United States Patent Application Publication US 2023/0026259 A1 - sequence listing, part 90

SEQ ID NO: 198741 - DNA, 1595 bp, Homo sapiens
  Payload ID: 19217
  Gene Name: v-akt murine thymoma viral oncogene homolog 1
  Uniprot ID: P31749
  ENST ID: ENST00000554848
  CDS Start-End: 153-1595
agtcctgcggtgccttcctcgagtctggcctgctttccatcctgctaagtacttggggcatttccctctttggaggctgtggccaggccagctgggctcggggagcgccagcctgagaggagcgcgtgagcgtcgcgggagcctcgggcaccatgagcgacgtggctattgtgaaggagggttggctgcacaaacgaggggagtacatcaagacctggcggccacgctacttcctcctcaagaatgatggcaccttcattggctacaaggagcggccgcaggatgtggaccaacgtgaggctcccctcaacaacttctctgtggcgcagtgccagctgatgaagacggagcggccccggcccaacaccttcatcatccgctgcctgcagtggaccactgtcatcgaacgcaccttccatgtggagactcctgaggagcgggaggagtggacaaccgccatccagactgtggctgacggcctcaagaagcaggaggaggaggagatggacttccggtcgggctcacccagtgacaactcaggggctgaagagatggaggtgtccctggccaagcccaagcaccgcgtgaccatgaacgagtttgagtacctgaagctgctgggcaagggcactttcggcaaggtgatcctggtgaaggagaaggccacaggccgctactacgccatgaagatcctcaagaaggaagtcatcgtggccaaggacgaggtggcccacacactcaccgagaaccgcgtcctgcagaactccaggcaccccttcctcacagccctgaagtactctttccagacccacgaccgcctctgctttgtcatggagtacgccaacgggggcgagctgttcttccacctgtcccgggagcgtgtgttctccgaggaccgggcccgcttctatggcgctgagattgtgtcagccctggactacctgcactcggagaagaacgtggtgtaccgggacctcaagctggagaacctcatgctggacaaggacgggcacattaagatcacagacttcgggctgtgcaaggaggggatcaaggacggtgccaccatgaagaccttttgcggcacacctgagtacctggcccccgaggtgctggaggacaatgactacggccgtgcagtggactggtgggggctgggcgtggtcatgtacgagatgatgtgcggtcgcctgcccttctacaaccaggaccatgagaagctttttgagctcatcctcatggaggagatccgcttcccgcgcacgcttggtcccgaggccaagtccttgctttcagggctgctcaagaaggaccccaagcagaggcttggcgggggctccgaggacgccaaggagatcatgcagcatcgcttctttgccggtatcgtgtggcagcacgtgtacgagaagaagctcagcccacccttcaagccccaggtcacgtcggagactgacaccaggtattttgatgaggagttcacggcccagatgatcaccatcacaccacctgaccaagatgacagcatggagtgtgtggacagcgagcgcaggccccacttcccccagttctcctactcggccagcggcacggcctga

SEQ ID NO: 198742 - DNA, 705 bp, Homo sapiens
  Payload ID: 19217
  Gene Name: v-akt murine thymoma viral oncogene homolog 1
  ENST ID: ENST00000555458
  CDS Start-End: 1-511
ggggatcaaggacggtgccaccatgaagaccttttgcggcacacctgagtacctggcccccgaggtgctggaggacaatgactacggccgtgcagtggactggtgggggctgggcgtggtcatgtacgagatgatgtgcggtcgcctgcccttctacaaccaggaccatgagaagctttttgagctcatcctcatggaggagatccgcttcccgcgcacgcttggtcccgaggccaagtccttgctttcagggctgctcaagaaggaccccaagcagaggcttggcgggggctccgaggacgccaaggagatcatgcagcatcgcttctttgccggtatcgtgtggcagcacgtgtacgagaagaagctcagcccacccttcaagccccaggtcacgtcggagactgacaccaggtattttgatgaggagttcacggcccagatgatcaccatcacaccacctgaccaagttcttggtgactgtcccaccgggagcctccccctcagatgatctctccacggtagcacttgaccttttcgacgcttaacctttccgctgtcgccccaggccctccctgactccctgtgggggtggccatccctgggcccctccacgcctcctggccagacgctgccgctgccgctgcaccacggcgtttttttacaacattcaactttagtatttttactattataatataatat

SEQ ID NO: 198743 - DNA, 553 bp, Homo sapiens
  Payload ID: 19217
  Gene Name: v-akt murine thymoma viral oncogene homolog 1
  ENST ID: ENST00000555926
  CDS Start-End: 279-553
gcgcccggacgcggcggcccgtctggggagcagggaggagccctgtgccctgtcccaggatccatgggtaggaacaccatggacagggagagcaaacggggccatctgtcaccaggggcttagggaaggccgagccagcctgggtcaaagaagtcaaaggggctgcctggaggaggcagcctgtcagctggtgcatcagaggctgtggccaggccagctgggctcggggagcgccagcctgagaggagcgcgtgagcgtcgcgggagcctcgggcaccatgagcgacgtggctattgtgaaggagggttggctgcacaaacgaggggagtacatcaagacctggcggccacgctacttcctcctcaagaatgatggcaccttcattggctacaaggagcggccgcaggatgtggaccaacgtgaggctcccctcaacaacttctctgtggcgcagtgccagctgatgaagacggagcggccccggcccaacaccttcatcatccgctgcctgcagtggaccactgtcatcgaacgcaccttccatgtggagac

SEQ ID NO: 198744 - DNA, 3916 bp, Homo sapiens
  Payload ID: 19217
  Gene Name: v-akt murine thymoma viral oncogene homolog 1
  Uniprot ID: P31749
  ENST ID: ENST00000554581
  CDS Start-End: 1482-2924
ctttgggtaaggtgtggtcttccctgtcctggcattagacacaaggcagtgggccttcctgccattctaagtgtagcttaagacaatcagtgcaaagcaaccctttgtgggtgtccagcccttgcctcgggaggccagaaaggtggcctggggggagagcgtctaagctggctgtggaaagacccatgttgggatccattccacagaggtcgtcaggggtctctgcctggcctggaggtcccagagaggaccctcctcccctcaggaaggcccatctggaagggtagcagaggactgctcacaggaagagcatgcgaagtgctctttctggggatgcctgtagttggtgatgtgggaactgggttttgagggatgcctaggagttcatccatcagaggggaaatgaggaagccatgcaggatcaatggataaagtgtgctcaggtgagggttggctggtgggccgctgcagggcgggggcctgtccagtgctcccccacttacttgctgcctcccgactgctgtaattatgggtctgtaaccaccctggactgggtgctcctcactgacggacttgtctgaacctctctttgtctccagcgcccagcactgggcctggcaaaacctgagacgcccggtacatgttggccaaatgaatgaaccagattcagaccggcaggggcgctgtggtttaggaggggcctggggtttctcccaggaggtttttgggcttgcgctggagggctctggactcccgtttgcgccagtggcctgcatcctggtcctgtcttcctcatgtttgaatttctttgctttcctagtctggggagcagggaggagccctgtgccctgtcccaggatccatgggtaggaacaccatggacagggagagcaaacggggccatctgtcaccaggggcttagggaaggccgagccagcctgggtcaaagaagtcaaaggggctgcctggaggaggcagcctgtcagctggtgcatcaggttagggaggctgggaaggccttttggggatgggggtgatttgtccaacggctgggggaggtgggaatggggaggtgagcaaggcagcagctctcagggcctggctgttgcgggtggtggtggcaggggctggaggctctaagcctagaataaggagaggcccaggtccagggaactgtgttcaattacatggatttgacacttggcagccctgagtgttttggggagagggaaggcaggcgggcagatgggggtcagagagcttagagggatggcagcccacctgggaaggcaggtgcgggtggagcccccaggcacgtgcagtgggtctctggctcacccagggcgaggagctgcccttagccaggcgtggcctcacattcagcttcctttgcttctcccagaggctgtggccaggccagctgggctcggggagcgccagcctgagaggagcgcgtgagcgtcgcgggagcctcgggcaccatgagcgacgtggctattgtgaaggagggttggctgcacaaacgaggggagtacatcaagacctggcggccacgctacttcctcctcaagaatgatggcaccttcattggctacaaggagcggccgcaggatgtggaccaacgtgaggctcccctcaacaacttctctgtggcgcagtgccagctgatgaagacggagcggccccggcccaacaccttcatcatccgctgcctgcagtggaccactgtcatcgaacgcaccttccatgtggagactcctgaggagcgggaggagtggacaaccgccatccagactgtggctgacggcctcaagaagcaggaggaggaggagatggacttccggtcgggctcacccagtgacaactcaggggctgaagagatggaggtgtccctggccaagcccaagcaccgcgtgaccatgaacgagtttgagtacctgaagctgctgggcaagggcactttcggcaaggtgatcctggtgaaggagaaggccacaggccgctactacgccatgaagatcctcaagaaggaagtcatcgtggccaaggacgaggtggcccacacactcaccgagaaccgcgtcctgcagaactccaggcaccccttcctcacagccctgaagtactctttccagacccacgaccgcctctgctttgtcatggagtacgccaacgggggcgagctgttcttccacctgtcccgggagcgtgtgttctccgaggaccgggcccgcttctatggcgctgagattgtgtcagccctggactacctgcactcggagaagaacgtggtgtaccgggacctcaagctggagaacctcatgctggacaaggacgggcacattaagatcacagacttcgggctgtgcaaggaggggatcaaggacggtgccaccatgaagaccttttgcggcacacctgagtacctggcccccgaggtgctggaggacaatgactacggccgtgcagtggactggtgggggctgggcgtggtcatgtacgagatgatgtgcggtcgcctgcccttctacaaccaggaccatgagaagctttttgagctcatcctcatggaggagatccgcttcccgcgcacgcttggtcccgaggccaagtccttgctttcagggctgctcaagaaggaccccaagcagaggcttggcgggggctccgaggacgccaaggagatcatgcagcatcgcttctttgccggtatcgtgtggcagcacgtgtacgagaagaagctcagcccacccttcaagccccaggtcacgtcggagactgacaccaggtattttgatgaggagttcacggcccagatgatcaccatcacaccacctgaccaagatgacagcatggagtgtgtggacagcgagcgcaggccccacttcccccagttctcctactcggccagcggcacggcctgaggcggcggtggactgcgctggacgatagcttggagggatggagaggcggcctcgtgccatgatctgtatttaatggtttttatttctcgggtgcatttgagagaagccacgctgtcctctcgagcccagatggaaagacgtttttgtgctgtgggcagcaccctcccccgcagcggggtagggaagaaaactatcctgcgggttttaatttatttcatccagtttgttctccgggtgtggcctcagccctcagaacaatccgattcacgtagggaaatgttaaggacttctgcagctatgcgcaatgtggcattggggggccgggcaggtcctgcccatgtgtcccctcactctgtcagccagccgccctgggctgtctgtcaccagctatctgtcatctctctggggccctgggcctcagttcaacctggtggcaccagatgcaacctcactatggtatgctggccagcaccctctcctgggggtggcaggcacacagcagccccccagcactaaggccgtgtctctgaggacgtcatcggaggctgggcccctgggatgggaccagggatgggggatgggccagggtttacccagtgggacagaggagcaaggtttaaatttgttattgtgtattatgttgttcaaatgcattttgggggtttttaatctttgtgacaggaaagccctcccccttccccttctgtgtcacagttcttggtgactgtcccaccgggagcctccccctcagatgatctctccacggtagcacttgaccttttcgacgcttaacctttccgctgtcgccccaggccctccctgactccctgtgggggtggccatccctgggcccctccacgcctcctggccagacgctgccgctgccgctgcaccacggcgtttttttacaacattcaactttagtatttttactattataatataatatggaaccttccctccaaattcttcaataaaagttgcttttcaaa

SEQ ID NO: 198745 - DNA, 858 bp, Homo sapiens
  Payload ID: 19217
  Gene Name: v-akt murine thymoma viral oncogene homolog 1
  ENST ID: ENST00000554585
  CDS Start-End: 1-441
ctggagaacctcatgctggacaaggacgggcacattaagatcacagacttcgggctgtgcaaggaggggatcaaggacggtgccaccatgaagaccttttgcggcacacctgagtacctggcccccgaggtgctggaggacaatgactacggccgtgcagtggactggtgggggctgggcgtggtcatgtacgagatgatgtgcggtcgcctgcccttctacaaccaggaccatgagaagctttttgagctcatcctcatggaggagatccgcttcccgcgcacgcttggtcccgaggccaagtccttgctttcagggctgctcaagaaggaccccaagcagaggcttggcgggggctccgaggacgccaaggagatcatgcagcatcgcttctttgccggtatcgtgtggcagcacgtgtacgagaagaagggaccctaggagccctggccatcaccccagctgatggggtctgccagctgggttcggaagcctgcactctgagatgctgggtgccctgtcaccagctcagcccacccttcaagccccaggtcacgtcggagactgacaccaggtattttgatgaggagttcacggcccagatgatcaccatcacaccacctgaccaagatgacagcatggagtgtgtggacagcgagcgcaggccccacttcccccagttctcctactcggccagcggcacggcctgaggcggcggtggactgcgctggacgatagcttggagggatggagaggcggcctcgtgccatgatctgtatttaatggtttttatttctcgggtgcatttgagagaagccacgctgtcctctcgagcccagatggaaagacgtttttgtg

SEQ ID NO: 198746 - DNA, 1393 bp, Homo sapiens
  Payload ID: 19218
  Gene Name: v-akt murine thymoma viral oncogene homolog 2
  Uniprot ID: P31751
  ENST ID: ENST00000311278
  CDS Start-End: 46-1362
ccctgagctgtcccgagctaggtgacagcgtaccacgctgccaccatgaatgaggtgtctgtcatcaaagaaggctggctccacaagcgtggtgaatacatcaagacctggaggccacggtacttcctgctgaagagcgacggctccttcattgggtacaaggagaggcccgaggcccctgatcagactctaccccccttaaacaacttctccgtagcagaatgccagctgatgaagaccgagaggccgcgacccaacacctttgtcatacgctgcctgcagtggaccacagtcatcgagaggaccttccacgtggattctccagacgagagggaggagtggatgcgggccatccagatggtcgccaacagcctcaagcagcgggccccaggcgaggaccccatggactacaagtgtggctcccccagtgactcctccacgactgaggagatggaagtggcggtcagcaaggcacgggctaaagtgaccatgaatgacttcgactatctcaaactccttggcaagggaacctttggcaaagtcatcctggtgcgggagaaggccactggccgctactacgccatgaagatcctgcggaaggaagtcatcattgccaaggatgaagtcgctcacacagtcaccgagagccgggtcctccagaacaccaggcacccgttcctcactgcgctgaagtatgccttccagacccacgaccgcctgtgctttgtgatggagtatgccaacgggggtgagctgttcttccacctgtcccgggagcgtgtcttcacagaggagcgggcccggttttatggtgcagagattgtctcggctcttgagtacttgcactcgcgggacgtggtataccgcgacatcaaggtgctggaggacaatgactatggccgggccgtggactggtgggggctgggtgtggtcatgtacgagatgatgtgcggccgcctgcccttctacaaccaggaccacgagcgcctcttcgagctcatcctcatggaagagatccgcttcccgcgcacgctcagccccgaggccaagtccctgcttgctgggctgcttaagaaggaccccaagcagaggcttggtggggggcccagcgatgccaaggaggtcatggagcacaggttcttcctcagcatcaactggcaggacgtggtccagaagaagctcctgccacccttcaaacctcaggtcacgtccgaggtcgacacaaggtacttcgatgatgaatttaccgcccagtccatcacaatcacaccccctgaccgctatgacagcctgggcttactggagctggaccagcggacccacttcccccagttctcctactcggccagcatccgcgagtgagcagtctgcccacgcagaggacgcacgctcg

SEQ ID NO: 198747 - DNA, 546 bp, Homo sapiens
  Payload ID: 19218
  Gene Name: v-akt murine thymoma viral oncogene homolog 2
  ENST ID: ENST00000358335
  CDS Start-End: 170-546
aaacacaaggaaagggaaccagcgcagcgtggcgatgggcgggggtagagccccgccggagaggctgggcggctgccggtgacagactgtgccctgtccacggtgcctcctgcatgtcctgctgccctgagctgtcccgagctaggtgacagcgtaccacgctgccaccatgaatgaggtgtctgtcatcaaagaaggctggctccacaagcgtggtgaatacatcaagacctggaggccacggtacttcctgctgaagagcgacggctccttcattgggtacaaggagaggcccgaggcccctgatcagactctaccccccttaaacaacttctccgtagcagccccctgctgtctgttccctctgcctgcagaatgccagctgatgaagaccgagaggccgcgacccaacacctttgtcatacgctgcctgcagtggaccacagtcatcgagaggaccttccacgtggattctccagacgagagggaggagtggatgcgggccatccagatggtcgccaacagcctcaagcagcgggccccagg

SEQ ID NO: 198748 - DNA, 1795 bp, Homo sapiens
  Payload ID: 19218
  Gene Name: v-akt murine thymoma viral oncogene homolog 2
  ENST ID: ENST00000391844
  CDS Start-End: 324-533
gctggggggagggggcggggggggccgcgccgtgctagccgttgggcctgcctcggaggaggcgtcgccgccgccgctgccgctgccggcgccgttgccgctgccgggaaacacaaggaaagggaaccagcgcagcgtggcgatgggcgggggtagagccccgccggagaggctgggcggctgccggtgacaggtgaatacatcaagacctggaggccacggtacttcctgctgaagagcgacggctccttcattgggtacaaggagaggcccgaggcccctgatcagactctaccccccttaaacaacttctccgtagcagaatgccagctgatgaagaccgagaggccgcgacccaacacctttgtcatacgctgcctgcagtggaccacagtcatcgagaggaccttccacgtggattctccagacgagagggaggagtggatgcgggccatccagatggtcgccaacagcctcaagcagcgggccccaggcgaggaccccatggactacaagtgtggctcccccagtgactcctccacgactgaggagatggaagtggcggtcagcaaggcacgggctaaagtgaccatgaatgacttcgactatctcaaactccttggcaagggaacctttggcaaagtcatcctggtgcgggagaaggccactggccgctactacgccatgaagatcctgcggaaggaagtcatcattgccaaggatgaagtcgctcacacagtcaccgagagccgggtcctccagaacaccaggcacccgttcctcactgcgctgaagtatgccttccagacccacgaccgcctgtgctttgtgatggagtatgccaacgggggtgagctgttcttccacctgtcccgggagcgtgtcttcacagaggagcgggcccggttttatggtgcagagattgtctcggctcttgagtacttgcactcgcgggacgtggtataccgcgacatcaagctggaaaacctcatgctggacaaagatggccacatcaagatcactgactttggcctctgcaaagagggcatcagtgacggggccaccatgaaaaccttctgtgggaccccggagtacctggcgcctgaggtgctggaggacaatgactatggccgggccgtggactggtgggggctgggtgtggtcatgtacgagatgatgtgcggccgcctgcccttctacaaccaggaccacgagcgcctcttcgagctcatcctcatggaagagatccgcttcccgcgcacgctcagccccgaggccaagtccctgcttgctgggctgcttaagaaggaccccaagcagaggcttggtggggggcccagcgatgccaaggaggtcatggagcacaggttcttcctcagcatcaactggcaggacgtggtccagaagaagctcctgccacccttcaaacctcaggtcacgtccgaggtcgacacaaggtacttcgatgatgaatttaccgcccagtccatcacaatcacaccccctgaccgctatgacagcctgggcttactggagctggaccagcggacccacttcccccagttctcctactcggccagcatccgcgagtgagcagtctgcccacgcagaggacgcacgctcgctgccatcaccgctgggtggttttttccccctaactttttacttagcctttttggtttgtgtccccacccccacctcctcaccccctttccagttcttcttcaggcccctcccagacgcaccccagcggcccctgcagcccctgcctccagcctccagcctcacctttgtg

SEQ ID NO: 198749 - DNA, 681 bp, Homo sapiens
  Payload ID: 19218
  Gene Name: v-akt murine thymoma viral oncogene homolog 2
  ENST ID: ENST00000392037
  CDS Start-End: 281-681
ttggggtcgctggggacattgccacatctctctgctcagaatgggtccttgagagcgggctccacgccacccttgctggccttaccctttgctgagtgggcagaacagccagagggcctcagagcccggcgtcctcagggaaggggctggtgtggaatcccctcccgccctgaccagctcctctcttgtcttgcagactgtgccctgtccacggtgcctcctgcatgtcctgctgccctgagctgtcccgagctaggtgacagcgtaccacgctgccaccatgaatgaggtgtctgtcatcaaagaaggctggctccacaagcgtggtgaatacatcaagacctggaggccacggtacttcctgctgaagagcgacggctccttcattgggtacaaggagaggcccgaggcccctgatcagactctaccccccttaaacaacttctccgtagcagaatgccagctgatgaagaccgagaggccgcgacccaacacctttgtcatacgctgcctgcagtggaccacagtcatcgagaggaccttccacgtggattctccagacgagagggaggagtggatgcgggccatccagatggtcgccaacagcctcaagcagcgggccccaggcgaggaccccatggactacaagtgtggctcccccagtgactcctccacgactga

SEQ ID NO: 198750 - DNA, 5300 bp, Homo sapiens
  Payload ID: 19218
  Gene Name: v-akt murine thymoma viral oncogene homolog 2
  Uniprot ID: P31751
  ENST ID: ENST00000392038
  CDS Start-End: 300-1745
tgggagggggcggtaagcgggggctggggggagggggcggggggggccgcgccgtgctagccgttgggcctgcctcggaggaggcgtcgccgccgccgctgccgctgccggcgccgttgccgctgccgggaaacacaaggaaagggaaccagcgcagcgtggcgatgggcgggggtagagccccgccggagaggctgggcggctgccggtgacagactgtgccctgtccacggtgcctcctgcatgtcctgctgccctgagctgtcccgagctaggtgacagcgtaccacgctgccaccatgaatgaggtgtctgtcatcaaagaaggctggctccacaagcgtggtgaatacatcaagacctggaggccacggtacttcctgctgaagagcgacggctccttcattgggtacaaggagaggcccgaggcccctgatcagactctaccccccttaaacaacttctccgtagcagaatgccagctgatgaagaccgagaggccgcgacccaacacctttgtcatacgctgcctgcagtggaccacagtcatcgagaggaccttccacgtggattctccagacgagagggaggagtggatgcgggccatccagatggtcgccaacagcctcaagcagcgggccccaggcgaggaccccatggactacaagtgtggctcccccagtgactcctccacgactgaggagatggaagtggcggtcagcaaggcacgggctaaagtgaccatgaatgacttcgactatctcaaactccttggcaagggaacctttggcaaagtcatcctggtgcgggagaaggccactggccgctactacgccatgaagatcctgcggaaggaagtcatcattgccaaggatgaagtcgctcacacagtcaccgagagccgggtcctccagaacaccaggcacccgttcctcactgcgctgaagtatgccttccagacccacgaccgcctgtgctttgtgatggagtatgccaacgggggtgagctgttcttccacctgtcccgggagcgtgtcttcacagaggagcgggcccggttttatggtgcagagattgtctcggctcttgagtacttgcactcgcgggacgtggtataccgcgacatcaagctggaaaacctcatgctggacaaagatggccacatcaagatcactgactttggcctctgcaaagagggcatcagtgacggggccaccatgaaaaccttctgtgggaccccggagtacctggcgcctgaggtgctggaggacaatgactatggccgggccgtggactggtgggggctgggtgtggtcatgtacgagatgatgtgcggccgcctgcccttctacaaccaggaccacgagcgcctcttcgagctcatcctcatggaagagatccgcttcccgcgcacgctcagccccgaggccaagtccctgcttgctgggctgcttaagaaggaccccaagcagaggcttggtggggggcccagcgatgccaaggaggtcatggagcacaggttcttcctcagcatcaactggcaggacgtggtccagaagaagctcctgccacccttcaaacctcaggtcacgtccgaggtcgacacaaggtacttcgatgatgaatttaccgcccagtccatcacaatcacaccccctgaccgctatgacagcctgggcttactggagctggaccagcggacccacttcccccagttctcctactcggccagcatccgcgagtgagcagtctgcccacgcagaggacgcacgctcgctgccatcaccgctgggtggttttttccccctaactttttacttagcctttttggtttgtgtccccacccccacctcctcaccccctttccagttcttcttcaggcccctcccagacgcaccccagcggcccctgcagcccctgcctccagcctccagcctcacctttgtgcccagactcgcatttggaagactccacctcccgcccaggcctgggctgttgggcggttggagattcaggttttaatccacacaagccccagtgaggggtgaagcatggcgcctggggcctgcctgagtttctggcctgggtgtcgtgctggtgtctgcctccgcgctgctgcatctggacgaaggctgccttctggtgggacgcgacacccggcagacagtggtgctgccttccaggccccgtggcctaggctcggagtggccaggcacggggcggtccaatcccccacccgctgtccccctatgggggcagaaaagcaataatgtccaggggcaggcaggggcccttgggagctgcagggctgggggttagggctgctccctggtgaatggagtcagatcctaggatctgtaccatggggaaccaggagtggccgggctgggtgccgcctcctggtccggcctcctccccaccaaactgtcctcaccctatggatgaggcaggaggaacatttggggccaaacctgcctgcctcccagccccgtgccttactagggcttccttccagctggccttacctcccgctggaccctgggcctggcctggccccactgggggctatgggctgggctcaccctctcctctgcgggggtggagggccaccagccttggctgttacaatcttacaccggacagtattgggccccatggacttggtcagggaggggtgggggtgggcatctctggtacctattggggtggggggcctctgaaaagggaggctcctaggcccccctcacccctccctctccccagggccccacgttctgcagccttaaggttgaacatgagtgcacgtccatgtcagtgctgtgggactcctgtgcgtgcctcggactgcgtgtgtcggcgggacgcaggcacacgtgggtgtgtgtgcatgtgtgtttgtgtgagggcagcgtgtcctccagtgtgcatggtgtgtgggcttgggccccatccctggcccgagcatttcatcctgtgggggaggggtgctgacctagtgggaggagccccactgtgatccatgagctgccctgcccacgcctcccctccctgtagcaacacctctgggtgtttggagtttagcttttgtgggtttgctctccctatcccatctcctgtactacacagttcatggcagggtggggaggggtggggttggttcgggtgggtgagggtctttttcctctgtgtgcgatgttgttatctgacagttctccgtccctactggcctttctcctcgtcttcatatttgtacggtacaagcaataaagacactcatttcagaccagggcccagcctgcactcacgccagcccaaccactctgggctttgccttggtgatggagtcagacccctgggccccagctcctcctgtactagccgttcccttcagcaaggagggcactgagctcagggtgagggcagctggggtgtgtgcaggagctcaggctggagagggtgggtggagctggtgctgtggggctgaggggtatgggaaggctccccgcatgtgggggtggggtggacagagaccactccaggccctcagtgctgcttaggctaagagaggtggggtggagggacagggctggaagatctgggtagcccagaatgaggagggtgcctgtgctgtcactgaatgagagggagtggttcattccacccggctgccgagcctcagaggggggcattcctatcctgccccacctccctgtttatgctgccacctggaagccttgaggcccccaaattccagtacagacccagtggtgtgttcatggtggcgtggttgctgtcacctgggagctcctgagcgtttggttagaaccctgttcagcttggggtcagccctcccctagtcactgccctttagcctggatgtgtctgggcccctgcacttcccgtgcttgagtcacgtggctgcatggccgggcgctggccggatggaacacctcccccagcaagggaccagggaccagagccctggcctgccctgctgagccctgctgtgcagagggcctggcacagatgaatttgagattttgccgcaaggtgttagcacttcacacccattgagtctttgagattttaagtgaatgtaagcagaaaaagtcagatccaatttacagaaatcagagttagctacagctaggactcgtttggttggggttttttagtttgtctttctaaagtcatgtggaccttaatttaattacaaaagtctaccctggtggtcataaaataggcaggcctatgaagaaaggccttttactcttccatctcgtcccagccccgagttgacccacgttgctgctcctcacaccatggtgatgcaggtctcgtagtgtgggcacaggcctggctacctcatctttttagtgcctctctcctcttccacaggatggggtcccacagctgcagcagctggccccgtagttgagcatgtgtggttatcctgtagagcttttcccaagaagggtgtttgaacttagagtcttaataaaatcttaccaaataaattttgagtagaataatcgtcttttgcaatgtacattttaaaaatttcacacattcttttttgtatataaagaacagtgactgggcacagtggctcatgcctgtaatcccagcaatttgggaggccgaggcgggcgggtctcttgaggccaggggttcgagaccagcctgggcatcatagggagaccttcatctctacaaaaaatacaaaaattagctgggcatggtggtgcatgcctgcaatcccagctaacttggaaggctgaggtgaggtgggaagatcacttgagcccaggagtttgaggctgcagtgagctatgattgcggcactgcactgcagcctgggacaatgagactgtgtctctaaaaataaaaaaaaaaaaaacatgatacatgctattaaaaaagacagcaaagcaggagtataagaaaggaaattcacccgaggtcgcagggccttgagtactcattttggtgctgattacctctctgcaaatggacacggcatcataaattggtagtttcctgctctttttgtgtaatcttttccagttaatgtgaagcctctgggggctgccctcgtgcactgatggttgtgtggagtcgggggcggcagtgcgattcccttttagctgctgcatggggggaactcaggctttccagctgcttcctggggttccatggggtagacccctcaaccgcttcagctgccccgttaacaggaattgacttggtttcgtttggtgctaccagcagtcctgtaataaactagctatccatctgta

SEQ ID NO: 198751 - DNA, 904 bp, Homo sapiens
  Payload ID: 19218
  Gene Name: v-akt murine thymoma viral oncogene homolog 2
  ENST ID: ENST00000416994
  CDS Start-End: 618-904
gggtatcttcctagaaggagcagaacccctcagaacaaaccactagggtctccagaaggcccccgggatgggttgggatggaaaggagtgtctttcagacttgagctccaagcccctggaggacccagggtcacccctccccgggcctctcttcagcttcccagagctctcagcggaaggccctcaaccacaggcctccgggccgcacggtggggtggttccatggcaggctcttctggacagccagccaagcagcgagaggcccagctgggggagacagcctgggagcaggaccaggagggagggagtgagtgtgggaggggcgctgggtgggagctcagcctggcccccttggggcaggacccactgccaactcggcacccacagcagggcccaggtgctctgactgtgccgagcgagggacagcaagccgggtcggccaagaggagactgcatgtcagaggtcccagcaggagtttcttcagcccagccgtcctgctggagaagctcgttcgcagatgttgtttctaaggactgtgccctgtccacggtgcctcctgcatgtcctgctgccctgagctgtcccgagctaggtgacagcgtaccacgctgccaccatgaatgaggtgtctgtcatcaaagaaggctggctccacaagcgtggtgaatacatcaagacctggaggccacggtacttcctgctgaagagcgacggctccttcattgggtacaaggagaggcccgaggcccctgatcagactctaccccccttaaacaacttctccgtagcagaatgccagctgatgaagaccgagaggccgcgacccaacacctttgtcatacgctgcctgcagtggaccacagtcatcgagaggaccttccacgtggattctccagacgagag

SEQ ID NO: 198752 - DNA, 582 bp, Homo sapiens
  Payload ID: 19218
  Gene Name: v-akt murine thymoma viral oncogene homolog 2
  ENST ID: ENST00000456441
  CDS Start-End: 261-582
gcaagtttgcgggacggggagcgcaggccgcagcgtgcgcgggccgggggctggacctttcgggcgcggcgggcagatcgagcctggctggtctcagaaggacgtccaccttgggctgttgtgaggattaaatgaattaatccacgagaagctcctagaatggtgcctggtactgtactgtgccctgtccacggtgcctcctgcatgtcctgctgccctgagctgtcccgagctaggtgacagcgtaccacgctgccaccatgaatgaggtgtctgtcatcaaagaaggctggctccacaagcgtggtgaatacatcaagacctggaggccacggtacttcctgctgaagagcgacggctccttcattgggtacaaggagaggcccgaggcccctgatcagactctaccccccttaaacaacttctccgtagcagaatgccagctgatgaagaccgagaggccgcgacccaacacctttgtcatacgctgcctgcagtggaccacagtcatcgagaggaccttccacgtggattctccagacgagagggaggagtggatgcgggccatccagatggtcgcca

SEQ ID NO: 198753 - DNA, 974 bp, Homo sapiens
  Payload ID: 19218
  Gene Name: v-akt murine thymoma viral oncogene homolog 2
  ENST ID: ENST00000441941
  CDS Start-End: 423-974
gatgcccatggtgtccctagagccagctgccacttctctgggcgccaccgtagctcccgacctgctgtccgcaaataaccccaggctgggaaaggcaaaggcgccttggtctctgtggaccctggccaggccccaggctccaggtaggggcccagctggcgctgcctcgcgccctcctcccctccgttctgggaacctgagacgaagcagtggcctcggcgtccctcagtctgttggttgctggtccctgaggacagaagtgaaggtcttggggtagggatcagggcctcggtcaagcccccaggactggcttctaggccccagaccgtgcatacgcaactgtgccctgtccacggtgcctcctgcatgtcctgctgccctgagctgtcccgagctaggtgacagcgtaccacgctgccaccatgaatgaggtgtctgtcatcaaagaaggctggctccacaagcgtggtgaatacatcaagacctggaggccacggtacttcctgctgaagagcgacggctccttcattgggtacaaggagaggcccgaggcccctgatcagactctaccccccttaaacaacttctccgtagcagaatgccagctgatgaagaccgagaggccgcgacccaacacctttgtcatacgctgcctgcagtggaccacagtcatcgagaggaccttccacgtggattctccagacgagagggaggagtggatgcgggccatccagatggtcgccaacagcctcaagcagcgggccccaggcgaggaccccatggactacaagtgtggctcccccagtgactcctccacgactgaggagatggaagtggcggtcagcaaggcacgggctaaagtgaccatgaatgacttcgactatctcaaactccttggcaagggaacctttggcaaagtcatcctggtgcgggagaaggccactggccgctactacgccatgaagatcctgcgg

SEQ ID NO: 198754 - DNA, 5170 bp, Homo sapiens
  Payload ID: 19218
  Gene Name: v-akt murine thymoma viral oncogene homolog 2
  Uniprot ID: P31751
  ENST ID: ENST00000424901
  CDS Start-End: 300-1616
tgggagggggcggtaagcgggggctggggggagggggcggggggggccgcgccgtgctagccgttgggcctgcctcggaggaggcgtcgccgccgccgctgccgctgccggcgccgttgccgctgccgggaaacacaaggaaagggaaccagcgcagcgtggcgatgggcgggggtagagccccgccggagaggctgggcggctgccggtgacagactgtgccctgtccacggtgcctcctgcatgtcctgctgccctgagctgtcccgagctaggtgacagcgtaccacgctgccaccatgaatgaggtgtctgtcatcaaagaaggctggctccacaagcgtggtgaatacatcaagacctggaggccacggtacttcctgctgaagagcgacggctccttcattgggtacaaggagaggcccgaggcccctgatcagactctaccccccttaaacaacttctccgtagcagaatgccagctgatgaagaccgagaggccgcgacccaacacctttgtcatacgctgcctgcagtggaccacagtcatcgagaggaccttccacgtggattctccagacgagagggaggagtggatgcgggccatccagatggtcgccaacagcctcaagcagcgggccccaggcgaggaccccatggactacaagtgtggctcccccagtgactcctccacgactgaggagatggaagtggcggtcagcaaggcacgggctaaagtgaccatgaatgacttcgactatctcaaactccttggcaagggaacctttggcaaagtcatcctggtgcgggagaaggccactggccgctactacgccatgaagatcctgcggaaggaagtcatcattgccaaggatgaagtcgctcacacagtcaccgagagccgggtcctccagaacaccaggcacccgttcctcactgcgctgaagtatgccttccagacccacgaccgcctgtgctttgtgatggagtatgccaacgggggtgagctgttcttccacctgtcccgggagcgtgtcttcacagaggagcgggcccggttttatggtgcagagattgtctcggctcttgagtacttgcactcgcgggacgtggtataccgcgacatcaaggtgctggaggacaatgactatggccgggccgtggactggtgggggctgggtgtggtcatgtacgagatgatgtgcggccgcctgcccttctacaaccaggaccacgagcgcctcttcgagctcatcctcatggaagagatccgcttcccgcgcacgctcagccccgaggccaagtccctgcttgctgggctgcttaagaaggaccccaagcagaggcttggtggggggcccagcgatgccaaggaggtcatggagcacaggttcttcctcagcatcaactggcaggacgtggtccagaagaagctcctgccacccttcaaacctcaggtcacgtccgaggtcgacacaaggtacttcgatgatgaatttaccgcccagtccatcacaatcacaccccctgaccgctatgacagcctgggcttactggagctggaccagcggacccacttcccccagttctcctactcggccagcatccgcgagtgagcagtctgcccacgcagaggacgcacgctcgctgccatcaccgctgggtggttttttccccctaactttttacttagcctttttggtttgtgtccccacccccacctcctcaccccctttccagttcttcttcaggcccctcccagacgcaccccagcggcccctgcagcccctgcctccagcctccagcctcacctttgtgcccagactcgcatttggaagactccacctcccgcccaggcctgggctgttgggcggttggagattcaggttttaatccacacaagccccagtgaggggtgaagcatggcgcctggggcctgcctgagtttctggcctgggtgtcgtgctggtgtctgcctccgcgctgctgcatctggacgaaggctgccttctggtgggacgcgacacccggcagacagtggtgctgccttccaggccccgtggcctaggctcggagtggccaggcacggggcggtccaatcccccacccgctgtccccctatgggggcagaaaagcaataatgtccaggggcaggcaggggcccttgggagctgcagggctgggggttagggctgctccctggtgaatggagtcagatcctaggatctgtaccatggggaaccaggagtggccgggctgggtgccgcctcctggtccggcctcctccccaccaaactgtcctcaccctatggatgaggcaggaggaacatttggggccaaacctgcctgcctcccagccccgtgccttactagggcttccttccagctggccttacctcccgctggaccctgggcctggcctggccccactgggggctatgggctgggctcaccctctcctctgcgggggtggagggccaccagccttggctgttacaatcttacaccggacagtattgggccccatggacttggtcagggaggggtgggggtgggcatctctggtacctattggggtggggggcctctgaaaagggaggctcctaggcccccctcacccctccctctccccagggccccacgttctgcagccttaaggttgaacatgagtgcacgtccatgtcagtgctgtgggactcctgtgcgtgcctcggactgcgtgtgtcggcgggacgcaggcacacgtgggtgtgtgtgcatgtgtgtttgtgtgagggcagcgtgtcctccagtgtgcatggtgtgtgggcttgggccccatccctggcccgagcatttcatcctgtgggggaggggtgctgacctagtgggaggagccccactgtgatccatgagctgccctgcccacgcctcccctccctgtagcaacacctctgggtgtttggagtttagcttttgtgggtttgctctccctatcccatctcctgtactacacagttcatggcagggtggggaggggtggggttggttcgggtgggtgagggtctttttcctctgtgtgcgatgttgttatctgacagttctccgtccctactggcctttctcctcgtcttcatatttgtacggtacaagcaataaagacactcatttcagaccagggcccagcctgcactcacgccagcccaaccactctgggctttgccttggtgatggagtcagacccctgggccccagctcctcctgtactagccgttcccttcagcaaggagggcactgagctcagggtgagggcagctggggtgtgtgcaggagctcaggctggagagggtgggtggagctggtgctgtggggctgaggggtatgggaaggctccccgcatgtgggggtggggtggacagagaccactccaggccctcagtgctgcttaggctaagagaggtggggtggagggacagggctggaagatctgggtagcccagaatgaggagggtgcctgtgctgtcactgaatgagagggagtggttcattccacccggctgccgagcctcagaggggggcattcctatcctgccccacctccctgtttatgctgccacctggaagccttgaggcccccaaattccagtacagacccagtggtgtgttcatggtggcgtggttgctgtcacctgggagctcctgagcgtttggttagaaccctgttcagcttggggtcagccctcccctagtcactgccctttagcctggatgtgtctgggcccctgcacttcccgtgcttgagtcacgtggctgcatggccgggcgctggccggatggaacacctcccccagcaagggaccagggaccagagccctggcctgccctgctgagccctgctgtgcagagggcctggcacagatgaatttgagattttgccgcaaggtgttagcacttcacacccattgagtctttgagattttaagtgaatgtaagcagaaaaagtcagatccaatttacagaaatcagagttagctacagctaggactcgtttggttggggttttttagtttgtctttctaaagtcatgtggaccttaatttaattacaaaagtctaccctggtggtcataaaataggcaggcctatgaagaaaggccttttactcttccatctcgtcccagccccgagttgacccacgttgctgctcctcacaccatggtgatgcaggtctcgtagtgtgggcacaggcctggctacctcatctttttagtgcctctctcctcttccacaggatggggtcccacagctgcagcagctggccccgtagttgagcatgtgtggttatcctgtagagcttttcccaagaagggtgtttgaacttagagtcttaataaaatcttaccaaataaattttgagtagaataatcgtcttttgcaatgtacattttaaaaatttcacacattcttttttgtatataaagaacagtgactgggcacagtggctcatgcctgtaatcccagcaatttgggaggccgaggcgggcgggtctcttgaggccaggggttcgagaccagcctgggcatcatagggagaccttcatctctacaaaaaatacaaaaattagctgggcatggtggtgcatgcctgcaatcccagctaacttggaaggctgaggtgaggtgggaagatcacttgagcccaggagtttgaggctgcagtgagctatgattgcggcactgcactgcagcctgggacaatgagactgtgtctctaaaaataaaaaaaaaaaaaacatgatacatgctattaaaaaagacagcaaagcaggagtataagaaaggaaattcacccgaggtcgcagggccttgagtactcattttggtgctgattacctctctgcaaatggacacggcatcataaattggtagtttcctgctctttttgtgtaatcttttccagttaatgtgaagcctctgggggctgccctcgtgcactgatggttgtgtggagtcgggggcggcagtgcgattcccttttagctgctgcatggggggaactcaggctttccagctgcttcctggggttccatggggtagacccctcaaccgcttcagctgccccgttaacaggaattgacttggtttcgtttggtgctaccagcagtcctgtaataaactagctatccatctgt

SEQ ID NO: 198755 - DNA, 798 bp, Homo sapiens
  Payload ID: 19218
  Gene Name: v-akt murine thymoma viral oncogene homolog 2
  ENST ID: ENST00000423127
  CDS Start-End: 440-798
gtagagggctgtacctttttggcgctgtggaagccgttgctgtgctgtatttacagggagtccgaaattgaagttcagaggaagaattgccttccaccgcatcttatcagaccctatgggtgccagggtgtgtgctgggagaagaagacagcaagagagccatgcagggggtgacacagctaccagggacctgcgttagctagcagcaggacggtgaagtcggttctagctctgcgaccttggaccacactgttcactcccatacagtggtctcagaaggacgtccaccttgggctgttgtgaggattaaatgaattaatccacgagaagctcctagaatggtgcctggtactgtactgtgccctgtccacggtgcctcctgcatgtcctgctgccctgagctgtcccgagctaggtgacagcgtaccacgctgccaccatgaatgaggtgtctgtcatcaaagaaggctggctccacaagcgtggtgaatacatcaagacctggaggccacggtacttcctgctgaagagcgacggctccttcattgggtacaaggagaggcccgaggcccctgatcagactctaccccccttaaacaacttctccgtagcagaatgccagctgatgaagaccgagaggccgcgacccaacacctttgtcatacgctgcctgcagtggaccacagtcatcgagaggaccttccacgtggattctccagacgagagggaggagtggatgcgggccatccagatggtcgccaacagcctcaagcagcgggccccaggcgaggaccccat

SEQ ID NO: 198756 - DNA, 554 bp, Homo sapiens
  Payload ID: 19218
  Gene Name: v-akt murine thymoma viral oncogene homolog 2
  ENST ID: ENST00000427375
  CDS Start-End: 354-554
aggtcgtgggataggcatatattgagctttgattttgactgcttaacagttttccacagtagttgaaccattttgcacctcccaccaataatgagtaagggttctggttcctctacatccgagccagcagttggccttgtcagtttttaaaattcgagccatcccagctgtgctgactccttagttgctgagatgagcttgtaaaaagcagctctgttgatcccagcagcggccagggcctccgctgcttctcggctgggagacccgagactgtgccctgtccacggtgcctcctgcatgtcctgctgccctgagctgtcccgagctaggtgacagcgtaccacgctgccaccatgaatgaggtgtctgtcatcaaagaaggctggctccacaagcgtggtgaatacatcaagacctggaggccacggtacttcctgctgaagagcgacggctccttcattgggtacaaggagaggcccgaggcccctgatcagactctaccccccttaaacaacttctccgtagcagaatgccagctgatgaagaccgagagg

SEQ ID NO: 198757 - DNA, 577 bp, Homo sapiens
  Payload ID: 19218
  Gene Name: v-akt murine thymoma viral oncogene homolog 2
  ENST ID: ENST00000452077
  CDS Start-End: 176-577
gctgcaagtttgcgggacggggagcgcaggccgcagcgtgcgcgggccgggggctggacctttcgggcgcggcgggcagatcgagcctggcactgtgccctgtccacggtgcctcctgcatgtcctgctgccctgagctgtcccgagctaggtgacagcgtaccacgctgccaccatgaatgaggtgtctgtcatcaaagaaggctggctccacaagcgtggtgaatacatcaagacctggaggccacggtacttcctgctgaagagcgacggctccttcattgggtacaaggagaggcccgaggcccctgatcagactctaccccccttaaacaacttctccgtagcagaatgccagctgatgaagaccgagaggccgcgacccaacacctttgtcatacgctgcctgcagtggaccacagtcatcgagaggaccttccacgtggattctccagacgagagggaggagtggatgcgggccatccagatggtcgccaacagcctcaagcagcgggccccaggcgaggaccccatggactacaagtgtggctcccccagtgactcctccacgactgag

SEQ ID NO: 198758 - DNA, 974 bp, Homo sapiens
  Payload ID: 19218
  Gene Name: v-akt murine thymoma viral oncogene homolog 2
  ENST ID: ENST00000416362
  CDS Start-End: 577-974
aagtgctgggattacacgcgtgagccaccacgtccagcttcctgttgtctttgaatttatctcctgagcaagtcttcctccgggcgctgtggaaaggcacagatctgagtgcaggcgacagaggctcctgagggggtcgctgccacctccccaatgagcctccgcagcaccaggaaggagccccacccaccagctccagctccaagagacgcagatctctgcttccccacctgcctccctagcccatctgtgctgtctggcatcaaaatcagttttccacagtagttgaaccattttgcacctcccaccaataatgagtaagggttctggttcctctacatccgagccagcagttggccttgtcagtttttaaaattcgagccatcccagctgtgctgactccttagttgctgagatgagcttgtaaaaagcagctctgttgatcccagcagcggccagggcctccgctgcttctcggctgggagacccgagactgtgccctgtccacggtgcctcctgcatgtcctgctgccctgagctgtcccgagctaggtgacagcgtaccacgctgccaccatgaatgaggtgtctgtcatcaaagaaggctggctccacaagcgtggtgaatacatcaagacctggaggccacggtacttcctgctgaagagcgacggctccttcattgggtacaaggagaggcccgaggcccctgatcagactctaccccccttaaacaacttctccgtagcagaatgccagctgatgaagaccgagaggccgcgacccaacacctttgtcatacgctgcctgcagtggaccacagtcatcgagaggaccttccacgtggattctccagacgagagggaggagtggatgcgggccatccagatggtcgccaacagcctcaagcagcgggccccaggcgaggaccccatggactacaagtgtggctcccccagtgactcctccacgac

SEQ ID NO: 198759 - DNA, 564 bp, Homo sapiens
  Payload ID: 19218
  Gene Name: v-akt murine thymoma viral oncogene homolog 2
  ENST ID: ENST00000578123
  CDS Start-End: 174-564
aatgtgcgcaggcgccctgctgtgagcccgcctccttctctgccctgctcttgcgctctcgctctctcagagttcgtctctggctctttactgtgccctgtccacggtgcctcctgcatgtcctgctgccctgagctgtcccgagctaggtgacagcgtaccacgctgccaccatgaatgaggtgtctgtcatcaaagaaggctggctccacaagcgtggtgaatacatcaagacctggaggccacggtacttcctgctgaagagcgacggctccttcattgggtacaaggagaggcccgaggcccctgatcagactctaccccccttaaacaacttctccgtagcagaatgccagctgatgaagaccgagaggccgcgacccaacacctttgtcatacgctgcctgcagtggaccacagtcatcgagaggaccttccacgtggattctccagacgagagggaggagtggatgcgggccatccagatggtcgccaacagcctcaagcagcgggccccaggcgaggaccccatggactacaagtgtggctcccccagtgactcct

SEQ ID NO: 198760 - DNA, 1706 bp, Homo sapiens
  Payload ID: 19218
  Gene Name: v-akt murine thymoma viral oncogene homolog 2
  ENST ID: ENST00000584288
  CDS Start-End: 386-595
gtgctagccgttgggcctgcctcggaggaggcgtcgccgccgccgctgccgctgccggcgccgttgccgctgccgggaaacacaaggaaagggaaccagcgcagcgtggcgatgggcgggggtagagccccgccggagaggctgggcggctgccggtgacagactgtgccctgtccacggtgcctcctgcatgtcctgctgccctgagctgtcccgagctaggtgacagcgtaccacgctgccaccatgaatgaggtgaatacatcaagacctggaggccacggtacttcctgctgaagagcgacggctccttcattgggtacaaggagaggcccgaggcccctgatcagactctaccccccttaaacaacttctccgtagcagaatgccagctgatgaagaccgagaggccgcgacccaacacctttgtcatacgctgcctgcagtggaccacagtcatcgagaggaccttccacgtggattctccagacgagagggaggagtggatgcgggccatccagatggtcgccaacagcctcaagcagcgggccccaggcgaggaccccatggactacaagtgtggctcccccagtgactcctccacgactgaggagatggaagtggcggtcagcaaggcacgggctaaagtgaccatgaatgacttcgactatctcaaactccttggcaagggaacctttggcaaagtcatcctggtgcgggagaaggccactggccgctactacgccatgaagatcctgcggaaggaagtcatcattgccaaggatgaagtcgctcacacagtcaccgagagccgggtcctccagaacaccaggcacccgttcctcactgcgctgaagtatgccttccagacccacgaccgcctgtgctttgtgatggagtatgccaacgggggtgagctgttcttccacctgtcccgggagcgtgtcttcacagaggagcgggcccggttttatggtgcagagattgtctcggctcttgagtacttgcactcgcgggacgtggtataccgcgacatcaagctggaaaacctcatgctggacaaagatggccacatcaagatcactgactttggcctctgcaaagagggcatcagtgacggggccaccatgaaaaccttctgtgggaccccggagtacctggcgcctgaggtgctggaggacaatgactatggccgggccgtggactggtgggggctgggtgtggtcatgtacgagatgatgtgcggccgcctgcccttctacaaccaggaccacgagcgcctcttcgagctcatcctcatggaagagatccgcttcccgcgcacgctcagccccgaggccaagtccctgcttgctgggctgcttaagaaggaccccaagcagaggcttggtggggggcccagcgatgccaaggaggtcatggagcacaggttcttcctcagcatcaactggcaggacgtggtccagaagaagctcctgccacccttcaaacctcaggtcacgtccgaggtcgacacaaggtacttcgatgatgaatttaccgcccagtccatcacaatcacaccccctgaccgctatgacagcctgggcttactggagctggaccagcggacccacttcccccagttctcctactcggccagcatccgcgagtgagcagtctgcccacgcagaggacgcacgctcgctgccatcaccgctgggtgg

SEQ ID NO: 198761 - DNA, 567 bp, Homo sapiens
  Payload ID: 19218
  Gene Name: v-akt murine thymoma viral oncogene homolog 2
  ENST ID: ENST00000583859
  CDS Start-End: 270-567
aagtttgcgggacggggagcgcaggccgcagcgtgcgcgggccgggggctggacctttcgggcgcggcgggcagatcgagcctggcgtgcgcgggctaagctatcgagggggcgcgccgcatcaagtgtagagggctgtacctttttggcgctgtggaagccgttgctgtgctgtatttacagggactgtgccctgtccacggtgcctcctgcatgtcctgctgccctgagctgtcccgagctaggtgacagcgtaccacgctgccaccatgaatgaggtgtctgtcatcaaagaaggctggctccacaagcgtggtgaatacatcaagacctggaggccacggtacttcctgctgaagagcgacggctccttcattgggtacaaggagaggcccgaggcccctgatcagactctaccccccttaaacaacttctccgtagcagaatgccagctgatgaagaccgagaggccgcgacccaacacctttgtcatacgctgcctgcagtggaccacagtcatcgagaggaccttccacgtggattctccagacgagagggaggagtgga

SEQ ID NO: 198762 - DNA, 737 bp, Homo sapiens
  Payload ID: 19218
  Gene Name: v-akt murine thymoma viral oncogene homolog 2
  ENST ID: ENST00000492463
  CDS Start-End: 243-452
acttctctgggcgccaccgtagctcccgacctgctgtccgcaaataaccccaggctgggaaaggcaaaggcgccttggtctctgtggaccctggccaggccccaggctccaggtgaatacatcaagacctggaggccacggtacttcctgctgaagagcgacggctccttcattgggtacaaggagaggcccgaggcccctgatcagactctaccccccttaaacaacttctccgtagcagaatgccagctgatgaagaccgagaggccgcgacccaacacctttgtcatacgctgcctgcagtggaccacagtcatcgagaggaccttccacgtggattctccagacgagagggaggagtggatgcgggccatccagatggtcgccaacagcctcaagcagcgggccccaggcgaggaccccatggactacaagtgtggctcccccagtgactcctccacgactgaggagatggaagtggcggtcagcaaggcacgggctaaagtgaccatgaatgacttcgactatctcaaactccttggcaagggaacctttggcaaagtcatcctggtgcgggagaaggccactggccgctactacgccatgaagatcctgcggaaggaagtcatcattgccaaggatgaagtcgctcacacagtcaccgagagccgggtcctccagaacaccaggcacccgttcctcactgcgctgaagtatgccttccagacccacgaccg

SEQ ID NO: 198763 - DNA, 158 bp, Homo sapiens
  Payload ID: 19218
  Gene Name: v-akt murine thymoma viral oncogene homolog 2
  ENST ID: ENST00000578310
  CDS Start-End: 1-158
tcctggtgcgggagaaggccactggccgctactacgccatgaagatcctgcggaaggaagtcatcattgccaagctggaaaacctcatgctggacaaagatggccacatcaagatcactgactttggcctctgcaaagagggcatcagtgacggggcc

SEQ ID NO: 198764 - DNA, 573 bp, Homo sapiens
  Payload ID: 19218
  Gene Name: v-akt murine thymoma viral oncogene homolog 2
  ENST ID: ENST00000491778
  CDS Start-End: 1-154
tcagactctaccccccttaaacaacttctccgtagcagaatgccagctgatgaagaccgagaggccgcgacccaacacctttgtcatacgctgcctgcagtggaccacagtcatcgagaggaccttccacgtggattctccagacgagagctgattgcagtggtatgatcatggctcactgcagcctccacctcctgggctcaagcagttctcccaccttagccccctgagtagctgagaccacagggaggagtggatgcgggccatccagatggtcgccaacagcctcaagcagcgggccccaggcgaggaccccatggactacaagtgtggctcccccagtgactcctccacgactgaggagatggaagtggcggtcagcaaggcacgggctaaagtgaccatgaatgacttcgactatctcaaactccttggcaagggaacctttggcaaagtcatcctggtgcgggagaaggccactggccgctactacgccatgaagatcctgcggaaggaagtcatcattgccaaggatgaagtcgctcacacagtcaccgagagccgggtcctcca

SEQ ID NO: 198765 - DNA, 877 bp, Homo sapiens
  Payload ID: 19218
  Gene Name: v-akt murine thymoma viral oncogene homolog 2
  ENST ID: ENST00000578615
  CDS Start-End: 1-877
aagtgtggctcccccagtgactcctccacgactgaggagatggaagtggcggtcagcaaggcacgggctaaagtgaccatgaatgacttcgactatctcaaactccttggcaagggaacctttggcaaagtcatcctggtgcgggagaaggccactggccgctactacgccatgaagatcctgcggaaggaagtcatcattgccaaggcgctgaagtatgccttccagacccacgaccgcctgtgctttgtgatggagtatgccaacgggggtgagctgttcttccacctgtcccgggagcgtgtcttcacagaggagcgggcccggttttatggtgcagagattgtctcggctcttgagtacttgcactcgcgggacgtggtataccgcgacatcaagctggaaaacctcatgctggacaaagatggccacatcaagatcactgactttggcctctgcaaagagggcatcagtgacggggccaccatgaaaaccttctgtgggaccccggagtacctggcgcctgaggtgctggaggacaatgactatggccgggccgtggactggtgggggctgggtgtggtcatgtacgagatgatgtgcggccgcctgcccttctacaaccaggaccacgagcgcctcttcgagctcatcctcatggaagagatccgcttcccgcgcacgctcagccccgaggccaagtccctgcttgctgggctgcttaagaaggaccccaagcagaggcttggtggggggcccagcgatgccaaggaggtcatggagcacaggttcttcctcagcatcaactggcaggacgtggtccagaagaagctcctgccacccttcaaacctcaggtcacgtccgaggtcgacacaa

SEQ ID NO: 198766 - DNA, 488 bp, Homo sapiens
  Payload ID: 19218
  Gene Name: v-akt murine thymoma viral oncogene homolog 2
  ENST ID: ENST00000476247
  CDS Start-End: 1-321
gactggtgggggctgggtgtggtcatgtacgagatgatgtgcggccgcctgcccttctacaaccaggaccacgagcgcctcttcgagctcatcctcatggaagagatccgcttcccgcgcacgctcagccccgaggccaagtccctgcttgctgggctgcttaagaaggaccccaagcagaggcttggtggggggcccagcgatgccaaggaggtcatggagcacaggttcttcctcagcatcaactggcaggacgtggtccagaagaagctcctgccacccttcaaacctcaggtcacgtccgaggtcgacacaagatgacagcctgggcttactggagctggaccagcggacccacttcccccagttctcctactcggccagcatccgcgagtgagcagtctgcccacgcagaggacgcacgctcgctgccatcaccgctgggtggttttttccccctaactttttacttagcctttttggtttgt

SEQ ID NO: 198767 - DNA, 606 bp, Homo sapiens
  Payload ID: 19218
  Gene Name: v-akt murine thymoma viral oncogene homolog 2
  ENST ID: ENST00000486368
  CDS Start-End: 136-606
agatgcatgcggctgtggggagggcctctgagctgatcccagtttggcaagactgtgccctgtccacggtgcctcctgcatgtcctgctgccctgagctgtcccgagctaggtgacagcgtaccacgctgccaccatgaatgaggtgtctgtcatcaaagaaggctggctccacaagcgtggtgaatacatcaagacctggaggccacggtacttcctgctgaagagcgacggctccttcattgggtacaaggagaggcccgaggcccctgatcagactctaccccccttaaacaacttctccgtagcagaatgccagctgatgaagaccgagaggccgcgacccaacacctttgtcatacgctgcctgcagtggaccacagtcatcgagaggaccttccacgtggattctccagacgagagggaggagtggatgcgggccatccagatggtcgccaacagcctcaagcagcgggccccaggcgaggaccccatggactacaagtgtggctcccccagtgactcctccacgactgaggagatggaagtggcggtcagcaaggcacgggctaaagtgaccatgaatgacttcgactatctcaaactc

SEQ ID NO: 198768 - DNA, 525 bp, Homo sapiens
  Payload ID: 19218
  Gene Name: v-akt murine thymoma viral oncogene homolog 2
  ENST ID: ENST00000580747
  CDS Start-End: 239-525
gagagaaagctgatgcccatggtgtccctagagccagctgccacttctctgggcgccaccgtagctcccgacctgctgtccgcaaataaccccaggctgggaaaggcaaaggcgccttggtctctgtggaccctggccaggccccaggctccagactgtgccctgtccacggtgcctcctgcatgtcctgctgccctgagctgtcccgagctaggtgacagcgtaccacgctgccaccatgaatgaggtgtctgtcatcaaagaaggctggctccacaagcgtggtgaatacatcaagacctggaggccacggtacttcctgctgaagagcgacggctccttcattgggtacaaggagaggcccgaggcccctgatcagactctaccccccttaaacaacttctccgtagcagaatgccagctgatgaagaccgagaggccgcgacccaacacctttgtcatacgctgcctgcagtggaccacagtcatcgagaggaccttccacgtggattctccagacgagag

SEQ ID NO: 198769 - DNA, 583 bp, Homo sapiens
  Payload ID: 19218
  Gene Name: v-akt murine thymoma viral oncogene homolog 2
  ENST ID: ENST00000596634
  CDS Start-End: 129-583
gtgcccggcggggggaccgcggccctcgagcccctccttcaggaactgtgccctgtccacggtgcctcctgcatgtcctgctgccctgagctgtcccgagctaggtgacagcgtaccacgctgccaccatgaatgaggtgtctgtcatcaaagaaggctggctccacaagcgtggtgaatacatcaagacctggaggccacggtacttcctgctgaagagcgacggctccttcattgggtacaaggagaggcccgaggcccctgatcagactctaccccccttaaacaacttctccgtagcagaatgccagctgatgaagaccgagaggccgcgacccaacacctttgtcatacgctgcctgcagtggaccacagtcatcgagaggaccttccacgtggattctccagacgagagggaggagtggatgcgggccatccagatggtcgccaacagcctcaagcagcgggccccaggcgaggaccccatggactacaagtgtggctcccccagtgactcctccacgactgaggagatggaagtggcggtcagcaaggcacgggctaaagtgaccatgaatgactt

SEQ ID NO: 198770 - DNA, 734 bp, Homo sapiens
  Payload ID: 19218
  Gene Name: v-akt murine thymoma viral oncogene homolog 2
  ENST ID: ENST00000489375
  CDS Start-End: 1-170
gcggccgcctgcccttctacaaccaggaccacgagcgcctcttcgagctcatcctcatggaagagatccgcttcccgcgcacgctcagccccgaggccaagtccctgcttgctgggctgcttaagaaggaccccaagcagagtggtttgtggtcaagacagaatcattaagggccatacagggcctgcctgctccgaaagcccgtctgcccgaacccagctgctccgggaggcaggtgctgacggccgtctctgcacaggcttggtggggggcccagcgatgccaaggaggtcatggagcacaggttcttcctcagcatcaactggcaggacgtggtccagaagaagctcctgccacccttcaaacctcaggtcacgtccgaggtcgacacaaggtacttcgatgatgaatttaccgcccagtccatcacaatcacaccccctgaccgctatgacagcctgggcttactggagctggaccagcggacccacttcccccagttctcctactcggccagcatccgcgagtgagcagtctgcccacgcagaggacgcacgctcgctgccatcaccgctgggtggttttttccccctaactttttacttagcctttttggtttgtgtccccacccccacctcctcaccccctttccagttcttcttcaggcccctcccagacgcaccccagcggcccctgcagcccctgcctccagcctccagcctcacctttgtgcc

SEQ ID NO: 198771 - DNA, 2029 bp, Homo sapiens
  Payload ID: 19218
  Gene Name: v-akt murine thymoma viral oncogene homolog 2
  ENST ID: ENST00000579047
  CDS Start-End: 303-1655
gtgctagccgttgggcctgcctcggaggaggcgtcgccgccgccgctgccgctgccggcgccgttgccgctgccgggaaacacaaggaaagggaaccagcgcagcgtggcgatgggcgggggtagagccccgccggagaggctgggcggctgccggtgacaggtgaatacatcaagacctggaggccacggtacttcctgctgaagagcgacggctccttcattgggtacaaggagaggcccgaggcccctgatcagactctaccccccttaaacaacttctccgtagcagaatgccagctgatgaagaccgagaggccgcgacccaacacctttgtcatacgctgcctgcagtggaccacagtcatcgagaggaccttccacgtggattctccagacgagagggaggagtggatgcgggccatccagatggtcgccaacagcctcaagcagcgggccccaggcgaggaccccatggactacaagtgtggctcccccagtgactcctccacgactgaggagatggaagtggcggtcagcaaggcacgggctaaagtgaccatgaatgacttcgactatctcaaactccttggcaagggaacctttggcaaagtcatcctggtgcgggagaaggccactggccgctactacgccatgaagatcctgcggaaggaagtcatcattgccaaggatgaagtcgctcacacagtcaccgagagccgggtcctccagaacaccaggcacccgttcctcactgcgctgaagtatgccttccagacccacgaccgcctgtgctttgtgatggagtatgccaacgggggtgagctgttcttccacctgtcccgggagcgtgtcttcacagaggagcgggcccggttttatggtgcagagattgtctcggctcttgagtacttgcactcgcgggacgtggtataccgcgacatcaagctggaaaacctcatgctggacaaagatggccacatcaagatcactgactttggcctctgcaaagagggcatcagtgacggggccaccatgaaaaccttctgtgggaccccggagtacctggcgcctgaggtgctggaggacaatgactatggccgggccgtggactggtgggggctgggtgtggtcatgtacgagatgatgtgcggccgcctgcccttctacaaccaggaccacgagcgcctcttcgagctcatcctcatggaagagatccgcttcccgcgcacgctcagccccgaggccaagtccctgcttgctgggctgcttaagaaggaccccaagcagaggcttggtggggggcccagcgatgccaaggaggtcatggagcacaggttcttcctcagcatcaactggcaggacgtggtccagaagaagctcctgccacccttcaaacctcaggtcacgtccgaggtcgacacaaggtacttcgatgatgaatttaccgcccagtccatcacaatcacaccccctgaccgctgtgagtgcctggggcccccgcgctggtgtgcctgccccaggggtggagggatgggatctgctcttaactcacttctcaaggagggccctcgaaggcccccgcttcatgtctgggagatttccccaagtctgctctcaggcccttttgctgttggtcctctttggacctggtgaggccaccaggagccattgactgcagcacgttctggagctcagtcggggggctcagggcaggaggcagcccggtccctgagcctggctgggttcactgctttacagctgtttgggttcttactctgaactcagcccagggctgggctatgctggggacacagcactgattgagccagccctgggccctgccctggaaagctcccagcccaggtagggtgggcggcctggagtggtcagggctagggcgtgggaggccagggactggggaatcccagaggaaatatccgacctggcctgcagttagggagggctttctagaggaggaagcaaacgtgtcagctggccggaggaatgacgtgtgggatgccagcaat

SEQ ID NO: 198772 - DNA, 554 bp, Homo sapiens
  Payload ID: 19218
  Gene Name: v-akt murine thymoma viral oncogene homolog 2
  ENST ID: ENST00000601166
  CDS Start-End: 1-390
gtggattctccagacgagagggaggagtggatgcgggccatccagatggtcgccaacagcctcaagcagcgggccccaggcgaggaccccatggactacaagtgtggctcccccagtgactcctccacgactgaggagatggaagtggcggtcagcaaggcacgggctaaagtgaccatgaatgacttcgactatctcaaactccttggcaagggaacctttggcaaagtcatcctggtgcgggagaaggccactggccgctactacgccatgaagatcctgcggaaggaagtcatcattgccaagtctgtctgcaggatgaagtcgctcacacagtcaccgagagccgggtcctccagaacaccaggcacccgttcctcactgcgctgaagtatgccttccagacccacgaccgcctgtgctttgtgatggagtatgccaacgggggtgagctgttcttccacctgtcccgggagcgtgtcttcacagaggagcgggcccggttttatggtgcagagattgtctcggctcttgagtacttgcactcgcgggac

SEQ ID NO: 198773 - DNA, 456 bp, Homo sapiens
  Payload ID: 19218
  Gene Name: v-akt murine thymoma viral oncogene homolog 2
  ENST ID: ENST00000497948
  CDS Start-End: 1-352
cccgcgcacgctcagccccgaggccaagtccctgcttgctgggctgcttaagaaggaccccaagcagaggcttggtggggggcccagcgatgccaaggaggtcatggagcacaggttcttcctcagcatcaactggcaggacgtggtccagaagaagctcctgccacccttcaaacctcaggtcacgtccgaggtcgacacaaggtacttcgatgatgaatttaccgcccagtccatcacaatcacaccccctgaccgctttagggagggctttctagaggaggaagcaaacgtgtcagctggccggaggaatgacgtgtgggatgccagcaatgggagaagcatggcatagctaaggaccggcagcagccagggagatggtgatgacagcctgggcttactggagctggaccagcggacccacttcccccagttctcctactcggccagcatccg

SEQ ID NO: 198774 - DNA, 7081 bp, Homo sapiens
  Payload ID: 19219
  Gene Name: v-akt murine thymoma viral oncogene homolog 3
  Uniprot ID: Q9Y243
  ENST ID: ENST00000263826
  CDS Start-End: 113-1552
gctgagtcatcactagagagtgggaagggcagcagcagcagagaatccaaaccctaaagctgatatcacaaagtaccatttctccaagttgggggctcagaggggagtcatcatgagcgatgttaccattgtgaaagaaggttgggttcagaagaggggagaatatataaaaaactggaggccaagatacttccttttgaagacagatggctcattcataggatataaagagaaacctcaagatgtggatttaccttatcccctcaacaacttttcagtggcaaaatgccagttaatgaaaacagaacgaccaaagccaaacacatttataatcagatgtctccagtggactactgttatagagagaacatttcatgtagatactccagaggaaagggaagaatggacagaagctatccaggctgtagcagacagactgcagaggcaagaagaggagagaatgaattgtagtccaacttcacaaattgataatataggagaggaagagatggatgcctctacaacccatcataaaagaaagacaatgaatgattttgactatttgaaactactaggtaaaggcacttttgggaaagttattttggttcgagagaaggcaagtggaaaatactatgctatgaagattctgaagaaagaagtcattattgcaaaggatgaagtggcacacactctaactgaaagcagagtattaaagaacactagacatccctttttaacatccttgaaatattccttccagacaaaagaccgtttgtgttttgtgatggaatatgttaatgggggcgagctgtttttccatttgtcgagagagcgggtgttctctgaggaccgcacacgtttctatggtgcagaaattgtctctgccttggactatctacattccggaaagattgtgtaccgtgatctcaagttggagaatctaatgctggacaaagatggccacataaaaattacagattttggactttgcaaagaagggatcacagatgcagccaccatgaagacattctgtggcactccagaatatctggcaccagaggtgttagaagataatgactatggccgagcagtagactggtggggcctaggggttgtcatgtatgaaatgatgtgtgggaggttacctttctacaaccaggaccatgagaaactttttgaattaatattaatggaagacattaaatttcctcgaacactctcttcagatgcaaaatcattgctttcagggctcttgataaaggatccaaataaacgccttggtggaggaccagatgatgcaaaagaaattatgagacacagtttcttctctggagtaaactggcaagatgtatatgataaaaagcttgtacctccttttaaacctcaagtaacatctgagacagatactagatattttgatgaagaatttacagctcagactattacaataacaccacctgaaaaatatgatgaggatggtatggactgcatggacaatgagaggcggccgcatttccctcaattttcctactctgcaagtggacgagaataagtctctttcattctgctacttcactgtcatcttcaatttattactgaaaatgattcctggacatcaccagtcctagctcttacacatagcaggggcaccttccgacatcccagaccagccaagggtcctcacccctcgccacctttcaccctcatgaaaacacacatacacgcaaatacactccagtttttgtttttgcatgaaattgtatctcagtctaaggtctcatgctgttgctgctactgtcttactattatagcaactttaagaagtaattttccaacctttggaagtcatgagcccaccattgttcatttgtgcaccaattatcatcttttgatcttttagtttttccctcagtgaaggctaaatgagatacactgattctaggtacattttttaactttctagaagagaaaaactaactagactaagaagatttagtttataaattcagaacaagcaattgtggaagggtggtggcgtgcatatgtaaagcacatcagatccgtgcgtgaagtaggcatatatcactaagctgtggctggaattgattaggaagcatttggtagaaggactgaacaactgttgggatatatatatatatatataattttttttttttaaattcctggtggatactgtagaagaagcccatatcacatgtggatgtcgagacttcacgggcaatcatgagcaagtgaacactgttctaccaagaactgaaggcatatgcacagtcaaggtcacttaaagggtcttatgaaacaatttgagccagagagcatctttcccctgtgcttggaaaccttttttccttcttgacatttatcacctctgatggctgaagaatgtagacaggtataatgatactgcttttcaccaaaatttctacaccaaggtaaacaggtgtttgccttatttaattttttactttcagttctacgtgaattagctttttctcagatgttgaaactttgaatgtccttttatgattttgtttatattgcagtagtatttattttttagtgatgagaattgtatgtcatgttagcaaacgcagctccaacttatataaaatagacttactgcagttacttttgacccatgtgcaaggattgtacacgctgatgagaatcatgcactttttctcctctgttaaaaaaaatgataaggctctgaaatggaatatattggttagaatttggctttgggagaagagatgctgccatttaaccccttggtactgaaaatgagaaaatccccaactatgcatgccaaggggttaatgaaacaaatagctgttgacgtttgctcatttaagaatttgaaacgttatgatgacctggcaacaaaaagtaatgaagaaaattgagacctgagtgaagataagaaatgatctttacgtggcaaaatgaacacatcttgagtatttaggaaatgggcagtgaaggctaagaacctggtgtgtttcttgggatcatggtacatttatcactgaattaagccatcagggaaaaaacaacaaaaaaagagaacacctccagcttttctttttctgtatatactcatgtcccccagattccaacatttctcactgaaagggggcatgtatgcaaacctcatctttctccttcattaatgatgatcttcagattaaaccctttggtgctaggagctgacaatttccaaagcagcctgtgaagtcctaggggctgggggccactcttgcggcaagcagaaggccatcctactccgcggagtgatcatggaaatgtattttagttaaactctgacagctcccaaacggaagactacagcatgacgtagtattatgattgcattgtatgaaagagcaagtgactttctaagtaggatgaatcatattcatatgcagatgtcttagcctcttgacgctggaagtgtggatttatagctatgaaaccactgctggcagtgggtgggccactgggactgacgggggttaaagggcattttactaaggcagctaagacatattcagacatcaacgttatccttctttttcatatttctacctgagtgaagttcatccttagtattgagtaggaagttacagtaaatggtagttcattcttacttacacacatagctaatcttttttttttcacttggaattatgttgaatgtttcattttgacaaaaaagtagactagaaggtatgttctttaagttgtcttgcatccattatataagaaagaaacaggtgagaggaagagcagaaagctgagactggctgatgttcagagcacttactcctctagagggaaagcatgacaccgaacactaagcacacagctttttgttgttttggttttttctcccgcaaatcttaaagtgattcccatgaccttggccaaggacacttcttaaagattaatgactggcactgacattgccccaggcgggccactcctcacactggctctcagttcccagccatgcctggggctcagtcacttctattccaccctctgagactccattggtgtcacacaaggtgtcttcttggctttgattttgagaatcccctattttcacttccagatctgtcagctgccatggaggaataatagaaaaccagaaatgcgtgtagagggagatttctaaaacttcccttgtgtcgcccatagttgtagttttgggttctggcaggtggaacaccctgaaacctggaatcattctatgagaatacagttcagactttgcagactccagcccatactaactgtcatgaagcttgacttcttgtcataatgcagccatcttggaggaaattggccatttctgcttagatggttggcagggtcgcgctcagctttgctttctacactaattacatagcattattcaagtattgttttccatttcccatccctgatttccagcttcttaaagctgactgttcttgcaggggccacttgcttctcctagagtacaaaagtaagggccttccttactaactgcagggtctctctattacacctcaacatacacactttgctgctactgtttgtactgtctacagtagaatttccttatcttgctcctggtagtgcattacaggcaagcatgaaatgtaaagtatttatttaaataaaaagaaaacctctaaattggtaattgaattacctccctgtagctttatagtttgtgacatttcttgaccttgctagttctttcattagatctgcgcaagatctagtcatctggttaaggattttaagcagatgcaactataaacccaagaaactgtattactattactgttggtcatactaaacctgtctatttcctgaagtatatgacccacaaggatgtggaataactaggagaaactgtttttgtacactgtacatccttagtatttttacacgtatatgatagggatgaacatgattttccttcgtacagacagcttaaataaagcactatgtcaatctgctacttctctgtttattgttgttggatgtggttctataatccccccaaattaaatcttctttaatgaaaacatgatttttaatagccccagctggtattaacctaccttgtataaaatgtgacaggaaaatatagaaataattccttgtagctcacacacacacacataggggatcatttttacttcagtgaaatggcagtagtgcggttgtgcaaactttgatgaacggctgcttctgaggggaaacgctgacctctcagcactggatttaggatggatgtactgtgaagccagggatgaaggaggtctcagaccctggggacattcagacccgaatcatctatacaacacacggtttggacccagaatctgaaggaatgtagcttttcattaacgtcttcctgataatgtactgctctgcatatttcctttcttagagtgtatttctaacaacatgtcatggcaaattaacaaacttagacgtgggtgatgtagatgggtaggatggctggactgcagtctgacttcacgttgaatcattctggatggggcctttttctgattttacctcataaagctactattgtagaaacttggctttgctcctgtgacgaagccagacagaggaatggcttttgggaccagagtgagtcaagcatgtatgtgtatgtcacacggccaaatttgagggcattctcacatgtgctcttctctcaaaaccactggggttgacagatccaggaggctaaaaaaaagtgacctctataattctttaaaggtgctatttttagaatattgtataatttattcacagtatatctaaaacagaattaaggacaattaaaatatcttatgtgacagcctttatgtctagcacatttgatgaaataaaaaacttctgaatctgaatagaagttctactgtttcaggcttgaaccttttacatgctcaagagattcaaatggtctctgtgtgtagatcatgccaccgcctccaaagcctaatccacatcacttctgagaggcaaggctgagcatatggtgacatcagctctgtgttgagatggtgatgaggatgatggctcgctggccaggcagggcagccgaaggtcagggacctgtcctaactaactgcagccttgcctttagtgtttgtcattctcagatacaacacggtatgtccagtgtccgtttttattactttaaagcatttgagggcttaattgtgtatagtagaaatactattttagacaaataattatctgtgtacagatatttgatatactctaagtaaattttctaatttcactaagtacgtttttaggctcctctcaaatactgcgtattgaagaaaaaaatctgacaccaccgagccaaagatgcttttttgtctgttttcgttgtttaacagaatggaaagagtaatgcatagtgcttcctggtgtctcctgattgattgattgtgcacaaagtaggacgataaataaataaaatggagtctgatgggacattgattaaaggtgaaggatgattgatatatagatcatgaaaagaaaaatgaatggcaggaaaaaaagtttggtccttaatatactttggcctagttaaaatatgtgcctttttggtgtgttttgttcatcactacaagataaaaaggaaacattacaactcaagtctttaaaaagttcatttattgaaaatcatatgtataacctagcatacgaatgagcagatttaaacacataacttcaagccatttctgaaaacatacaccaggagctctgctcagctagagtcagactccagctccagcccgactgcgtgcggggacagcgcccgcgttgatgaggaccagccccactgcaggctgaggcggtgtcaccctgggaaggtcgtggtgcgttgtggcatattaagtctaaaccagatgaatgtaaatatctctttgtaaatcatttatttcactctgttccatccaggtcagcaatcagattgtggcatgctgggtaactggaaaaaataataaaaagtaagtttcaatagctc

SEQ ID NO: 198775 - DNA, 1688 bp, Homo sapiens
  Payload ID: 19219
  Gene Name: v-akt murine thymoma viral oncogene homolog 3
  Uniprot ID: Q9Y243
  ENST ID: ENST00000336199
  CDS Start-End: 67-1464
ccaaaccctaaagctgatatcacaaagtaccatttctccaagttgggggctcagaggggagtcatcatgagcgatgttaccattgtgaaagaaggttgggttcagaagaggggagaatatataaaaaactggaggccaagatacttccttttgaagacagatggctcattcataggatataaagagaaacctcaagatgtggatttaccttatcccctcaacaacttttcagtggcaaaatgccagttaatgaaaacagaacgaccaaagccaaacacatttataatcagatgtctccagtggactactgttatagagagaacatttcatgtagatactccagaggaaagggaagaatggacagaagctatccaggctgtagcagacagactgcagaggcaagaagaggagagaatgaattgtagtccaacttcacaaattgataatataggagaggaagagatggatgcctctacaacccatcataaaagaaagacaatgaatgattttgactatttgaaactactaggtaaaggcacttttgggaaagttattttggttcgagagaaggcaagtggaaaatactatgctatgaagattctgaagaaagaagtcattattgcaaaggatgaagtggcacacactctaactgaaagcagagtattaaagaacactagacatccctttttaacatccttgaaatattccttccagacaaaagaccgtttgtgttttgtgatggaatatgttaatgggggcgagctgtttttccatttgtcgagagagcgggtgttctctgaggaccgcacacgtttctatggtgcagaaattgtctctgccttggactatctacattccggaaagattgtgtaccgtgatctcaagttggagaatctaatgctggacaaagatggccacataaaaattacagattttggactttgcaaagaagggatcacagatgcagccaccatgaagacattctgtggcactccagaatatctggcaccagaggtgttagaagataatgactatggccgagcagtagactggtggggcctaggggttgtcatgtatgaaatgatgtgtgggaggttacctttctacaaccaggaccatgagaaactttttgaattaatattaatggaagacattaaatttcctcgaacactctcttcagatgcaaaatcattgctttcagggctcttgataaaggatccaaataaacgccttggtggaggaccagatgatgcaaaagaaattatgagacacagtttcttctctggagtaaactggcaagatgtatatgataaaaagcttgtacctccttttaaacctcaagtaacatctgagacagatactagatattttgatgaagaatttacagctcagactattacaataacaccacctgaaaaatgtcagcaatcagattgtggcatgctgggtaactggaaaaaataataaaaatcggcttcctacagccagcagcacagtcacccatggaactgttggctttggattaaatgtggaattgaacgactacccagaagtgttctggaaagaagcgagatgtgtggcctgcctcaccgtcctcacccatcaaaagcaccagcaggcacgttaactcgaattctcacaaggaaaaggccattaaagctcaaggtgcatttcaaactccaggctac

SEQ ID NO: 198776 - DNA, 5127 bp, Homo sapiens
  Payload ID: 19219
  Gene Name: v-akt murine thymoma viral oncogene homolog 3
  Uniprot ID: Q9Y243
  ENST ID: ENST00000366539
  CDS Start-End: 202-1641
ccctctcctccccccgcccccccccggctccatcctccgccgccgcccgagcagctgcggggccgccaccgccgccgccgccgttgcaggctgagtcatcactagagagtgggaagggcagcagcagcagagaatccaaaccctaaagctgatatcacaaagtaccatttctccaagttgggggctcagaggggagtcatcatgagcgatgttaccattgtgaaagaaggttgggttcagaagaggggagaatatataaaaaactggaggccaagatacttccttttgaagacagatggctcattcataggatataaagagaaacctcaagatgtggatttaccttatcccctcaacaacttttcagtggcaaaatgccagttaatgaaaacagaacgaccaaagccaaacacatttataatcagatgtctccagtggactactgttatagagagaacatttcatgtagatactccagaggaaagggaagaatggacagaagctatccaggctgtagcagacagactgcagaggcaagaagaggagagaatgaattgtagtccaacttcacaaattgataatataggagaggaagagatggatgcctctacaacccatcataaaagaaagacaatgaatgattttgactatttgaaactactaggtaaaggcacttttgggaaagttattttggttcgagagaaggcaagtggaaaatactatgctatgaagattctgaagaaagaagtcattattgcaaaggatgaagtggcacacactctaactgaaagcagagtattaaagaacactagacatccctttttaacatccttgaaatattccttccagacaaaagaccgtttgtgttttgtgatggaatatgttaatgggggcgagctgtttttccatttgtcgagagagcgggtgttctctgaggaccgcacacgtttctatggtgcagaaattgtctctgccttggactatctacattccggaaagattgtgtaccgtgatctcaagttggagaatctaatgctggacaaagatggccacataaaaattacagattttggactttgcaaagaagggatcacagatgcagccaccatgaagacattctgtggcactccagaatatctggcaccagaggtgttagaagataatgactatggccgagcagtagactggtggggcctaggggttgtcatgtatgaaatgatgtgtgggaggttacctttctacaaccaggaccatgagaaactttttgaattaatattaatggaagacattaaatttcctcgaacactctcttcagatgcaaaatcattgctttcagggctcttgataaaggatccaaataaacgccttggtggaggaccagatgatgcaaaagaaattatgagacacagtttcttctctggagtaaactggcaagatgtatatgataaaaagcttgtacctccttttaaacctcaagtaacatctgagacagatactagatattttgatgaagaatttacagctcagactattacaataacaccacctgaaaaatatgatgaggatggtatggactgcatggacaatgagaggcggccgcatttccctcaattttcctactctgcaagtggacgagaataagtctctttcattctgctacttcactgtcatcttcaatttattactgaaaatgattcctggacatcaccagtcctagctcttacacatagcaggggcaccttccgacatcccagaccagccaagggtcctcacccctcgccacctttcaccctcatgaaaacacacatacacgcaaatacactccagtttttgtttttgcatgaaattgtatctcagtctaaggtctcatgctgttgctgctactgtcttactattatagcaactttaagaagtaattttccaacctttggaagtcatgagcccaccattgttcatttgtgcaccaattatcatcttttgatcttttagtttttccctcagtgaaggctaaatgagatacactgattctaggtacattttttaactttctagaagagaaaaactaactagactaagaagatttagtttataaattcagaacaagcaattgtggaagggtggtggcgtgcatatgtaaagcacatcagatccgtgcgtgaagtaggcatatatcactaagctgtggctggaattgattaggaagcatttggtagaaggactgaacaactgttgggatatatatatatatatataattttttttttttaaattcctggtggatactgtagaagaagcccatatcacatgtggatgtcgagacttcacgggcaatcatgagcaagtgaacactgttctaccaagaactgaaggcatatgcacagtcaaggtcacttaaagggtcttatgaaacaatttgagccagagagcatctttcccctgtgcttggaaaccttttttccttcttgacatttatcacctctgatggctgaagaatgtagacaggtataatgatactgcttttcaccaaaatttctacaccaaggtaaacaggtgtttgccttatttaattttttactttcagttctacgtgaattagctttttctcagatgttgaaactttgaatgtccttttatgattttgtttatattgcagtagtatttattttttagtgatgagaattgtatgtcatgttagcaaacgcagctccaacttatataaaatagacttactgcagttacttttgacccatgtgcaaggattgtacacgctgatgagaatcatgcactttttctcctctgttaaaaaaaatgataaggctctgaaatggaatatattggttagaatttggctttgggagaagagatgctgccatttaaccccttggtactgaaaatgagaaaatccccaactatgcatgccaaggggttaatgaaacaaatagctgttgacgtttgctcatttaagaatttgaaacgttatgatgacctggcaacaaaaagtaatgaagaaaattgagacctgagtgaagataagaaatgatctttacgtggcaaaatgaacacatcttgagtatttaggaaatgggcagtgaaggctaagaacctggtgtgtttcttgggatcatggtacatttatcactgaattaagccatcagggaaaaaacaacaaaaaaagagaacacctccagcttttctttttctgtatatactcatgtcccccagattccaacatttctcactgaaagggggcatgtatgcaaacctcatctttctccttcattaatgatgatcttcagattaaaccctttggtgctaggagctgacaatttccaaagcagcctgtgaagtcctaggggctgggggccactcttgcggcaagcagaaggccatcctactccgcggagtgatcatggaaatgtattttagttaaactctgacagctcccaaacggaagactacagcatgacgtagtattatgattgcattgtatgaaagagcaagtgactttctaagtaggatgaatcatattcatatgcagatgtcttagcctcttgacgctggaagtgtggatttatagctatgaaaccactgctggcagtgggtgggccactgggactgacgggggttaaagggcattttactaaggcagctaagacatattcagacatcaacgttatccttctttttcatatttctacctgagtgaagttcatccttagtattgagtaggaagttacagtaaatggtagttcattcttacttacacacatagctaatcttttttttttcacttggaattatgttgaatgtttcattttgacaaaaaagtagactagaaggtatgttctttaagttgtcttgcatccattatataagaaagaaacaggtgagaggaagagcagaaagctgagactggctgatgttcagagcacttactcctctagagggaaagcatgacaccgaacactaagcacacagctttttgttgttttggttttttctcccgcaaatcttaaagtgattcccatgaccttggccaaggacacttcttaaagattaatgactggcactgacattgccccaggcgggccactcctcacactggctctcagttcccagccatgcctggggctcagtcacttctattccaccctctgagactccattggtgtcacacaaggtgtcttcttggctttgattttgagaatcccctattttcacttccagatctgtcagctgccatggaggaataatagaaaaccagaaatgcgtgtagagggagatttctaaaacttcccttgtgtcgcccatagttgtagttttgggttctggcaggtggaacaccctgaaacctggaatcattctatgagaatacagttcagactttgcagactccagcccatactaactgtcatgaagcttgacttcttgtcataatgcagccatcttggaggaaattggccatttctgcttagatggttggcagggtcgcgctcagctttgctttctacactaattacatagcattattcaagtattgttttccatttcccatccctgatttccagcttcttaaagctgactgttcttgcaggggccacttgcttctcctagagtacaaaagtaagggccttccttactaactgcagggtctctctattacacctcaacatacacactttgctgctactgtttgtactgtctacagtagaatttccttatcttgctcctggtagtgcattacaggcaagcatgaaatgtaaagtatttatttaaataaaaagaaaacctctaaattggtaattgaattacctccctgtagctttatagtttgtgacatttcttgaccttgctagttctttcattagatctgcgcaagatctagtcatctggttaaggattttaagcagatgcaactataaacccaagaaactgtattactattactgttggtcatactaaacctgtctatttcctgaagtatatgacccacaaggatgtggaataactaggagaaactgtttttgtacactgtacatccttagtatttttacacgtatatgatagggatgaacatgattttccttcgtacagacagcttaaataaagcactatgtcaatctgcta

SEQ ID NO: 198777 - DNA, 1575 bp, Homo sapiens
  Payload ID: 19219
  Gene Name: v-akt murine thymoma viral oncogene homolog 3
  Uniprot ID: Q9Y243
  ENST ID: ENST00000366540
  CDS Start-End: 154-1551
ctcaaatacacatcaccaaacaaattttctctattatttgggctgagtcatcactagagagtgggaagggcagcagcagcagagaatccaaaccctaaagctgatatcacaaagtaccatttctccaagttgggggctcagaggggagtcatcatgagcgatgttaccattgtgaaagaaggttgggttcagaagaggggagaatatataaaaaactggaggccaagatacttccttttgaagacagatggctcattcataggatataaagagaaacctcaagatgtggatttaccttatcccctcaacaacttttcagtggcaaaatgccagttaatgaaaacagaacgaccaaagccaaacacatttataatcagatgtctccagtggactactgttatagagagaacatttcatgtagatactccagaggaaagggaagaatggacagaagctatccaggctgtagcagacagactgcagaggcaagaagaggagagaatgaattgtagtccaacttcacaaattgataatataggagaggaagagatggatgcctctacaacccatcataaaagaaagacaatgaatgattttgactatttgaaactactaggtaaaggcacttttgggaaagttattttggttcgagagaaggcaagtggaaaatactatgctatgaagattctgaagaaagaagtcattattgcaaaggatgaagtggcacacactctaactgaaagcagagtattaaagaacactagacatccctttttaacatccttgaaatattccttccagacaaaagaccgtttgtgttttgtgatggaatatgttaatgggggcgagctgtttttccatttgtcgagagagcgggtgttctctgaggaccgcacacgtttctatggtgcagaaattgtctctgccttggactatctacattccggaaagattgtgtaccgtgatctcaagttggagaatctaatgctggacaaagatggccacataaaaattacagattttggactttgcaaagaagggatcacagatgcagccaccatgaagacattctgtggcactccagaatatctggcaccagaggtgttagaagataatgactatggccgagcagtagactggtggggcctaggggttgtcatgtatgaaatgatgtgtgggaggttacctttctacaaccaggaccatgagaaactttttgaattaatattaatggaagacattaaatttcctcgaacactctcttcagatgcaaaatcattgctttcagggctcttgataaaggatccaaataaacgccttggtggaggaccagatgatgcaaaagaaattatgagacacagtttcttctctggagtaaactggcaagatgtatatgataaaaagcttgtacctccttttaaacctcaagtaacatctgagacagatactagatattttgatgaagaatttacagctcagactattacaataacaccacctgaaaaatgtcagcaatcagattgtggcatgctgggtaactggaaaaaataataaaaagtaagtttcaatagctca

SEQ ID NO: 198778 - DNA, 560 bp, Homo sapiens
  Payload ID: 19219
  Gene Name: v-akt murine thymoma viral oncogene homolog 3
  ENST ID: ENST00000552631
  CDS Start-End: 144-560
attgggcaccgcccacttcgtgggcttccaggctgagtcatcactagagagtgggaagggcagcagcagcagagaatccaaaccctaaagctgatatcacaaagtaccatttctccaagttgggggctcagaggggagtcatcatgagcgatgttaccattgtgaaagaaggttgggttcagaagaggggagaatatataaaaaactggaggccaagatacttccttttgaagacagatggctcattcataggatataaagagaaacctcaagatgtggatttaccttatcccctcaacaacttttcagtggcaaaatgccagttaatgaaaacagaacgaccaaagccaaacacatttataatcagatgtctccagtggactactgttatagagagaacatttcatgtagatactccagaggaaagggaagaatggacagaagctatccaggctgtagcagacagactgcagaggcaagaagaggagagaatgaattgtagtccaacttcacaaattgataatataggagaggaagagatggatgcctctacaacccat

SEQ ID NO: 198779 - DNA, 4926 bp, Homo sapiens
  Payload ID: 19219
  Gene Name: v-akt murine thymoma viral oncogene homolog 3
  Uniprot ID: Q9Y243
  ENST ID: ENST00000621586
  CDS Start-End: 1-1440
atgagcgatgttaccattgtgaaagaaggttgggttcagaagaggggagaatatataaaaaactggaggccaagatacttccttttgaagacagatggctcattcataggatataaagagaaacctcaagatgtggatttaccttatcccctcaacaacttttcagtggcaaaatgccagttaatgaaaacagaacgaccaaagccaaacacatttataatcagatgtctccagtggactactgttatagagagaacatttcatgtagatactccagaggaaagggaagaatggacagaagctatccaggctgtagcagacagactgcagaggcaagaagaggagagaatgaattgtagtccaacttcacaaattgataatataggagaggaagagatggatgcctctacaacccatcataaaagaaagacaatgaatgattttgactatttgaaactactaggtaaaggcacttttgggaaagttattttggttcgagagaaggcaagtggaaaatactatgctatgaagattctgaagaaagaagtcattattgcaaaggatgaagtggcacacactctaactgaaagcagagtattaaagaacactagacatccctttttaacatccttgaaatattccttccagacaaaagaccgtttgtgttttgtgatggaatatgttaatgggggcgagctgtttttccatttgtcgagagagcgggtgttctctgaggaccgcacacgtttctatggtgcagaaattgtctctgccttggactatctacattccggaaagattgtgtaccgtgatctcaagttggagaatctaatgctggacaaagatggccacataaaaattacagattttggactttgcaaagaagggatcacagatgcagccaccatgaagacattctgtggcactccagaatatctggcaccagaggtgttagaagataatgactatggccgagcagtagactggtggggcctaggggttgtcatgtatgaaatgatgtgtgggaggttacctttctacaaccaggaccatgagaaactttttgaattaatattaatggaagacattaaatttcctcgaacactctcttcagatgcaaaatcattgctttcagggctcttgataaaggatccaaataaacgccttggtggaggaccagatgatgcaaaagaaattatgagacacagtttcttctctggagtaaactggcaagatgtatatgataaaaagcttgtacctccttttaaacctcaagtaacatctgagacagatactagatattttgatgaagaatttacagctcagactattacaataacaccacctgaaaaatatgatgaggatggtatggactgcatggacaatgagaggcggccgcatttccctcaattttcctactctgcaagtggacgagaataagtctctttcattctgctacttcactgtcatcttcaatttattactgaaaatgattcctggacatcaccagtcctagctcttacacatagcaggggcaccttccgacatcccagaccagccaagggtcctcacccctcgccacctttcaccctcatgaaaacacacatacacgcaaatacactccagtttttgtttttgcatgaaattgtatctcagtctaaggtctcatgctgttgctgctactgtcttactattatagcaactttaagaagtaattttccaacctttggaagtcatgagcccaccattgttcatttgtgcaccaattatcatcttttgatcttttagtttttccctcagtgaaggctaaatgagatacactgattctaggtacattttttaactttctagaagagaaaaactaactagactaagaagatttagtttataaattcagaacaagcaattgtggaagggtggtggcgtgcatatgtaaagcacatcagatccgtgcgtgaagtaggcatatatcactaagctgtggctggaattgattaggaagcatttggtagaaggactgaacaactgttgggatatatatatatatatataattttttttttttaaattcctggtggatactgtagaagaagcccatatcacatgtggatgtcgagacttcacgggcaatcatgagcaagtgaacactgttctaccaagaactgaaggcatatgcacagtcaaggtcacttaaagggtcttatgaaacaatttgagccagagagcatctttcccctgtgcttggaaaccttttttccttcttgacatttatcacctctgatggctgaagaatgtagacaggtataatgatactgcttttcaccaaaatttctacaccaaggtaaacaggtgtttgccttatttaattttttactttcagttctacgtgaattagctttttctcagatgttgaaactttgaatgtccttttatgattttgtttatattgcagtagtatttattttttagtgatgagaattgtatgtcatgttagcaaacgcagctccaacttatataaaatagacttactgcagttacttttgacccatgtgcaaggattgtacacgctgatgagaatcatgcactttttctcctctgttaaaaaaaatgataaggctctgaaatggaatatattggttagaatttggctttgggagaagagatgctgccatttaaccccttggtactgaaaatgagaaaatccccaactatgcatgccaaggggttaatgaaacaaatagctgttgacgtttgctcatttaagaatttgaaacgttatgatgacctggcaacaaaaagtaatgaagaaaattgagacctgagtgaagataagaaatgatctttacgtggcaaaatgaacacatcttgagtatttaggaaatgggcagtgaaggctaagaacctggtgtgtttcttgggatcatggtacatttatcactgaattaagccatcagggaaaaaacaacaaaaaaagagaacacctccagcttttctttttctgtatatactcatgtcccccagattccaacatttctcactgaaagggggcatgtatgcaaacctcatctttctccttcattaatgatgatcttcagattaaaccctttggtgctaggagctgacaatttccaaagcagcctgtgaagtcctaggggctgggggccactcttgcggcaagcagaaggccatcctactccgcggagtgatcatggaaatgtattttagttaaactctgacagctcccaaacggaagactacagcatgacgtagtattatgattgcattgtatgaaagagcaagtgactttctaagtaggatgaatcatattcatatgcagatgtcttagcctcttgacgctggaagtgtggatttatagctatgaaaccactgctggcagtgggtgggccactgggactgacgggggttaaagggcattttactaaggcagctaagacatattcagacatcaacgttatccttctttttcatatttctacctgagtgaagttcatccttagtattgagtaggaagttacagtaaatggtagttcattcttacttacacacatagctaatcttttttttttcacttggaattatgttgaatgtttcattttgacaaaaaagtagactagaaggtatgttctttaagttgtcttgcatccattatataagaaagaaacaggtgagaggaagagcagaaagctgagactggctgatgttcagagcacttactcctctagagggaaagcatgacaccgaacactaagcacacagctttttgttgttttggttttttctcccgcaaatcttaaagtgattcccatgaccttggccaaggacacttcttaaagattaatgactggcactgacattgccccaggcgggccactcctcacactggctctcagttcccagccatgcctggggctcagtcacttctattccaccctctgagactccattggtgtcacacaaggtgtcttcttggctttgattttgagaatcccctattttcacttccagatctgtcagctgccatggaggaataatagaaaaccagaaatgcgtgtagagggagatttctaaaacttcccttgtgtcgcccatagttgtagttttgggttctggcaggtggaacaccctgaaacctggaatcattctatgagaatacagttcagactttgcagactccagcccatactaactgtcatgaagcttgacttcttgtcataatgcagccatcttggaggaaattggccatttctgcttagatggttggcagggtcgcgctcagctttgctttctacactaattacatagcattattcaagtattgttttccatttcccatccctgatttccagcttcttaaagctgactgttcttgcaggggccacttgcttctcctagagtacaaaagtaagggccttccttactaactgcagggtctctctattacacctcaacatacacactttgctgctactgtttgtactgtctacagtagaatttccttatcttgctcctggtagtgcattacaggcaagcatgaaatgtaaagtatttatttaaataaaaagaaaacctctaaattggtaattgaattacctccctgtagctttatagtttgtgacatttcttgaccttgctagttctttcattagatctgcgcaagatctagtcatctggttaaggattttaagcagatgcaactataaacccaagaaactgtattactattactgttggtcatactaaacctgtctatttcctgaagtatatgacccacaaggatgtggaataactaggagaaactgtttttgtacactgtacatccttagtatttttacacgtatatgatagggatgaacatgattttccttcgtacagacagcttaaataaagcactatgtcaatctgcta

SEQ ID NO: 198780 - DNA, 1688 bp, Homo sapiens; identical to SEQ ID NO: 198775
  Payload ID: 19219
  Gene Name: v-akt murine thymoma viral oncogene homolog 3
  Uniprot ID: Q9Y243
  ENST ID: ENST00000613395
  CDS Start-End: 67-1464

SEQ ID NO: 198781 - DNA, 1575 bp, Homo sapiens; identical to SEQ ID NO: 198777
  Payload ID: 19219
  Gene Name: v-akt murine thymoma viral oncogene homolog 3
  Uniprot ID: Q9Y243
  ENST ID: ENST00000619536
  CDS Start-End: 154-1551

SEQ ID NO: 198782 - DNA, 560 bp, Homo sapiens; identical to SEQ ID NO: 198778
  Payload ID: 19219
  Gene Name: v-akt murine thymoma viral oncogene homolog 3
  ENST ID: ENST00000629115
  CDS Start-End: 144-560

SEQ ID NO: 198783 - DNA, 4370 bp, Homo sapiens
  Payload ID: 19220
  Gene Name: valosin containing protein
  Uniprot ID: P55072
  ENST ID: ENST00000358901
  CDS Start-End: 897-3317
taatgacgggaggaagaaaggcacaagcgctgagaaactgcaaaggctgtgggattggggttaccagagggtgcagtgacaatggggtaggagtggggtgctagtcagaaagttcagagtaggggtggttggaggcagcgttgagaaggagcaagaagtgtcagggtggtgatggcgtcttagaagatctccaggttttgggagaagatgggtgtatgggttaccacaataggactagactaatacaagggttcagtctattgtgccacgttcttccaggaggataaactccggagccaatgaactggagccaagtgggagagtccgcctctaagggattaaagggtctcctttcactaatcgatctcgccctattcctttcgttgattggctgagaattccaatccgtcgaggaagcgtagcgttgcggccaattgacgtggcgttactaggcgtgtcgcatcactgaggcgggagccaggccgcaagcgaatttcctgattggctgtgatctgcgggttgctggggagaggcgcggagaggcgggcgagagtccgcagggcaggcgctgattggctgaggtgggagcagcttcccttccgatgattcggctcttctcggctcagtctcagcgaagcgtctgcgaccgtcgtttgagtcgtcgctgccgctgccgctgccactgccactgccacctcgcggatcaggagccagcgttgttcgcccgacgcctcgctgccggtgggaggaagcgagagggaagccgcttgcgggtttgtcgccgctgctcgcccaccgcctggaagagccgagccccggcccagtcggtcgcttgccaccgctcgtagccgttacccgcgggccgccacagccgccggccgggagaggcgcgcgccatggcttctggagccgattcaaaaggtgatgacctatcaacagccattctcaaacagaagaaccgtcccaatcggttaattgttgatgaagccatcaatgaggacaacagtgtggtgtccttgtcccagcccaagatggatgaattgcagttgttccgaggtgacacagtgttgctgaaaggaaagaagagacgagaagctgtttgcatcgtcctttctgatgatacttgttctgatgagaagattcggatgaatagagttgttcggaataaccttcgtgtacgcctaggggatgtcatcagcatccagccatgccctgatgtgaagtacggcaaacgtatccatgtgctgcccattgatgacacagtggaaggcattactggtaatctcttcgaggtataccttaagccgtacttcctggaagcgtatcgacccatccggaaaggagacatttttcttgtccgtggtgggatgcgtgctgtggagttcaaagtggtggaaacagatcctagcccttattgcattgttgctccagacacagtgatccactgcgaaggggagcctatcaaacgagaggatgaggaagagtccttgaatgaagtagggtatgatgacattggtggctgcaggaagcagctagctcagataaaggagatggtggaactgcccctgagacatcctgccctctttaaggcaattggtgtgaagcctcctagaggaatcctgctttacggacctcctggaacaggaaagaccctgattgctcgagctgtagcaaatgagactggagccttcttcttcttgatcaatggtcctgagatcatgagcaaattggctggtgagtctgagagcaaccttcgtaaagcctttgaggaggctgagaagaatgctcctgccatcatcttcattgatgagctagatgccatcgctcccaaaagagagaaaactcatggcgaggtggagcggcgcattgtatcacagttgttgaccctcatggatggcctaaagcagagggcacatgtgattgttatggcagcaaccaacagacccaacagcattgacccagctctacggcgatttggtcgctttgacagggaggtagatattggaattcctgatgctacaggacgcttagagattcttcagatccataccaagaacatgaagctggcagatgatgtggacctggaacaggtagccaatgagactcacgggcatgtgggtgctgacttagcagccctgtgctcagaggctgctctgcaagccatccgcaagaagatggatctcattgacctagaggatgagaccattgatgccgaggtcatgaactctctagcagttactatggatgacttccggtgggccttgagccagagtaacccatcagcactgcgggaaaccgtggtagaggtgccacaggtaacctgggaagacatcgggggcctagaggatgtcaaacgtgagctacaggagctggtccagtatcctgtggagcacccagacaaattcctgaagtttggcatgacaccttccaagggagttctgttctatggacctcctggctgtgggaaaactttgttggccaaagccattgctaatgaatgccaggccaacttcatctccatcaagggtcctgagctgctcaccatgtggtttggggagtctgaggccaatgtcagagaaatctttgacaaggcccgccaagctgccccctgtgtgctattctttgatgagctggattcgattgccaaggctcgtggaggtaacattggagatggtggtggggctgctgaccgagtcatcaaccagatcctgacagaaatggatggcatgtccacaaaaaaaaatgtgttcatcattggcgctaccaaccggcctgacatcattgatcctgccatcctcagacctggccgtcttgatcagctcatctacatcccacttcctgatgagaagtcccgtgttgccatcctcaaggctaacctgcgcaagtccccagttgccaaggatgtggacttggagttcctggctaaaatgactaatggcttctctggagctgacctgacagagatttgccagcgtgcttgcaagctggccatccgtgaatccatcgagagtgagattaggcgagaacgagagaggcagacaaacccatcagccatggaggtagaagaggatgatccagtgcctgagatccgtcgagatcactttgaagaagccatgcgctttgcgcgccgttctgtcagtgacaatgacattcggaagtatgagatgtttgcccagacccttcagcagagtcggggctttggcagcttcagattcccttcagggaaccagggtggagctggccccagtcagggcagtggaggcggcacaggtggcagtgtatacacagaagacaatgatgatgacctgtatggctaagtggtggtggccagcgtgcagtgagctggcctgcctggaccttgttccctgggggtgggggcgcttgcccaggagagggaccaggggtgcgcccacagcctgctccattctccagtctgaacagttcagctacagtctgactctggacagggggtttctgttgcaaaaatacaaaacaaaagcgataaaataaaagcgattttcatttggtaggcggagagtgaattaccaacagggaattgggccttgggcctatgccatttctgttgtagtttggggcagtgcaggggacctgtgtggggtgtgaaccaaggcactactgccacctgccacagtaaagcatctgcacttgactcaatgctgcccgagccctcccttccccctatccaacctgggtaggtgggtaggggccacagttgctggatgtttatatagagagtaggttgatttattttacatgcttttgagttaatgttggaaaactaatcacaagcagtttctaaaccaaaaaatgacatgttgtaaaaggacaataaacgttgggtcaaaatggagcctgagtcctgggccctgtgcctgcttcttttcctgggaacagccttgggctacccaccactcccaaggcattcttccaaatgtgaaatcctggaagtaagattgcaccttcttcctctcctgatcaacatcggtatgatgtctcctgttgcctcaccctttgtctgcagtatcactggataggactggtggaaagggagcagcctgacagagctccaaatgtggagaatatggcatccctccacctatatttgatgtggacggtaaggctaggcctgcaggatcccttatcctgaccaaagactgtgttggggtgccatttgaaaatcgcagggttgcaaaagaatacaatcttacttgcaggtggatattctctatactctcttttaatgcatctaaaaatcccaaacatcccctggttggtgatcacttacagttgtgtccacctttattttatgtactttgattaaaaaaaaaaaactttttgttaatataaaa

SEQ ID NO: 198784 - DNA, 950 bp, Homo sapiens
  Payload ID: 19220
  Gene Name: valosin containing protein
  ENST ID: ENST00000448530
  CDS Start-End: 470-950
tcagtctcagcgaagcgtctgcgaccgtcgtttgagtcgtcgctgccgctgccgctgccactgccactgccacctcgcggatcaggagccagcgttgttcgcccgacgcctcgctgccggtgggaggaagcgagagggaagccgcttgcgggtttgtcgccgctgctcgcccaccgcctggaagagccgagccccggcccagtcggtcgcttgccaccgctcgtagccgttacccgcgggccgccacagccgccggccgggagaggcgcgcgccatggcttctggagccgagtgagtgtgcgcgcgccgttcgcttgctgcggcggcgcgcaccgggaccagccgcgcaggttcaaaaggtgatgacctatcaacagccattctcaaacagaagaaccgtcccaatcggttaattgttgatgaagccatcaatgaggacaacagtgtggtgtccttgtcccagcccaagatggatgaattgcagttgttccgaggtgacacagtgttgctgaaaggaaagaagagacgagaagctgtttgcatcgtcctttctgatgatacttgttctgatgagaagattcggatgaatagagttgttcggaataaccttcgtgtacgcctaggggatgtcatcagcatccagccatgccctgatgtgaagtacggcaaacgtatccatgtgctgcccattgatgacacagtggaaggcattactggtaatctcttcgaggtataccttaagccgtacttcctggaagcgtatcgacccatccggaaaggagacatttttcttgtccgtggtgggatgcgtgctgtggagttcaaagtggtggaaacagatcctagcccttattgcattgttgctccagacacagtgatccactgcgaaggggagcctatcaaacgagaggatgaggaagagtccttgaatgaagtagggtatgatgaca

SEQ ID NO: 198785 - DNA, 722 bp, Homo sapiens
  Payload ID: 19220
  Gene Name: valosin containing protein
  ENST ID: ENST00000417448
  CDS Start-End: 377-722
actccgccggcgcggcgccccggggctttggggcgccagtctgccgtccggcctaccacccgccgaaagcctttggtccccggagagagcaggccccgcgagcccgaggccccagccgggcccggtgggcgtggactttgcgccatgtgaaggcctcaggagctctgccaccgaggcggagcccggggtcggggaaggcccgccgagctcagggaagctcacagccgcctttttggagccgggtcggcggggccggagttcaaaaggtgatgacctatcaacagccattctcaaacagaagaaccgtcccaatcggttaattgttgatgaagccatcaatgaggacaacagtgtggtgtccttgtcccagcccaagatggatgaattgcagttgttccgaggtgacacagtgttgctgaaaggaaagaagagacgagaagctgtttgcatcgtcctttctgatgatacttgttctgatgagaagattcggatgaatagagttgttcggaataaccttcgtgtacgcctaggggatgtcatcagcatccagccatgccctgatgtgaagtacggcaaacgtatccatgtgctgcccattgatgacacagtggaaggcattactggtaatctcttcgaggtataccttaagccgtacttcctggaagcgtatcgacccatccggaaaggagacatttttcttgtccgtggtgggatgcgtgctg

SEQ ID NO: 198786 - DNA, 9942 bp, Homo sapiens
  Payload ID: 19221
  Gene Name: valosin containing protein (p97)/p47 complex interacting protein 1
  Uniprot ID: Q96JH7
  ENST ID: ENST00000310421
  CDS Start-End: 260-3928
gagagcgagagtgagtgagtgtgagtgcggggtggggtggtggccgttacgttcggggcaacggctacggcagtggagaagtaagaagagaaacaacgtccggcgcttccgccttcgcttaggaggaggaagagctggtagggaaaggaaagtgcttcgccctgggcctggactggaccgagtcgggttggtgggggtctgggctatgagcttttgagggtcgcctgggacgcggagcgagacacgagagccaggagctatgtctcagccgccgccgccgccgcctccgttgccgccgccacctcctccccctgaggctccacagactccgtcgtccttggcgtcggcggctgcttcgggggggcttttgaagcggagagaccggagaatcctttccgggagctgcccggatccgaagtgtcaggcgcgtctatttttcccggcctccggttctgtcagcatcgagtgtaccgagtgcggccagcggcacgagcagcaacagctgctgggggttgaggaggtgaccgacccggacgtagtgctacacaacctgctgcggaacgcgctgctcggggttacgggggcacccaagaagaacacggaactggtaaaggtgatgggcctttccaactatcactgcaaattgttgtcgcccatattagctcgctatggaatggacaaacagacaggccgggccaagcttctccgggacatgaaccagggcgaactgttcgattgcgccttactgggtgaccgcgccttcctcatagaaccagagcatgttaacactgtgggctatggcaaggaccgctccggaagcctcctgtatttgcatgacactctggaggacattaagcgggccaataaaagccaggaatgtctcattccagtgcatgtggacggggatggacactgcttggtgcatgctgtgtctcgggctctagtaggccgagagctcttctggcatgccttaagagagaatcttaaacagcactttcagcagcacctggcccgatatcaagctctgttccatgacttcattgatgctgctgagtgggaggacattatcaatgagtgtgaccctctgtttgtaccacctgagggtgttcccttgggcctgaggaatatccacatatttggtcttgccaatgtgctacatcgtcctattattctgttagattccctcagtggcatgagaagctctggtgattattcagccacctttctacctgggctcatccctgcagagaagtgcactgggaaagatggtcatttgaacaaaccaatctgtattgcatggagcagctccggtagaaaccattatatccccttggtaggcataaaaggggctgctttgcccaaactgcctatgaatttgcttcctaaagcatggggtgtgcctcaggaccttattaaaaagtacataaaacttgaagaggatggtggttgtgttattggaggtgacagaagtttgcaagataaatacttacttaggcttgttgctgctatggaagaagtctttatggacaaacatggtatccatcctagtttggttgctgatgtccatcagtatttctacagaaggactggagtgataggagttcagcctgaggaagtcacagcagctgctaaaaaagcagtaatggataatcgccttcacaaatgtttgctctgtggtgccctttctgaacttcatgttcctccagagtggttggctcctggagggaaattgtataacctggcaaaaagtactcatggacagctgaggactgacaaaaattacagctttcccttgaacaatttggtttgctcatatgattcagtgaaagatgttctggtaccagactatggaatgagtaacctaacagcttgtaattggtgccatggcacatctgtgcgaaaggtcagaggagatgggtctattgtgtatttggatggagacagaactaattctaggtccactggtggcaaatgtggttgtggattcaaacacttttgggatggtaaggagtatgacaatctaccagaagctttccctattactttagaatggggtggaagagtggtcagagaaacagtatattggttccagtatgaaagtgattcatctttgaatagtaatgtttacgatgttgcaatgaaacttgttaccaagcactttccaggtgaatttgggagtgaaatcctagttcagaaagttgtccacactatattgcatcagactgccaaaaagaatcccgatgattatactcctgtaaatatagatggtgctcacgcccaaagagttggagatgttcaaggacaagaatcagagtctcagctcccaactaaaattattcttactggacagaaaacaaaaactttgcacaaggaggagttaaacatgagtaaaactgaaagaactattcaacagaatattacggaacaggcttctgtaatgcagaaacggaaaacagagaagttaaaacaagaacaaaaagggcaacccaggactgtttctcccagtaccattcgtgatggtccatcctctgcacctgctacacctaccaaggctccctattcaccgacaacttctaaggagaagaagatccgaatcacaactaatgatggacgacagtccatggttacccttaagtcttcaacaaccttttttgaacttcaggaaagtatagccagagaattcaacattcctccatatttacagtgtattcgatacgggtttcctcctaaagagttaatgccaccacaggcaggaatggaaaaggaaccagttcctttacagcatggcgacagaattacaatagaaattctaaaaagtaaagctgaaggtggtcagtctgctgcagcacactcagcccacactgtgaaacaagaagatattgctgttactggtaaactgtcatctaaggaacttcaggagcaagctgaaaaagaaatgtactccttgtgtcttttagcaacattaatgggagaagatgtatggtcttatgcaaagggacttcctcacatgtttcagcagggtggtgtattctacagtattatgaagaaaaccatgggtatggctgatggcaagcattgtacttttccacatctgcctggcaaaacctttgtctataatgcttctgaagatagactggaattgtgtgtggatgctgcaggacatttccccattggtcctgatgttgaagatttagttaaagaggctgtaagtcaggttcgagcagaggctactacaagaagtagggaatcaagtccctcacatgggctattaaaactaggtagtggtggagtagtgaaaaagaaatctgagcaacttcataacgtaactgcctttcagggaaaagggcattctttaggaactgcatctggtaacccacaccttgatccaagagctagggaaacttcagttgtaagaaagcataatacagggacagactttagtaatagttccactaaaacagagccttctgtattcacagcttcttctagtaatagtgagcttattcgaatagctcctggagtagtaacaatgagagacggcaggcagcttgatcctgatttggttgaggcccagcgaaaaaaattgcaggaaatggtttcttctattcaggcttcaatggacaggcaccttcgggatcaaagtacagagcagtcaccatctgatcttcctcaaaggaaaacagaagttgtgagttcttctgcaaagtctgggagtcttcagactggtttgcctgaatcttttcctttaactggtggtactgaaaatttgaatacagaaacaactgatggctgtgtagcagatgcactgggagcagcctttgccacaaggtcaaaagcacaaaggggaaattccgtggaggagcttgaagagatggatagtcaagatgctgagatgactaacacaactgagccaatggatcactcttgatttaattagaggctaataaaggcagaatgtttattgtgaatatgtaatatttgttggctgggccacgtaacttgattagtcattaaaaatcttgtacgtatataattcaaagattatatcttgttattcagtgcatgatagcaagtgtgtgattggccatagcttttaatatactgctgcccaggctggctctgaatttctataaattagctgttagatctgctgagatgactttcttccatatatgtggttcattggaagttctttgtaattttaattccatgaaagtcttaatgtttccaacatgaaaattctcttacttaaatacgtttgatttctgaaaagcctacaaatggaggggaaatgagattgtgctaatgttgatgtcatcaaggtaaccatctcatatactagtgtcaaaaggtttatgtaaacttgaattttatctgaactaaattgtatcttaaaattcatacaattatttattagacagtggaatgcaaatgtttctatgaacgtaaacacattcatagagatttcttggcgaaaatatcttgagaatagaatgtaacgatataacattttgctgatttgtgcaagattggggaaaaatttcttctagattgatgaggtcaatgtgattcagttgtgttgctgtctgagccacagccaattgtgtgtgctctattaatatgttaccattatttttgattcctggcttggtcaagaacaacctgatttttttttttttaatcttgcagaaaagttgattgcaaagtgtggtagaaaaagaaataatggtagcagtagagaatttataaataagagtttatctttatgaatgagttaattgttctacaattttgatcagtggtatttaagcctgtatatgctaagtgtatttatgcccctttgagccaaaatttttttttttttttcagaatccataagagtttatttgttggcttcacttgggtttagatgcaaattttactgcatcacaccctgatcagctgggtatttgcttagtgtattcatcaaatcttcagtgccagtttccttgagaagcagctttcatgcttattccttaaaaacaacagaagagtgtttatcctgagattggtattgcactattttattttattctgcaaatctgtatcctgaagtgtacatttcaacccatattcttctctgttcactgaaattaagttgaatttgaatggctgaaagacaaaatatatgttaatacaatctcttacctagagcattcaaagcctggctgtctctgtttgcacatgtaacagatgcagaactgtgtttgtaattctaagaaaatgtatgtcagaaagtattttatcagatgtttaaaaatctctgcctgttgattcataagggatatagacagtactttaacttgtgtttccagataaggcagattttggtcatctttctgtgaaagtatctctaactgaatccacttcttaaacaaactactctattttaaataaggaaagaatggagaatctagacattttacaggtgtatctgagcaaaatatatatttgggttagtttttatcacattatcacgtttgtctttatattttatcttcatcctaaattttctccctatcaaaacagcaggaaatttttaaacttttatattgtacactatttttgcataaaataagagctgtagctaccaaatactatttactacttagtaaaggtggcttctgtgtattaaactacgaattacaaatatcacttcactaaccactataattatttttggctttttcagccactggaactttttttggggggatttaaatacaggaaaactgtttaagcaaaaaatgcactgctttcatgtaaaatgatataatcttctttaacaaatattttcttcattgataactgacagatatctcatagcattaacataaaataccagaaacaaactttatctccctattcttacatttagtgcaaattggaatgcgtatgtgaatgttagaagatggacttaatctctgacaactttattaatttctctagctacagcaatgctatttaaaagccagttaggtatgaatagtacagtaatagtttgggttctcccttgataaatgaataaaaggctcaattctgataagtgatcaaatttcttgaaattctttcaaatcagctgaaaatttggttggggtgaattgatggtttttgagaagtaggccaggtatcctcacaaagaagttttagaatagggtttcttttaagtttttaaatatcatcctttgtctttccatatggttttcataaccaaatacatgactatagcatggttatttttctagtactgccatttgtgatatagccacatcttggcgtgcaagctagacatctcaggtaaatttgtttttttttttttttttagccctagaggtaacattataactaaaatgcattcctgcaattctgtttgcagtgcttcactaaacattgaaataaagttgtaaattttttcttcagtaatccattttatagttaatcataccaaatttaagttgatgacctaaagtccaggtagtgttgaagatagtatgtatctagaatactggtaatgagaaattgttgtaaattgaagaaaacaagatgctgccatatattaagatagaatataattaactccatgagaatggttactcaggaactagttaaagagcaaacccatttctcccgcttcactctgtttcagatatttttattggaaaatgttagggtagaggcctgagaaagttagcaaatgctattgactgatactggctctgtgtcttccagtgatttttagtttggtttttacagtcaagcctactgcttgcaattaagatatcaatctgaaatgcatctgtaattcctggccacaggtccttattgccattatttttaagtatcttcattggagatgaacactgacttttgcatatggtctcttacctcagggaagatcacttgctagcaactcatactactaatgacaggtttttgagaattgtactgacatcacatgttagctactaaatgcaaaatgtataaaagtattgttttatgtagttacctaccaatactatctgctactgaataactctctaaatatgtagacctcactaataactaacctttaggtaaaaaatttacttctgtcattaattacacttcaactggtcaatatagtggcagcataaagtgtttatttcagaatatcaatacagttttgtcttcatttttcaacagtaatttcaattggttcatacttaaaatactacacagattttgagttttatggttctcaaagcaaggtttccatcttaagatttttataaacacaaagcctttgcaaaattggattaaattccacctatcttaatgtgaattaaaaaccaccatttataataataatagcgccatattctaagttgagtaaatgcatcctaccattcaaggttatcatataatttaacaaaattgtacaaccttaaggctcttcacagtataaattaatttttcaaaccagagctgttcacatgaaaatattccttagtagaatgtatatttaagaaataaaacaacaaaggggaactatatcacccatgtaagttatagagttaattacaagttctaccattcttgataattctttgagatgctaagtgtttcagttcatatttaatgatacttaaatcgtgggaattttaatgtttgttccaaaatagcagaaattgtaaaaattatgaattattggagaaaatgccattacttgtatatctgacatttaattttttaattatggagactacatgcttttgtagtataatattaatgattattctcttgtaaaagaaaaggaaaaattagtaaagaaaaaagttttagttgatgttacctgcttgtgagtatcaattacttagtttttaaatttttaaggtattgcctacttttctttagaatgcagaaatctcgtcctgagcccttattatgcctgtggtagagcaatgcaagactgaaaaggttgccagtattttcaggcttatttgactaagaattagtgccaagaactggaaagtctactttttggagggaaatgatacttagaatttgtaaacataagcagtaatagtgtaaatatttagaaaaatagcaagtgctttaactgctcaataaaatagtatagatgttatttcacccttaaggcactggctgttgcccattattttccgatttcgtgattactgtatatattacatttgagtaatgaataattggtaatagtgtattatagtgttctacagcacaccttactgtacagtatttgaagttttcttttatatcaataataaaactataagttaatactgattttcccctgaaattctccacattagcttttaaaggtaattttatgttctttagtttcctggaattataatgcatgaacatatagttcagttttataaagaaattcttaaataataaagttttcttgttgaacttaagcgggttatcgtacaggaatagtgatttttccccttaatgtagatttcattgctagatgaaatggacccagtgaaaaaagagtgcgcaatttaaaaaaaaaccaaaacggtctcactctgctgcccatgctggattgccgtggcatgatcagggctcactgcagcctcaacctcctgggctcaagtgatcctcccacctcagcctcctgaatagctgggactacaggcatgtgccaccacacctggctaatttttgtattttttgtagagatagggttttgccatgttgcccaggccggtcttgaacccctgagctcaagtgatctgccctcctctgcctctttaagtgctgggattacaggcgtgagccaccgcaccctgccagcaaaatttctttagacatattacataattgggccataatgcttactgaatatttaaaaatgaaggcaaattctaacagagaacttgattttgtggtggtttaaaaaaatactggttagtgataaggaaatgaaaggaaatacagataatagtactaaataacgtttgtgtagcttagcagtcaacacgtttacttccaagttttattgtatatgcttaatatacattttattagatcatttaactcaataatttagagtatagccttagacaccagactgcctaggtctgactcctggtacgctgctttctgtgacctctctgtgcattcctctctgcgaggatgatgatcacatctgctcccagggtggctgtcttaaatgagttaacacgtatctgatgattagaagagtgcctgacacatagtaaacactcaaatatttgctatgttatatgttaatgtaatgtggtagagttcagttgccattaagtgggataaatcctcacagggcacacattatttaaataatttgttacattaaaacttattttacttgtacataattgactaaaaaatggggggttgtacattcaaacatttatgaccatgtgcaacactgagaatctcaaaccgacagtgtgctctgtgacccaaggcaagtcttggagcctttcaaggcctcaatttcttctgtaaccttgtggtttcacaattgtcaaccttttgttctgccgaccattgtcgtcatagtcttacttgcagagggcatagtgctgatgggacaagtgacatgggtatgagccccatgtaaactaaaacataattacctttcctttaggtgttggctacagttatcccaaacttggacttgaggtcttgtatatgcatgccattggtcacataccatcagaatagaattctcaaaaactctttagtaaataagataaacatcctacttataacagctcattatggattttatttttattgtctggctctttcagaccccagcaactgcaattctgacttaataatcaattgtttctaatcattaaaaatgtatatagaaaaactgaa

SEQ ID NO: 198787 - DNA, 795 bp, Homo sapiens
  Payload ID: 19222
  Gene Name: valosin containing protein lysine (K) methyltransferase
  Uniprot ID: Q9H867
  ENST ID: ENST00000395859
  CDS Start-End: 49-633
gcgttgatgtgacgtccctgcgcgcgccgctttctgttgccgggcgcaatggcggatacgctggagtcctcgctggaggacccactgcggagctttgtgcgagttttggagaagcgggatggtacagtgctacgactacagcagtatagctccggtggcgtgggttgcgttgtgtgggacgctgccattgtcctttctaaatacctggaaacgcccgagttttctggcgacggggcccacgcgctgagccggcggtcggtgctggagctgggttcgggcaccggggccgtggggctcatggctgctaccctcggggctgatgttgtagtcaccgatcttgaggaattgcaagacttgctgaagatgaatattaatatgaacaagcatcttgtcactggttctgttcaagccaaggtactgaaatggggggaagaaatagaaggctttccttctccacccgacttcatactgatggccgactgcatatactatgaagagtctttggagccattgctgaaaactctaaaagatatcagcggatttgaaacttgtattatatgttgttatgaacaacgaacaatggggaaaaatccagaaattgagaaaaaatattttgagaaatttccatcgtgaagcctttaatcatcttacccaaggctctaacaacctgggtaaactaaagatgtgaatagagcatgtgaatacagcatgggaagattgtgttcacagatttttttttccggcacgtccttagagatccgatgtatagatgatgaccaccaggggctgtctgca

SEQ ID NO: 198788 - DNA, 1761 bp, Homo sapiens
  Payload ID: 19222
  Gene Name: valosin containing protein lysine (K) methyltransferase
  Uniprot ID: Q9H867
  ENST ID: ENST00000395860
  CDS Start-End: 6-695
gcgcaatggcggatacgctggagtcctcgctggaggacccactgcggagctttgtgcgagttttggagaagcgggatggtacagtgctacgactacagcagtatagctccggtggcgtgggttgcgttgtgtgggacgctgccattgtcctttctaaatacctggaaacgcccgagttttctggcgacggggcccacgcgctgagccggcggtcggtgctggagctgggttcgggcaccggggccgtggggctcatggctgctaccctcggggctgatgttgtagtcaccgatcttgaggaattgcaagacttgctgaagatgaatattaatatgaacaagcatcttgtcactggttctgttcaagccaaggtactgaaatggggggaagaaatagaaggctttccttctccacccgacttcatactgatggccgactgcatatactatgaagagtctttggagccattgctgaaaactctaaaagatatcagcggatttgaaacttgtattatatgttgttatgaacaacgaacaatggggaaaaatccagaaattgagaaaaaatattttgagctccttcagctagattttgactttgaaaaaattcctttggaaaaacatgatgaagagtatcgaagtgaagatattcatattatatacatcagaaagaaaaaatcgaaatttccatcgtgaagcctttaatcatcttacccaaggctctaacaacctgggtaaactaaagatgtgaatagagcatgtgaatacagcatgggaagattgtgttcacagatttttttttccggcacgtccttagagatccgatgtatagatgatgaccaccaggggctgtctgcaatacgaaaaattcctgcttgcctgcctgcctgccaatggccctgaatccagcttaggttacttagttcagcatcaagttcttcttaaatgttgggaatcagttattcaaataaaaattggtattgaggcgaggctgaaatctgccaaaaacagccaacatgatttgactggaccttttacaggaagctagagataaatttctgaagagaactatctgctattatataataatgttttaaattcaaactagtaaattttagtttgtcttcagagtttaaaaggttttcattttgtacataattatacaatatttatcatttgtattttccacttcatttcttttaaaatatctttaatactgaaatgttcttttaattttaaaaagaactgagatattgtcttgtatacttatattagccaaagttttcttttcctccaccatacatatctatgtgatttaatcagtaaattgtactgtaatgagttgctaagaagacaaatcagaagattggaggaacaaaagatatctttacagatttttcatttgagcatggagtgagaatagaaagaccagtttcaggcttatgcacttacgtggctcatgcactttatgtatatgttccaggaaaatctggcttaaaaatactggtattgtttacatgaagcagtgaaaggtttttgaataactacaaatgtagttctatatgtatataccaaatgaatttctgttctgtgtctctctgttttatgttatgaagccattcgctcatatacaataatctgtcaaggactttaatcatacttgttccaaagagtagtaaccggatggaattctggtatttataggcattggtgctagatggtacattttatgtgttaaaataaacattgtttttgagacctt

SEQ ID NO: 198789 - DNA, 1793 bp, Homo sapiens
  Payload ID: 19222
  Gene Name: valosin containing protein lysine (K) methyltransferase
  Uniprot ID: Q9H867
  ENST ID: ENST00000491402
  CDS Start-End: 49-483
gcgttgatgtgacgtccctgcgcgcgccgctttctgttgccgggcgcaatggcggatacgctggagtcctcgctggaggacccactgcggagctttgtgcgagttttggagaagcgggatggtacagtgctacgactacagcagtatagctccggtggcgtgggttgcgttgtgtgggacgctgccattgtcctttctaaatacctggaaacgcccgagttttctggcgacggggcccacgcgctgagccggcggtcggtgctggagctgggttcgggcaccggggccgtggggctcatggctgctaccctcggggctgatgttgtagtcaccgatcttgaggaattgcaagacttgctgaagatgaatattaatatgaacaagcatcttgtcactggttctgttcaagccaaggggggaagaaatagaaggctttccttctccacccgacttcatactgatggccgactgcatatactatgaagagtctttggagccattgctgaaaactctaaaagatatcagcggatttgaaacttgtattatatgttgttatgaacaacgaacaatggggaaaaatccagaaattgagaaaaaatattttgagctccttcagctagattttgactttgaaaaaattcctttggaaaaacatgatgaagagtatcgaagtgaagatattcatattatatacatcagaaagaaaaaatcgaaatttccatcgtgaagcctttaatcatcttacccaaggctctaacaacctgggtaaactaaagatgtgaatagagcatgtgaatacagcatgggaagattgtgttcacagatttttttttccggcacgtccttagagatccgatgtatagatgatgaccaccaggggctgtctgcaatacgaaaaattcctgcttgcctgcctgcctgccaatggccctgaatccagcttaggttacttagttcagcatcaagttcttcttaaatgttgggaatcagttattcaaataaaaattggtattgaggcgaggctgaaatctgccaaaaacagccaacatgatttgactggaccttttacaggaagctagagataaatttctgaagagaactatctgctattatataataatgttttaaattcaaactagtaaattttagtttgtcttcagagtttaaaaggttttcattttgtacataattatacaatatttatcatttgtattttccacttcatttcttttaaaatatctttaatactgaaatgttcttttaattttaaaaagaactgagatattgtcttgtatacttatattagccaaagttttcttttcctccaccatacatatctatgtgatttaatcagtaaattgtactgtaatgagttgctaagaagacaaatcagaagattggaggaacaaaagatatctttacagatttttcatttgagcatggagtgagaatagaaagaccagtttcaggcttatgcacttacgtggctcatgcactttatgtatatgttccaggaaaatctggcttaaaaatactggtattgtttacatgaagcagtgaaaggtttttgaataactacaaatgtagttctatatgtatataccaaatgaatttctgttctgtgtctctctgttttatgttatgaagccattcgctcatatacaataatctgtcaaggactttaatcatacttgttccaaagagtagtaaccggatggaattctggtatttataggcattggtgctagatggtacattttatgtgttaaaataaacattgtttttgagacctt

SEQ ID NO: 198790 - DNA, 4312 bp, Homo sapiens
  Payload ID: 19223
  Gene Name: valyl-tRNA synthetase
  Uniprot ID: P26640
  ENST ID: ENST00000211402
  CDS Start-End: 442-4236
cacaaggtgcccgtggcggcgcctgacgggagcgtcgtgctcaggggtgtcctctcgtcctgcgtccgcgcccagcgccccgcgccccgcgctgttcctcgtgagaccggcgggcggcgagccgcgcggcccccggggcagtgtcggacacggcgggcgcgcactcgcaggcggggcacggccgcccccgccaggacccgcaggcccggaaacgctccctgtcacaaaggggggaacacgtgggcgccggctgccggggcggcgatcttagggaactagggtcacctggagagccgcccaccgtctctgcccgctcgactcctccgcccgggccgctcggccggtccagccgcggccggcgcctggctgtgaggtggattcccggcccagtctgaccatctccctccagtttttccacttcgttcggaccttctcataactatgtccaccctctacgtctcccctcacccagatgccttccccagcctccgagccctcatagccgctcgctatggggaggctggggagggtcccggatggggaggagcccacccccgcatctgtctccagccacccccgactagcaggactccctttcccccaccccgcctgccggccctggagcaggggcccggtgggctctgggtgtggggggccacggctgtggcccagctgctgtggccagcaggcctggggggcccagggggcagccgggcggctgtccttgtccaacagtgggtcagttacgccgacacggagttaataccagctgcctgtggagcaacgctgccggccctgggactccgaagctcggcccaggacccccaggctgtgctgggggccctgggcagggccctgagccccttggaggagtggcttcggctgcacacctacttggccggggaggcccccactctggctgacctggcggctgtcacagccttgctgctgcctttccgatacgtcctagacccacctgcccgccggatctggaataatgtgactcgctggtttgtcacgtgtgtccggcagccagaattccgagccgtgctaggagaagtggttctatactcaggagccaggcctctctctcatcagccaggccccgaggctcctgccctcccaaagacagctgctcagctcaagaaagaggcaaagaaacgggagaagctagagaaattccaacagaagcagaagatccaacagcagcagccacctccaggggagaagaaaccaaaaccagagaagagggagaaacgggatcctggggtcattacctatgacctcccaaccccacccggggaaaagaaagatgtcagtggccccatgcccgactcctacagccctcggtatgtggaggctgcctggtacccttggtgggagcagcagggcttcttcaagccagagtatgggcgtcctaatgtgtcagcagcaaatccccgaggtgtcttcatgatgtgcatcccaccccccaatgtgacaggctccctgcacctgggccatgcactcaccaacgccatccaggactccctgactcgatggcaccgcatgcgtggggagaccaccctgtggaaccctggctgtgaccatgcaggtattgccacccaggtggtggtggagaagaagctatggcgtgagcagggactgagccggcaccagctgggccgcgaggcctttctacaggaagtctggaagtggaaggaggagaaaggtgaccggatttaccaccagttgaagaagcttggcagctccttggactgggatcgagcctgtttcaccatggaccctaaactctcagcagctgtgacagaggcctttgtccggcttcacgaggaaggcatcatctatcgcagtacccgccttgttaactggtcctgcaccctcaactccgccatctctgacattgaggtggataagaaggagctgacaggtcgcaccctgctctccgtgcctggctacaaggagaaggtggagttcggggtcctcgtgtcctttgcctataaggtccaaggctcagatagcgacgaggaggtggtggtggcaacaactcggatcgagacaatgctgggagatgtggctgtagctgtgcaccccaaagataccagataccagcacctgaaggggaagaacgtgatccacccattcctgtctcggagccttcccattgtcttcgatgaatttgtggacatggactttggcacaggtgctgtgaagatcacccccgcacatgaccaaaatgactatgaagttgggcagcggcacgggctggaggccatcagcatcatggactcccggggggccctcatcaatgtgcctccgcctttcctgggcctgcccaggtttgaggccaggaaagcggtgctggtggcgctgaaggagcggggactgttccgtggcattgaggacaaccccatggtggtgccactttgcaaccggtcgaaggacgtggtagagcctctgctgcggccgcagtggtacgttcgctgcggggagatggcccaggctgccagcgccgctgtgactcggggtgacctccgcatcctgcctgaggcccatcagcgcacatggcatgcctggatggacaacatccgggagtggtgcatttccaggcagctgtggtggggccatcgcatcccagcctactttgtcactgtcagtgacccagcggtgccccctggggaggaccctgatgggcggtactgggtgagtggacgcaatgaggcggaggcccgggagaaggcagccaaggagttcggagtgtcccctgacaagatcagtctccagcaagatgaggatgtattggatacctggttctcctctggcctcttccccttatccattttgggctggcccaaccagtcagaagacctgagtgtgttctaccccgggacactgctggagaccggtcatgacatcctcttcttctgggtggcccggatggtcatgctgggcctgaagctcacgggcaggctgccctttagagaggtctacctccatgccatcgtgcgagatgctcacggccggaagatgagcaagtctctaggcaatgtcatcgatcccctggacgtcatctatggaatctccctgcagggcctccacaaccagctgctgaacagcaacctggatcccagcgaggtggagaaggccaaagaagggcagaaagctgacttcccagcggggattcctgaatgtggcaccgatgctctccggtttggattatgtgcctacatgtcccagggtcgtgacatcaacctggatgtgaaccggatactgggttaccgccacttctgcaacaagctctggaatgccaccaagtttgcccttcgtggccttgggaagggttttgtgccctcacccacctcccagcccggaggccatgagagcctggtggaccgctggatccgcagccgcctgacagaggctgtgaggctcagcaatcaaggcttccaggcctacgacttcccggccgtcaccactgcccagtacagcttctggctctatgagctctgtgatgtctacttggagtgcctgaaacctgtactgaatggggtggaccaggtggcagctgagtgtgcccgccagaccctgtacacttgcctggacgttggcctgcggctgctctcacccttcatgcccttcgtgacggaggagctgttccagaggctgccccggaggatgccgcaagctccccctagcctctgtgttaccccctacccggagccctcagagtgctcctggaaggaccccgaggcagaagccgcccttgagctggcgctaagcatcacgcgagccgtgcgctccctgcgggccgactacaacctcacccggatccggcctgactgtttcctggaagtggcggatgaggccacgggcgccctggcatcggcggtgtcgggctacgtgcaggccctggccagcgcaggtgtggtggctgttctggccctgggggctcccgccccccagggttgcgctgtggctctggcttctgatcgctgctccatccacctgcagcttcaggggctggtggaccctgcacgggagctgggcaagctgcaagccaagcgagttgaggcccagcggcaggcccagcgtctgcgggaacgccgtgctgcctcgggctatcctgtcaaggtgccgctcgaagtccaggaggcagatgaagccaagctccaacagacagaagcagagctcaggaaggtggatgaggccatcgccctattccagaagatgctgtgatccaccacccagcttcacccctcacccccagcggctcaccatggggatggcagcaataaaatattttcccacaaaa

SEQ ID NO: 198791 - DNA, 4312 bp, Homo sapiens; identical to SEQ ID NO: 198790
  Payload ID: 19223
  Gene Name: valyl-tRNA synthetase
  Uniprot ID: P26640
  ENST ID: ENST00000375663
  CDS Start-End: 442-4236

SEQ ID NO: 198792 - DNA, 284 bp, Homo sapiens
  Payload ID: 19223
  Gene Name: valyl-tRNA synthetase
  ENST ID: ENST00000455956
  CDS Start-End: 1-284
ggccagcaggcctggggggcccagggggcagccgggcggctgtccttgtccaacagtgggtcagttacgccgacacggagttaataccagctgcctgtggagcaacgctgccggccctgggactccgaagctcggcccaggacccccaggctgtgctgggggccctgggcagggccctgagccccttggaggagtggcttcggctgcacacctacttggccggggaggcccccactctggctgacctggcggctgtcacagccttgctgctgcctttccgatac

SEQ ID NO: 198793 - DNA, 863 bp, Homo sapiens
  Payload ID: 19223
  Gene Name: valyl-tRNA synthetase
  ENST ID: ENST00000445152
  CDS Start-End: 1-863
gaaggagcggggactgttccgtggcattgaggacaaccccatggtggtgccactttgcaaccggtcgaaggacgtggtagagcctctgctgcggccgcagtgggagtggtgcatttccaggcagctgtggtggggccatcgcatcccagcctactttgtcactgtcagtgacccagcggtgccccctggggaggaccctgatgggcggtactgggtgagtggacgcaatgaggcggaggcccgggagaaggcagccaaggagttcggagtgtcccctgacaagatcagtctccagcaagatgaggatgtattggatacctggttctcctctggcctcttccccttatccattttgggctggcccaaccagtcagaagacctgagtgtgttctaccccgggacactgctggagaccggtcatgacatcctcttcttctgggtggcccggatggtcatgctgggcctgaagctcacgggcaggctgccctttagagaggtctacctccatgccatcgtgcgagatgctcacggccggaagatgagcaagtctctaggcaatgtcatcgatcccctggacgtcatctatggaatctccctgcagggcctccacaaccagctgctgaacagcaacctggatcccagcgaggtggagaaggccaaagaagggcagaaagctgacttcccagcggggattcctgaatgtggcaccgatgctctccggtttggattatgtgcctacatgtcccagggtcgtgacatcaacctggatgtgaaccggatactgggttaccgccacttctgcaacaagctctggaatgccaccaagtttgcccttcgtggccttgggaagggttttgtgccct

SEQ ID NO: 198794 - DNA, 3627 bp, Homo sapiens
  Payload ID: 19223
  Gene Name: valyl-tRNA synthetase
  ENST ID: ENST00000425144
  CDS Start-End: 1-3551
caggcctggggggcccagggggcagccgggcggctgtccttgtccaacagtgggtcagttacgccgacacggagttaataccagctgcctgtggagcaacgctgccggccctgggactccgaagctcggcccaggacccccaggctgtgctgggggccctgggcagggccctgagccccttggaggagtggcttcggctgcacacctacttggccggggaggcccccactctggctgacctggcggctgtcacagccttgctgctgcctttccgatacgtcctagacccacctgcccgccggatctggaataatgtgactcgctggtttgtcacgtgtgtccggcagccagaattccgagccgtgctaggagaagtggttctatactcaggagccaggcctctctctcatcagccaggccccgaggctcctgccctcccaaagacagctgctcagctcaagaaagaggcaaagaaacgggagaagctagagaaattccaacagaagcagaagatccaacagcagcagccacctccaggggagaagaaaccaaaaccagagaagagggagaaacgggatcctggggtcattacctatgacctcccaaccccacccggggaaaagaaagatgtcagtggccccatgcccgactcctacagccctcggtatgtggaggctgcctggtacccttggtgggagcagcagggcttcttcaagccagagtatgggcgtcctaatgtgtcagcagcaaatccccgaggtgtcttcatgatgtgcatcccaccccccaatgtgacaggctccctgcacctgggccatgcactcaccaacgccatccaggactccctgactcgatggcaccgcatgcgtggggagaccaccctgtggaaccctggctgtgaccatgcaggtattgccacccaggtggtggtggagaagaagctatggcgtgagcagggactgagccggcaccagctgggccgcgaggcctttctacaggaagtctggaagtggaaggaggagaaaggtgaccggatttaccaccagttgaagaagcttggcagctccttggactgggatcgagcctgtttcaccatggaccctaaactctcagcagctgtgacagaggcctttgtccggcttcacgaggaaggcatcatctatcgcagtacccgccttgttaactggtcctgcaccctcaactccgccatctctgacattgaggtggataagaaggagctgacaggtcgcaccctgctctccgtgcctggctacaaggagaaggtggagttcggggtcctcgtgtcctttgcctataaggtccaaggctcagatagcgacgaggaggtggtggtggcaacaactcggatcgagacaatgctgggagatgtggctgtagctgtgcaccccaaagataccagataccagcacctgaaggggaagaacgtgatccacccattcctgtctcggagccttcccattgtcttcgatgaatttgtggacatggactttggcacaggtgctgtgaagatcacccccgcacatgaccaaaatgactatgaagttgggcagcggcacgggctggaggccatcagcatcatggactcccggggggccctcatcaatgtgcctccgcctttcctgggcctgcccaggtttgaggccaggaaagcggtgctggtggcgctgaaggagcggggactgttccgtggcattgaggacaaccccatggtggtgccactttgcaaccggtcgaaggacgtggtagagcctctgctgcggccgcagtggtacgttcgctgcggggagatggcccaggctgccagcgccgctgtgactcggggtgacctccgcatcctgcctgaggcccatcagcgcacatggcatgcctggatggacaacatccgggagtggtgcatttccaggcagctgtggtggggccatcgcatcccagcctactttgtcactgtcagtgacccagcggtgccccctggggaggaccctgatgggcggtactgggtgagtggacgcaatgaggcggaggcccgggagaaggcagccaaggagttcggagtgtcccctgacaagatcagtctccagcaagatgaggatgtattggatacctggttctcctctggcctcttccccttatccattttgggctggcccaaccagtcagaagacctgagtgtgttctaccccgggacactgctggagaccggtcatgacatcctcttcttctgggtggcccggatggtcatgctgggcctgaagctcacgggcaggctgccctttagagaggtctacctccatgccatcgtgcgagatgctcacggccggaagatgagcaagtctctaggcaatgtcatcgatcccctggacgtcatctatggaatctccctgcagggcctccacaaccagctgctgaacagcaacctggatcccagcgaggtggagaaggccaaagaagggcagaaagctgacttcccagcggggattcctgaatgtggcaccgatgctctccggtttggattatgtgcctacatgtcccagggtcgtgacatcaacctggatgtgaaccggatactgggttaccgccacttctgcaacaagctctggaatgccaccaagtttgcccttcgtggccttgggaagggttttgtgccctcacccacctcccagcccggaggccatgagagcctggtggaccgctggatccgcagccgcctgacagaggctgtgaggctcagcaatcaaggcttccaggcctacgacttcccggccgtcaccactgcccagtacagcttctggctctatgagctctgtgatgtctacttggagtgcctgaaacctgtactgaatggggtggaccaggtggcagctgagtgtgcccgccagaccctgtacacttgcctggacgttggcctgcggctgctctcacccttcatgcccttcgtgacggaggagctgttccagaggctgccccggaggatgccgcaagctccccctagcctctgtgttaccccctacccggagccctcagagtgctcctggaaggaccccgaggcagaagccgcccttgagctggcgctaagcatcacgcgagccgtgcgctccctgcgggccgactacaacctcacccggatccggcctgactgtttcctggaagtggcggatgaggccacgggcgccctggcatcggcggtgtcgggctacgtgcaggccctggccagcgcaggtgtggtggctgttctggccctgggggctcccgccccccagggttgcgctgtggctctggcttctgatcgctgctccatccacctgcagcttcaggggctggtggaccctgcacgggagctgggcaagctgcaagccaagcgagttgaggcccagcggcaggcccagcgtctgcgggaacgccgtgctgcctcgggctatcctgtcaaggtgccgctcgaagtccaggaggcagatgaagccaagctccaacagacagaagcagagctcaggaaggtggatgaggccatcgccctattccagaagatgctgtgatccaccacccagcttcacccctcacccccagcggctcaccatggggatggcagcaataaaatattttcccacaaaa

SEQ ID NO: 198795 - DNA, 1541 bp, Homo sapiens
  Payload ID: 19223
  Gene Name: valyl-tRNA synthetase
  ENST ID: ENST00000424974
  CDS Start-End: 442-1541
cacaaggtgcccgtggcggcgcctgacgggagcgtcgtgctcaggggtgtcctctcgtcctgcgtccgcgcccagcgccccgcgccccgcgctgttcctcgtgagaccggcgggcggcgagccgcgcggcccccggggcagtgtcggacacggcgggcgcgcactcgcaggcggggcacggccgcccccgccaggacccgcaggcccggaaacgctccctgtcacaaaggggggaacacgtgggcgccggctgccggggcggcgatcttagggaactagggtcacctggagagccgcccaccgtctctgcccgctcgactcctccgcccgggccgctcggccggtccagccgcggccggcgcctggctgtgaggtggattcccggcccagtctgaccatctccctccagtttttccacttcgttcggaccttctcataactatgtccaccctctacgtctcccctcacccagatgccttccccagcctccgagccctcatagccgctcgctatggggaggctggggagggtcccggatggggaggagcccacccccgcatctgtctccagccacccccgactagcaggactccctttcccccaccccgcctgccggccctggagcaggggcccggtgggctctgggtgtggggggccacggctgtggcccagctgctgtggccagcaggcctggggggcccagggggcagccgggcggctgtccttgtccaacagtgggtcagttacgccgacacggagttaataccagctgcctgtggagcaacgctgccggccctgggactccgaagctcggcccaggacccccaggctgtgctgggggccctgggcagggccctgagccccttggaggagtggcttcggctgcacacctacttggccggggaggcccccactctggctgacctggcggctgtcacagccttgctgctgcctttccgatacgtcctagacccacctgcccgccggatctggaataatgtgactcgctggtttgtcacgtgtgtccggcagccagaattccgagccgtgctaggagaagtggttctatactcaggagccaggcctctctctcatcagccaggccccgaggctcctgccctcccaaagacagctgctcagctcaagaaagaggcaaagaaacgggagaagctagagaaattccaacagaagcagaagatccaacagcagcagccacctccaggggagaagaaaccaaaaccagagaagagggagaaacgggatcctggggtcattacctatgacctcccaaccccacccggggaaaagaaagatgtcagtggccccatgcccgactcctacagccctcggtatgtggaggctgcctggtacccttggtgggagcagcagggcttcttcaagccagagtatgggcgtcctaatgtgtcagcagcaaatccccgaggtgtcttcatgatgtgcatcccaccccccaatgtgacaggctccctgcacctgggccatgcactcaccaacgccatccaggactccctgactcgatg

SEQ ID NO: 198796 - DNA, 863 bp, Homo sapiens; identical to SEQ ID NO: 198793
  Payload ID: 19223
  Gene Name: valyl-tRNA synthetase
  ENST ID: ENST00000435299
  CDS Start-End: 1-863

SEQ ID NO: 198797 - DNA, 4312 bp, Homo sapiens
  Payload ID: 19223
  Gene Name: valyl-tRNA synthetase
  Uniprot ID: P26640
  ENST ID: ENST00000422694
  CDS Start-End: 442-4236
cacaaggtgcccgtggcggcgcctgacgggagcgtcgtgctcaggggtgtcctctcgtcctgcgtccgcgcccagcgccccgcgccccgcgctgttcctcgtgagaccggcgggcggcgagccgcgcggcccccggggcagtgtcggacacggcgggcgcgcactcgcaggcggggcacggccgcccccgccaggacccgcaggcccggaaacgctccctgtcacaaaggggggaacacgtgggcgccggctgccggggcggcgatcttagggaactagggtcacctggagagccgcccaccgtctctgcccgctcgactcctccgcccgggccgctcggccggtccagccgcggccggcgcctggctgtgaggtggattcccggcccagtctgaccatctccctccagtttttccacttcgttcggaccttctcataactatgtccaccctctacgtctcccctcacccagatgccttccccagcctccgagccctcatagccgctcgctatggggaggctggggagggtcccggatggggaggagcccacccccgcatctgtctccagccacccccgactagcaggactagctttcccccaccccgcctgccggccctggagcaggggcccggtgggctctgggtgtggggggccacggctgtggcccagctgctgtggccagcaggcctggggggcccagggggcagccgggcggctgtccttgtccaacagtgggtcagttacgccgacacggagttaataccagctgcctgtggagcaacgctgccggccctgggactccgaagctcggcccaggacccccaggctgtgctgggggccctgggcagggccctgagccccttggaggagtggcttcggctgcacacctacttggccggggaggcccccactctggctgacctggcggctgtcacagccttgctgctgcctttccgatacgtcctagacccacctgcccgccggatctggaataatgtgactcgctggtttgtcacgtgtgtccggcagccagaattccgagccgtgctaggagaagtggttctatactcaggagccaggcctctctctcatcagccaggccccgaggctcctgccctcccaaagacagctgctcagctcaagaaagaggcaaagaaacgggagaagctagagaaattccaacagaagcagaagatccaacagcagcagccacctccaggggagaagaaaccaaaaccagagaagagggagaaacgggatcctggggtcattacctatgacctcccaaccccacccggggaaaagaaagatgtcagtggccccatgcccgactcctacagccctcggtatgtggaggctgcctggtacccttggtgggagcagcagggcttcttcaagccagagtatgggcgtcctaatgtgtcagcagcaaatccccgaggtgtcttcatgatgtgcatcccaccccccaatgtgacaggctccctgcacctgggccatgcactcaccaacgccatccaggactccctgactcgatggcaccgcatgcgtggggagaccaccctgtggaaccctggctgtgaccatgcaggtattgccacccaggtggtggtggagaagaagctatggcgtgagcagggactgagccggcaccagctgggccgcgaggcctttctacaggaagtctggaagtggaaggaggagaaaggtgaccggatttaccaccagttgaagaagcttggcagctccttggactgggatcgagcctgtttcaccatggaccctaaactctcagcagctgtgacagaggcctttgtccggcttcacgaggaaggcatcatctatcgcagtacccgccttgttaactggtcctgcaccctcaactccgccatctctgacattgaggtggataagaaggagctgacaggtcgcaccctgctctccgtgcctggctacaaggagaaggtggagttcggggtcctcgtgtcctttgcctataaggtccaaggctcagatagcgacgaggaggtggtggtggcaacaactcggatcgagacaatgctgggagatgtggctgtagctgtgcaccccaaagataccagataccagcacctgaaggggaagaacgtgatccacccattcctgtctcggagccttcccattgtcttcgatgaatttgtggacatggactttggcacaggtgctgtgaagatcacccccgcacatgaccaaaatgactatgaagttgggcagcggcacgggctggaggccatcagcatcatggactcccggggggccctcatcaatgtgcctccgcctttcctgggcctgcccaggtttgaggccaggaaagcggtgctggtggcgctgaaggagcggggactgttccgtggcattgaggacaaccccatggtggtgccactttgcaaccggtcgaaggacgtggtagagcctctgctgcggccgcagtggtacgttcgctgcggggagatggcccaggctgccagcgccgctgtgactcggggtgacctccgcatcctgcctgaggcccatcagcgcacatggcatgcctggatggacaacatccgggagtggtgcatttccaggcagctgtggtggggccatcgcatcccagcctactttgtcactgtcagtgacccagcggtgccccctggggaggaccctgatgggcggtactgggtgagtggacgcaatgaggcggaggcccgggagaaggcagccaaggagttcggagtgtcccctgacaagatcagtctccagcaagatgaggatgtattggatacctggttctcctctggcctcttccccttatccattttgggctggcccaaccagtcagaagacctgagtgtgttctaccccgggacactgctggagaccggtcatgacatcctcttcttctgggtggcccggatggtcatgctgggcctgaagctcacgggcaggctgccctttagagaggtctacctccatgccatcgtgcgagatgctcacggccggaagatgagcaagtctctaggcaatgtcatcgatcccctggacgtcatctatggaatctccctgcagggcctccacaaccagctgctgaacagcaacctggatcccagcgaggtggagaaggccaaagaagggcagaaagctgacttcccagcggggattcctgaatgtggcaccgatgctctccggtttggattatgtgcctacatgtcccagggtcgtgacatcaacctggatgtgaaccggatactgggttaccgccacttctgcaacaagctctggaatgccaccaagtttgcccttcgtggccttgggaagggttttgtgccctcacccacctcccagcccggaggccatgagagcctggtggaccgctggatccgcagccgcctgacagaggctgtgaggctcagcaatcaaggcttccaggcctacgacttcccggccgtcaccactgcccagtacagcttctggctctatgagctctgtgatgtctacttggagtgcctgaaacctgtactgaatggggtggaccaggtggcagctgagtgtgcccgccagaccctgtacacttgcctggacgttggcctgcggctgctctcacccttcatgcccttcgtgacggaggagctgttccagaggctgccccggaggatgccgcaagctccccctagcctctgtgttaccccctacccggagccctcagagtgctcctggaaggaccccgaggcagaagccgcccttgagctggcgctaagcatcacgcgagccgtgcgctccctgcgggccgactacaacctcacccggatccggcctgactgtttcctggaagtggcggatgaggccacgggcgccctggcatcggcggtgtcgggctacgtgcaggccctggccagcgcaggtgtggtggctgttctggccctgggggctcccgccccccagggttgcgctgtggctctggcttctgatcgctgctccatccacctgcagcttcaggggctggtggaccctgcacgggagctgggcaagctgcaagccaagcgagttgaggcccagcggcaggcccagcgtctgcgggaacgccgtgctgcctcgggctatcctgtcaaggtgccgctcgaagtccaggaggcagatgaagccaagctccaacagacagaagcagagctcaggaaggtggatgaggccatcgccctattccagaagatgctgtgatccaccacccagcttcacccctcacccccagcggctcaccatggggatggcagcaataaaatattttcccacaaaa

SEQ ID NO: 198798 - DNA, 4312 bp, Homo sapiens; identical to SEQ ID NO: 198790
  Payload ID: 19223
  Gene Name: valyl-tRNA synthetase
  Uniprot ID: P26640
  ENST ID: ENST00000457796
  CDS Start-End: 442-4236

SEQ ID NO: 198799 - DNA, 804 bp, Homo sapiens
  Payload ID: 19223
  Gene Name: valyl-tRNA synthetase
  ENST ID: ENST00000417430
  CDS Start-End: 283-804
ctcctgagagccttccacactccccgaagccccgcgatggtggatagttcctcttccccaggaactccccactgacactgcccctctgagagccaggtcctcggctcctgacagcctgcctggtcagaccctcagtcctatgggactcgggtgtctgcggcgaaggagctcccgtgagggtcccctctctactcaaacataggacccacctcgatcccgcagtcttcccctgtctctctttctccttaggtttttccacttcgttcggaccttctcataactatgtccaccctctacgtctcccctcacccagatgccttccccagcctccgagccctcatagccgctcgctatggggaggctggggagggtcccggatggggaggagcccacccccgcatctgtctccagccacccccgactagcaggactagctttcccccaccccgcctgccggccctggagcaggggcccggtgggctctgggtgtggggggccacggctgtggcccagctgctgtggccagcaggcctggggggcccagggggcagccgggcggctgtccttgtccaacagtgggtcagttacgccgacacggagttaataccagctgcctgtggagcaacgctgccggccctgggactccgaagctcggcccaggacccccaggctgtgctgggggccctgggcagggccctgagccccttggaggagtggcttcggctgcacacctacttggccggggaggcccccactctggctgacctggcggctgtcacagccttgctgctgcctttccgatac

SEQ ID NO: 198800 - DNA, 863 bp, Homo sapiens; identical to SEQ ID NO: 198793
  Payload ID: 19223
  Gene Name: valyl-tRNA synthetase
  ENST ID: ENST00000420919
  CDS Start-End: 1-863

SEQ ID NO: 198801 - DNA, 863 bp, Homo sapiens; identical to SEQ ID NO: 198793
  Payload ID: 19223
  Gene Name: valyl-tRNA synthetase
  ENST ID: ENST00000446350
  CDS Start-End: 1-863

SEQ ID NO: 198802 - DNA, 804 bp, Homo sapiens; identical to SEQ ID NO: 198799
  Payload ID: 19223
  Gene Name: valyl-tRNA synthetase
  ENST ID: ENST00000419375
  CDS Start-End: 283-804

SEQ ID NO: 198803 - DNA, 804 bp, Homo sapiens
  Payload ID: 19223
  Gene Name: valyl-tRNA synthetase
  ENST ID: ENST00000424984
  CDS Start-End: 283-804
ctcctgagagccttccacactccccgaagccccgcgatggtggatagttcctcttccccaggaactccccactgacactgcccctctgagagccaggtcctcggctcctgacagcctgcctggtcagaccctcagtcctatgggactcgggtgtctgcggcgaaggagctcccgtgagggtcccctctctactcaaacataggacccacctcgatcccgcagtcttcccctgtctctctttctccttaggtttttccacttcgttcggaccttctcataactatgtccaccctctacgtctcccctcacccagatgccttccccagcctccgagccctcatagccgctcgctatggggaggctggggagggtcccggatggggaggagcccacccccgcatctgtctccagccacccccgactagcaggactccctttcccccaccccgcctgccggccctggagcaggggcccggtgggctctgggtgtggggggccacggctgtggcccagctgctgtggccagcaggcctggggggcccagggggcagccgggcggctgtccttgtccaacagtgggtcagttacgccgacacggagttaataccagctgcctgtggagcaacgctgccggccctgggactccgaagctcggcccaggacccccaggctgtgctgggggccctgggcagggccctgagccccttggaggagtggcttcggctgcacacctacttggccggggaggcccccactctggctgacctggcggctgtcacagccttgctgctgcctttccgatac

SEQ ID NO: 198804 - DNA, 804 bp, Homo sapiens; identical to SEQ ID NO: 198803
  Payload ID: 19223
  Gene Name: valyl-tRNA synthetase
  ENST ID: ENST00000440048
  CDS Start-End: 283-804

SEQ ID NO: 198805 - DNA, 804 bp, Homo sapiens; identical to SEQ ID NO: 198803
  Payload ID: 19223
  Gene Name: valyl-tRNA synthetase
  ENST ID: ENST00000425864
  CDS Start-End: 283-804

SEQ ID NO: 198806 - DNA, 4312 bp, Homo sapiens; identical to SEQ ID NO: 198797
  Payload ID: 19223
  Gene Name: valyl-tRNA synthetase
  Uniprot ID: P26640
  ENST ID: ENST00000435657
  CDS Start-End: 442-4236

SEQ ID NO: 198807 - DNA, 863 bp, Homo sapiens; identical to SEQ ID NO: 198793
  Payload ID: 19223
  Gene Name: valyl-tRNA synthetase
  ENST ID: ENST00000428445
  CDS Start-End: 1-863

SEQ ID NO: 198808 - DNA, 804 bp, Homo sapiens; identical to SEQ ID NO: 198803
  Payload ID: 19223
  Gene Name: valyl-tRNA synthetase
  ENST ID: ENST00000428505
  CDS Start-End: 283-804

SEQ ID NO: 198809 - DNA, 863 bp, Homo sapiens; identical to SEQ ID NO: 198793
  Payload ID: 19223
  Gene Name: valyl-tRNA synthetase
  ENST ID: ENST00000428796
  CDS Start-End: 1-863

SEQ ID NO: 198810 - DNA, 4073 bp, Homo sapiens
  Payload ID: 19224
  Gene Name: valyl-tRNA synthetase 2, mitochondrial
  Uniprot ID: Q5ST30
  ENST ID: ENST00000321897
  CDS Start-End: 633-3824
gccagctgctgcgcatgcgccggccggggccccgcccccatgcgccgcgcggctccagggccacgttccagggtcgggtttggtggattcctcagtccctgccgccgcggggcgccctgggatagcggcggggcctcctggtgagcgcgcgccggggcggcctccgggaagtgggagacgctgcgggtcctgggcccaggccttgggatgggcgggaaggcttggccgcgccgggctgtgggcactgcaggaggcccctgtgcaggtggagatcgccgcggccctggcgggactccttgctggctcttgggcgcgctgatgcccatcatctccctgagtttctgagccctatctctcatgtgtcagtggtcaccgccgaatccagacactccggccctgttccggaagagccctgatatccgtggctccatggcgctgtctgtcgataccatgcactctagctctcaaggaggaaaggttttgtggaagggaatagagacttggaataacagacctgtgctaattagagacaggaaagatggaacaaggggagtgacccttctccacccccatatcctaatgtgctctctctctatccagaacagatctcggcccctttccaaacactcctgatgcctcatttgcctctcgcctcttttcgaccaccattttgggggctgaggcactcacggggcctccccaggtttcactccgtttctacacagtcggagccccatggatctcccatctcccggaggaaccgtgaagccaaacagaagcgcctgcgagagaagcaggcgactctggaggctgagatagcaggggagagcaagtcacctgcagaatccattaaggcctggaggcctaaggagttagtattgtatgaaatccctacgaaacccggtgaaaagaaagatgtctctgggcccctgcctcctgcatacagcccccgatatgttgaggctgcctggtacccgtggtgggtacgagagggcttcttcaaaccagaatatcaggcccggctgccccaagctacaggggagaccttttccatgtgtatcccacctcccaatgtcactggctccctgcacattggccacgcactcacggtggccatacaggatgccctcgtgcgctggcaccggatgcgtggggatcaagtgctgtgggtccctggttcagatcatgcaggaattgctacacaagctgtggtggagaaacaactgtggaaggaacggggagtgaggagacatgagctgagccgggaggccttccttagggaggtgtggcagtggaaggaggcgaaaggtggagagatctgtgagcagctgcgagctctgggtgcctccctggactgggatcgagagtgttttaccatggatgttggctcctcagtggctgtgactgaagcttttgtgcggctctacaaggcggggttgctgtaccggaaccatcagcttgtcaactggtcatgtgctttaagatcagccatctcggacattgaggtggagaaccggcccctgcctggccacacacagcttcgactgcctggctgccccacccccgtgtcttttggcctcctattttctgttgccttccccgtggatggagagcctgatgcagaggttgtggtaggaaccacaaggccagagacgctgcctggagatgtggctgtggccgttcatccagacgactcgcgatacacacatctacacgggcgacagcttcgtcaccccttgatggggcagcctcttcccctcatcacagactatgctgttcagccacatgtgggcacgggggcagtgaaggtgactccagctcacagtcctgccgatgctgagatgggggcccgacatggcttgagccccttgaatgtcattgcggaggatgggaccatgacctccctctgcggggactggctgcagggtcttcaccggtttgtggcccgggaaaagataatgtctgtgctgagtgaatggggcctgttccggggcctccagaaccaccccatggtactgcccatctgcagccgttctggggatgtgatagaatacctgctgaagaaccagtggtttgtccgctgccaggaaatgggggcccgagctgccaaggctgtggagtcgggggccctggagctcagtccctccttccaccagaagaactggcagcactggttttcccatattggggactggtgtgtctcccggcagctgtggtggggccatcagattccagcctacctggttgtagaggaccatgcgcagggagaagaggactgttgggtggttgggcggtcagaggctgaggccagagaggtagcagcggaactgacagggaggccaggggcagagctgaccctggagagggatcctgatgtcctagacacatggttttcttctgccctgttccccttttctgccctgggctggccccaagagaccccagaccttgctcgtttctaccccctgtcacttttggaaacgggcagcgaccttctgctgttctgggtgggccgcatggtcatgttggggacccagctcacagggcagctgcccttcagcaaggtgcttcttcatcccatggttcgggacaggcagggccggaagatgagcaagtccctggggaatgtgctggacccaagagacatcatcagtggggtggagatgcaggtgctgcaggaaaagctgagaagcggaaatttggaccctgcagagctggccattgtggctgcagcacagaaaaaggactttcctcacgggatccctgagtgtgggacagatgccctgagattcacactctgctcccatggagttcaggcgggcgacttgcacctgtcagtctctgaggtccagagctgccgacatttctgcaacaagatctggaatgctcttcgctttatcctcaatgctttaggggagaaatttgtgccacagcctgctgaggagctgtctccctcctccccgatggatgcctggatcctgagccgccttgccctggctgcccaggagtgtgagcggggcttcctcacccgagagctctcgctcgtcactcatgccctgcaccacttctggcttcacaacctctgtgacgtctacctggaggctgtgaagcccgtgctgtggcactcgccccgccccctggggccccctcaggtcctgttctcctgcgctgacctcggcctccgcctcctggccccactgatgcccttcctggctgaagagctctggcagaggctgccccccaggcctggttgcccccctgcccccagcatctcggttgccccctaccccagcgcctgcagcttggagcactggcgccagccagagctggagcggcgcttctcccgggtccaagaggtcgtgcaggtgctaagggctctccgagccacgtaccagctcaccaaagcccggccccgagtgctgctgcagagctcagagcctggggaccagggcctcttcgaggccttcttggagcccctgggcaccctgggctactgtggggctgtgggcctgttacccccaggcgcagcagctccctccggctgggcccaggctccactcagtgacacggctcaagtctacatggagctgcagggcctggtggacccgcagatccagctacctctgttagccgcccgaaggtacaagttgcagaagcagcttgacagcctcacagccaggaccccatcagaaggggaggcagggactcagaggcaacaaaagctttcttccctccagctggaattgtcaaaactggacaaggcagcctctcacctccggcagctgatggatgagcctccagccccagggagcccggagctctaactcatcatccccatcagttttcctccctctcagacctgtctttgaggacaaacagatttgtcagctgtcagggtgcagtgggacgtcagagactatgtggtccatcgccttcattgtgtaaatgaggacacagactggcttggtcgcagtgactgtggtgtccttgagatgctcacattactgcccggcctgcctcccacctggaagtctgggaatgaggagattgagataaacttttgaaatcccaaa

SEQ ID NO: 198811 - DNA, 4073 bp, Homo sapiens
  Payload ID: 19224
  Gene Name: valyl-tRNA synthetase 2, mitochondrial
  ENST ID: ENST00000383369
  CDS Start-End: 633-3824
gccagctgctgcgcatgcgccggccggggccccgcccccatgcgccgcgcggctccagggccacgttccagggtcgggtttggtggattcctcagtccctgccgccgcggggcgccctgggatagcggcggggcctcctggtgagcgcgcgccggggcggcctccgggaagtgggagacgctgcgggtcctgggcccaggccttgggatgggcgggaaggcttggccgcgccgggctgtgggcactgcaggaggcccctgtgcaggtggagatcgccgcggccctggcgggactccttgctggctcttgggcgcgctgatgcccatcatctccctgagtttctgagccctatctctcatgtgtcagtggtcaccgccgaatccagacactccggccctgttccggaagagccctgatatccgtggctccatggtgctgtctgtcgataccatgcactctagctctcaaggaggaaaggttttgtggaagggaatagagacttggaataacagacctgtgctaattagagacaggaaagatggaacaaggggagtgacccttctccacccccatatcctaatgtgctctctctctatccagaacagatctcggcccctttccaaacactcctgatgcctcatttgcctctcgcctcttttcgaccaccattttgggggctgaggcactcacggggcctccccaggtttcactccgtttctacacagtcggagccccatggatctcccatctcccggaggaaccgtgaagccaaacagaagcgcctgcgagagaagcaggcgactctggaggctgagatagcaggggagagcaagtcacctgcagaatccattaaggcctggaggcctaaggagttagtattgtatgaaatccctacgaaacccggtgaaaagaaagatgtctctgggcccctgcctcctgcatacagcccccgatatgttgaggctgcctggtacccgtggtgggtacgagagggcttcttcaaaccagaatatcaggcccggctgccccaagctacaggggagaccttttccatgtgtatcccacctcccaatgtcactggctccctgcacattggccacgcactcacggtggccatacaggatgccctcgtgcgctggcaccggatgcgtggggatcaagtgctgtgggtccctggttcagatcatgcaggaattgctacacaagctgtggtggagaaacaactgtggaaggaacggggagtgaggagacatgagctgagccgggaggccttccttagggaggtgtggcagtggaaggaggcgaaaggtggagagatctgtgagcagctgcgagctctgggtgcctccctggactgggatcgagagtgttttaccatggatgttggctcctcagtggctgtgactgaagcttttgtgcggctctacaaggcggggttgctgtaccggaaccatcagcttgtcaactggtcatgtgctttaagatcagccatctcggacattgaggtggagaaccggcccctgcctggccacacacagcttcgactgcctggctgccccacccccgtgtcttttggcctcctattttctgttgccttccccgtggatggagagcctgatgcagaggttgtggtaggaaccacaaggccagagacgctgcctggagatgtggctgtggccgttcatccagacgactcgcgatacacacatctacacgggcgacagcttcgtcaccccttgatggggcagcctcttcccctcatcacagactatgctgttcagccacatgtgggcacgggggcagtgaaggtgactccagctcacagtcctgccgatgctgagatgggggcccgacatggcttgagccccttgaatgtcattgcggaggatgggaccatgacctccctctgcggggactggctgcagggtcttcaccggtttgtggcccgggaaaagataatgtctgtgctgagtgaatggggcctgttccggggcctccagaaccaccccatggtactgcccatctgcagccgttctggggatgtgatagaatacctgctgaagaaccagtggtttgtccgctgccaggaaatgggggcccgagctgccaaggctgtggagtcgggggccctggagctcagtccctccttccaccagaagaactggcagcactggttttcccatattggggactggtgtgtctcccggcagctgtggtggggccatcagattccagcctacctggttgtagaggaccatgcgcagggagaagaggactgttgggtggttgggcggtcagaggctgaggccagagaggtagcagcggaactgacagggaggccaggggcagagctgaccctggagagggatcctgatgtcctagacacatggttttcttctgccctgttccccttttctgccctgggctggccccaagagaccccagaccttgctcgtttctaccccctgtcacttttggaaacgggcagcgaccttctgctgttctgggtgggccgcatggtcatgttggggacccagctcacagggcagctgcccttcagcaaggtgcttcttcatcccatggttcgggacaggcagggccggaagatgagcaagtccctggggaatgtgctggacccaagagacatcatcagtggggtggagatgcaggtgctgcaggaaaagctgagaagcggaaatttggaccctgcagagctggccattgtggctgcagcacagaaaaaggactttcctcacgggatccctgagtgtgggacagatgccctgagattcacactctgctcccatggagttcaggcgggcgacttgcacctgtcagtctctgaggtccagagctgccgacatttctgcaacaagatctggaatgctcttcgctttatcctcaatgctttaggggagaaatttgtgccacagcctgctgaggagctgtctccctcctccccgatggatgcctggatcctgagccgccttgccctggctgcccaggagtgtgagcggggcttcctcacccgagagctctcgctcgtcactcatgccctgcaccacttctggcttcacaacctctgtgacgtctacctggaggctgtgaagcccgtgctgtggcactcgccccgccccctggggccccctcaggtcctgttctcctgcgctgacctcggcctccgcctcctggccccactgatgcccttcctggctgaagagctctggcagaggctgccccccaggcctggttgcccccctgcccccagcatctcggttgccccctaccccagcgcctgcagcttggagcactggcgccagccagagctggagcggcgcttctcccgggtccaagaggtcgtgcaggtgctaagggctctccgagccacgtaccagctcaccaaagcccggccccgagtgctgctgcagagctcagagcctggggaccagggcctcttcgaggccttcttggagcccctgggcaccctgggctactgtggggctgtgggcctgttacccccaggcgcagcagctccctccggctgggcccaggctccactcagtgacacggctcaagtctacatggagctgcagggcctggtggacccgcagatccagctacctctgttagccgcccgaaggtacaagttgcagaagcagcttgatagcctcacagccaggaccccatcagaaggggaggcagggactcagaggcaacaaaagctttcttccctccagctggaattgtcaaaactggacaaggcagcctctcacctccagcagctgatggatgagcctccagccccagggagcccggagctctaactcatcatccccatcagttttcctccctctcagacctgtctttgaggacaaacagatttgtcagctgtcagggtgcagtgggacgtcagagactatgtggtccatcgccttcattgtgtaaatgaggacacagactggcttggtcgcagtgactgtggtgtccttgagatgctcacattactgcccggcctgcctcccacctggaagtctgggaatgaggagattgagataaacttttgaaatcccaaa

SEQ ID NO: 198812 - DNA, 4073 bp, Homo sapiens
  Payload ID: 19224
  Gene Name: valyl-tRNA synthetase 2, mitochondrial
  ENST ID: ENST00000383540
  CDS Start-End: 633-3824
gccagctgctgcgcatgcgccggccggggccccgcccccatgcgccgcgcggctccagggccacgttccagggtcgggtttggtggattcctcagtccctgccgccgcggggcgccctgggatagcggcggggcctcctggtgagcgcgcgccggggcggcctccgggaagtgggagacgctgcgggtcctgggcccaggccttgggatgggcgggaaggcctggccgcgccgggctgtgggcactgcaggaggcccctgtgcaggtggagatcgccgcggccctggcgggactctttgctggctcttgggcgcgctgatgcccatcatctccctgagtttctgagccctatctctcatgtgtcagtggtcaccgccgaatccagacactccggccctgttccggaagagccctgatatccgtggctccatggcgctgtctgtcgataccatgcactctagctctcaaggaggaaaggttttgtggaagggaatagagacttggaataacagacctgtgctaattagagacgggaaagatggaacaaggggagtgacccttctccacccccatatcctaatgtgctctctctctatccagaacagatctcggcccctttccaaacactcctgatgcctcatttgcctctcgcttcttttcgaccaccattttgggggctgaggcactcacggggcctccccaggtttcactccgtttctacacagtcggagccccatggatctcccatctcccggaggaaccgtgaagccaaacagaagcgcctgcgagagaagcaggctactctggaggctgagatagcaggggagagcaagtcacctgcagaatccattaaggcctggaggcctaaggagttagtattgtatgaaatccctacgaaacccggtgaaaagaaagatgtctctgggcccctgcctcctgcatacagcccccgatatgttgaggctgcctggtacccgtggtgggtacgagagggcttcttcaaaccagaatatcaggcccggctgccccaagctacaggggagaccttttccatgtgtatcccacctcccaatgtcactggctccctgcacattggccacgcactcacggtggccatacaggatgccctcgtgcgctggcaccggatgcgtggggatcaagtgctgtgggtccctggttcagatcatgcaggaattgctacacaagctgtggtggagaaacaactgtggaaggaacggggagtgaggagacatgagctgagccgggaggccttccttagggaggtgtggcagtggaaggaggcgaaaggtggagagatctgtgagcagctgcgagctctgggtgcctccctggactgggatcgagagtgttttaccatggatgttggctcctcagtggctgtgactgaagcttttgtgcggctctacaaggcggggttgctgtaccggaaccatcagcttgtcaactggtcatgtgctttaagatcagccatctcggacattgaggtggagaaccggcccctgcctggccacacacagcttcgactgcctggctgccccacccccgtgtcttttggcctcctattttctgttgccttccccgtggatggagagcctgatgcagaggttgtggtaggaaccacaaggccagagacgctgcctggagatgtggctgtggccgttcatccagacgactcgcgatacacacatctacacgggcgacagcttcgtcaccccttgatggggcagcctcttcccctcatcacagactatgctgttcagccacatgtgggcacgggggcagtgaaggtgactccagctcacagtcctgccgatgctgagatgggggcccgacatggcttgagccccttgaatgtcattgcggaggatgggaccatgacctccctctgcggggactggttgcagggtcttcaccggtttgtggcccgggaaaagataatgtctgtgctgagtgaacggggcctattccggggcctccagaaccaccccatggtactgcccatctgcagccgttctggggatgtgatagaatacctgctgaagaaccagtggtttgtccgctgccaggaaatgggggcccgagctgccaaggctgtggagtcgggggccctggagctcagtccctccttccaccagaagaactggcagcactggttttcccatattggggactggtgtgtctcccggcagctgtggtggggccatcagattccagcctacctggttgtagaggaccatgcgcagggagaagaggactgttgggtggttgggcggtcagaggctgaggccagagaggtagcagcggaactgacagggaggccaggggcagagctgaccctggagagggatcctgatgtcctagacacatggttttcttctgccctgttccccttttctgccctgggctggccccaagagaccccagaccttgctcgtttctaccccctgtcacttttggaaacgggcagcgaccttctgctgttctgggtgggccgcatggtcatgttggggacccagctcacagggcagctgcccttcagcaaggtgcttcttcatcccatggttcgggacaggcagggccggaagatgagcaagtccctggggaatgtgctggacccaagagacatcatcagtggggtggagatgcagttgctgcaggaaaagctgagaagcggaaatttggaccctgcagagctggccattgtggctgcagcacagaaaaaggactttcctcacgggatccctgagtgtgggacagatgccctgagattcacactctgctcccatggagttcaggcgggcgacttgcacctgtcagtctctgaggtccagagctgccgacatttctgcaacaagatctggaatgctcttcgctttatcctcaatgctttaggggagaaatttgtgccacagcctgctgaggagctgtctccctcctccccgatggatgcctggatcctgagccgccttgccctggctgcccaggagtgtgagcggggcttcctcacccgagagctctcgctcgtcactcatgccctgcaccacttctggcttcacaacctctgtgacgtctacctggaggctgtgaagcccgtgctgtggcactcgccccgccccctggggccccctcaggtcctgttctcctgcgctgacctcggcctccgcctcctggccccactgatgcccttcctggctgaagagctctggcagaggctgccccccaggcctggttgcccccctgcccccagcatctcggttgccccctaccctagcgcctgcagcttggagcactggcgccagccagagctggagcggcgcttctcccgggtccaagaggtcgtgcaggtgctaagggctctccgagccacgtaccagctcaccaaagcccggccccgagtgctgctgcagagctcagagcctggggaccagggcctcttcgaggccttcttggagcccctgggcaccctgggctactgtggggctgtgggcctgttacccccaggcacagcagctccctccggctgggcccaggctccactcagtgacacggctcaagtctacatggagctgcagggcctggtggacccgcagatccagctacctctgttagccgcccgaaggtacaagttgcagaagcagcttgatagcctcacagccaggaccccatcagaaggggaggcagggactcagaggcaacaaaagctttcttccctccagctggaattgtcaaaactggacaaggcagcctctcacctccggcagctgatggatgagcctccagccccagggagcccggagctctaactcatcatccccatcagttttcctccctctcagacctgtctttgaggacaaacagatttgtcagctgtcagggtgcagtgggacgtcagagactatgtggtccatcgccttcattgtgtaaatgaggacacagactggcttggtcgcagtgactgtggtgtccttgagatgctcacattactgcccggcctgcctcccacctggaagtctgggaatgaggagattgagataaacttttgaaatcccaaa

SEQ ID NO: 198813 - DNA, 1103 bp, Homo sapiens
  Payload ID: 19224
  Gene Name: valyl-tRNA synthetase 2, mitochondrial
  ENST ID: ENST00000452966
  CDS Start-End: 126-1103
cgcggctccagggccacgttccagggtcgggtttggtggattcctcagtccctgccgccgcggggcgccctgggatagcggcggggcctcctgaacagatctcggcccctttccaaacactcctgatgcctcatttgcctctcgcttcttttcgaccaccattttgggggctgaggcactcacggggcctccccaggtttcactccgtttctacacagtcggagccccatggatctcccatctcccggaggaaccgtgaagccaaacagaagcgcctgcgagagaagcaggctactctggaggctgagatagcaggggagagcaagtcacctgcagaatccattaaggcctggaggcctaaggagttagtattgtatgaaatccctacgaaacccggtgaaaagaaagatgtctctgggcccctgcctcctgcatacagcccccgatatgttgaggctgcctggtacccgtggtgggtacgagagggcttcttcaaaccagaatatcaggcccggctgccccaagctacaggggagaccttttccatgtgtatcccacctcccaatgtcactggctccctgcacattggccacgcactcacggtggccatacaggatgccctcgtgcgctggcaccggatgcgtggggatcaagtgctgtgggtccctggttcagatcatgcaggaattgctacacaagctgtggtggagaaacaactgtggaaggaacggggagtgaggagacatgagctgagccgggaggccttccttagggaggtgtggcagtggaaggaggcgaaaggtggagagatctgtgagcagctgcgagctctgggtgcctccctggactgggatcgagagtgttttaccatggatgttggctcctcagtggctgtgactgaagcttttgtgcggctctacaaggcggggttgctgtaccggaaccatcagcttgtcaactggtcatgtgctttaagatcagccatctcggacattgaggtggagaaccggcccctgcctggccacacacagcttcgactgcctggctgccccacccccgtgtcttttggcctcctattttctgttgccttccccgtggatgga

SEQ ID NO: 198814 - DNA, 460 bp, Homo sapiens
  Payload ID: 19224
  Gene Name: valyl-tRNA synthetase 2, mitochondrial
  ENST ID: ENST00000434089
  CDS Start-End: 116-460
acgctgcgggtcctgggcccaggccttgggatgggcgggaaggcttggccgcgccgggctgtgggcactgcaggaggcccctgtgcagatctcggcccctttccaaacactcctgatgcctcatttgcctctcgcctcttttcgaccaccattttgggggctgaggcactcacggggcctccccaggtttcactccgtttctacacagtcggagccccatggatctcccatctcccggaggaaccgtgaagccaaacagaagcgcctgcgagagaagcaggcgactctggaggctgagatagcaggggagagcaagtcacctgcagaatccattaaggcctggaggcctaaggagttagtattgtatgaaatccctacgaaacccggtgaaaagaaagatgtctctgggcccctgcctcctgcatacagcccccgatatgttgaggctgcctggtacccg

SEQ ID NO: 198815 - DNA, 4073 bp, Homo sapiens
  Payload ID: 19224
  Gene Name: valyl-tRNA synthetase 2, mitochondrial
  ENST ID: ENST00000428577
  CDS Start-End: 633-3824
gccagctgctgcgcatgcgccggccggggccccgcccccatgcgccgcgcggctccagggccacgttccagggtcgggtttggtggattcctcagtccctgccgccgcggggcgccctgggatagcggcggggcctcctggtgagcgcgcgccggggcggcctccgggaagtgggagacgctgcgggtcctgggcccaggccttgggatgggcgggaaggcctggccgcgccgggctgtgggcactgcaggaggcccctgtgcaggtggagatcgccgcggccctggcgggactccttgctggctcttgggcgcgctgatgcccatcatctccctgagtttctgagccctatctctcatgtgtcagtggtcaccgccgaatccagacactccggccctgttccggaagagccctgatatccgtggctccatggcgctgtctgtcgataccatgcactctagctctcaaggaggaaaggttttgtggaagggaatagagacttggaataacagacctgtgctaattagagacaggaaagatggaacaaggggagtgacccttctccacccccatatcctaatgtgctctctctctatccagaacagatctcggcccctttccaaacactcctgatgcctcatttgcctctcgcctcttttcgaccaccattttgggggctgaggcactcacggggcctccccaggtttcactccgtttctacacagtcggagccccatggatctcccatctcccggaggaaccgtgaagccaaacagaagcgcctgcgagagaagcaggcgactctggaggctgagatagcaggggagagcaagtcacctgcagaatccattaaggcctggaggcctaaggagttagtattgtatgaaatccctacgaaacccggtgaaaagaaagatgtctctgggcccctgcctcctgcatacagcccccgatatgttgaggctgcctggtacccgtggtgggtacgagagggcttcttcaaaccagaatatcaggcccggctgccccaagctacaggggagaccttttccatgtgtatcccacctcccaatgtcactggctccctgcacattggccacgcactcacggtggccatacaggatgccctcgtgcgctggcaccggatgcgtggggatcaagtgctgtgggtccctggttcagatcatgcaggaattgctacacaagctgtggtggagaaacaactgtggaaggaacggggagtgaggagacatgagctgagccgggaggccttccttagggaggtgtggcagtggaaggaggcgaaaggtggagagatctgtgagcagctgcgagctctgggtgcctccctggactgggatcgagagtgttttaccatggatgttggctcctcagtggctgtgactgaagcttttgtgcggctctacaaggcggggttgctgtaccggaaccatcagcttgtcaactggtcatgtgctttaagatcagccatctcggacattgaggtggagaaccggcccctgcctggccacacacagcttcgactgcctggctgccccacccccgtgtcttttggcctcctattttctgttgccttccccgtggatggagagcctgatgcagaggttgtggtaggaaccacaaggccagagacgctgcctggagatgtggctgtggccgttcatccagacgactcgcgatacacacatctacacgggcgacagcttcgtcaccccttgatggggcagcctcttcccctcatcacagactatgctgttcagccacatgtgggcacgggggcagtgaaggtgactccagctcacagtcctgccgatgctgagatgggggcccgacatggcttgagccccttgaatgtcattgcggaggatgggaccatgacctctctctgcggggactggctgcagggtcttcaccggtttgtggcccgggaaaagataatgtctgtgctgagtgaacggggcctgttccggggcctccagaaccaccccatggtactgcccatctgcagccgttctggggatgtgatagaatacctgctgaagaaccagtggtttgtccgctgccaggaaatgggggcccgagctgccaaggctgtggagtcgggggccctggagctcagtccctccttccaccagaagaactggcagcactggttttcccatattggggactggtgtgtctcccggcagctgtggtggggccatcagattccagcctacctggttgtagaggaccatgcgcagggagaagaggactgttgggtggtcgggcggtcagaggctgaggccagagaggtagcagcggaactgacagggaggccaggggcagagctgaccctggagagggatcctgatgtcctagacacatggttttcttctgccctgttccccttttctgccctgggctggccccaagagaccccagaccttgctcgtttctaccccctgtcacttttggaaacgggcagcgaccttctgctgttctgggtgggccgcatggtcatgttggggacccagctcacagggcagctgcccttcagcaaggtgcttcttcatcccatggttcgggacaggcagggccggaagatgagcaagtccctggggaatgtgctggacccaagagacatcatcagtggggtggagatgcaggtgctgcaggaaaagctgagaagcggaaatttggaccctgcagagctggccattgtggctgcagcacagaaaaaggactttcctcacgggatccctgagtgtgggacagatgccctgagattcacactctgctcccatggagttcaggcgggcgacttgcacctgtcagtctctgaggtccagagctgccgacatttctgcaacaagatctggaatgctcttcgctttatcctcaatgctttaggggagaaatttgtgccacagcctgctgaggagctgtctccctcctccccgatggatgcctggatcctgagccgccttgccctggctgcccaggagtgtgagcggggcttcctcacccgagagctctcgctcgtcactcatgccctgcaccacttctggcttcacaacctctgtgacgtctacctggaggctgtgaagcccgtgctgtggcactcgccccgccccctggggccccctcaggtcctgttctcctgcgctgacctcggcctccgcctcctggccccactgatgcccttcctggctgaagagctctggcagaggctgccccccaggcctggttgcccccctgcccccagcatctcggttgccccctaccccagcgcctgcagcttggagcactggcgccagccagagctggagcggcgcttctcccgggtccaagaggtcgtgcaggtgctaagggctctccaagccacgtaccagctcaccaaagcccggccccgagtgctgctgcagagctcagagcctggggaccagggcctcttcgaggccttcttggagcccctgggcaccctgggctactgtggggctgtgggcctgttacccccaggcgcagcagctccctccggctgggcccaggctccactcagtgacacggctcaagtctacatggagctgcagggcctggtggacccgcagatccagctacctctgttagccgcccgaaggtacaagttgcagaagcagcttgatagcctcacagccaggaccccatcagaaggggaggcagggactcagaggcaacaaaagctttcttccctccagctggaattgtcaaaactggacaaggcagcctctcacctccggcagctgatggatgagcctccagccccagggagcccggagctctaactcatcatccccatcagttttcctccctctcagacctgtctttgaggacaaacagatttgtcagctgtcagggtgcagtgggacgtcagagactatgtggtccatcgccttcattgtgtaaatgaggacacagactggcttggtcgcagtgactgtggtgtccttgagatgctcacattactgcccggcctgcctcccacctggaagtctgggaatgaggagattgagataaacttttgaaatcccaaa

SEQ ID NO: 198816 - DNA, 4073 bp, Homo sapiens; identical to SEQ ID NO: 198810
  Payload ID: 19224
  Gene Name: valyl-tRNA synthetase 2, mitochondrial
  ENST ID: ENST00000415079
  CDS Start-End: 633-3824

SEQ ID NO: 198817 - DNA, 460 bp, Homo sapiens
  Payload ID: 19224
  Gene Name: valyl-tRNA synthetase 2, mitochondrial
  ENST ID: ENST00000433908
  CDS Start-End: 116-460
acgctgcgggtcctgggcccaggccttgggatgggcgggaaggcctggccgcgccgggctgtgggcactgcaggaggcccctgtgcagatctcggcccctttccaaacactcctgatgcctcatttgcctctcgcttcttttcgaccaccattttgggggctgaggcactcacggggcctccccaggtttcactccgtttctacacagtcggagccccatggatctcccatctcccggaggaaccgtgaagccaaacagaagcgcctgcgagagaagcaggctactctggaggctgagatagcaggggagagcaagtcacctgcagaatccattaaggcctggaggcctaaggagttagtattgtatgaaatccctacgaaacccggtgaaaagaaagatgtctctgggcccctgcctcctgcatacagcccccgatatgttgaggctgcctggtacccg

SEQ ID NO: 198818 - DNA, 1103 bp, Homo sapiens
  Payload ID: 19224
  Gene Name: valyl-tRNA synthetase 2, mitochondrial
  ENST ID: ENST00000428017
  CDS Start-End: 126-1103
cgcggctccagggccacgttccagggtcgggtttggtggattcctcagtccctgccgccgcggggcgccctgggatagcggcggggcctcctgaacagatctcggcccctttccaaacactcctgatgcctcatttgcctctcgcctcttttcgaccaccattttgggggctgaggcactcacggggcctccccaggtttcactccgtttctacacagtcggagccccatggatctcccatctcccggaggaaccgtgaagccaaacagaagcgcctgcgagagaagcaggcgactctggaggctgagatagcaggggagagcaagtcacctgcagaatccattaaggcctggaggcctaaggagttagtattgtatgaaatccctacgaaacccggtgaaaagaaagatgtctctgggcccctgcctcctgcatacagcccccgatatgttgaggctgcctggtacccgtggtgggtacgagagggcttcttcaaaccagaatatcaggcccggctgccccaagctacaggggagaccttttccatgtgtatcccacctcccaatgtcactggctccctgcacattggccacgcactcacggtggccatacaggatgccctcgtgcgctggcaccggatgcgtggggatcaagtgctgtgggtccctggttcagatcatgcaggaattgctacacaagctgtggtggagaaacaactgtggaaggaacggggagtgaggagacatgagctgagccgggaggccttccttagggaggtgtggcagtggaaggaggcgaaaggtggagagatctgtgagcagctgcgagctctgggtgcctccctggactgggatcgagagtgttttaccatggatgttggctcctcagtggctgtgactgaagcttttgtgcggctctacaaggcggggttgctgtaccggaaccatcagcttgtcaactggtcatgtgctttaagatcagccatctcggacattgaggtggagaaccggcccctgcctggccacacacagcttcgactgcctggctgccccacccccgtgtcttttggcctcctattttctgttgccttccccgtggatgga

SEQ ID NO: 198819 - DNA, 1103 bp, Homo sapiens; identical to SEQ ID NO: 198818
  Payload ID: 19224
  Gene Name: valyl-tRNA synthetase 2, mitochondrial
  ENST ID: ENST00000411697
  CDS Start-End: 126-1103

SEQ ID NO: 198820 - DNA, 4073 bp, Homo sapiens; identical to SEQ ID NO: 198812
  Payload ID: 19224
  Gene Name: valyl-tRNA synthetase 2, mitochondrial
  ENST ID: ENST00000450090
  CDS Start-End: 633-3824

SEQ ID NO: 198821 - DNA, 460 bp, Homo sapiens
  Payload ID: 19224
  Gene Name: valyl-tRNA synthetase 2, mitochondrial
  ENST ID: ENST00000443384
  CDS Start-End: 116-460
acgctgcgggtcctgggcccaggccttgggatgggcgggaaggcctggccgcgccgggctgtgggcactgcaggaggcccctgtgcagatctcggcccctttccaaacactcctgatgcctcatttgcctctcgcctcttttcgaccaccattttgggggctgaggcactcacggggcctccccaggtttcactccgtttctacacagtcggagccccatggatctcccatctcccggaggaaccgtgaagccaaacagaagcgcctgcgagagaagcaggcgactctggaggctgagatagcaggggagagcaagtcacctgcagaatccattaaggcctggaggcctaaggagttagtattgtatgaaatccctacgaaacccggtgaaaagaaagatgtctctgggcccctgcctcctgcatacagcccccgatatgttgaggctgcctggtacccg

SEQ ID NO: 198822 - DNA, 460 bp, Homo sapiens; identical to SEQ ID NO: 198817
  Payload ID: 19224
  Gene Name: valyl-tRNA synthetase 2, mitochondrial
  ENST ID: ENST00000414570
  CDS Start-End: 116-460

SEQ ID NO: 198823 - DNA, 460 bp, Homo sapiens; identical to SEQ ID NO: 198814
  Payload ID: 19224
  Gene Name: valyl-tRNA synthetase 2, mitochondrial
  ENST ID: ENST00000416187
  CDS Start-End: 116-460

SEQ ID NO: 198824 - DNA, 1103 bp, Homo sapiens; identical to SEQ ID NO: 198818
  Payload ID: 19224
  Gene Name: valyl-tRNA synthetase 2, mitochondrial
  ENST ID: ENST00000431578
  CDS Start-End: 126-1103

SEQ ID NO: 198825 - DNA, 1103 bp, Homo sapiens; identical to SEQ ID NO: 198813
  Payload ID: 19224
  Gene Name: valyl-tRNA synthetase 2, mitochondrial
  ENST ID: ENST00000446577
  CDS Start-End: 126-1103

SEQ ID NO: 198826 - DNA, 1103 bp, Homo sapiens; identical to SEQ ID NO: 198818
  Payload ID: 19224
  Gene Name: valyl-tRNA synthetase 2, mitochondrial
  ENST ID: ENST00000425563
  CDS Start-End: 126-1103

SEQ ID NO: 198827 - DNA, 460 bp, Homo sapiens; identical to SEQ ID NO: 198814
  Payload ID: 19224
  Gene Name: valyl-tRNA synthetase 2, mitochondrial
  ENST ID: ENST00000421263
  CDS Start-End: 116-460

SEQ ID NO: 198828 - DNA, 4064 bp, Homo sapiens
  Payload ID: 19224
  Gene Name: valyl-tRNA synthetase 2, mitochondrial
  ENST ID: ENST00000542001
  CDS Start-End: 633-3818
gccagctgctgcgcatgcgccggccggggccccgcccccatgcgccgcgcggctccagggccacgttccagggtcgggtttggtggattcctcagtccctgccgccgcggggcgccctgggatagcggcggggcctcctggtgagcgcgcgccggggcggcctccgggaagtgggagacgctgcgggtcctgggcccaggccttgggatgggcgggaaggcttggccgcgccgggctgtgggcactgcaggaggcccctgtgcaggtggagatcgccgcggccctggcgggactccttgctggctcttgggcgcgctgatgcccatcatctccctgagtttctgagccctatctctcatgtgtcagtggtcaccgccgaatccagacactccggccctgttccggaagagccctgatatccgtggctccatggcgctgtctgtcgataccatgcactctagctctcaaggaggaaaggttttgtggaagggaatagagacttggaataacagacctgtgctaattagagacaggaaagatggaacaaggggagtgacccttctccacccccatatcctaatgtgctctctctctatccagaacagatctcggcccctttccaaacactcctgatgcctcatttgcctctcgcctcttttcgaccaccattttgggggctgaggcactcacggggcctccccaggtttcactccgtttctacacagtcggagccccatggatctcccatctcccggaggaaccgtgaagccaaacagaagcgcctgcgagagaagcaggcgactctggaggctgagatagcaggggagagcaagtcacctgcagaatccattaaggcctggaggcctaaggagttagtattgtatgaaatccctacgaaacccggtgaaaagaaagatgtctctgggcccctgcctcctgcatacagcccccgatatgttgaggctgcctggtacccgtggtgggtacgagagggcttcttcaaaccagaatatcaggcccggctgccccaagctacaggggagaccttttccatgtgtatcccacctcccaatgtcactggctccctgcacattggccacgcactcacggtggccatacaggatgccctcgtgcgctggcaccggatgcgtggggatcaagtgctgtgggtccctggttcagatcatgcaggaattgctacacaagctgtggtggagaaacaactgtggaaggaacggggagtgaggagacatgagctgagccgggaggccttccttagggaggtgtggcagtggaaggaggcgaaaggtggagagatctgtgagcagctgcgagctctgggtgcctccctggactgggatcgagagtgttttaccatggatgttggctcctcagtggctgtgactgaagcttttgtgcggctctacaaggcggggttgctgtaccggaaccatcagcttgtcaactggtcatgtgctttaagatcagccatctcggacattgaggtggagaaccggcccctgcctggccacacacagcttcgactgcctggctgccccacccccgtgtcttttggcctcctattttctgttgccttccccgtggatggagagcctgatgcagaggttgtggtaggaaccacaaggccagagacgctgcctggagatgtggctgtggccgttcatccagacgactcgcgatacacacatctacacgggcgacagcttcgtcaccccttgatggggcagcctcttcccctcatcacagactatgctgttcagccacatgtgggcacggtgaaggtgactccagctcacagtcctgccgatgctgagatgggggcccgacatggcttgagccccttgaatgtcattgcggaggatgggaccatgacctccctctgcggggactggctgcagggtcttcaccggtttgtggcccgggaaaagataatgtctgtgctgagtgaatggggcctgttccggggcctccagaaccaccccatggtactgcccatctgcagccgttctggggatgtgatagaatacctgctgaagaaccagtggtttgtccgctgccaggaaatgggggcccgagctgccaaggctgtggagtcgggggccctggagctcagtccctccttccaccagaagaactggcagcactggttttcccatattggggactggtgtgtctcccggcagctgtggtggggccatcagattccagcctacctggttgtagaggaccatgcgcagggagaagaggactgttgggtggttgggcggtcagaggctgaggccagagaggtagcagcggaactgacagggaggccaggggcagagctgaccctggagagggatcctgatgtcctagacacatggttttcttctgccctgttccccttttctgccctgggctggccccaagagaccccagaccttgctcgtttctaccccctgtcacttttggaaacgggcagcgaccttctgctgttctgggtgggccgcatggtcatgttggggacccagctcacagggcagctgcccttcagcaaggtgcttcttcatcccatggttcgggacaggcagggccggaagatgagcaagtccctggggaatgtgctggacccaagagacatcatcagtggggtggagatgcaggtgctgcaggaaaagctgagaagcggaaatttggaccctgcagagctggccattgtggctgcagcacagaaaaaggactttcctcacgggatccctgagtgtgggacagatgccctgagattcacactctgctcccatggagttcaggcgggcgacttgcacctgtcagtctctgaggtccagagctgccgacatttctgcaacaagatctggaatgctcttcgctttatcctcaatgctttaggggagaaatttgtgccacagcctgctgaggagctgtctccctcctccccgatggatgcctggatcctgagccgccttgccctggctgcccaggagtgtgagcggggcttcctcacccgagagctctcgctcgtcactcatgccctgcaccacttctggcttcacaacctctgtgacgtctacctggaggctgtgaagcccgtgctgtggcactcgccccgccccctggggccccctcaggtcctgttctcctgcgctgacctcggcctccgcctcctggccccactgatgcccttcctggctgaagagctctggcagaggctgccccccaggcctggttgcccccctgcccccagcatctcggttgccccctaccccagcgcctgcagcttggagcactggcgccagccagagctggagcggcgcttctcccgggtccaagaggtcgtgcaggtgctaagggctctccgagccacgtaccagctcaccaaagcccggccccgagtgctgctgcagagctcagagcctggggaccagggcctcttcgaggccttcttggagcccctgggcaccctgggctactgtggggctgtgggcctgttacccccaggcgcagcagctccctccggctgggcccaggctccactcagtgacacggctcaagtctacatggagctgcagggcctggtggacccgcagatccagctacctctgttagccgcccgaaggtacaagttgcagaagcagcttgacagcctcacagccaggaccccatcagaaggggaggcagggactcagaggcaacaaaagctttcttccctccagctggaattgtcaaaactggacaaggcagcctctcacctccggcagctgatggatgagcctccagccccagggagcccggagctctaactcatcatccccatcagttttcctccctctcagacctgtctttgaggacaaacagatttgtcagctgtcagggtgcagtgggacgtcagagactatgtggtccatcgccttcattgtgtaaatgaggacacagactggcttggtcgcagtgactgtggtgtccttgagatgctcacattactgcccggcctgcctcccacctggaagtctgggaatgaggagattgagataaacttttgaaatccc

SEQ ID NO: 198829 - DNA, 3566 bp, Homo sapiens
  Payload ID: 19224
  Gene Name: valyl-tRNA synthetase 2, mitochondrial
  Uniprot ID: Q5ST30
  ENST ID: ENST00000541562
  CDS Start-End: 82-3363
ggcggggcctcctggtgagcgcgcgccggggcggcctccgggaagtgggagacgctgcgggtcctgggcccaggccttgggatgggcgggaaggcttggccgcgccgggctgtgggcactgcaggaggcccctgtgcagaacagatctcggcccctttccaaacactcctgatgcctcatttgcctctcgcctcttttcgaccaccattttgggggctgaggcactcacggggcctccccaggtttcactccgtttctacacagtcggagccccatggatctcccatctcccggaggaaccgtgaagccaaacagaagcgcctgcgagagaagcaggcgactctggaggctgagatagcaggggagagcaagtcacctgcagaatccattaaggcctggaggcctaaggagttagtattgtatgaaatccctacgaaacccggtgaaaagaaagatgtctctgggcccctgcctcctgcatacagcccccgatatgttgaggctgcctggtacccgtggtgggtacgagagggcttcttcaaaccagaatatcaggcccggctgccccaagctacaggggagaccttttccatgtgtatcccacctcccaatgtcactggctccctgcacattggccacgcactcacggtggccatacaggatgccctcgtgcgctggcaccggatgcgtggggatcaagtgctgtgggtccctggttcagatcatgcaggaattgctacacaagctgtggtggagaaacaactgtggaaggaacggggagtgaggagacatgagctgagccgggaggccttccttagggaggtgtggcagtggaaggaggcgaaaggtggagagatctgtgagcagctgcgagctctgggtgcctccctggactgggatcgagagtgttttaccatggatgttggctcctcagtggctgtgactgaagcttttgtgcggctctacaaggcggggttgctgtaccggaaccatcagcttgtcaactggtcatgtgctttaagatcagccatctcggacattgaggtggagaaccggcccctgcctggccacacacagcttcgactgcctggctgccccacccccgtgtcttttggcctcctattttctgttgccttccccgtggatggagagcctgatgcagaggttgtggtaggaaccacaaggccagagacgctgcctggagatgtggctgtggccgttcatccagacgactcgcgatacacacatctacacgggcgacagcttcgtcaccccttgatggggcagcctcttcccctcatcacagactatgctgttcagccacatgtgggcacgggggcagtgaaggtgactccagctcacagtcctgccgatgctgagatgggggcccgacatggcttgagccccttgaatgtcattgcggaggatgggaccatgacctccctctgcggggactggctgcagggtcttcaccggtttgtggcccgggaaaagataatgtctgtgctgagtgaatggggcctgttccggggcctccagaaccaccccatggtactgcccatctgcagccgttctggggatgtgatagaatacctgctgaagaaccagtggtttgtccgctgccaggaaatgggggcccgagctgccaaggctgtggagtcgggggccctggagctcagtccctccttccaccagaagaactggcagcactggttttcccatattggggactggtgtgtctcccggcagctgtggtggggccatcagattccagcctacctggttgtagaggaccatgcgcagggagaagaggactgttgggtggttgggcggtcagaggctgaggccagagaggtagcagcggaactgacagggaggccaggggcagagctgaccctggagagggatcctgatgtcctagacacatggttttcttctgccctgttccccttttctgccctgggctggccccaagagaccccagaccttgctcgtttctaccccctgtcacttttggaaacgggcagcgaccttctgctgttctgggtgggccgcatggtcatgttggggacccagctcacagggcagctgcccttcagcaaggtgcttcttcatcccatggttcgggacaggcagggccggaagatgagcaagtccctggggaatgtgctggacccaagagacatcatcagtggggtggagatgcaggtgctgcaggaaaagctgagaagcggaaatttggaccctgcagagctggccattgtggctgcagcacagaaaaaggactttcctcacgggatccctgagtgtgggacagatgccctgagattcacactctgctcccatggagttcaggcgggcgacttgcacctgtcagtctctgaggtccagagctgccgacatttctgcaacaagatctggaatgctcttcgctttatcctcaatgctttaggggagaaatttgtgccacagcctgctgaggagctgtctccctcctccccgatggatgcctggatcctgagccgccttgccctggctgcccaggagtgtgagcggggcttcctcacccgagagctctcgctcgtcactcatgccctgcaccacttctggcttcacaacctctgtgacgtctacctggaggctgtgaagcccgtgctgtggcactcgccccgccccctggggccccctcaggtcctgttctcctgcgctgacctcggcctccgcctcctggccccactgatgcccttcctggctgaagagctctggcagaggctgccccccaggcctggttgcccccctgcccccagcatctcggttgccccctaccccagcgcctgcagcttggagcactggcgccagccagagctggagcggcgcttctcccgggtccaagaggtcgtgcaggtgctaagggctctccgagccacgtaccagctcaccaaagcccggccccgagtgctgctgcagagctcagagcctggggaccagggcctcttcgaggccttcttggagcccctgggcaccctgggctactgtggggctgtgggcctgttacccccaggcgcagcagctccctccggctgggcccaggctccactcagtgacacggctcaagtctacatggagctgcagggcctggtggacccgcagatccagctacctctgttagccgcccgaaggtacaagttgcagaagcagcttgacagcctcacagccaggaccccatcagaaggggaggcagggactcagaggcaacaaaagctttcttccctccagctggaattgtcaaaactggacaaggcagcctctcacctccggcagctgatggatgagcctccagccccagggagcccggagctctaactcatcatccccatcagttttcctccctctcagacctgtctttgaggacaaacagatttgtcagctgtcagggtgcagtgggacgtcagagactatgtggtccatcgccttcattgtgtaaatgaggacacagactggcttggtcgcagtgactgtggtgtccttgagatgctcacattactgcccggcctgcctcccacctg

SEQ ID NO: 198830 - DNA, 4064 bp, Homo sapiens
  Payload ID: 19224
  Gene Name: valyl-tRNA synthetase 2, mitochondrial
  ENST ID: ENST00000550773
  CDS Start-End: 633-3818
gccagctgctgcgcatgcgccggccggggccccgcccccatgcgccgcgcggctccagggccacgttccagggtcgggtttggtggattcctcagtccctgccgccgcggggcgccctgggatagcggcggggcctcctggtgagcgcgcgccggggcggcctccgggaagtgggagacgctgcgggtcctgggcccaggccttgggatgggcgggaaggcctggccgcgccgggctgtgggcactgcaggaggcccctgtgcaggtggagatcgccgcggccctggcgggactctttgctggctcttgggcgcgctgatgcccatcatctccctgagtttctgagccctatctctcatgtgtcagtggtcaccgccgaatccagacactccggccctgttccggaagagccctgatatccgtggctccatggcgctgtctgtcgataccatgcactctagctctcaaggaggaaaggttttgtggaagggaatagagacttggaataacagacctgtgctaattagagacgggaaagatggaacaaggggagtgacccttctccacccccatatcctaatgtgctctctctctatccagaacagatctcggcccctttccaaacactcctgatgcctcatttgcctctcgcttcttttcgaccaccattttgggggctgaggcactcacggggcctccccaggtttcactccgtttctacacagtcggagccccatggatctcccatctcccggaggaaccgtgaagccaaacagaagcgcctgcgagagaagcaggctactctggaggctgagatagcaggggagagcaagtcacctgcagaatccattaaggcctggaggcctaaggagttagtattgtatgaaatccctacgaaacccggtgaaaagaaagatgtctctgggcccctgcctcctgcatacagcccccgatatgttgaggctgcctggtacccgtggtgggtacgagagggcttcttcaaaccagaatatcaggcccggctgccccaagctacaggggagaccttttccatgtgtatcccacctcccaatgtcactggctccctgcacattggccacgcactcacggtggccatacaggatgccctcgtgcgctggcaccggatgcgtggggatcaagtgctgtgggtccctggttcagatcatgcaggaattgctacacaagctgtggtggagaaacaactgtggaaggaacggggagtgaggagacatgagctgagccgggaggccttccttagggaggtgtggcagtggaaggaggcgaaaggtggagagatctgtgagcagctgcgagctctgggtgcctccctggactgggatcgagagtgttttaccatggatgttggctcctcagtggctgtgactgaagcttttgtgcggctctacaaggcggggttgctgtaccggaaccatcagcttgtcaactggtcatgtgctttaagatcagccatctcggacattgaggtggagaaccggcccctgcctggccacacacagcttcgactgcctggctgccccacccccgtgtcttttggcctcctattttctgttgccttccccgtggatggagagcctgatgcagaggttgtggtaggaaccacaaggccagagacgctgcctggagatgtggctgtggccgttcatccagacgactcgcgatacacacatctacacgggcgacagcttcgtcaccccttgatggggcagcctcttcccctcatcacagactatgctgttcagccacatgtgggcacggtgaaggtgactccagctcacagtcctgccgatgctgagatgggggcccgacatggcttgagccccttgaatgtcattgcggaggatgggaccatgacctccctctgcggggactggttgcagggtcttcaccggtttgtggcccgggaaaagataatgtctgtgctgagtgaacggggcctattccggggcctccagaaccaccccatggtactgcccatctgcagccgttctggggatgtgatagaatacctgctgaagaaccagtggtttgtccgctgccaggaaatgggggcccgagctgccaaggctgtggagtcgggggccctggagctcagtccctccttccaccagaagaactggcagcactggttttcccatattggggactggtgtgtctcccggcagctgtggtggggccatcagattccagcctacctggttgtagaggaccatgcgcagggagaagaggactgttgggtggttgggcggtcagaggctgaggccagagaggtagcagcggaactgacagggaggccaggggcagagctgaccctggagagggatcctgatgtcctagacacatggttttcttctgccctgttccccttttctgccctgggctggccccaagagaccccagaccttgctcgtttctaccccctgtcacttttggaaacgggcagcgaccttctgctgttctgggtgggccgcatggtcatgttggggacccagctcacagggcagctgcccttcagcaaggtgcttcttcatcccatggttcgggacaggcagggccggaagatgagcaagtccctggggaatgtgctggacccaagagacatcatcagtggggtggagatgcagttgctgcaggaaaagctgagaagcggaaatttggaccctgcagagctggccattgtggctgcagcacagaaaaaggactttcctcacgggatccctgagtgtgggacagatgccctgagattcacactctgctcccatggagttcaggcgggcgacttgcacctgtcagtctctgaggtccagagctgccgacatttctgcaacaagatctggaatgctcttcgctttatcctcaatgctttaggggagaaatttgtgccacagcctgctgaggagctgtctccctcctccccgatggatgcctggatcctgagccgccttgccctggctgcccaggagtgtgagcggggcttcctcacccgagagctctcgctcgtcactcatgccctgcaccacttctggcttcacaacctctgtgacgtctacctggaggctgtgaagcccgtgctgtggcactcgccccgccccctggggccccctcaggtcctgttctcctgcgctgacctcggcctccgcctcctggccccactgatgcccttcctggctgaagagctctggcagaggctgccccccaggcctggttgcccccctgcccccagcatctcggttgccccctaccctagcgcctgcagcttggagcactggcgccagccagagctggagcggcgcttctcccgggtccaagaggtcgtgcaggtgctaagggctctccgagccacgtaccagctcaccaaagcccggccccgagtgctgctgcagagctcagagcctggggaccagggcctcttcgaggccttcttggagcccctgggcaccctgggctactgtggggctgtgggcctgttacccccaggcacagcagctccctccggctgggcccaggctccactcagtgacacggctcaagtctacatggagctgcagggcctggtggacccgcagatccagctacctctgttagccgcccgaaggtacaagttgcagaagcagcttgatagcctcacagccaggaccccatcagaaggggaggcagggactcagaggcaacaaaagctttcttccctccagctggaattgtcaaaactggacaaggcagcctctcacctccggcagctgatggatgagcctccagccccagggagcccggagctctaactcatcatccccatcagttttcctccctctcagacctgtctttgaggacaaacagatttgtcagctgtcagggtgcagtgggacgtcagagactatgtggtccatcgccttcattgtgtaaatgaggacacagactggcttggtcgcagtgactgtggtgtccttgagatgctcacattactgcccggcctgcctcccacctggaagtctgggaatgaggagattgagataaacttttgaaatccc

SEQ ID NO: 198831 - DNA, 3609 bp, Homo sapiens
  Payload ID: 19224
  Gene Name: valyl-tRNA synthetase 2, mitochondrial
  ENST ID: ENST00000546854
  CDS Start-End: 82-3363
ggcggggcctcctggtgagcgcgcgccggggcggcctccgggaagtgggagacgctgcgggtcctgggcccaggccttgggatgggcgggaaggcttggccgcgccgggctgtgggcactgcaggaggcccctgtgcagaacagatctcggcccctttccaaacactcctgatgcctcatttgcctctcgcctcttttcgaccaccattttgggggctgaggcactcacggggcctccccaggtttcactccgtttctacacagtcggagccccatggatctcccatctcccggaggaaccgtgaagccaaacagaagcgcctgcgagagaagcaggcgactctggaggctgagatagcaggggagagcaagtcacctgcagaatccattaaggcctggaggcctaaggagttagtattgtatgaaatccctacgaaacccggtgaaaagaaagatgtctctgggcccctgcctcctgcatacagcccccgatatgttgaggctgcctggtacccgtggtgggtacgagagggcttcttcaaaccagaatatcaggcccggctgccccaagctacaggggagaccttttccatgtgtatcccacctcccaatgtcactggctccctgcacattggccacgcactcacggtggccatacaggatgccctcgtgcgctggcaccggatgcgtggggatcaagtgctgtgggtccctggttcagatcatgcaggaattgctacacaagctgtggtggagaaacaactgtggaaggaacggggagtgaggagacatgagctgagccgggaggccttccttagggaggtgtggcagtggaaggaggcgaaaggtggagagatctgtgagcagctgcgagctctgggtgcctccctggactgggatcgagagtgttttaccatggatgttggctcctcagtggctgtgactgaagcttttgtgcggctctacaaggcggggttgctgtaccggaaccatcagcttgtcaactggtcatgtgctttaagatcagccatctcggacattgaggtggagaaccggcccctgcctggccacacacagcttcgactgcctggctgccccacccccgtgtcttttggcctcctattttctgttgccttccccgtggatggagagcctgatgcagaggttgtggtaggaaccacaaggccagagacgctgcctggagatgtggctgtggccgttcatccagacgactcgcgatacacacatctacacgggcgacagcttcgtcaccccttgatggggcagcctcttcccctcatcacagactatgctgttcagccacatgtgggcacgggggcagtgaaggtgactccagctcacagtcctgccgatgctgagatgggggcccgacatggcttgagccccttgaatgtcattgcggaggatgggaccatgacctccctctgcggggactggctgcagggtcttcaccggtttgtggcccgggaaaagataatgtctgtgctgagtgaatggggcctgttccggggcctccagaaccaccccatggtactgcccatctgcagccgttctggggatgtgatagaatacctgctgaagaaccagtggtttgtccgctgccaggaaatgggggcccgagctgccaaggctgtggagtcgggggccctggagctcagtccctccttccaccagaagaactggcagcactggttttcccatattggggactggtgtgtctcccggcagctgtggtggggccatcagattccagcctacctggttgtagaggaccatgcgcagggagaagaggactgttgggtggttgggcggtcagaggctgaggccagagaggtagcagcggaactgacagggaggccaggggcagagctgaccctggagagggatcctgatgtcctagacacatggttttcttctgccctgttccccttttctgccctgggctggccccaagagaccccagaccttgctcgtttctaccccctgtcacttttggaaacgggcagcgaccttctgctgttctgggtgggccgcatggtcatgttggggacccagctcacagggcagctgcccttcagcaaggtgcttcttcatcccatggttcgggacaggcagggccggaagatgagcaagtccctggggaatgtgctggacccaagagacatcatcagtggggtggagatgcaggtgctgcaggaaaagctgagaagcggaaatttggaccctgcagagctggccattgtggctgcagcacagaaaaaggactttcctcacgggatccctgagtgtgggacagatgccctgagattcacactctgctcccatggagttcaggcgggcgacttgcacctgtcagtctctgaggtccagagctgccgacatttctgcaacaagatctggaatgctcttcgctttatcctcaatgctttaggggagaaatttgtgccacagcctgctgaggagctgtctccctcctccccgatggatgcctggatcctgagccgccttgccctggctgcccaggagtgtgagcggggcttcctcacccgagagctctcgctcgtcactcatgccctgcaccacttctggcttcacaacctctgtgacgtctacctggaggctgtgaagcccgtgctgtggcactcgccccgccccctggggccccctcaggtcctgttctcctgcgctgacctcggcctccgcctcctggccccactgatgcccttcctggctgaagagctctggcagaggctgccccccaggcctggttgcccccctgcccccagcatctcggttgccccctaccccagcgcctgcagcttggagcactggcgccagccagagctggagcggcgcttctcccgggtccaagaggtcgtgcaggtgctaagggctctccgagccacgtaccagctcaccaaagcccggccccgagtgctgctgcagagctcagagcctggggaccagggcctcttcgaggccttcttggagcccctgggcaccctgggctactgtggggctgtgggcctgttacccccaggcgcagcagctccctccggctgggcccaggctccactcagtgacacggctcaagtctacatggagctgcagggcctggtggacccgcagatccagctacctctgttagccgcccgaaggtacaagttgcagaagcagcttgacagcctcacagccaggaccccatcagaaggggaggcagggactcagaggcaacaaaagctttcttccctccagctggaattgtcaaaactggacaaggcagcctctcacctccggcagctgatggatgagcctccagccccagggagcccggagctctaactcatcatccccatcagttttcctccctctcagacctgtctttgaggacaaacagatttgtcagctgtcagggtgcagtgggacgtcagagactatgtggtccatcgccttcattgtgtaaatgaggacacagactggcttggtcgcagtgactgtggtgtccttgagatgctcacattactgcccggcctgcctcccacctggaagtctgggaatgaggagattgagataaacttttgaaatccc

SEQ ID NO: 198832 - DNA, 3609 bp, Homo sapiens
  Payload ID: 19224
  Gene Name: valyl-tRNA synthetase 2, mitochondrial
  ENST ID: ENST00000553245
  CDS Start-End: 82-3363
ggcggggcctcctggtgagcgcgcgccggggcggcctccgggaagtgggagacgctgcgggtcctgggcccaggccttgggatgggcgggaaggcttggccgcgccgggctgtgggcactgcaggaggcccctgtgcagaacagatctcggcccctttccaaacactcctgatgcctcatttgcctctcgcctcttttcgaccaccattttgggggctgaggcactcacggggcctccccaggtttcactccgtttctacacagtcggagccccatggatctcccatctcccggaggaaccgtgaagccaaacagaagcgcctgcgagagaagcaggcgactctggaggctgagatagcaggggagagcaagtcacctgcagaatccattaaggcctggaggcctaaggagttagtattgtatgaaatccctacgaaacccggtgaaaagaaagatgtctctgggcccctgcctcctgcatacagcccccgatatgttgaggctgcctggtacccgtggtgggtacgagagggcttcttcaaaccagaatatcaggcccggctgccccaagctacaggggagaccttttccatgtgtatcccacctcccaatgtcactggctccctgcacattggccacgcactcacggtggccatacaggatgccctcgtgcgctggcaccggatgcgtggggatcaagtgctgtgggtccctggttcagatcatgcaggaattgctacacaagctgtggtggagaaacaactgtggaaggaacggggagtgaggagacatgagctgagccgggaggccttccttagggaggtgtggcagtggaaggaggcgaaaggtggagagatctgtgagcagctgcgagctctgggtgcctccctggactgggatcgagagtgttttaccatggatgttggctcctcagtggctgtgactgaagcttttgtgcggctctacaaggcggggttgctgtaccggaaccatcagcttgtcaactggtcatgtgctttaagatcagccatctcggacattgaggtggagaaccggcccctgcctggccacacacagcttcgactgcctggctgccccacccccgtgtcttttggcctcctattttctgttgccttccccgtggatggagagcctgatgcagaggttgtggtaggaaccacaaggccagagacgctgcctggagatgtggctgtggccgttcatccagacgactcgcgatacacacatctacacgggcgacagcttcgtcaccccttgatggggcagcctcttcccctcatcacagactatgctgttcagccacatgtgggcacgggggcagtgaaggtgactccagctcacagtcctgccgatgctgagatgggggcccgacatggcttgagccccttgaatgtcattgcggaggatgggaccatgacctccctctgcggggactggctgcagggtcttcaccggtttgtggcccgggaaaagataatgtctgtgctgagtgaatggggcctgttccggggcctccagaaccaccccatggtactgcccatctgcagccgttctggggatgtgatagaatacctgctgaagaaccagtggtttgtccgctgccaggaaatgggggcccgagctgccaaggctgtggagtcgggggccctggagctcagtccctccttccaccagaagaactggcagcactggttttcccatattggggactggtgtgtctcccggcagctgtggtggggccatcagattccagcctacctggttgtagaggaccatgcgcagggagaagaggactgttgggtggttgggcggtcagaggctgaggccagagaggtagcagcggaactgacagggaggccaggggcagagctgaccctggagagggatcctgatgtcctagacacatggttttcttctgccctgttccccttttctgccctgggctggccccaagagaccccagaccttgctcgtttctaccccctgtcacttttggaaacgggcagcgaccttctgctgttctgggtgggccgcatggtcatgttggggacccagctcacagggcagctgcccttcagcaaggtgcttcttcatcccatggttcgggacaggcagggccggaagatgagcaagtccctggggaatgtgctggacccaagagacatcatcagtggggtggagatgcaggtgctgcaggaaaagctgagaagcggaaatttggaccctgcagagctggccattgtggctgcagcacagaaaaaggactttcctcacgggatccctgagtgtgggacagatgccctgagattcacactctgctcccatggagttcaggcgggcgacttgcacctgtcagtctctgaggtccagagctgccgacatttctgcaacaagatctggaatgctcttcgctttatcctcaatgctttaggggagaaatttgtgccacagcctgctgaggagctgtctccctcctccccgatggatgcctggatcctgagccgccttgccctggctgcccaggagtgtgagcggggcttcctcacccgagagctctcgctcgtcactcatgccctgcaccacttctggcttcacaacctctgtgacgtctacctggaggctgtgaagcccgtgctgtggcactcgccccgccccctggggccccctcaggtcctgttctcctgcgctgacctcggcctccgcctcctggccccactgatgcccttcctggctgaagagctctggcagaggctgccccccaggcctggttgcccccctgcccccagcatctcggttgccccctaccccagcgcctgcagcttggagcactggcgccagccagagctggagcggcgcttctcccgggtccaagaggtcgtgcaggtgctaagggctctccgagccacgtaccagctcaccaaagcccggccccgagtgctgctgcagagctcagagcctggggaccagggcctcttcgaggccttcttggagcccctgggcaccctgggctactgtggggctgtgggcctgttacccccaggcgcagcagctccctccggctgggcccaggctccactcagtgacacggctcaagtctacatggagctgcagggcctggtggacccgcagatccagctacctctgttagccgcccgaaggtacaagttgcagaagcagcttgatagcctcacagccaggaccccatcagaaggggaggcagggactcagaggcaacaaaagctttcttccctccagctggaattgtcaaaactggacaaggcagcctctcacctccagcagctgatggatgagcctccagccccagggagcccggagctctaactcatcatccccatcagttttcctccctctcagacctgtctttgaggacaaacagatttgtcagctgtcagggtgcagtgggacgtcagagactatgtggtccatcgccttcattgtgtaaatgaggacacagactggcttggtcgcagtgactgtggtgtccttgagatgctcacattactgcccggcctgcctcccacctggaagtctgggaatgaggagattgagataaacttttgaaatccc

SEQ ID NO: 198833 - DNA, 3609 bp, Homo sapiens
  Payload ID: 19224
  Gene Name: valyl-tRNA synthetase 2, mitochondrial
  ENST ID: ENST00000548165
  CDS Start-End: 82-3363
ggcggggcctcctggtgagcgcgcgccggggcggcctccgggaagtgggagacgctgcgggtcctgggcccaggccttgggatgggcgggaaggcctggccgcgccgggctgtgggcactgcaggaggcccctgtgcagaacagatctcggcccctttccaaacactcctgatgcctcatttgcctctcgcctcttttcgaccaccattttgggggctgaggcactcacggggcctccccaggtttcactccgtttctacacagtcggagccccatggatctcccatctcccggaggaaccgtgaagccaaacagaagcgcctgcgagagaagcaggcgactctggaggctgagatagcaggggagagcaagtcacctgcagaatccattaaggcctggaggcctaaggagttagtattgtatgaaatccctacgaaacccggtgaaaagaaagatgtctctgggcccctgcctcctgcatacagcccccgatatgttgaggctgcctggtacccgtggtgggtacgagagggcttcttcaaaccagaatatcaggcccggctgccccaagctacaggggagaccttttccatgtgtatcccacctcccaatgtcactggctccctgcacattggccacgcactcacggtggccatacaggatgccctcgtgcgctggcaccggatgcgtggggatcaagtgctgtgggtccctggttcagatcatgcaggaattgctacacaagctgtggtggagaaacaactgtggaaggaacggggagtgaggagacatgagctgagccgggaggccttccttagggaggtgtggcagtggaaggaggcgaaaggtggagagatctgtgagcagctgcgagctctgggtgcctccctggactgggatcgagagtgttttaccatggatgttggctcctcagtggctgtgactgaagcttttgtgcggctctacaaggcggggttgctgtaccggaaccatcagcttgtcaactggtcatgtgctttaagatcagccatctcggacattgaggtggagaaccggcccctgcctggccacacacagcttcgactgcctggctgccccacccccgtgtcttttggcctcctattttctgttgccttccccgtggatggagagcctgatgcagaggttgtggtaggaaccacaaggccagagacgctgcctggagatgtggctgtggccgttcatccagacgactcgcgatacacacatctacacgggcgacagcttcgtcaccccttgatggggcagcctcttcccctcatcacagactatgctgttcagccacatgtgggcacgggggcagtgaaggtgactccagctcacagtcctgccgatgctgagatgggggcccgacatggcttgagccccttgaatgtcattgcggaggatgggaccatgacctctctctgcggggactggctgcagggtcttcaccggtttgtggcccgggaaaagataatgtctgtgctgagtgaacggggcctgttccggggcctccagaaccaccccatggtactgcccatctgcagccgttctggggatgtgatagaatacctgctgaagaaccagtggtttgtccgctgccaggaaatgggggcccgagctgccaaggctgtggagtcgggggccctggagctcagtccctccttccaccagaagaactggcagcactggttttcccatattggggactggtgtgtctcccggcagctgtggtggggccatcagattccagcctacctggttgtagaggaccatgcgcagggagaagaggactgttgggtggtcgggcggtcagaggctgaggccagagaggtagcagcggaactgacagggaggccaggggcagagctgaccctggagagggatcctgatgtcctagacacatggttttcttctgccctgttccccttttctgccctgggctggccccaagagaccccagaccttgctcgtttctaccccctgtcacttttggaaacgggcagcgaccttctgctgttctgggtgggccgcatggtcatgttggggacccagctcacagggcagctgcccttcagcaaggtgcttcttcatcccatggttcgggacaggcagggccggaagatgagcaagtccctggggaatgtgctggacccaagagacatcatcagtggggtggagatgcaggtgctgcaggaaaagctgagaagcggaaatttggaccctgcagagctggccattgtggctgcagcacagaaaaaggactttcctcacgggatccctgagtgtgggacagatgccctgagattcacactctgctcccatggagttcaggcgggcgacttgcacctgtcagtctctgaggtccagagctgccgacatttctgcaacaagatctggaatgctcttcgctttatcctcaatgctttaggggagaaatttgtgccacagcctgctgaggagctgtctccctcctccccgatggatgcctggatcctgagccgccttgccctggctgcccaggagtgtgagcggggcttcctcacccgagagctctcgctcgtcactcatgccctgcaccacttctggcttcacaacctctgtgacgtctacctggaggctgtgaagcccgtgctgtggcactcgccccgccccctggggccccctcaggtcctgttctcctgcgctgacctcggcctccgcctcctggccccactgatgcccttcctggctgaagagctctggcagaggctgccccccaggcctggttgcccccctgcccccagcatctcggttgccccctaccccagcgcctgcagcttggagcactggcgccagccagagctggagcggcgcttctcccgggtccaagaggtcgtgcaggtgctaagggctctccaagccacgtaccagctcaccaaagcccggccccgagtgctgctgcagagctcagagcctggggaccagggcctcttcgaggccttcttggagcccctgggcaccctgggctactgtggggctgtgggcctgttacccccaggcgcagcagctccctccggctgggcccaggctccactcagtgacacggctcaagtctacatggagctgcagggcctggtggacccgcagatccagctacctctgttagccgcccgaaggtacaagttgcagaagcagcttgatagcctcacagccaggaccccatcagaaggggaggcagggactcagaggcaacaaaagctttcttccctccagctggaattgtcaaaactggacaaggcagcctctcacctccggcagctgatggatgagcctccagccccagggagcccggagctctaactcatcatccccatcagttttcctccctctcagacctgtctttgaggacaaacagatttgtcagctgtcagggtgcagtgggacgtcagagactatgtggtccatcgccttcattgtgtaaatgaggacacagactggcttggtcgcagtgactgtggtgtccttgagatgctcacattactgcccggcctgcctcccacctggaagtctgggaatgaggagattgagataaacttttgaaatccc

SEQ ID NO: 198834 - DNA, 4064 bp, Homo sapiens; identical to SEQ ID NO: 198830
  Payload ID: 19224
  Gene Name: valyl-tRNA synthetase 2, mitochondrial
  ENST ID: ENST00000547340
  CDS Start-End: 633-3818

SEQ ID NO: 198835 - DNA, 4064 bp, Homo sapiens
  Payload ID: 19224
  Gene Name: valyl-tRNA synthetase 2, mitochondrial
  ENST ID: ENST00000549900
  CDS Start-End: 633-3818
gccagctgctgcgcatgcgccggccggggccccgcccccatgcgccgcgcggctccagggccacgttccagggtcgggtttggtggattcctcagtccctgccgccgcggggcgccctgggatagcggcggggcctcctggtgagcgcgcgccggggcggcctccgggaagtgggagacgctgcgggtcctgggcccaggccttgggatgggcgggaaggcttggccgcgccgggctgtgggcactgcaggaggcccctgtgcaggtggagatcgccgcggccctggcgggactccttgctggctcttgggcgcgctgatgcccatcatctccctgagtttctgagccctatctctcatgtgtcagtggtcaccgccgaatccagacactccggccctgttccggaagagccctgatatccgtggctccatggtgctgtctgtcgataccatgcactctagctctcaaggaggaaaggttttgtggaagggaatagagacttggaataacagacctgtgctaattagagacaggaaagatggaacaaggggagtgacccttctccacccccatatcctaatgtgctctctctctatccagaacagatctcggcccctttccaaacactcctgatgcctcatttgcctctcgcctcttttcgaccaccattttgggggctgaggcactcacggggcctccccaggtttcactccgtttctacacagtcggagccccatggatctcccatctcccggaggaaccgtgaagccaaacagaagcgcctgcgagagaagcaggcgactctggaggctgagatagcaggggagagcaagtcacctgcagaatccattaaggcctggaggcctaaggagttagtattgtatgaaatccctacgaaacccggtgaaaagaaagatgtctctgggcccctgcctcctgcatacagcccccgatatgttgaggctgcctggtacccgtggtgggtacgagagggcttcttcaaaccagaatatcaggcccggctgccccaagctacaggggagaccttttccatgtgtatcccacctcccaatgtcactggctccctgcacattggccacgcactcacggtggccatacaggatgccctcgtgcgctggcaccggatgcgtggggatcaagtgctgtgggtccctggttcagatcatgcaggaattgctacacaagctgtggtggagaaacaactgtggaaggaacggggagtgaggagacatgagctgagccgggaggccttccttagggaggtgtggcagtggaaggaggcgaaaggtggagagatctgtgagcagctgcgagctctgggtgcctccctggactgggatcgagagtgttttaccatggatgttggctcctcagtggctgtgactgaagcttttgtgcggctctacaaggcggggttgctgtaccggaaccatcagcttgtcaactggtcatgtgctttaagatcagccatctcggacattgaggtggagaaccggcccctgcctggccacacacagcttcgactgcctggctgccccacccccgtgtcttttggcctcctattttctgttgccttccccgtggatggagagcctgatgcagaggttgtggtaggaaccacaaggccagagacgctgcctggagatgtggctgtggccgttcatccagacgactcgcgatacacacatctacacgggcgacagcttcgtcaccccttgatggggcagcctcttcccctcatcacagactatgctgttcagccacatgtgggcacggtgaaggtgactccagctcacagtcctgccgatgctgagatgggggcccgacatggcttgagccccttgaatgtcattgcggaggatgggaccatgacctccctctgcggggactggctgcagggtcttcaccggtttgtggcccgggaaaagataatgtctgtgctgagtgaatggggcctgttccggggcctccagaaccaccccatggtactgcccatctgcagccgttctggggatgtgatagaatacctgctgaagaaccagtggtttgtccgctgccaggaaatgggggcccgagctgccaaggctgtggagtcgggggccctggagctcagtccctccttccaccagaagaactggcagcactggttttcccatattggggactggtgtgtctcccggcagctgtggtggggccatcagattccagcctacctggttgtagaggaccatgcgcagggagaagaggactgttgggtggttgggcggtcagaggctgaggccagagaggtagcagcggaactgacagggaggccaggggcagagctgaccctggagagggatcctgatgtcctagacacatggttttcttctgccctgttccccttttctgccctgggctggccccaagagaccccagaccttgctcgtttctaccccctgtcacttttggaaacgggcagcgaccttctgctgttctgggtgggccgcatggtcatgttggggacccagctcacagggcagctgcccttcagcaaggtgcttcttcatcccatggttcgggacaggcagggccggaagatgagcaagtccctggggaatgtgctggacccaagagacatcatcagtggggtggagatgcaggtgctgcaggaaaagctgagaagcggaaatttggaccctgcagagctggccattgtggctgcagcacagaaaaaggactttcctcacgggatccctgagtgtgggacagatgccctgagattcacactctgctcccatggagttcaggcgggcgacttgcacctgtcagtctctgaggtccagagctgccgacatttctgcaacaagatctggaatgctcttcgctttatcctcaatgctttaggggagaaatttgtgccacagcctgctgaggagctgtctccctcctccccgatggatgcctggatcctgagccgccttgccctggctgcccaggagtgtgagcggggcttcctcacccgagagctctcgctcgtcactcatgccctgcaccacttctggcttcacaacctctgtgacgtctacctggaggctgtgaagcccgtgctgtggcactcgccccgccccctggggccccctcaggtcctgttctcctgcgctgacctcggcctccgcctcctggccccactgatgcccttcctggctgaagagctctggcagaggctgccccccaggcctggttgcccccctgcccccagcatctcggttgccccctaccccagcgcctgcagcttggagcactggcgccagccagagctggagcggcgcttctcccgggtccaagaggtcgtgcaggtgctaagggctctccgagccacgtaccagctcaccaaagcccggccccgagtgctgctgcagagctcagagcctggggaccagggcctcttcgaggccttcttggagcccctgggcaccctgggctactgtggggctgtgggcctgttacccccaggcgcagcagctccctccggctgggcccaggctccactcagtgacacggctcaagtctacatggagctgcagggcctggtggacccgcagatccagctacctctgttagccgcccgaaggtacaagttgcagaagcagcttgatagcctcacagccaggaccccatcagaaggggaggcagggactcagaggcaacaaaagctttcttccctccagctggaattgtcaaaactggacaaggcagcctctcacctccagcagctgatggatgagcctccagccccagggagcccggagctctaactcatcatccccatcagttttcctccctctcagacctgtctttgaggacaaacagatttgtcagctgtcagggtgcagtgggacgtcagagactatgtggtccatcgccttcattgtgtaaatgaggacacagactggcttggtcgcagtgactgtggtgtccttgagatgctcacattactgcccggcctgcctcccacctggaagtctgggaatgaggagattgagataaacttttgaaatccc

SEQ ID NO: 198836 - DNA, 4064 bp, Homo sapiens; identical to SEQ ID NO: 198828
  Payload ID: 19224
  Gene Name: valyl-tRNA synthetase 2, mitochondrial
  ENST ID: ENST00000551709
  CDS Start-End: 633-3818

SEQ ID NO: 198837 - DNA, 3609 bp, Homo sapiens
  Payload ID: 19224
  Gene Name: valyl-tRNA synthetase 2, mitochondrial
  ENST ID: ENST00000549458
  CDS Start-End: 82-3363
ggcggggcctcctggtgagcgcgcgccggggcggcctccgggaagtgggagacgctgcgggtcctgggcccaggccttgggatgggcgggaaggcctggccgcgccgggctgtgggcactgcaggaggcccctgtgcagaacagatctcggcccctttccaaacactcctgatgcctcatttgcctctcgcttcttttcgaccaccattttgggggctgaggcactcacggggcctccccaggtttcactccgtttctacacagtcggagccccatggatctcccatctcccggaggaaccgtgaagccaaacagaagcgcctgcgagagaagcaggctactctggaggctgagatagcaggggagagcaagtcacctgcagaatccattaaggcctggaggcctaaggagttagtattgtatgaaatccctacgaaacccggtgaaaagaaagatgtctctgggcccctgcctcctgcatacagcccccgatatgttgaggctgcctggtacccgtggtgggtacgagagggcttcttcaaaccagaatatcaggcccggctgccccaagctacaggggagaccttttccatgtgtatcccacctcccaatgtcactggctccctgcacattggccacgcactcacggtggccatacaggatgccctcgtgcgctggcaccggatgcgtggggatcaagtgctgtgggtccctggttcagatcatgcaggaattgctacacaagctgtggtggagaaacaactgtggaaggaacggggagtgaggagacatgagctgagccgggaggccttccttagggaggtgtggcagtggaaggaggcgaaaggtggagagatctgtgagcagctgcgagctctgggtgcctccctggactgggatcgagagtgttttaccatggatgttggctcctcagtggctgtgactgaagcttttgtgcggctctacaaggcggggttgctgtaccggaaccatcagcttgtcaactggtcatgtgctttaagatcagccatctcggacattgaggtggagaaccggcccctgcctggccacacacagcttcgactgcctggctgccccacccccgtgtcttttggcctcctattttctgttgccttccccgtggatggagagcctgatgcagaggttgtggtaggaaccacaaggccagagacgctgcctggagatgtggctgtggccgttcatccagacgactcgcgatacacacatctacacgggcgacagcttcgtcaccccttgatggggcagcctcttcccctcatcacagactatgctgttcagccacatgtgggcacgggggcagtgaaggtgactccagctcacagtcctgccgatgctgagatgggggcccgacatggcttgagccccttgaatgtcattgcggaggatgggaccatgacctccctctgcggggactggttgcagggtcttcaccggtttgtggcccgggaaaagataatgtctgtgctgagtgaacggggcctattccggggcctccagaaccaccccatggtactgcccatctgcagccgttctggggatgtgatagaatacctgctgaagaaccagtggtttgtccgctgccaggaaatgggggcccgagctgccaaggctgtggagtcgggggccctggagctcagtccctccttccaccagaagaactggcagcactggttttcccatattggggactggtgtgtctcccggcagctgtggtggggccatcagattccagcctacctggttgtagaggaccatgcgcagggagaagaggactgttgggtggttgggcggtcagaggctgaggccagagaggtagcagcggaactgacagggaggccaggggcagagctgaccctggagagggatcctgatgtcctagacacatggttttcttctgccctgttccccttttctgccctgggctggccccaagagaccccagaccttgctcgtttctaccccctgtcacttttggaaacgggcagcgaccttctgctgttctgggtgggccgcatggtcatgttggggacccagctcacagggcagctgcccttcagcaaggtgcttcttcatcccatggttcgggacaggcagggccggaagatgagcaagtccctggggaatgtgctggacccaagagacatcatcagtggggtggagatgcagttgctgcaggaaaagctgagaagcggaaatttggaccctgcagagctggccattgtggctgcagcacagaaaaaggactttcctcacgggatccctgagtgtgggacagatgccctgagattcacactctgctcccatggagttcaggcgggcgacttgcacctgtcagtctctgaggtccagagctgccgacatttctgcaacaagatctggaatgctcttcgctttatcctcaatgctttaggggagaaatttgtgccacagcctgctgaggagctgtctccctcctccccgatggatgcctggatcctgagccgccttgccctggctgcccaggagtgtgagcggggcttcctcacccgagagctctcgctcgtcactcatgccctgcaccacttctggcttcacaacctctgtgacgtctacctggaggctgtgaagcccgtgctgtggcactcgccccgccccctggggccccctcaggtcctgttctcctgcgctgacctcggcctccgcctcctggccccactgatgcccttcctggctgaagagctctggcagaggctgccccccaggcctggttgcccccctgcccccagcatctcggttgccccctaccctagcgcctgcagcttggagcactggcgccagccagagctggagcggcgcttctcccgggtccaagaggtcgtgcaggtgctaagggctctccgagccacgtaccagctcaccaaagcccggccccgagtgctgctgcagagctcagagcctggggaccagggcctcttcgaggccttcttggagcccctgggcaccctgggctactgtggggctgtgggcctgttacccccaggcacagcagctccctccggctgggcccaggctccactcagtgacacggctcaagtctacatggagctgcagggcctggtggacccgcagatccagctacctctgttagccgcccgaaggtacaagttgcagaagcagcttgatagcctcacagccaggaccccatcagaaggggaggcagggactcagaggcaacaaaagctttcttccctccagctggaattgtcaaaactggacaaggcagcctctcacctccggcagctgatggatgagcctccagccccagggagcccggagctctaactcatcatccccatcagttttcctccctctcagacctgtctttgaggacaaacagatttgtcagctgtcagggtgcagtgggacgtcagagactatgtggtccatcgccttcattgtgtaaatgaggacacagactggcttggtcgcagtgactgtggtgtccttgagatgctcacattactgcccggcctgcctcccacctggaagtctgggaatgaggagattgagataaacttttgaaatccc

SEQ ID NO: 198838 - DNA, 4064 bp, Homo sapiens
  Payload ID: 19224
  Gene Name: valyl-tRNA synthetase 2, mitochondrial
  ENST ID: ENST00000548842
  CDS Start-End: 633-3818
gccagctgctgcgcatgcgccggccggggccccgcccccatgcgccgcgcggctccagggccacgttccagggtcgggtttggtggattcctcagtccctgccgccgcggggcgccctgggatagcggcggggcctcctggtgagcgcgcgccggggcggcctccgggaagtgggagacgctgcgggtcctgggcccaggccttgggatgggcgggaaggcctggccgcgccgggctgtgggcactgcaggaggcccctgtgcaggtggagatcgccgcggccctggcgggactccttgctggctcttgggcgcgctgatgcccatcatctccctgagtttctgagccctatctctcatgtgtcagtggtcaccgccgaatccagacactccggccctgttccggaagagccctgatatccgtggctccatggcgctgtctgtcgataccatgcactctagctctcaaggaggaaaggttttgtggaagggaatagagacttggaataacagacctgtgctaattagagacaggaaagatggaacaaggggagtgacccttctccacccccatatcctaatgtgctctctctctatccagaacagatctcggcccctttccaaacactcctgatgcctcatttgcctctcgcctcttttcgaccaccattttgggggctgaggcactcacggggcctccccaggtttcactccgtttctacacagtcggagccccatggatctcccatctcccggaggaaccgtgaagccaaacagaagcgcctgcgagagaagcaggcgactctggaggctgagatagcaggggagagcaagtcacctgcagaatccattaaggcctggaggcctaaggagttagtattgtatgaaatccctacgaaacccggtgaaaagaaagatgtctctgggcccctgcctcctgcatacagcccccgatatgttgaggctgcctggtacccgtggtgggtacgagagggcttcttcaaaccagaatatcaggcccggctgccccaagctacaggggagaccttttccatgtgtatcccacctcccaatgtcactggctccctgcacattggccacgcactcacggtggccatacaggatgccctcgtgcgctggcaccggatgcgtggggatcaagtgctgtgggtccctggttcagatcatgcaggaattgctacacaagctgtggtggagaaacaactgtggaaggaacggggagtgaggagacatgagctgagccgggaggccttccttagggaggtgtggcagtggaaggaggcgaaaggtggagagatctgtgagcagctgcgagctctgggtgcctccctggactgggatcgagagtgttttaccatggatgttggctcctcagtggctgtgactgaagcttttgtgcggctctacaaggcggggttgctgtaccggaaccatcagcttgtcaactggtcatgtgctttaagatcagccatctcggacattgaggtggagaaccggcccctgcctggccacacacagcttcgactgcctggctgccccacccccgtgtcttttggcctcctattttctgttgccttccccgtggatggagagcctgatgcagaggttgtggtaggaaccacaaggccagagacgctgcctggagatgtggctgtggccgttcatccagacgactcgcgatacacacatctacacgggcgacagcttcgtcaccccttgatggggcagcctcttcccctcatcacagactatgctgttcagccacatgtgggcacggtgaaggtgactccagctcacagtcctgccgatgctgagatgggggcccgacatggcttgagccccttgaatgtcattgcggaggatgggaccatgacctctctctgcggggactggctgcagggtcttcaccggtttgtggcccgggaaaagataatgtctgtgctgagtgaacggggcctgttccggggcctccagaaccaccccatggtactgcccatctgcagccgttctggggatgtgatagaatacctgctgaagaaccagtggtttgtccgctgccaggaaatgggggcccgagctgccaaggctgtggagtcgggggccctggagctcagtccctccttccaccagaagaactggcagcactggttttcccatattggggactggtgtgtctcccggcagctgtggtggggccatcagattccagcctacctggttgtagaggaccatgcgcagggagaagaggactgttgggtggtcgggcggtcagaggctgaggccagagaggtagcagcggaactgacagggaggccaggggcagagctgaccctggagagggatcctgatgtcctagacacatggttttcttctgccctgttccccttttctgccctgggctggccccaagagaccccagaccttgctcgtttctaccccctgtcacttttggaaacgggcagcgaccttctgctgttctgggtgggccgcatggtcatgttggggacccagctcacagggcagctgcccttcagcaaggtgcttcttcatcccatggttcgggacaggcagggccggaagatgagcaagtccctggggaatgtgctggacccaagagacatcatcagtggggtggagatgcaggtgctgcaggaaaagctgagaagcggaaatttggaccctgcagagctggccattgtggctgcagcacagaaaaaggactttcctcacgggatccctgagtgtgggacagatgccctgagattcacactctgctcccatggagttcaggcgggcgacttgcacctgtcagtctctgaggtccagagctgccgacatttctgcaacaagatctggaatgctcttcgctttatcctcaatgctttaggggagaaatttgtgccacagcctgctgaggagctgtctccctcctccccgatggatgcctggatcctgagccgccttgccctggctgcccaggagtgtgagcggggcttcctcacccgagagctctcgctcgtcactcatgccctgcaccacttctggcttcacaacctctgtgacgtctacctggaggctgtgaagcccgtgctgtggcactcgccccgccccctggggccccctcaggtcctgttctcctgcgctgacctcggcctccgcctcctggccccactgatgcccttcctggctgaagagctctggcagaggctgccccccaggcctggttgcccccctgcccccagcatctcggttgccccctaccccagcgcctgcagcttggagcactggcgccagccagagctggagcggcgcttctcccgggtccaagaggtcgtgcaggtgctaagggctctccaagccacgtaccagctcaccaaagcccggccccgagtgctgctgcagagctcagagcctggggaccagggcctcttcgaggccttcttggagcccctgggcaccctgggctactgtggggctgtgggcctgttacccccaggcgcagcagctccctccggctgggcccaggctccactcagtgacacggctcaagtctacatggagctgcagggcctggtggacccgcagatccagctacctctgttagccgcccgaaggtacaagttgcagaagcagcttgatagcctcacagccaggaccccatcagaaggggaggcagggactcagaggcaacaaaagctttcttccctccagctggaattgtcaaaactggacaaggcagcctctcacctccggcagctgatggatgagcctccagccccagggagcccggagctctaactcatcatccccatcagttttcctccctctcagacctgtctttgaggacaaacagatttgtcagctgtcagggtgcagtgggacgtcagagactatgtggtccatcgccttcattgtgtaaatgaggacacagactggcttggtcgcagtgactgtggtgtccttgagatgctcacattactgcccggcctgcctcccacctggaagtctgggaatgaggagattgagataaacttttgaaatccc

SEQ ID NO: 198839 - DNA, 3609 bp, Homo sapiens; identical to SEQ ID NO: 198837
  Payload ID: 19224
  Gene Name: valyl-tRNA synthetase 2, mitochondrial
  ENST ID: ENST00000552560
  CDS Start-End: 82-3363

SEQ ID NO: 198840 - DNA, 3362 bp, Homo sapiens
  Payload ID: 19224
  Gene Name: valyl-tRNA synthetase 2, mitochondrial
  Uniprot ID: Q5ST30
  ENST ID: ENST00000625423
  CDS Start-End: 345-3116
tgcgccggccggggccccgcccccatgcgccgcgcggctccagggccacgttccagggtcgggtttggtggattcctcagtccctgccgccgcggggcgccctgggatagcggcggggcctcctgtcacctgcagaatccattaaggcctggaggcctaaggagttagtattgtatgaaatccctacgaaacccggtgaaaagaaagatgtctctgggcccctgcctcctgcatacagcccccgatatgttgaggctgcctggtacccgtggtgggtacgagagggcttcttcaaaccagaatatcaggcccggctgccccaagctacaggggagaccttttccatgtgtatcccacctcccaatgtcactggctccctgcacattggccacgcactcacggtggccatacaggatgccctcgtgcgctggcaccggatgcgtggggatcaagtgctgtgggtccctggttcagatcatgcaggaattgctacacaagctgtggtggagaaacaactgtggaaggaacggggagtgaggagacatgagctgagccgggaggccttccttagggaggtgtggcagtggaaggaggcgaaaggtggagagatctgtgagcagctgcgagctctgggtgcctccctggactgggatcgagagtgttttaccatggatgttggctcctcagtggctgtgactgaagcttttgtgcggctctacaaggcggggttgctgtaccggaaccatcagcttgtcaactggtcatgtgctttaagatcagccatctcggacattgaggtggagaaccggcccctgcctggccacacacagcttcgactgcctggctgccccacccccgtgtcttttggcctcctattttctgttgccttccccgtggatggagagcctgatgcagaggttgtggtaggaaccacaaggccagagacgctgcctggagatgtggctgtggccgttcatccagacgactcgcgatacacacatctacacgggcgacagcttcgtcaccccttgatggggcagcctcttcccctcatcacagactatgctgttcagccacatgtgggcacgggggcagtgaaggtgactccagctcacagtcctgccgatgctgagatgggggcccgacatggcttgagccccttgaatgtcattgcggaggatgggaccatgacctccctctgcggggactggctgcagggtcttcaccggtttgtggcccgggaaaagataatgtctgtgctgagtgaatggggcctgttccggggcctccagaaccaccccatggtactgcccatctgcagccgttctggggatgtgatagaatacctgctgaagaaccagtggtttgtccgctgccaggaaatgggggcccgagctgccaaggctgtggagtcgggggccctggagctcagtccctccttccaccagaagaactggcagcactggttttcccatattggggactggtgtgtctcccggcagctgtggtggggccatcagattccagcctacctggttgtagaggaccatgcgcagggagaagaggactgttgggtggttgggcggtcagaggctgaggccagagaggtagcagcggaactgacagggaggccaggggcagagctgaccctggagagggatcctgatgtcctagacacatggttttcttctgccctgttccccttttctgccctgggctggccccaagagaccccagaccttgctcgtttctaccccctgtcacttttggaaacgggcagcgaccttctgctgttctgggtgggccgcatggtcatgttggggacccagctcacagggcagctgcccttcagcaaggtgcttcttcatcccatggttcgggacaggcagggccggaagatgagcaagtccctggggaatgtgctggacccaagagacatcatcagtggggtggagatgcaggtgctgcaggaaaagctgagaagcggaaatttggaccctgcagagctggccattgtggctgcagcacagaaaaaggactttcctcacgggatccctgagtgtgggacagatgccctgagattcacactctgctcccatggagttcaggcgggcgacttgcacctgtcagtctctgaggtccagagctgccgacatttctgcaacaagatctggaatgctcttcgctttatcctcaatgctttaggggagaaatttgtgccacagcctgctgaggagctgtctccctcctccccgatggatgcctggatcctgagccgccttgccctggctgcccaggagtgtgagcggggcttcctcacccgagagctctcgctcgtcactcatgccctgcaccacttctggcttcacaacctctgtgacgtctacctggaggctgtgaagcccgtgctgtggcactcgccccgccccctggggccccctcaggtcctgttctcctgcgctgacctcggcctccgcctcctggccccactgatgcccttcctggctgaagagctctggcagaggctgccccccaggcctggttgcccccctgcccccagcatctcggttgccccctaccccagcgcctgcagcttggagcactggcgccagccagagctggagcggcgcttctcccgggtccaagaggtcgtgcaggtgctaagggctctccgagccacgtaccagctcaccaaagcccggccccgagtgctgctgcagagctcagagcctggggaccagggcctcttcgaggccttcttggagcccctgggcaccctgggctactgtggggctgtgggcctgttacccccaggcgcagcagctccctccggctgggcccaggctccactcagtgacacggctcaagtctacatggagctgcagggcctggtggacccgcagatccagctacctctgttagccgcccgaaggtacaagttgcagaagcagcttgacagcctcacagccaggaccccatcagaaggggaggcagggactcagaggcaacaaaagctttcttccctccagctggaattgtcaaaactggacaaggcagcctctcacctccggcagctgatggatgagcctccagccccagggagcccggagctctaactcatcatccccatcagttttcctccctctcagacctgtctttgaggacaaacagatttgtcagctgtcagggtgcagtgggacgtcagagactatgtggtccatcgccttcattgtgtaaatgaggacacagactggcttggtcgcagtgactgtggtgtccttgagatgctcacattactgcccggcctgcctcccacctggaagtctgggaatgaggagattgagataaacttttgaaatccc

SEQ ID NO: 198841 - DNA, 1227 bp, Homo sapiens
  Payload ID: 19225
  Gene Name: VAMP (vesicle-associated membrane protein)-associated protein A, 33kDa
  Uniprot ID: Q9P0L0
  ENST ID: ENST00000340541
  CDS Start-End: 196-1080
tcagttgtgggacccggagctgctgacccagcgggtggcccaccgaaccggtgacacagcggcaggcgttagggctcgggagccgcgagcctggcctcgtcctagagctcggccgagccgtcgccgccgtcgtcccccgcccccagtcagcaaaccgccgccgcgggcgcgcccccgctctgcgctgtctctccgatggcgtccgcctcaggggccatggcgaagcacgagcagatcctggtcctcgatccgcccacagacctcaaattcaaaggccccttcacagatgtagtcactacaaatcttaaattgcgaaatccatcggatagaaaagtgtgtttcaaagtgaagactacagcacctcgccggtactgtgtgaggcccaacagtggaattattgacccagggtcaactgtgactgtttcagtaatgctacagccctttgactatgatccgaatgaaaagagtaaacacaagtttatggtacagacaatttttgctccaccaaacacttcagatatggaagctgtgtggaaagaggcaaaacctgatgaattaatggattccaaattgagatgcgtatttgaaatgcccaatgaaaatgataaattgggtataactccaccagggaatgctccgactgtcacttcaatgagcagcatcaacaacacagttgcaacacctgccagttatcacacgaaggatgaccccaggggactcagtgtgttgaaacaggagaaacagaagaatgatatggaacctagcaaagctgttccactgaatgcatctaagcaagatggacctatgccaaaaccacacagtgtttcacttaatgataccgaaacaaggaaactaatggaagagtgtaaaagacttcagggagaaatgatgaagctatcagaagaaaatcggcacctgagagatgaaggtttaaggctcagaaaggtagcacattcggataaacctggatcaacctcaactgcatccttcagagataatgtcaccagtcctcttccttcacttcttgttgtaattgcagccattttcattggattctttctagggaaattcatcttgtagagtgaagcatgcagagtgctgtttctttttttttttttctcttgaccagaaaaagatttgtttacctaccatttcattggtagtatggcccacggtgaccatttttttgtgtgtacagcgtcatataggctttgcctttaatgatct

SEQ ID NO: 198842 - DNA, 6815 bp, Homo sapiens
  Payload ID: 19225
  Gene Name: VAMP (vesicle-associated membrane protein)-associated protein A, 33kDa
  Uniprot ID: Q9P0L0
  ENST ID: ENST00000400000
  CDS Start-End: 256-1005
tcacgtgggtcgccgaggctcgcaagtgcgcgtggccgtggcggctggtgtggggttgagtcagttgtgggacccggagctgctgacccagcgggtggcccaccgaaccggtgacacagcggcaggcgttagggctcgggagccgcgagcctggcctcgtcctagagctcggccgagccgtcgccgccgtcgtcccccgcccccagtcagcaaaccgccgccgcgggcgcgcccccgctctgcgctgtctctccgatggcgtccgcctcaggggccatggcgaagcacgagcagatcctggtcctcgatccgcccacagacctcaaattcaaaggccccttcacagatgtagtcactacaaatcttaaattgcgaaatccatcggatagaaaagtgtgtttcaaagtgaagactacagcacctcgccggtactgtgtgaggcccaacagtggaattattgacccagggtcaactgtgactgtttcagtaatgctacagccctttgactatgatccgaatgaaaagagtaaacacaagtttatggtacagacaatttttgctccaccaaacacttcagatatggaagctgtgtggaaagaggcaaaacctgatgaattaatggattccaaattgagatgcgtatttgaaatgcccaatgaaaatgataaattgaatgatatggaacctagcaaagctgttccactgaatgcatctaagcaagatggacctatgccaaaaccacacagtgtttcacttaatgataccgaaacaaggaaactaatggaagagtgtaaaagacttcagggagaaatgatgaagctatcagaagaaaatcggcacctgagagatgaaggtttaaggctcagaaaggtagcacattcggataaacctggatcaacctcaactgcatccttcagagataatgtcaccagtcctcttccttcacttcttgttgtaattgcagccattttcattggattctttctagggaaattcatcttgtagagtgaagcatgcagagtgctgtttctttttttttttttctcttgaccagaaaaagatttgtttacctaccatttcattggtagtatggcccacggtgaccatttttttgtgtgtacagcgtcatataggctttgcctttaatgatctcttacggttagaaaacacaataaaaacaaactgttcggctactggacaggttgtatattaccagatcatcactagcagatgtcagttgcacattgagtcctttatgaaattcataaataaagaattgttctttctttgtggttttaataagagttcaagaattgttcagagtcttgtaaatgttattttaataatccctttaaattttatctgttgctgttacctcttgaaatatgatttatttagattgctaatcccactcattcaggaaatgccaagaggtattccttggggaaatggtgcctcttacagtgtaaatttttcctcctttacctttgctaatatcatggcagaatttttcttatcccttgtgaggcagttgttgactgagtttttcatccttacaatcctgtcccatggtatttaacataaaaaaaaataaaactgttaacagattcttgctcgatagcttgtttgtgtctgtcgtgttattagagggaactccactatatatggtcacttgaaattatgatgcaaaggtttctcttgcattgaaaccctcttggatattacagtatttttaattgaaagtcctaattctgttaaggaaaggagttgattaaattttaaggtaccactggtattttgggagattataatcagtttgttttcaagataatagaaaataaggtccatgagaatagaagttatgtgatttcagtgagttgatgtgtacagcatggctgtgctccatctgatttaccccattcttaagttctgagagtatgttctcaaggaagatttaactctctttggttttaaattactttttaaccagcctaataaataagtcttactacttttcataatatttcataatagttaaaagtaggtgtttttttcgtgctcaatttggcactcaaaataatgttcattatggaagtttggtaatactgagcaagcctgtggaattttctttatgaaaaatgattttagcctttgcaaatgttaaccatgtgaaacacattttcagtataagtatgcgttacagggtttgatactttcctgcacttaggtttgtcctattcttcatttattcatactaggatagaaaattttggaatcagaaaatagatccagtgtttagctacatacaatctagtacaagtgaatttttattcttaaacataggtgtgttggctctttttttaaaagatgcgctctacctgaaaaggaaattggattttagaactggatgtggtgcagtgaagtattttaggcccaggtctgtgtacacattttatagaagaatgaagtactctgaagtattttggttgccttttcatttcaactgtgttttgaatttgtcagatcacacatatattgtgttattgggcgctgtggtatcttttataaaacctcttgcttgtgtgcaaaagttcctaaaaggaaacacaagtaatgcctatccattactagcatgctatgctgcatgctttactgccattgctgtatgctttactgtctttgtaaaaatccccctctccccttttctggtaactggaaaagcatgctaaaaatagtcttatattttcaccccataaatgcagaatcagtaattccttggcttaaagctcttatataatcaatattattggtggtaaataccaagtttggtatctcatagctatctttttttaaagaaattaagttcttgaaaatttagccaaatcccgttttatgggaatgctctttagaattcattttgttcagcccctttgttctatggttgagaaatctgaggccttacgaaggttaagagaactttccccgtgtctcacaggtaggtagaggcagagctggaactagatatctggtctgttgactctagctcagtgtcttctggtaactgttgaaaattgtcttagtttgagagatggctgaaataatgaacataaaatgctatttataataacaagtatatgtgaaatttcttattgtaagactactaccggcttactgttgaatagtttggttatagtgtttaggctagaaatgcctcccacattggtaataaacattacaaaatacaatgtatttttaggtaggcattttataaaatgcattatgccatggttgcttttgagatagattgtagtctgggtagcatctttaaaatgtatgtgggcttaactgttgttcatatcaggagatgctctgattgtataggtgagactctgtttctgttatttttaattgctgtatgaaatgtgatcagattattttactaccaacagttatagtttgaaagtccaactgtattaattgactgataatatgataatatagagattaaattgtttgtcttcattccttatatgtttagaagtttttgctttgtctgcctgcttacttgtatatgtaagcatgagggaaatacactgttgctaatactgaaattacaatcaagtaactaaggccttgagttcatatgtgacactgaatgcactagcttccttcgttctataactaatgtaccttaacttcccccattcttatatttacaagaagctaagtcattatgttctgagtgtgtggtatgttcccttaaaaaaaaatgacacttggaagaaaaatgtatgaaattcagaaattccgatcaaagaaaagtaattctttctttttttttttgagacagagtcttgctttgttgcccaggctggagggcagtggtgtgatctcacctcactgcagcttccgcctcctgggttcaagtgattctcatggctcagccgcctgagtagctgggattacaggtgtgagccaacaagcccggctaatttttgtatttttagtagagacaaggtttcaccatgttggtcaggctgggctcaaactcctgaatccgcctgcctcggcctcccaaagtgctgggattacaggtgtgagctgccgcacccagccaagaaaaataatactcttaaatacttagatgttcacctaaagttgatattatttggtatgggaattacttttgaactgtaatctttcagattacaccactttgaaaacaagttttaacagtagggtaaaaatatagtttttgagggtattcccaacttgtgatcttctaccactttagagacattcaagtaatagttttcttagagctttgcacattcctattcactgagattttaaaaatttcacctttattcgagggaaggatcaatgcttattaccatttggaaaaacgaagatcagaaggtaaatgatctttattttctagctttaaagggaaattaaaccattcatgaataaactttaaaaatgtgaagtgtccttttccttttcacaatacaaaaaaaatttcaacagattgtgtggtttgtgcatttatatcctgttaagcattaatagctaatcactgggacttgaattctgatggcagatagtctcttgcttagtgagatggagttaactattttttagtaggaagtgagaacagctgattttcatgccacgtttcatagccccacttttggtagactaccaccacgcttcttcgcgtaagcagtggcatcttgggaatgaatgcccagccgctcgtgggttggtgcaaagaagtataaacatatatcactaaggaaaaagaaagtttgtcttgcccttctgacacagtgtgtgcacttcaggcaatttttggaaaatataaaaaattccaaattctgcctttcagcagcatcaattgctaggaacatttcattcatttccctgtaatattaatgttctttaagcataatcactaattataagttgtatcctatttttttccagcttaatttctgtggtttattgaaaaccaagtataaatgtgactaaaagcattttgctttgtttttatagttaactttcttaaggttatggacattttataatgtaacatttgattggcctggcctcttgacaattcccttctagttatgcatatcctcctgttgccacatttcttgttttaaaactcagtttcttgttttccagttgttgctatgtataacacccatcttgaaagagagtatataggaagttattcagataacttttgtagtagtgatattcaactatagcagtaccttaactcatgatgagcttaggaacataaaagataattgttgcttgaatagcacccccagagatactgacctaattggtctggggtggagatctggcatggtagtttttttcaagctccaatcatcggccagacagttgctttatgtaggtttttaaatgccaaaggcagatatgaagtagatttaattaagacttgacttcagcaatacaggggaacttaaaatacttatttttctttaaactgcaggagtcactgttaggtattgcttaaaaaaaattgcataaaagctttgcttgtcaagttaggattgctggaataccactaaagatttttgacttgtgaataaatgagctgtcatcgcaaaaaggcgatttgagaaatgtgggcttcagtattaattgccattttgctgacacccagtgtacctacctacctgagaaatttattttgtccatcatgtatttctcaaagcaaaaggtggttttcaagtataatgtcgttttcaacatgcttattacttagttttacgtcagctcatttcatcatcattgataacttgtgaaatacttatctccatcctatggaataggggagacgggtttagacaggttcaattagctcaagtctacacagctgaagtagcagagaaagtgggatctagatggtctgatcctagtgatctaccatatgaaggacatagtttgtgtcctggtccaagtcaaatattgactcctcacaaacagtaagtatggcaattttgtgatgcctttgattccactttacatggagtactattatttgtgaaatgtctttaagatttttggtcttaaatttttgaagactgctttccccctttatctcccagaaaattgagaagaagtaaactcctgcccactaacaatctcagtccgtgaacaaaaccaacatgaacattcctaaacaagagtgtgtgttactctaagaagaaggctatagaatttatggaaatggcttatgtaacctacaagactggagaacagaatgtgactggccttttctaatggtcctttaagatttaatgattaaagcaagagttttttataattgactttgtggtctaaattcttgatactgtttataattctacaaagaacaaaaattgttatgtactataggcacttaagaaccctgaggaaaaataatacaatgtgtgtgtgtgagagagagagtgagttactgacattgttccaaaaaaaaaaaaaaaaaaaaaaaaaatgtggagggttgaaatggtaaggaattggaatcttttgtattttcgagcaataagaattcctattcttgtttcaaatagaggtttgttaggaattacagttgtggggagcaaactttcttttttgtgctgttttaattcaaaatgtatatccttaattgtatataatatgtagataaatatatgagggtattaagctactttgaattaaatttaaggatatatttcacatgaaaacaaatacaaacgagaatcaaaataaagttttgcaaagta

SEQ ID NO: 198843 - DNA, 567 bp, Homo sapiens
  Payload ID: 19225
  Gene Name: VAMP (vesicle-associated membrane protein)-associated protein A, 33kDa
  ENST ID: ENST00000585042
  CDS Start-End: 195-284
cagttgtgggacccggagctgctgacccagcgggtggcccaccgaaccggtgacacagcggcaggcgttagggctcgggagccgcgagcctggcctcgtcctagagctcggccgagccgtcgccgccgtcgtcccccgcccccagtcagcaaaccgccgccgcgggcgcgcccccgctctgcgctgtctctccgatggcgtccgcctcaggggccatggcgaagcacgagcagatcctggtcctcgatccgcccacagacctcaaattcaaagtcatagtataacatcagtaacaaaaatgagcatctcccttgccccagaaggctgccaaaagaatggaaagaagtgttttcattttttatttaggccccttcacagatgtagtcactacaaatcttaaattgcgaaatccatcggatagaaaagtgtgtttcaaagtgaagactacagcacctcgccggtactgtgtgaggcccaacagtggaattattgacccagggtcaactgtgactgtttcagtaatgctacagccctttgactatgatccgaatgaaaagagtaaacaca

SEQ ID NO: 198844 - DNA, 1834 bp, Homo sapiens
  Payload ID: 19226
  Gene Name: VAMP (vesicle-associated membrane protein)-associated protein B and C
  Uniprot ID: O95292
  ENST ID: ENST00000395802
  CDS Start-End: 148-447
gcgcgcccacccggtagaggacccccgcccgtgccccgaccggtccccgcctttttgtaaaacttaaagcgggcgcagcattaacgcttcccgccccggtgacctctcaggggtctccccgccaaaggtgctccgccgctaaggaacatggcgaaggtggagcaggtcctgagcctcgagccgcagcacgagctcaaattccgaggtcccttcaccgatgttgtcaccaccaacctaaagcttggcaacccgacagaccgaaatgtgtgttttaaggtgaagactacagcaccacgtaggtactgtgtgaggcccaacagcggaatcatcgatgcaggggcctcaattaatgtatctggaagaagatggactgcggatgaggaagacagtgcagagcaacagccccatttcagcattagccccaactgggaaggaagaaggccttagcacccggctcttggctctggtggttttgttctttatcgttggtgtaattattgggaagattgccttgtagaggtagcatgcacaggatggtaaattggattggtggatccaccatatcatgggatttaaatttatcataaccatgtgtaaaaagaaattaatgtatgatgacatctcacaggtcttgcctttaaattacccctccctgcacacacatacacagatacacacacacaaatataatgtaacgatcttttagaaagttaaaaatgtatagtaactgattgagggggaaaagaatgatctttattaatgacaagggaaaccatgagtaatgccacaatggcatattgtaaatgtcattttaaacattggtaggccttggtacatgatgctggattacctctcttaaaatgacacccttcctcgcctgttggtgctggcccttggggagctggagcccagcatgctggggagtgcggtcagctccacacagtagtccccacgtggcccactcccggcccaggctgctttccgtgtcttcagttctgtccaagccatcagctccttgggactgatgaacagagtcagaagcccaaaggaattgcactgtggcagcatcagacgtactcgtcataagtgagaggcgtgtgttgactgattgacccagcgctttggaaataaatggcagtgctttgttcacttaaagggaccaagctaaatttgtattggttcatgtagtgaagtcaaactgttattcagagatgtttaatgcatatttaacttatttaatgtatttcatctcatgttttcttattgtcacaagagtacagttaatgctgcgtgctgctgaactctgttgggtgaactggtattgctgctggagggctgtgggctcctctgtctctggagagtctggtcatgtggaggtggggtttattgggatgctggagaagagctgccaggaagtgttttttctgggtcagtaaataacaactgtcatagggagggaaattctcagtagtgacagtcaactctaggttaccttttttaatgaagagtagtcagtcttctagattgttcttataccacctctcaaccattactcacacttccagcgcccaggtccaagtctgagcctgacctccccttggggacctagcctggagtcaggacaaatggatcgggctgcagagggttagaagcgagggcaccagcagttgtgggtggggagcaagggaagagagaaactcttcagcgaatccttctagtactagttgagagtttgactgtgaattaattttatgccataaaagaccaacccagttctgtttgactatgtagcatcttgaaaagaaaaattataataaagccccaaaattaagaa

SEQ ID NO: 198845 - DNA, 7936 bp, Homo sapiens
  Payload ID: 19226
  Gene Name: VAMP (vesicle-associated membrane protein)-associated protein B and C
  Uniprot ID: O95292
  ENST ID: ENST00000475243
  CDS Start-End: 339-1070
ccccgcccctggagccggcggcgcagggcgcagcttcccgccgccagagcgggccagcctgctgcgtgcgtgcgtgtgtacgactctgcgtgcgtgcgtgcgtgcgtgcgtgccgtcagctcgccgggcaccgcggcctcgccctcgccctccgcccctgcgcctgcaccgcgtagaccgacccccccccagcgcgcccacccggtagaggacccccgcccgtgccccgaccggtccccgcctttttgtaaaacttaaagcgggcgcagcattaacgcttcccgccccggtgacctctcaggggtctccccgccaaaggtgctccgccgctaaggaacatggcgaaggtggagcaggtcctgagcctcgagccgcagcacgagctcaaattccgaggtcccttcaccgatgttgtcaccaccaacctaaagcttggcaacccgacagaccgaaatgtgtgttttaaggtgaagactacagcaccacgtaggtactgtgtgaggcccaacagcggaatcatcgatgcaggggcctcaattaatgtatctgtgatgttacagcctttcgattatgatcccaatgagaaaagtaaacacaagtttatggttcagtctatgtttgctccaactgacacttcagatatggaagcagtatggaaggaggcaaaaccggaagaccttatggattcaaaacttagatgtgtgtttgaattgccagcagagaatgataaaccacatgatgtagaaataaataaaattatatccacaactgcatcaaagacagaaacaccaatagtgtctaagtctctgagttcttctttggatgacaccgaagttaagaaggttatggaagaatgtaagaggctgcaaggtgaagttcagaggctacgggaggagaacaagcagttcaaggaagaagatggactgcggatgaggaagacagtgcagagcaacagccccatttcagcattagccccaactgggaaggaagaaggccttagcacccggctcttggctctggtggttttgttctttatcgttggtgtaattattgggaagattgccttgtagaggtagcatgcacaggatggtaaattggattggtggatccaccatatcatgggatttaaatttatcataaccatgtgtaaaaagaaattaatgtatgatgacatctcacaggtcttgcctttaaattacccctccctgcacacacatacacagatacacacacacaaatataatgtaacgatcttttagaaagttaaaaatgtatagtaactgattgagggggaaaagaatgatctttattaatgacaagggaaaccatgagtaatgccacaatggcatattgtaaatgtcattttaaacattggtaggccttggtacatgatgctggattacctctcttaaaatgacacccttcctcgcctgttggtgctggcccttggggagctggagcccagcatgctggggagtgcggtcagctccacacagtagtccccacgtggcccactcccggcccaggctgctttccgtgtcttcagttctgtccaagccatcagctccttgggactgatgaacagagtcagaagcccaaaggaattgcactgtggcagcatcagacgtactcgtcataagtgagaggcgtgtgttgactgattgacccagcgctttggaaataaatggcagtgctttgttcacttaaagggaccaagctaaatttgtattggttcatgtagtgaagtcaaactgttattcagagatgtttaatgcatatttaacttatttaatgtatttcatctcatgttttcttattgtcacaagagtacagttaatgctgcgtgctgctgaactctgttgggtgaactggtattgctgctggagggctgtgggctcctctgtctctggagagtctggtcatgtggaggtggggtttattgggatgctggagaagagctgccaggaagtgttttttctgggtcagtaaataacaactgtcatagggagggaaattctcagtagtgacagtcaactctaggttaccttttttaatgaagagtagtcagtcttctagattgttcttataccacctctcaaccattactcacacttccagcgcccaggtccaagtctgagcctgacctccccttggggacctagcctggagtcaggacaaatggatcgggctgcagagggttagaagcgagggcaccagcagttgtgggtggggagcaagggaagagagaaactcttcagcgaatccttctagtactagttgagagtttgactgtgaattaattttatgccataaaagaccaacccagttctgtttgactatgtagcatcttgaaaagaaaaattataataaagccccaaaattaagaattcttttgtcattttgtcacatttgctctatggggggaattattattttatcatttttattattttgccattggaaggttaactttaaaatgagccctatcactgagaaatacgtgtttcatgatttaactctgtgtgtgtgtgtgtgtgtgtgtgtgtgtgtgtgtgtattttttttttggttgtcttcagctgacagtatgaaaaatgaaactgctgaaaaagctgagcacctggtcacccttggccttccattgctttggccttcagtaaaaagcagcctcccttctaggtcagggaaccatgccattgagactagtaacgggcgttctgggcacagtcccactgtgcacaggtttgagaggacaagttcatcagaaggaaggcagtccttagaagtcacatacgttgagccacgttgctcctaagcctggctctgtcaagctgggtcaggggccttgaaactggagaagtggaagtctatggttggtctgagtaagtaacttcctgtcttcatgaaaaaagttgactttgaatcccaggtactcacagaaatggtgaacagacttagttgttacccaggcacccatggattgtgttgagtgtgcagacagggaggccaccccaataggaattcgtctccaggatttttcccatgtgtcccccagtacttataaaagggagtgaaaagaccgagctgtaaggcatgtgccttctgccacctgactttccgtgaggggactaaaatttactaattgtagttgctgcagccagttaagtcctgtagcttccaggccctcatgtctttgataggagagtgcttaggtggtccccaacagtgcctaggggtacagtacagtcccattacactagagcagggctctatttatttttaaaggatatggccgtgtgttttgataaaactttattcacaaaaacagccgggtcatgggatttggcttgtgagtctgtaacagttcttaaaaagaatatctgagaaactactctgttttagacctttgaaggtgatttagagttttgtgtacatctaggagaaggtgttcagcttctcagaggatgtggacattttggttgcagctaaaaatcagtctctgaagtctctctcccttctagaggttaggacttggtgaacatgtttgtgggccttttgactgagtggcagaaggaaactgctcaggaagagaaacaggtgactgatgggaaggttgattattttctcagtcatcctggcagccaaaaatgtgccaggaaaagaaagaatgtggagcacgcgtggctcctggaggacttggagatgcatgcacatttagggtgttttccctagaattacataatgaaaaaaagaataaggcaaagaggaggtgaatatggggcctgtcacaacggcctgccctgccccaagagggttaagagtcagataatcgggacgaaactggcatggaaagagcgagcctagggaggatgccgctgggcagtgtgcatgggggagctgctgccaggctgccctccagtctgctcctgtggttactggctccacagcacctcagagagggcggccctggcttcagaaatgccagccatagtgctcacaaatgcagaagagatggaagcggtgacagaatcctgaaagtttttattgattgaagttttaaattggtaacttaagcttccttggcacgatacaaaatacctcttaaagacagcaggcttttttatttgtaggtgtgaggaactggctttaacttttttctcctcctagtttgcatgttttccttctctcgtcttctgaactgctggcaccagcagtaatacatactgataaaatcaaaattgatttttaccagtggccagtttatggctagagagacgacttatacctccataacacagaagggggaaaaatgaagaacctccagtgatccgtgaaaacctaaacgctttcaaacaaatcccaggaacagaattgctatcgaaagatatcattgcccagtttgcaggctatgttgagtcagatagaactgaatgtagtgagagctcagagctacagagcctttcagatgaatttgaaaacagactctgtgtgtgtgtgcatgtgtgcatgtgtgcatgtgtggcatatgtgccgtatgtcagtagcttgacagttttcaaatcgtgcctatatttttttgcatacacaaatttttgtgtttgcaaactcagaatccatgccaaaatacaatgttatatgtcattttcagctccttctctaaaggaatggcccatttctcattgtagtttgagaaatacatgtatgaagagataggggtcttgggcttcccagtgtcactttgaacacctgaataacatttaactcctgagaccttctcggtgtagaggccactgcttccccctgctggagatggcatttcattgaagggcctctcgtggctttccctgcccccggctgtctggcctgaagaaggagaaagaaccaaactgaactatgaaaagttaccactctgaggagacctctcttaattaacacttggggccatgtttgctgttgttgagaaggagtgttctcaaagatgagctggaatggaattgtatttagaaaggcccctgcaaagtatatagatggatgactctagttcatgacatacaaatcccataaggccaacgaccactcttctggaacaccaagagcagctctgagatcatgctggccctacgcgaattgagtttctgtggcctaattggatttggagaacgccttccctggccccttttcctcagacagatctgctctgataggaaccttttcaagaaagttactgttgtttcaatgccactccttacctgtatagaacatttccaatacattcgctcattgaacttaatccttgcaactgtgactggggggtagatggctctgtttgcatacgaagaaataaaggctccaggaggttaaatcgggcaactttttagaactaaatcagtctctgtaaggcctacattgctaagataccatttcagctctgaaaatctgcttcagggaagtgagtggatgaggccttcctgcctcagctactctgcccgtctgtacatcttttgtgtctgcctccgtaccttattcagttattttcacactaaagtaagtagaattaagactgtagttcagatgctttttctttttctgttggaaactgaacacactacagacagtgaaaaaaggtacatattccattttctcattgcctgaagatctctgctgatgctcctggagaatgactttgggggctttagaaagaatattgccagtccgtctcggcaaggagatgatgggagcgctttatatggaggctttacatgacttgtaaattaaatgtgaatgagggcagttgattaaaattggtattacagaagggccctgctgaggtttgaaaacagctgagctgctgatgtctcaggcctttccctgaattagcactgcggttctccaggatatcagcaaagagggcaagtaatagaagcccctgataaggagcgtcagccgacaggcaagcttgggaggctgtgggaatgggtctgcccccagcttcacagacctcttcctccagcctctgaatcccattagccacagcctagaacattagctgagctgcacaagctcacccacccctgtgccagggggccctgacctccctccatgccatgtttttggctgtatctacggcacttaacaataggggctttttattttcattacagagatattttgaaaaatttaaaagacatgaactcacataaacagttatggatgatagttaaaagagaaacgggtggaggtggatgagaggttgtcttcatgaatataattacttgagatttttttttcttaatggaattagtttattagaaaatgtctgtgttaaatccgtagaaaaggaagaaaagtgtagcaacaaaaatgtagccattatctaacttgccataaatatttgcagttatgataccttggaatgttgccacgatatggattgctttgattaaaagatgtcagttgaataaaacagtactgtgggagaatcgctttctgctgctagataaatgctgatgtttatttttaaaccaggaaacattgatcctgtaacaatgcccgattacaattgctttattacaccccagggctgatggagatgtaatcacttggctaatggatgtgggtgcaggacagatgctcgcttgctggcctgctttcctgcttgcattctgatgagctgcaggagtgcgcctggccttctgcaggtggagctgctgtcagagcttcgtttcactgatacccaaagccatgtctgactgaaataaaacaggttccctttttttttccctttggaaaatgccaactaagggagactaatcagatatcttaacacaatttcatccaggcttagtgctaacaagattgcggggctttttagggtttaagaagatgagaaatgagtgtgcacgtttcacacgttgacttgccggtttttccatgtcatacaaaaaagtcctggctgtttctccgaactggctgcctgcattcccgtctttcttttgtttttaagaaatagactgaattcagctgttaatcctctagtacagtatccatgttaaaatgtttttccattgcatcttttatgtgaattcaaaggtcagaatttattgtctgtgatattgagaccatgtgtacaagaactactttttgcttttcatcattcactccttagcaaacgtttcgtaagtaccctctgtctgtttgctactatatgaggtgctgcgaaattagtgggcgtggctttttatatttttcattcgtgtgtagcctaagtaaggtgactcaagatgatacaccgagagaaaaatgcaaaatatatttggttctcatttctgttgctgtcgtttcctttttaaagacgatttatcaactgctgccatttggaacttcctataagaaactaaaaatgatctatttcagtgttcctttcgcctttcctctgctttctgaataaatggtttcagtaacccatgctgttctctccctattctacgtctttctccctatgttgaaaaaagattcccacagtttctgatgtgtgtgtttatagtcttcaatgtatgttaacatgttaggaactgagtatcttaagagatgtcttagaatgctttagttttcataatttgtcctttatgtatttttcattgtatttgctgttttgacatggaagtaatttaaaaagttggtgcaggaaaggactctttactgttgcacattttggttttctgatatgtaataaattcatggcttggcagctgacatgatgtttcccagagagaaggagatgtatttctgcagggtccagaccaaaagagccatttacagcatgttctcccatgttccattatcagcctgatgaaacctgccctgccaaggcataaacttttgtactagctgtctccatattatgttcaataaattctgtgctctgaatatatttaaa

SEQ ID NO: 198846 - DNA, 937 bp, Homo sapiens
  Payload ID: 19226
  Gene Name: VAMP (vesicle-associated membrane protein)-associated protein B and C
  ENST ID: ENST00000520497
  CDS Start-End: 95-310
tttgtaaaacttaaagcgggcgcagcattaacgcttcccgccccggtgacctctcaggggtctccccgccaaaggtgctccgccgctaaggaacatggcgaaggtggagcaggtcctgagcctcgagccgcagcacgagctcaaattccgaggtcccttcaccgatgttgtcaccaccaacctaaagcttggcaacccgacagaccgaaatgtgtgttttaaggtgaagactacagcaccacgtaggtactgtgtgaggcccaacagcggaatcatcgatgcaggggcctcaattaatgtatctgcatgatgtagaaataaataaaattatatccacaactgcatcaaagacagaaacaccaatagtgtctaagtctctgagttcttctttggatgacaccgaagttaagaaggttatggaagaatgtaagaggctgcaaggtgaagttcagaggctacgggaggagaacaagcagttcaaggaagaagatggactgcggatgaggaagacagtgcagagcaacagccccatttcagcattagccccaactgggaaggaagaaggccttagcacccggctcttggctctggtggttttgttctttatcgttggtgtaattattgggaagattgccttgtagaggtagcatgcacaggatggtaaattggattggtggatccaccatatcatgggatttaaatttatcataaccatgtgtaaaaagaaattaatgtatgatgacatctcacaggtcttgcctttaaattacccctccctgcacacacatacacagatacacacacacaaatataatgtaacgatcttttagaaagttaaaaatgtatagtaactgattgagggggaaaagaatgatctttattaatgacaagggaaaccatgagtaatgccacaatggcatattgtaaatgtcatttt

SEQ ID NO: 198847 - DNA, 2265 bp, Homo sapiens
  Payload ID: 19227
  Gene Name: VANGL planar cell polarity protein 1
  Uniprot ID: Q8TAA9
  ENST ID: ENST00000310260
  CDS Start-End: 216-1790
ctcgctcacaaaaaattgagccggccctggaggcctggggggcgagtccggttgcgcctcggagagcgcaacaggcagaatttgttcctgttgaagagtggctcctcttctaatttccagactccttgaggttttaggagtctggtaggtgaaattttctacctctaaggagaaacagtacctgctccttcctcaagcgcaagccctccattgctatggataccgaatccacttattctggatattcttactattcaagtcattcgaaaaaatctcacagacaaggggaaagaactagagagagacacaagtcaccccggaataaagacggcagagggtcagaaaagtctgtcaccattcaacctcccactggagagcccctgttgggaaatgattctactcggacagaggaagttcaggatgacaactggggagagaccaccacggccatcacaggcacctcggagcacagcatatcccaagaggacattgccaggatcagcaaggacatggaggacagcgtggggctggattgcaaacgctacctgggcctcaccgtcgcctcttttcttggacttctagttttcctcacccctattgccttcatccttttacctccgatcctgtggagggatgagctggagccttgtggcacaatttgtgaggggctctttatctccatggcattcaaactcctcattctgctcatagggacctgggcactttttttccgcaagcggagagctgacatgccacgggtgtttgtgtttcgtgcccttttgttggtcctcatctttctctttgtggtttcctattggcttttttacggggtccgcattttggactctcgggaccggaattaccagggcattgtgcaatatgcagtctcccttgtggatgccctcctcttcatccattacctggccatcgtcctgctggagctcaggcagctgcagcccatgttcacgctgcaggtggtccgctccaccgatggcgagtcccgcttctacagcctgggacacctgagtatccagcgagcagcattggtggtcctagaaaattactacaaagatttcaccatctataacccaaacctcctaacagcctccaaattccgagcagccaagcatatggccgggctgaaagtctacaatgtagatggccccagtaacaatgccactggccagtcccgggccatgattgctgcagctgctcggcgcagggactcaagccacaacgagttgtattatgaagaggccgaacatgaacggcgagtaaagaagcggaaagcaaggctggtggttgcagtggaagaggccttcatccacattcagcgtctccaggctgaggagcagcagaaagccccaggggaggtgatggaccctagggaggccgcccaggccattttcccctccatggccagggctctccagaagtacctgcgcatcacccggcagcagaactaccacagcatggagagcatcctgcagcacctggccttctgcatcaccaacggcatgacccccaaggccttcctagaacggtacctcagtgcgggccccaccctgcaatatgacaaggaccgctggctctctacacagtggaggcttgtcagtgatgaggctgtgactaatggattacgggatggaattgtgttcgtccttaagtgcttggacttcagcctcgtagtcaatgtgaagaaaattccattcatcatactctctgaagagttcatagaccccaaatctcacaaatttgtccttcgcttacagtctgagacatccgtttaaaagttctatatttgtggctttattaaaaaaaaaagaaaaatatatagagagatatatatctatgccagaggggtgtcttttttaaaaattcttcttcattgctgactgaaactggcagatgattgaccagtatcctttgaccatctgcactttatttggaaggaagcaggggctgtccaccctgaaaaagagtgactgatgacatctgacttttgtcgatgggacttctcaagaagccattccttggagcttctgttacagctgtaaaccaaagtggagctggtgcttcttgggagcctcgccttacaactaattcctgcctttcgtccagtaccaagtcccccgttgcttctggtcagcccacttgtagacttccaggggacacatctttattctgtttcaggaaaccagtcacgacacgtccacatatgtatttgtgtatgttaatgtccagtatcacatcacccatgaaagt

SEQ ID NO: 198848 - DNA, 8691 bp, Homo sapiens
  Payload ID: 19227
  Gene Name: VANGL planar cell polarity protein 1
  Uniprot ID: Q8TAA9
  ENST ID: ENST00000355485
  CDS Start-End: 272-1846
aggaagcggaaagcagcagtgcagcggcggcggcggcggggctctgcctctccaggagcccagcgcaggccgcagagccggggccgctgtgagccgagaccgcgggccgcggagctcgggcggccggcgcggagaatttgttcctgttgaagagtggctcctcttctaatttccagactccttgaggttttaggagtctggtaggtgaaattttctacctctaaggagaaacagtacctgctccttcctcaagcgcaagccctccattgctatggataccgaatccacttattctggatattcttactattcaagtcattcgaaaaaatctcacagacaaggggaaagaactagagagagacacaagtcaccccggaataaagacggcagagggtcagaaaagtctgtcaccattcaacctcccactggagagcccctgttgggaaatgattctactcggacagaggaagttcaggatgacaactggggagagaccaccacggccatcacaggcacctcggagcacagcatatcccaagaggacattgccaggatcagcaaggacatggaggacagcgtggggctggattgcaaacgctacctgggcctcaccgtcgcctcttttcttggacttctagttttcctcacccctattgccttcatccttttacctccgatcctgtggagggatgagctggagccttgtggcacaatttgtgaggggctctttatctccatggcattcaaactcctcattctgctcatagggacctgggcactttttttccgcaagcggagagctgacatgccacgggtgtttgtgtttcgtgcccttttgttggtcctcatctttctctttgtggtttcctattggcttttttacggggtccgcattttggactctcgggaccggaattaccagggcattgtgcaatatgcagtctcccttgtggatgccctcctcttcatccattacctggccatcgtcctgctggagctcaggcagctgcagcccatgttcacgctgcaggtggtccgctccaccgatggcgagtcccgcttctacagcctgggacacctgagtatccagcgagcagcattggtggtcctagaaaattactacaaagatttcaccatctataacccaaacctcctaacagcctccaaattccgagcagccaagcatatggccgggctgaaagtctacaatgtagatggccccagtaacaatgccactggccagtcccgggccatgattgctgcagctgctcggcgcagggactcaagccacaacgagttgtattatgaagaggccgaacatgaacggcgagtaaagaagcggaaagcaaggctggtggttgcagtggaagaggccttcatccacattcagcgtctccaggctgaggagcagcagaaagccccaggggaggtgatggaccctagggaggccgcccaggccattttcccctccatggccagggctctccagaagtacctgcgcatcacccggcagcagaactaccacagcatggagagcatcctgcagcacctggccttctgcatcaccaacggcatgacccccaaggccttcctagaacggtacctcagtgcgggccccaccctgcaatatgacaaggaccgctggctctctacacagtggaggcttgtcagtgatgaggctgtgactaatggattacgggatggaattgtgttcgtccttaagtgcttggacttcagcctcgtagtcaatgtgaagaaaattccattcatcatactctctgaagagttcatagaccccaaatctcacaaatttgtccttcgcttacagtctgagacatccgtttaaaagttctatatttgtggctttattaaaaaaaaaagaaaaatatatagagagatatatatctatgccagaggggtgtcttttttaaaaattcttcttcattgctgactgaaactggcagatgattgaccagtatcctttgaccatctgcactttatttggaaggaagcaggggctgtccaccctgaaaaagagtgactgatgacatctgacttttgtcgatgggacttctcaagaagccattccttggagcttctgttacagctgtaaaccaaagtggagctggtgcttcttgggagcctcgccttacaactaattcctgcctttcgtccagtaccaagtcccccgttgcttctggtcagcccacttgtagacttccaggggacacatctttattctgtttcaggaaaccagtcacgacacgtccacatatgtatttgtgtatgttaatgtccagtatcacatcacccatgaaagtcgtgggcagttcaggagatacctgccttcatctttgttctttgttgccttaggttcttcagagaaagatcacaacaaaaaatgtacactgtcgtttacagctattaagtgatttgattttgtttttttcccaaagagaaaacctacctgccctgtttctgatcccacccctctgctggcttgaagcaggtaaccctttcccagccctgcagctgcccacctggcctccatgccatcctgcccccacctggctggcagccctggctctccatgtgtgccctccggctctgtgtgaagcctcaagtcagtcccagcattgtttccatagggaagtgtggggtgcccagcaggtaaagcacagggagagagggcagtgggaatgccacctttaggctgcagcaggagccccacactgcccagttttcctccccactgttctacaccaaccaggggagactaacactgtgactctgggattggcaggtgcaacttggagccacttaatttcctggggacgtaagttcttcccaagcttagagcaagctgccctgccaaaggagaccaaaccatgccaaccacgctggcaactgctgctgtccagtccctgtgttttctgaccaccgtcactgtgcaactcatcgcctctgccacttaggaccaggaaagaggctggttttgctcccactcttagttgctgataaagtggggagaaggaaaatggacactctacagagtttggggaagggagagtagggagcccatcttgtccagaaagattcatctgtggtctgtctgttaaacacagctgatttcagtgggctttcccctggccctgggggagcagacactgactgggttgtgggcagaggagccatcctggcggagccctgctgcaggggagctccttcaggagccccatccggacctcttgcactgggctgcctttgcctccatttgccttcctgtatctgcaacaaaccttttaaaagtgttcactcttgctttttccagtatttcggtaatcagccatcttgctgtagtacaggatgacattgtcgaatgctctttgtatgtgtgcacacccccttactcccttactgcttcatacactccacaagtggtacagtattttgtgtcattgtaaaaatcaaaattggctttggatctttgtaatacacctgtacctgaaaaagtaaacaacattcttcaattactagccttcagcttgaaaagacatgctggagaagaaggaagggggaacccataggtgtggcgtggagccaagatgtactattcaactatgtgtttctgtttataaaaaacacataccatggaaccatggtgcttttgttcttagtttttgccgttagatcccttcaaactggaagttccttacaatatctttctcaggaaatattttgggaaatggggtaagagatggcaagtgtgagacgggctgtgtcagaggttgctacgtcatggatacagtgcagttccaagtgccataagtgtatgtacatatagttaataatgacactgttcatcaccattctaaaatactgttcttccaaccctatcttcaatgaccagtccagaaggggttaagctggattcatttgctctggcatgtgcattcccagcagggtgaagaaaggtttaaattaaagaatttattttctctctcccccttcctctttctcccagtctttgcataggagaatgttagacattcagaaattactgtttctgttttaaattgagtattgatttttttatattgactttgtattgagttctttttgaaagaataacaaaataaaatgcaggatctttgtaaagcctttgcactttcaacctctttatagcttgagttacttttgcagtgggaacaatgtaaatgacatttaaaagatttaaggtttcagaaagctgcatcccacaattgaacacaatgcatttttatttcaattcttggaactggtaggctattctttttaaaagggggtaaacttcgccctaaggctggtagaatgtatgttcacattatagtagacaggatttcatttgccttatatgtttatagattttttataattttcatcctacgttattaaaattagagcattgagtgttaaagaacttaatgaggagtctatatctgagattgctctcttccctggtgatgttttaactggtagataatttgttcttaaatatgtacttttgaagataggacagtttttatagtccatgaactgaatgttaaaaagttctgtatgcattctcagagaggattttaaagctatatagttcatccatcctttgcattatcaaaatgttaagtcaaatctgtaatactttggctaaaattcataaagtaagccctagagaaaatacttgaccaccaaatttttgcccaactatcatcacctcccttcccccgcctctgttcttgccttttgacatctacatggaagacaagttctttacagcaaatggtaagaggcaggtgacctggtgtgtttgctgtgttgtagttcattgcctggggcttgggactccttttttaatggagagactagctgtgcaggtgtgtgttggatagggataaagtgctcacccctgccctctctacagtagttggtggtagatttctctctcattttgcctcataatcactttcgagtgcatgtatttacctaagggctgtagctctgtgggatgctaccagcatattggactgacagaaattgattaccttgccactccaacctacgtactgagtgagtgctccagccactcagtgaaaccaacaaaagtgagtccttggtttaccttccaatctgggtcctgctgtgtaagtatccctaagtggggatgcatatttgtttgtgcgtttttatttccatatatgtgagcatttctctgagtgtattaccagacggatagcacatttatatgtcagacatcttaacatctgtgttatctgtagcaggtgtgtagctcagcagatacgtgtcattgtgtatatagctgagtgtgtgagggtgtctgtgtttctgcagtcccctgtgtttgagagatgacttaataaccctgtgttttgagaggtcgctctaaaccagtgacttttccctcccctgctttattcctttccctcactgacactggcttctcccgctagagtaaatggctttagcacagcactgtcttctggggagcctgctgtcctgcaggcaagtccattaaactctttcttgctttaggactctgaaaacagcaagaaacaaacaaacaaaggtcaagctctaagaaaattactgctcaaacttcactaccctggaagccttactagatatttcttaaggtaacttaaaaattgggctttatttttaaaaagtgataggttacttacagtagcacagaaatgttagcatatttatttaaatagtcctgcagcagagaccctgcgattgtaaagtgatttaagtatttctgggtagtgtttgtgatttacggatttgttactgaaaaacaaaaaaatcactactgtgaatttactactatgtaaccttgtggtcgtatttcattataaataaaataagaattgctcttctgcccaccgttcttgattggtattcagtgcagtagcgaaatgagatagtttagacactgttgaaataactgcattgagctttaaccaagtgtatgctcagaaaattcagttttggatcacattttgacaaaacatgttttggtcaaagaaaggaaaggctactaacacatttatcaggtaatgtatgtcacagtccgtgttccacccagccttgttatccccacattctttcaagataggagtcatcttggtttttcgggtgaaaaacggaaggtcagagaggaaggggcttgtccaaggtctcatgtctggttaacagaatttcaaactagatgtttgattctaacccctcagtccactgtaccttgaagtatggtctaaatgattcggcacttctggatgttgaggaaggacctagagacacatccttgaactagaacctggggtgagagttcattgggaggcaggatctcttctttcactttggatttacaccttgtcccttggaaagcttctccactatgctagcaaatatcttaggatatttgatggaaagaacttgagaatcccttctggaaaacccagcctttcagtgttaacacctgctgcaagacagggatgctgttgttctggcagcccccctttgcttttgcctggccccaccttctgctcccactctgctggcttgggcaagatgcgtgccttgggccttgggtgcagggaggcaggcaggggcttgacctggcctctctctggtgccatggcaacattatgccccaaacttcttccctggttggagtgagaggggctgtccacagccccatcctgtggggatctcaagccggagtccctggcctggcctccttgacgtaggtgttctcagcaagcagtttgcatcccaccgtctttctcacacttgcccccaagacttttgacagagcagacgtaaaacaggactcagaaaaccatttttctctgttcccatatgtagtaagttttgattcagttgtgcataaaccatagttttctgccctgctgtttgctttcaatggaagacagtaaagggaagatggtgctcacatctctccatgtgacatctcattaggaattaagatgcgatggattagaaatgtaaaacttcagaataaaattaaatttcagggctctataagtcccgttttcccaggtcctgttccgtttctacgtagataacccaatttgttttgtctatgaaataagcctctttagtgggttgttttagtctctccaacaaaagagcagattcctaaagccaggtgcagcactgtgaaaagtttctttcaatatggcaccaagactctaccatttatgtctctctcagcttacaaacatcagcgttttgtccttgtcatagtggaagaaagacacttactttaagctttggggacaaaggtgacaaaccccaggcttttatcttaaaagtgtctttggcacttcttttggcactgaaatggtatttgggaagcattatttgaatgtacagttgtttggttttgtatgtgcttatctttatctgagctttcacttgtagacatggccttttgttgtgaagttgctcatcatttaggagtgtttaattctaaaaagccttcagcctaagaaagcttcatctgtggggaccagagacttgttgctcagggagttagtgatgggacttgggcatctgatctgcaggtgacaagtttagttcaactgaagttgtagggaatttagacagttgcacatcattgccgttctaggggccttgtagaaagatgaaacagttgtttttcatttaccagcacctctcagttatagaggtaatggaacattcgcttacttttcatcatcattctttaaaaagggaacatacaaaaatctaaactatggcaataatttatttttataatagtttacggtaggctttaattaaatggcaaactcctctgggacccctaagttatggcgtgattagccaaatttgatttccaacagtcatttatggccataactattgcatagagtgcaggatgccagcaaagatgagggtgggggcagatactggctcagtgatttaactcacattatagatgaccccttcctcaacagaaatgctactgagagaaccagagaggcctgggccaggcaggtcttatttgagaggagattatttgataattgctttggttagaaggactttacatttcctgatttcaagtccagcaccaatttagaaagttcagagatgaaaccacctgtctttacctgacagagtcataacggtttgtgtaaaaatgtggtcagggaccttttttgttctttctgattagttaatactgtacattgtaaccaggaggggcagttttgccaaccagcctctgctcatggtcaccatatgtgtatgacaaggcctgagtgagttcctgcataaactgggtagtgggctcttttgacacatttgcaagcatgtaaatgaatgaatgacactaccagcaaccatctgtacaggtccatttacttacattcataaggtttatgctatgaaacttcttctcattgtgatgtcagtaacagagttagtgtctctgatggaatagtgtacctgtcacccaagttattttgttcctttttgggtcctccagtataatccccccctcatcccaattaactgtaaaatgttttacacatcacattttttatactgtaaacttggaaaataaactgaaatatcaaattg

SEQ ID NO: 198849 - DNA, 2062 bp, Homo sapiens
  Payload ID: 19227
  Gene Name: VANGL planar cell polarity protein 1
  Uniprot ID: Q8TAA9
  ENST ID: ENST00000369509
  CDS Start-End: 13-1587
ccctccattgctatggataccgaatccacttattctggatattcttactattcaagtcattcgaaaaaatctcacagacaaggggaaagaactagagagagacacaagtcaccccggaataaagacggcagagggtcagaaaagtctgtcaccattcaacctcccactggagagcccctgttgggaaatgattctactcggacagaggaagttcaggatgacaactggggagagaccaccacggccatcacaggcacctcggagcacagcatatcccaagaggacattgccaggatcagcaaggacatggaggacagcgtggggctggattgcaaacgctacctgggcctcaccgtcgcctcttttcttggacttctagttttcctcacccctattgccttcatccttttacctccgatcctgtggagggatgagctggagccttgtggcacaatttgtgaggggctctttatctccatggcattcaaactcctcattctgctcatagggacctgggcactttttttccgcaagcggagagctgacatgccacgggtgtttgtgtttcgtgcccttttgttggtcctcatctttctctttgtggtttcctattggcttttttacggggtccgcattttggactctcgggaccggaattaccagggcattgtgcaatatgcagtctcccttgtggatgccctcctcttcatccattacctggccatcgtcctgctggagctcaggcagctgcagcccatgttcacgctgcaggtggtccgctccaccgatggcgagtcccgcttctacagcctgggacacctgagtatccagcgagcagcattggtggtcctagaaaattactacaaagatttcaccatctataacccaaacctcctaacagcctccaaattccgagcagccaagcatatggccgggctgaaagtctacaatgtagatggccccagtaacaatgccactggccagtcccgggccatgattgctgcagctgctcggcgcagggactcaagccacaacgagttgtattatgaagaggccgaacatgaacggcgagtaaagaagcggaaagcaaggctggtggttgcagtggaagaggccttcatccacattcagcgtctccaggctgaggagcagcagaaagccccaggggaggtgatggaccctagggaggccgcccaggccattttcccctccatggccagggctctccagaagtacctgcgcatcacccggcagcagaactaccacagcatggagagcatcctgcagcacctggccttctgcatcaccaacggcatgacccccaaggccttcctagaacggtacctcagtgcgggccccaccctgcaatatgacaaggaccgctggctctctacacagtggaggcttgtcagtgatgaggctgtgactaatggattacgggatggaattgtgttcgtccttaagtgcttggacttcagcctcgtagtcaatgtgaagaaaattccattcatcatactctctgaagagttcatagaccccaaatctcacaaatttgtccttcgcttacagtctgagacatccgtttaaaagttctatatttgtggctttattaaaaaaaaaagaaaaatatatagagagatatatatctatgccagaggggtgtcttttttaaaaattcttcttcattgctgactgaaactggcagatgattgaccagtatcctttgaccatctgcactttatttggaaggaagcaggggctgtccaccctgaaaaagagtgactgatgacatctgacttttgtcgatgggacttctcaagaagccattccttggagcttctgttacagctgtaaaccaaagtggagctggtgcttcttgggagcctcgccttacaactaattcctgcctttcgtccagtaccaagtcccccgttgcttctggtcagcccacttgtagacttccaggggacacatctttattctgtttcaggaaaccagtcacgacacgtccacatatgtatttgtgtatgttaatgtccagtatcacatcacccatgaaagt

SEQ ID NO: 198850 - DNA, 8647 bp, Homo sapiens
  Payload ID: 19227
  Gene Name: VANGL planar cell polarity protein 1
  Uniprot ID: Q8TAA9
  ENST ID: ENST00000369510
  CDS Start-End: 234-1802
gggctctgcctctccaggagcccagcgcaggccgcagagccggggccgctgtgagccgagaccgcgggccgcggagctcgggcggccggcgcggagaatttgttcctgttgaagagtggctcctcttctaatttccagactccttgaggttttaggagtctggtaggtgaaattttctacctctaaggagaaacagtacctgctccttcctcaagcgcaagccctccattgctatggataccgaatccacttattctggatattcttactattcaagtcattcgaaaaaatctcacagacaaggggaaagaactagagagagacacaagtcaccccggaataaagacggcagagggtcagaaaagtctgtcaccattcaacctcccactggagagcccctgttgggaaatgattctactcggacagaggaagatgacaactggggagagaccaccacggccatcacaggcacctcggagcacagcatatcccaagaggacattgccaggatcagcaaggacatggaggacagcgtggggctggattgcaaacgctacctgggcctcaccgtcgcctcttttcttggacttctagttttcctcacccctattgccttcatccttttacctccgatcctgtggagggatgagctggagccttgtggcacaatttgtgaggggctctttatctccatggcattcaaactcctcattctgctcatagggacctgggcactttttttccgcaagcggagagctgacatgccacgggtgtttgtgtttcgtgcccttttgttggtcctcatctttctctttgtggtttcctattggcttttttacggggtccgcattttggactctcgggaccggaattaccagggcattgtgcaatatgcagtctcccttgtggatgccctcctcttcatccattacctggccatcgtcctgctggagctcaggcagctgcagcccatgttcacgctgcaggtggtccgctccaccgatggcgagtcccgcttctacagcctgggacacctgagtatccagcgagcagcattggtggtcctagaaaattactacaaagatttcaccatctataacccaaacctcctaacagcctccaaattccgagcagccaagcatatggccgggctgaaagtctacaatgtagatggccccagtaacaatgccactggccagtcccgggccatgattgctgcagctgctcggcgcagggactcaagccacaacgagttgtattatgaagaggccgaacatgaacggcgagtaaagaagcggaaagcaaggctggtggttgcagtggaagaggccttcatccacattcagcgtctccaggctgaggagcagcagaaagccccaggggaggtgatggaccctagggaggccgcccaggccattttcccctccatggccagggctctccagaagtacctgcgcatcacccggcagcagaactaccacagcatggagagcatcctgcagcacctggccttctgcatcaccaacggcatgacccccaaggccttcctagaacggtacctcagtgcgggccccaccctgcaatatgacaaggaccgctggctctctacacagtggaggcttgtcagtgatgaggctgtgactaatggattacgggatggaattgtgttcgtccttaagtgcttggacttcagcctcgtagtcaatgtgaagaaaattccattcatcatactctctgaagagttcatagaccccaaatctcacaaatttgtccttcgcttacagtctgagacatccgtttaaaagttctatatttgtggctttattaaaaaaaaaagaaaaatatatagagagatatatatctatgccagaggggtgtcttttttaaaaattcttcttcattgctgactgaaactggcagatgattgaccagtatcctttgaccatctgcactttatttggaaggaagcaggggctgtccaccctgaaaaagagtgactgatgacatctgacttttgtcgatgggacttctcaagaagccattccttggagcttctgttacagctgtaaaccaaagtggagctggtgcttcttgggagcctcgccttacaactaattcctgcctttcgtccagtaccaagtcccccgttgcttctggtcagcccacttgtagacttccaggggacacatctttattctgtttcaggaaaccagtcacgacacgtccacatatgtatttgtgtatgttaatgtccagtatcacatcacccatgaaagtcgtgggcagttcaggagatacctgccttcatctttgttctttgttgccttaggttcttcagagaaagatcacaacaaaaaatgtacactgtcgtttacagctattaagtgatttgattttgtttttttcccaaagagaaaacctacctgccctgtttctgatcccacccctctgctggcttgaagcaggtaaccctttcccagccctgcagctgcccacctggcctccatgccatcctgcccccacctggctggcagccctggctctccatgtgtgccctccggctctgtgtgaagcctcaagtcagtcccagcattgtttccatagggaagtgtggggtgcccagcaggtaaagcacagggagagagggcagtgggaatgccacctttaggctgcagcaggagccccacactgcccagttttcctccccactgttctacaccaaccaggggagactaacactgtgactctgggattggcaggtgcaacttggagccacttaatttcctggggacgtaagttcttcccaagcttagagcaagctgccctgccaaaggagaccaaaccatgccaaccacgctggcaactgctgctgtccagtccctgtgttttctgaccaccgtcactgtgcaactcatcgcctctgccacttaggaccaggaaagaggctggttttgctcccactcttagttgctgataaagtggggagaaggaaaatggacactctacagagtttggggaagggagagtagggagcccatcttgtccagaaagattcatctgtggtctgtctgttaaacacagctgatttcagtgggctttcccctggccctgggggagcagacactgactgggttgtgggcagaggagccatcctggcggagccctgctgcaggggagctccttcaggagccccatccggacctcttgcactgggctgcctttgcctccatttgccttcctgtatctgcaacaaaccttttaaaagtgttcactcttgctttttccagtatttcggtaatcagccatcttgctgtagtacaggatgacattgtcgaatgctctttgtatgtgtgcacacccccttactcccttactgcttcatacactccacaagtggtacagtattttgtgtcattgtaaaaatcaaaattggctttggatctttgtaatacacctgtacctgaaaaagtaaacaacattcttcaattactagccttcagcttgaaaagacatgctggagaagaaggaagggggaacccataggtgtggcgtggagccaagatgtactattcaactatgtgtttctgtttataaaaaacacataccatggaaccatggtgcttttgttcttagtttttgccgttagatcccttcaaactggaagttccttacaatatctttctcaggaaatattttgggaaatggggtaagagatggcaagtgtgagacgggctgtgtcagaggttgctacgtcatggatacagtgcagttccaagtgccataagtgtatgtacatatagttaataatgacactgttcatcaccattctaaaatactgttcttccaaccctatcttcaatgaccagtccagaaggggttaagctggattcatttgctctggcatgtgcattcccagcagggtgaagaaaggtttaaattaaagaatttattttctctctcccccttcctctttctcccagtctttgcataggagaatgttagacattcagaaattactgtttctgttttaaattgagtattgatttttttatattgactttgtattgagttctttttgaaagaataacaaaataaaatgcaggatctttgtaaagcctttgcactttcaacctctttatagcttgagttacttttgcagtgggaacaatgtaaatgacatttaaaagatttaaggtttcagaaagctgcatcccacaattgaacacaatgcatttttatttcaattcttggaactggtaggctattctttttaaaagggggtaaacttcgccctaaggctggtagaatgtatgttcacattatagtagacaggatttcatttgccttatatgtttatagattttttataattttcatcctacgttattaaaattagagcattgagtgttaaagaacttaatgaggagtctatatctgagattgctctcttccctggtgatgttttaactggtagataatttgttcttaaatatgtacttttgaagataggacagtttttatagtccatgaactgaatgttaaaaagttctgtatgcattctcagagaggattttaaagctatatagttcatccatcctttgcattatcaaaatgttaagtcaaatctgtaatactttggctaaaattcataaagtaagccctagagaaaatacttgaccaccaaatttttgcccaactatcatcacctcccttcccccgcctctgttcttgccttttgacatctacatggaagacaagttctttacagcaaatggtaagaggcaggtgacctggtgtgtttgctgtgttgtagttcattgcctggggcttgggactccttttttaatggagagactagctgtgcaggtgtgtgttggatagggataaagtgctcacccctgccctctctacagtagttggtggtagatttctctctcattttgcctcataatcactttcgagtgcatgtatttacctaagggctgtagctctgtgggatgctaccagcatattggactgacagaaattgattaccttgccactccaacctacgtactgagtgagtgctccagccactcagtgaaaccaacaaaagtgagtccttggtttaccttccaatctgggtcctgctgtgtaagtatccctaagtggggatgcatatttgtttgtgcgtttttatttccatatatgtgagcatttctctgagtgtattaccagacggatagcacatttatatgtcagacatcttaacatctgtgttatctgtagcaggtgtgtagctcagcagatacgtgtcattgtgtatatagctgagtgtgtgagggtgtctgtgtttctgcagtcccctgtgtttgagagatgacttaataaccctgtgttttgagaggtcgctctaaaccagtgacttttccctcccctgctttattcctttccctcactgacactggcttctcccgctagagtaaatggctttagcacagcactgtcttctggggagcctgctgtcctgcaggcaagtccattaaactctttcttgctttaggactctgaaaacagcaagaaacaaacaaacaaaggtcaagctctaagaaaattactgctcaaacttcactaccctggaagccttactagatatttcttaaggtaacttaaaaattgggctttatttttaaaaagtgataggttacttacagtagcacagaaatgttagcatatttatttaaatagtcctgcagcagagaccctgcgattgtaaagtgatttaagtatttctgggtagtgtttgtgatttacggatttgttactgaaaaacaaaaaaatcactactgtgaatttactactatgtaaccttgtggtcgtatttcattataaataaaataagaattgctcttctgcccaccgttcttgattggtattcagtgcagtagcgaaatgagatagtttagacactgttgaaataactgcattgagctttaaccaagtgtatgctcagaaaattcagttttggatcacattttgacaaaacatgttttggtcaaagaaaggaaaggctactaacacatttatcaggtaatgtatgtcacagtccgtgttccacccagccttgttatccccacattctttcaagataggagtcatcttggtttttcgggtgaaaaacggaaggtcagagaggaaggggcttgtccaaggtctcatgtctggttaacagaatttcaaactagatgtttgattctaacccctcagtccactgtaccttgaagtatggtctaaatgattcggcacttctggatgttgaggaaggacctagagacacatccttgaactagaacctggggtgagagttcattgggaggcaggatctcttctttcactttggatttacaccttgtcccttggaaagcttctccactatgctagcaaatatcttaggatatttgatggaaagaacttgagaatcccttctggaaaacccagcctttcagtgttaacacctgctgcaagacagggatgctgttgttctggcagcccccctttgcttttgcctggccccaccttctgctcccactctgctggcttgggcaagatgcgtgccttgggccttgggtgcagggaggcaggcaggggcttgacctggcctctctctggtgccatggcaacattatgccccaaacttcttccctggttggagtgagaggggctgtccacagccccatcctgtggggatctcaagccggagtccctggcctggcctccttgacgtaggtgttctcagcaagcagtttgcatcccaccgtctttctcacacttgcccccaagacttttgacagagcagacgtaaaacaggactcagaaaaccatttttctctgttcccatatgtagtaagttttgattcagttgtgcataaaccatagttttctgccctgctgtttgctttcaatggaagacagtaaagggaagatggtgctcacatctctccatgtgacatctcattaggaattaagatgcgatggattagaaatgtaaaacttcagaataaaattaaatttcagggctctataagtcccgttttcccaggtcctgttccgtttctacgtagataacccaatttgttttgtctatgaaataagcctctttagtgggttgttttagtctctccaacaaaagagcagattcctaaagccaggtgcagcactgtgaaaagtttctttcaatatggcaccaagactctaccatttatgtctctctcagcttacaaacatcagcgttttgtccttgtcatagtggaagaaagacacttactttaagctttggggacaaaggtgacaaaccccaggcttttatcttaaaagtgtctttggcacttcttttggcactgaaatggtatttgggaagcattatttgaatgtacagttgtttggttttgtatgtgcttatctttatctgagctttcacttgtagacatggccttttgttgtgaagttgctcatcatttaggagtgtttaattctaaaaagccttcagcctaagaaagcttcatctgtggggaccagagacttgttgctcagggagttagtgatgggacttgggcatctgatctgcaggtgacaagtttagttcaactgaagttgtagggaatttagacagttgcacatcattgccgttctaggggccttgtagaaagatgaaacagttgtttttcatttaccagcacctctcagttatagaggtaatggaacattcgcttacttttcatcatcattctttaaaaagggaacatacaaaaatctaaactatggcaataatttatttttataatagtttacggtaggctttaattaaatggcaaactcctctgggacccctaagttatggcgtgattagccaaatttgatttccaacagtcatttatggccataactattgcatagagtgcaggatgccagcaaagatgagggtgggggcagatactggctcagtgatttaactcacattatagatgaccccttcctcaacagaaatgctactgagagaaccagagaggcctgggccaggcaggtcttatttgagaggagattatttgataattgctttggttagaaggactttacatttcctgatttcaagtccagcaccaatttagaaagttcagagatgaaaccacctgtctttacctgacagagtcataacggtttgtgtaaaaatgtggtcagggaccttttttgttctttctgattagttaatactgtacattgtaaccaggaggggcagttttgccaaccagcctctgctcatggtcaccatatgtgtatgacaaggcctgagtgagttcctgcataaactgggtagtgggctcttttgacacatttgcaagcatgtaaatgaatgaatgacactaccagcaaccatctgtacaggtccatttacttacattcataaggtttatgctatgaaacttcttctcattgtgatgtcagtaacagagttagtgtctctgatggaatagtgtacctgtcacccaagttattttgttcctttttgggtcctccagtataatccccccctcatcccaattaactgtaaaatgttttacacatcacattttttatactgtaaacttggaaaataaactgaaatatcaaattg

SEQ ID NO: 198851 - DNA, 5340 bp, Homo sapiens
  Payload ID: 19228
  Gene Name: VANGL planar cell polarity protein 2
  Uniprot ID: Q9ULK5
  ENST ID: ENST00000368061
  CDS Start-End: 475-2040
gattcctgatccttgattccttgatccttggtcccgccatgggagcctgagcgccccctattcccccctggcccccagcccccggggccttgagggggaagaggcagcggtctgggacggagcagggggtgaccagactcaagaacccccccctcaacatcccccatcgcgcgcgctgcctgtccaggagcgccgagttcggagcgacccggagcgctgcggatacaaaggcgacgggccgagcggggcgcccgcggagcccacccggcagttcgcagcggcgggagcgtcgctggattttctctgagacaagcccacccgtccagcaaaatagagtccctcagggtgacagttgacttcctgaaggtgcctcttggcctaaagaagccggtgctgaaggaggtggctgtggggccccccaagaggccccagcctgcggccctggagcgctacaaggcgcggcgttcagacgccatggacaccgagtcccagtactcgggctattcctacaagtcgggccactcccgcagctcccgcaagcacagggaccgccgggaccgacaccgctctaagagtcgagatgggggccgaggggacaagtcggtgacaatccaggctcccggggagcccctgctggacaatgagtccacacgaggggatgagcgggatgacaactggggggaaacgacgacagtagtaacgggcacctcagagcacagcatctcccatgatgacctcacacgcatcgccaaggacatggaggacagtgtccctctggactgctcccgtcacctgggtgtggcagcgggggccaccctggcactgctgtctttcctcacgcctctggccttcctgctgctgcccccactgctgtggcgggaggagctggagccttgcgggacggcctgcgagggcctcttcatctctgtcgccttcaagctgctcatcctgctactgggcagctgggctctgttcttccgccggcccaaggcctcgctgccccgcgtctttgtgctgcgtgccctgcttatggtgctggttttcctgctcgtggtctcctactggctcttctatggtgtgcgcatcctggatgctcgggagcgcagctaccagggcgtggtgcagttcgccgtgtcgctggtggacgcccttcttttcgtgcactacctggccgtggtcctgctggagctgcgccagctccagcctcagttcacgctcaaggtcgtgcgctccaccgacggcgccagccgcttctacaacgttggccatctcagcatccagcgcgtggcagtgtggatcctggagaagtattaccatgacttccctgtctacaaccctgccctcctcaacctgcccaagtccgtcctggccaagaaagtgtctggcttcaaggtgtattccctcggagaggaaaacagcaccaacaactccactggccagtctcgggctgtgattgcagcggcagctcggaggcgggacaacagtcacaatgagtactactatgaggaggctgagcatgagcgaagggtgcgcaagaggagggccaggcttgtagtggcggtggaggaggccttcactcacattaagcggctgcaggaagaggagcagaaaaaccccagggaggtgatggacccccgggaggcagcccaagccatctttgcatccatggcccgtgccatgcagaagtaccttcggaccaccaagcagcagccctaccacaccatggagagcatcctgcagcaccttgaattctgcatcacgcatgacatgacgcccaaggccttcttggagcgatacttggcggctggacctaccatccagtaccacaaggaacgctggctggccaaacagtggacattggtgagcgaggagccggtgaccaacggcctcaaggatggcatcgttttcctcttaaaacgccaggacttcagcctggtggtcagcaccaagaaggtcccattcttcaaactctccgaggaatttgtggatcccaagtcacacaagtttgtcatgaggctgcagtctgagacctcagtgtgactgtgcaacagcagggggagtgggaaactctggggggtcctgagggggtgggagggggcttggttctcaggcccagccacattcctgccacccttcttcttcttgctcttttttttttacttgaattaacgcacccccaccttctctcctcgcttcttccttattttaccccatgtgaacctggagagaccatcctgctgtcaacagtacctgggaaggactcccacctcaccaacaacttttgtattactctaggccctgcaggaatcagtgcctctctccctcttctttccctagtcttttcccagattacagtctctcctgaaagggcacagggccctgctgattgtactttcccctcctgagccccgactcacaaatccaagttcttaaaacatttctcttcagtggcccaacagggtttctctggggcacatggacatgactccagagagccacagtgccaaactcctccagggcagcaactggccctcctgtccctcaccccagccacaacaaaccctgggttctagggcagggatactcctgccacacagcccgagttagaaatctccttgctaggagcatttgcttccacatatatttagagcaaagaaggatcccatccttttcccagaaatctccacctaatgtttttggtttgtatggtcacgtgaccataggcaaccacgtggaaaccctctgtgaccacttttccagggacttaggggaaggtacctttcttccaatgtgtcttcctaggcagcccctgaggaggagggctgaatagatccctgaggttttggagagacccccatcactgactcctgctccctaaccctaccctcactttcgtccccgctcttcccagtgaaggatggtatgtagactcctgtacagacatagtggcttgcagaccctgacccagcccctgtggtcttagacaaatgtttttatttttgtcaccagccacccctgtcctgccgccttctctcgactccagagacctgttgcctcatctcttttggggaagagccggcagctcctcctcatcccctgccttaagtccagttctttgcctcaggggtctcgtttccttggccttccagggtccccaccccttttctccctgcctgattctctgagctctgggctccgtctgtattgggttgaggggcaaggattactgccttttgtaggtacttcacccctcaccccattttagcttccatagtctttgcaccaaatccaaattcttgataatttagatctcattttgagcaaaatttgctggccctctaataaatattttcaatataaatctgagcctttgactcagacatttttgccaaggagagtagaattaggaagtacccatatacatccagccaggatccacatggaggacctttctgatggctgcaatgactaggccattcctctgagtaactcacagtgtccttttgtaggcccttcttttccctgaaagactggttggtacttaccttgcagagcacatcctgggataagatccccagtgtctcccctgggaggctccccctctgtgtagcaccagccctgggaatgatggagcctagtgatcggggtttctcctgctgtcctttctgcaaaagttcacttgtttacccaccgcatgctagagaggagctcattggccaatgcttaccttgtccccaaaggggtgggttgtggagctcacttaggcagggcctctggctggggccagggttatgagataggcctgtatgaaatatgtcctgttctgggggtctgtctcttttcttctcttcaaaaactttgtgtcagagagtcccttctgagtcacataaatacctcactatcctggaaaacagggcctggatggtgactggggtcattgcctttgtggacaggatggagtgtggtgtggtctgaggagcaggttggggtgggggagagggaaaggatttgggatcttagttgctgccctaggttaggggctggggagtgtttattttaagatcctgccatgtttttaatcactgtgatttttttttcattcccctttcctaaaaaaaattttttgcctccaactctctaagcactaagggctgtgcctgagaatggtagcattttggtcttttgcttcagaactgtggtatctttgtcttttttcattattattattattattattattattattactattgttttttaaaatgtcaggatgaattgtcagacatatggccatgtgtttgtcctctgcttctcccctgtgggaagttgtctccatgctgtgaactgctgtggggtgtgcagctgactcagtccctctgagcagtttccccactgtgtctgtcccatcatgcgctggatctgctcattctcctgctgtgggggtatgcccacctcttacccccttgacaccatagggctgctgtggctgggcctcaccagcactgtcttttgtgtgactcatggcatcctcgttcatccccaccgtgcctagcaggccttccttttcaccacctcggaacgcttgcctttcctccctccacaacaggacgctgtgcctcagtccttcacctacctcgccactctgccactgtccccattggtcctttctcctaaactggtctttgtgctctctttgttttttcttatttccctcttgtctctcattttttcttcccattcccctcccatttcagcccttaacttttctctttcccatctccactcagtattccaatggcaaaccctgatgatgtaacacctgcgatgagacatcggactctccggaactttctcatctgacacgtctttttcccagggttcgtacttctcctccattggtcccaggctaactcccctgttcctctgtggtgtctgtcagtccgtctgtcttctctttcctctgcccttcccacagggcagtatctgctgatggattcagtcctggtgtgtgattgttgtgatttgttcttccgtgcgcaaaaggaagagggctttttgagtcccttccaagtgagattgtaaatgtagaattttccactgttggatctagattttttttccttttttttgggggggtggggttacagagctgagaccttgtgcatgcatgtagaaaattgtaaaatgtaaattttttttaatatataaaaagcttgtttctacagtttgcagtggatctaaacattacggcaattttaggatttttttcttaaacataggaactaaaactgtacaaattttttttatataaaataaagacatttgacttttgtgggggca

SEQ ID NO: 198852 - DNA, 3106 bp, Homo sapiens
  Payload ID: 19229
  Gene Name: vanin 1
  Uniprot ID: O95497
  ENST ID: ENST00000367928
  CDS Start-End: 15-1556
cattggacttcagcatgactactcagttgccagcttacgtggcaattttgcttttctatgtctcaagagccagctgccaggacactttcactgcagctgtttatgagcatgcagcgatattgcccaatgccaccctaacaccagtgtctcgtgaggaggctttggcattaatgaatcggaatctggacattttggaaggagcgatcacatcagcagcagatcagggtgcgcatattattgtgactccagaagatgctatttatggctggaacttcaacagggactctctctacccatatttggaggacatcccagaccctgaagtaaactggatcccctgtaataatcgtaacagatttggccagaccccagtacaagaaagactcagctgcctggccaagaacaactctatctatgttgtggcaaatattggggacaagaagccatgcgataccagtgatcctcagtgtccccctgatggccgttaccaatacaacactgatgtggtatttgattctcaaggaaaactggtggcacgctaccataagcaaaaccttttcatgggtgaaaatcaattcaatgtacccaaggagcctgagattgtgactttcaataccacctttggaagttttggcattttcacatgctttgatatactcttccatgatcctgctgttaccttggtgaaagatttccacgtggacaccatagtattcccaacagcttggatgaatgttttgccacatttgtcagctgttgaattccactcagcttgggctatgggcatgagggtcaatttccttgcatccaacatacattacccctcaaagaaaatgacaggaagtggcatctatgcacccaattcttcaagagcatttcattatgatatgaagacagaagagggaaaactcctcctctcgcaactggattcccacccatcccattctgcagtggtgaactggacttcctatgccagcagtatagaagcgctctcatcaggaaacaaggaatttaaaggcactgtctttttcgatgaattcacttttgtgaagctcacaggagttgcaggaaattatacagtttgtcagaaagatctctgctgtcatttaagctacaaaatgtctgagaacataccaaatgaagtgtacgctctaggggcatttgacggactgcacactgtggaagggcgctattatctacagatttgtaccctgttgaaatgtaaaacgactaatttaaacacttgcggtgactcagctgaaacagcttctaccaggtttgaaatgttctccctcagtggcactttcggaacccagtatgtctttcctgaggtgttgctgagtgaaaatcagcttgcacctggagaatttcaggtgtcaactgacggacgcttgtttagtctgaagccaacatccggacctgtcttaacagtaactctgtttgggaggttgtatgagaaggactgggcatcaaatgcttcatcaggcctcacagcacaagcaagaataataatgctaatagttatagcacctattgtatgctcattaagttggtagaatattgactttttctcttttttatttgggataatttaaaaaatgatggatgagaaaagaaagattggtccgggttaatattatcctctagtataagtgaattactagtttctctttatttagacaaacacacacacaccagataatataaacttaataaattatctgttaatgtagattttatttaaaaaactatatttgaacattggtctttcttggacgtgagctaattatatcaaataagtatcacaaatcttttacgcagaagaaataaaaactacgggtagaaaacataagaactatcataaaatttacttacaaggaggctgctcttgttaccacttttattatattacgtatcacttattcagctctgctgaaaatttccaatgactttgtttgtttgctctttttgttttttacctaaacaatacattttgattctcttgtgggttgataatgtctccccaaaatttacatgttgaagcacctcagaatgtgactgtatttggagacagggtctttaaagaggtaaaataaggtcattaggatagaccctaattcaatatgactgatgatcataaaagaagaggcgagtagggcacaacaggcacaaagggagaccataaggagacacagaggaaggacaactctttacaagctaagaagagagggcctcagaagaaaccaaccctgccaacaccttgatcttggacttccagcctccaaaactatgagaaataaatttctattgtttaagtcacccagtccatggtactttgttaggcagccctggcaaatgaatcaaagacccattcctgttcctctccccaccactactgttttctactgtaatctgaagcttcaacaaaaggcttacctggtaagaatattcagctggtctgggtcctcaagactccaatagacactcttagagaaggattgctgatggattgatagtgaaaccattagatcattgaattcctctggaattagaaaaccagagagtcccattttaagaaattagatatttaatatagcattgtgtgttctattttagtaacagcagaatctcttgacattacacaactcagtgaaacaacatcatttaagccaaaatatctcccaactgactgatagactctgagcactaatatcatagtgctgtgatgatggacaattacatagtaccgataacagccatgcactgtgcaaagcatgcccttctgcacaggagagcaaggcacttgcagtagtgatctatgccagcaaaacatcattttgagacaaacatttttgtggcagatgtttttcctaaaaagtactatatcatccaagaaatatttgagtaaaatcccttgttcttttgggtgacattaactgacatttgctttttttcaagacctaatagaaaataagaaagcccataatgtatttagaaacaggaatcctcagagcaattctctgtattctcatataatttcaatgtaaaacagaaaacatattgatgtgttggtgataggcttgaattattaaaaacttcaaaaaca

SEQ ID NO: 198853 - DNA, 2118 bp, Homo sapiens
  Payload ID: 19230
  Gene Name: vanin 2
  Uniprot ID: O95498
  ENST ID: ENST00000326499
  CDS Start-End: 126-1688
aagaagaaaaatgatgataaagtaaaaggccagtaactggcagccacatgttatgcaaacattctcccctctgtaaatactacatgaatgttatttttgctttcagaaatcactaaaccttggccatggtcacttcctcttttccaatctctgtggcagtttttgccctaataaccctgcaggttggtactcaggacagttttatagctgcagtgtatgaacatgctgtcattttgccaaataaaacagaaacaccagtttctcaggaggatgccttgaatctcatgaacgagaatatagacattctggagacagcgatcaagcaggcagctgagcagggtgctcgaatcattgtgactccagaagatgcactttatggatggaaatttaccagggaaactgttttcccttatctggaggatatcccagaccctcaggtgaactggattccgtgtcaagacccccacagatttggtcacacaccagtacaagcaagactcagctgcctggccaaggacaactctatctatgtcttggcaaatttgggggacaaaaagccatgtaattcccgtgactccacatgtcctcctaatggctactttcaatacaataccaatgtggtgtataatacagaaggaaaactcgtggcacgttaccataagtaccacctgtactctgagcctcagtttaatgtccctgaaaagccggagttggtgactttcaacaccgcatttggaaggtttggcattttcacgtgctttgatatattcttctatgatcctggtgttaccctggtgaaagatttccatgtggacaccatactgtttcccacagcttggatgaacgttttgccccttttgacagctattgaattccattcagcttgggcaatgggaatgggagttaatcttcttgtggccaacacacatcatgtcagcctaaatatgacaggaagtggtatttatgcaccaaatggtcccaaagtgtatcattatgacatgaagacagagttgggaaaacttctcctttcagaggtggattcacatcccctatcctcgcttgcctacccaacagctgttaattggaatgcctacgccaccaccatcaaaccatttccagtacagaaaaacactttcaggggatttatttccagggatgggttcaacttcacagaactttttgaaaatgcaggaaaccttacagtctgtcaaaaggagctttgctgtcatttaagctacagaatgttacaaaaagaagagaatgaagtatacgttctaggagcttttacaggattacatggccgaaggagaagagagtactggcaggtctgcacactgctgaagtgcaaaactactaatttgacaacttgtggacggccagtagaaactgcttctacaagatttgaaatgttctccctcagtggcacatttggaacagagtatgtttttcctgaagtgctacttaccgaaattcatctgtcacctggaaaatttgaggtgctgaaagatgggcgtttggtaaacaagaatggatcatctgggcctatactaacagtgtcactctttgggaggtggtacacaaaggactcactttacagctcatgtgggaccagcaattcagcaataacttacctgctaatattcatattattaatgatcatagctttgcaaaatattgtaatgttatagggcgtctctttatcactcagcttctgcatcatatgcttggctgaatgtgtttatcggcttcccaagtttactaagaaactttgaagggctatttcagtagtatagaccagtgagtcctaaatattttttctcatcaataattattttttaagtattatgataatgttgtccatttttttggctactctgaaatgttgcagtgtggaacaatggaaagagcctgggtgtttgggtcagataaatgaagatcaaactccagctccagcctcatttgcttgagactttgtgtgtatgggggacttgtatgtatgggagtgaggagtttcagggccattgcaaacatagctgtgcccttgaagagaatagtaatgatgggaatttagaggtttatgactgaattccctttgacattaaagactatttgaattca

SEQ ID NO: 198854 - DNA, 1920 bp, Homo sapiens
  Payload ID: 19230
  Gene Name: vanin 2
  ENST ID: ENST00000392389
  CDS Start-End: 88-960
ggcagccacatgttatgcaaacattctcccctctgtaaatactacatgaatgttatttttgctttcagaaatcactaaaccttggccatggtcacttcctcttttccaatctctgtggcagtttttgccctaataaccctgcaggttggtactcaggacagttttatagctgcagtgtatgaacatgctgtcattttgccaaataaaacagaaacaccagtttctcaggaggatgccttgaatctcatgaacgagaatatagacattctggagacagcgatcaagcaggcagctgagcagggtgctcgaatcattgtgactccagaagatgcactttatggatggaaatttaccagggaaactgttttcccttatctggaggatatcccagaccctcaggtgaactggattccgtgtcaagacccccacagatttggtcacacaccagtacaagcaagactcagctgcctggccaaggacaactctatctatgtcttggcaaatttgggggacaaaaagccatgtaattcccgtgactccacatgtcctcctaatggctactttcaatacaataccaatgtggtgtataatacagaaggaaaactcgtggcacgttaccataagtaccacctgtactctgagcctcagtttaatgtccctgaaaagccggagttggtgactttcaacaccgcatttggaaggtttggcattttcacgtgctttgatatattcttctatgatcctggtgttaccctggtgaaagatttccatgtggacaccatactgtttcccacagcttggatgaacgttttgccccttttgacagctattgaattccattcagcttgggcaatgggaatgggagttaatcttcttgtggccaacacacatcatgtcagcctaaatatgacagtggtatttatgcaccaaatggtcccaaagtgtatcattatgacatgaagacagagttgggaaaacttctcctttcagaggtggattcacatcccctatcctcgcttgcctacccaacagctgttaattggaatgcctacgccaccaccatcaaaccatttccagtacagaaaaacactttcaggggatttatttccagggatgggttcaacttcacagaactttttgaaaatgcaggaaaccttacagtctgtcaaaaggagctttgctgtcatttaagctacagaatgttacaaaaagaagagaatgaagtatacgttctaggagcttttacaggattacatggccgaaggagaagagagtactggcaggtctgcacactgctgaagtgcaaaactactaatttgacaacttgtggacggccagtagaaactgcttctacaagatttgaaatgttctccctcagtggcacatttggaacagagtatgtttttcctgaagtgctacttaccgaaattcatctgtcacctggaaaatttgaggtgctgaaagatgggcgtttggtaaacaagaatggatcatctgggcctatactaacagtgtcactctttgggaggtggtacacaaaggactcactttacagctcatgtgggaccagcaattcagcaataacttacctgctaatattcatattattaatgatcatagctttgcaaaatattgtaatgttatagggcgtctctttatcactcagcttctgcatcatatgcttggctgaatgtgtttatcggcttcccaagtttactaagaaactttgaagggctatttcagtagtatagaccagtgagtcctaaatattttttctcatcaataattattttttaagtattatgataatgttgtccatttttttggctactctgaaatgttgcagtgtggaacaatggaaagagcctgggtgtttgggtcagataaatgaagatcaaactccagctccagcctcatttg

SEQ ID NO: 198855 - DNA, 1781 bp, Homo sapiens
  Payload ID: 19230
  Gene Name: vanin 2
  ENST ID: ENST00000418593
  CDS Start-End: 1-660
atggtcacttcctcttttccaatctctgtggcagtttttgccctaataaccctgcaggttggtactcaggacagttttatagctgcagtgtatgaacatgctgtcattttgccaaataaaacagaaacaccagtttctcaggaggatgccttgaatctcatgaacgagaatatagacattctggagacagcgatcaagcaggcagctgagcagggtgctcgaatcattgtgactccagaagatgcactttatggatggaaatttaccagggaaactgttttcccttatctggaggatatcccagaccctcaggtgaactggattccgtgtcaagacccccacagatttggtcacacaccagtacaagcaagactcagctgcctggccaaggacaactctatctatgtcttggcaaatttgggggacaaaaagccatgtaattcccgtgactccacatgtcctcctaatggctactttcaatacaataccaatgtggtgtataatacagaaggaaaactcgtggcacgttaccataagtaccacctgtactctgagcctcagtttaatgtccctgaaaagccggagttggtgactttcaacaccgcatttggaaggaagtggtatttatgcaccaaatggtcccaaagtgtatcattatgacatgaagacagagttgggaaaacttctcctttcagaggtggattcacatcccctatcctcgcttgcctacccaacagctgttaattggaatgcctacgccaccaccatcaaaccatttccagtacagaaaaacactttcaggggatttatttccagggatgggttcaacttcacagaactttttgaaaatgcaggaaaccttacagtctgtcaaaaggagctttgctgtcatttaagctacagaatgttacaaaaagaagagaatgaagtatacgttctaggagcttttacaggattacatggccgaaggagaagagagtactggcaggtctgcacactgctgaagtgcaaaactactaatttgacaacttgtggacggccagtagaaactgcttctacaagatttgaaatgttctccctcagtggcacatttggaacagagtatgtttttcctgaagtgctacttaccgaaattcatctgtcacctggaaaatttgaggtgctgaaagatgggcgtttggtaaacaagaatggatcatctgggcctatactaacagtgtcactctttgggaggtggtacacaaaggactcactttacagctcatgtgggaccagcaattcagcaataacttacctgctaatattcatattattaatgatcatagctttgcaaaatattgtaatgttatagggcgtctctttatcactcagcttctgcatcatatgcttggctgaatgtgtttatcggcttcccaagtttactaagaaactttgaagggctatttcagtagtatagaccagtgagtcctaaatattttttctcatcaataattattttttaagtattatgataatgttgtccatttttttggctactctgaaatgttgcagtgtggaacaatggaaagagcctgggtgtttgggtcagataaatgaagatcaaactccagctccagcctcatttgcttgagactttgtgtgtatgggggacttgtatgtatgggagtgaggagtttcagggccattgcaaacatagctgtgcccttgaagagaatagtaatgatgggaatttagaggtttatgactgaattccctttgacattaaagactatttgaattca

SEQ ID NO: 198856 - DNA, 1873 bp, Homo sapiens
  Payload ID: 19230
  Gene Name: vanin 2
  ENST ID: ENST00000422400
  CDS Start-End: 1-651
atggtcacttcctcttttccaatctctgtggcagtttttgccctaataaccctgcaggttggtactcaggacagttttatagctgcagtgtatgaacatgctgtcattttgccaaataaaacagaaacaccagtttctcaggaggatgccttgaatctcatgaacgagaatatagacattctggagacagcgatcaagcaggcagctgagcagggtgctcgaatcattgtgactccagaagatgcactttatggatggaaatttaccagggaaactgttttcccttatctggaggatatcccagaccctcaggtgaactggattccgtgtcaagacccccacagatttggtcacacaccagtacaagcaagactcagctgcctggccaaggacaactctatctatgtcttggcaaatttgggggacaaaaagccatgtaattcccgtgactccacatgtcctcctaatggctactttcaatacaataccaatgtggtgtataatacagaaggaaaactcgtggcacgttaccataagtaccacctgtactctgagcctcagtttaatgtccctgaaaagccggagttggtgactttcaacaccgcatttggaagcttggatgaacgttttgccccttttgacagctattgaattccattcagcttgggcaatgggaatgggagttaatcttcttgtggccaacacacatcatgtcagcctaaatatgacaggaagtggtatttatgcaccaaatggtcccaaagtgtatcattatgacatgaagacagagttgggaaaacttctcctttcagaggtggattcacatcccctatcctcgcttgcctacccaacagctgttaattggaatgcctacgccaccaccatcaaaccatttccagtacagaaaaacactttcaggggatttatttccagggatgggttcaacttcacagaactttttgaaaatgcaggaaaccttacagtctgtcaaaaggagctttgctgtcatttaagctacagaatgttacaaaaagaagagaatgaagtatacgttctaggagcttttacaggattacatggccgaaggagaagagagtactggcaggtctgcacactgctgaagtgcaaaactactaatttgacaacttgtggacggccagtagaaactgcttctacaagatttgaaatgttctccctcagtggcacatttggaacagagtatgtttttcctgaagtgctacttaccgaaattcatctgtcacctggaaaatttgaggtgctgaaagatgggcgtttggtaaacaagaatggatcatctgggcctatactaacagtgtcactctttgggaggtggtacacaaaggactcactttacagctcatgtgggaccagcaattcagcaataacttacctgctaatattcatattattaatgatcatagctttgcaaaatattgtaatgttatagggcgtctctttatcactcagcttctgcatcatatgcttggctgaatgtgtttatcggcttcccaagtttactaagaaactttgaagggctatttcagtagtatagaccagtgagtcctaaatattttttctcatcaataattattttttaagtattatgataatgttgtccatttttttggctactctgaaatgttgcagtgtggaacaatggaaagagcctgggtgtttgggtcagataaatgaagatcaaactccagctccagcctcatttgcttgagactttgtgtgtatgggggacttgtatgtatgggagtgaggagtttcagggccattgcaaacatagctgtgcccttgaagagaatagtaatgatgggaatttagaggtttatgactgaattccctt

SEQ ID NO: 198857 - DNA, 594 bp, Homo sapiens
  Payload ID: 19230
  Gene Name: vanin 2
  ENST ID: ENST00000524919
  CDS Start-End: 97-594
gactggaggagcacaggccttggaaaggaaagcagctgagatccagaggagtggaaggctcccccttgactaaagctaaatcactaaaccttggccatggtcacttcctcttttccaatctctgtggcagtttttgccctaataaccctgcaggttggtactcaggacagttttatagctgcagtgtatgaacatgctgtcattttgccaaataaaacagaaacaccagtttctcaggaggatgccttgaatctcatgaacgagaatatagacattctggagacagcgatcaagcaggcagctgagcagggtgctcgaatcattgtgactccagaagatgcactttatggatggaaatttaccagggaaactgttttcccttatctggaggatatcccagaccctcaggtgaactggattccgtgtcaagacccccacagatttggtcacacaccagtacaagcaagactcagctgcctggccaaggacaactctatctatgtcttggcaaatttgggggacaaaaagccatgtaattcccgtgactccacatgtcctcctaatggctactttcaatacaataccaatgtggtg

SEQ ID NO: 198858 - DNA, 543 bp, Homo sapiens
  Payload ID: 19230
  Gene Name: vanin 2
  ENST ID: ENST00000532012
  CDS Start-End: 241-543
aaagcagctgagatccagaggagtggaaggctcccccttgactaaagctccaaggacagagaaaaacatccagatttgggaacacaataacagatatgattgtccccacttctactgccaaaattataaaactgttaactcctcctcatcagcttacctgactacttaaaagcaaaagagttaattaagtattactaattggtgatactagatcaatgaagaaatcactaaaccttggccatggtcacttcctcttttccaatctctgtggcagtttttgccctaataaccctgcaggttggtactcaggacagttttatagctgcagtgtatgaacatgctgtcattttgccaaataaaacagaaacaccagtttctcaggaggatgccttgaatctcatgaacgagaatatagacattctggagacagcgatcaagcaggcagctgagcagggtgctcgaatcattgtgactccagaagatgcactttatggatggaaatttaccagggaaactgttttcccttatctggaggatatccca

SEQ ID NO: 198859 - DNA, 1123 bp, Homo sapiens
  Payload ID: 19230
  Gene Name: vanin 2
  ENST ID: ENST00000533835
  CDS Start-End: 22-576
agaaatcactaaaccttggccatggtcacttcctcttttccaatctctgtggcagtttttgccctaataaccctgcaggttggtactcaggacagttttatagctgcagtgtatgaacatgctgtcattttgccaaataaaacagaaacaccagtttctcaggaggatgccttgaatctcatgaacgagaatatagacattctggagacagcgatcaagcaggcagctgagcagggtgctcgaatcattgtgactccagaagatgcactttatggatggaaatttaccagggaaactgttttcccttatctggaggatatcccagaccctcaggtgaactggattccgtgtcaagacccccacagatttggtcacacaccagtacaagcaagactcagctgcctggccaaggacaactctatctatgtcttggcaaatttgggggacaaaaagccatgtaattcccgtgactccacatgtcctcctaatggctactttcaatacaataccaatgtggtgtataatacagaaggaaaactcgtggcacgttaccataaggtgggcaagagtcactgagattactttggatgggacactaaagagagagatgacatctctcacctgacttacaggaagtggtatttatgcaccaaatggtcccaaagtgtatcattatgacatgaagacagagttgggaaaacttctcctttcagaggtggattcacatcccctatcctcgcttgcctacccaacagctgttaattggaatgcctacgccaccaccatcaaaccatttccagtacagaaaaacactttcaggggatttatttccagggatgggttcaacttcacagaactttttgaaaatgcaggaaaccttacagtctgtcaaaaggagctttgctgtcatttaagctacagaatgttacaaaaagaagagaatgaagtatacgttctaggagcttttacaggattacatggccgaaggagaagagagtactggcaggtctgcacactgctgaagtgcaaaactactaatttgacaacttgtggacggccagtagaaactgcttctacaagatttgaaatgttctccctcagtggcacatttggaacagagtat

SEQ ID NO: 198860 - DNA, 571 bp, Homo sapiens
  Payload ID: 19230
  Gene Name: vanin 2
  ENST ID: ENST00000531279
  CDS Start-End: 84-479
aagcagctgagatccagaggagtggaaggctcccccttgactaaagctaaacaccagtttctcaggaggatgccttgaatctcatgaacgagaatatagacattctggagacagcgatcaagcaggcagctgagcagggtgctcgaatcattgtgactccagaagatgcactttatggatggaaatttaccagggaaactgttttcccttatctggaggatatcccagaccctcaggtgaactggattccgtgtcaagacccccacagatttggtcacacaccagtacaagcaagactcagctgcctggccaaggacaactctatctatgtcttggcaaatttgggggacaaaaagccatgtaattcccgtgactccacatgtcctcctaatggctactttcaatacaataccaatgtggtgtataatacagaaggaaaactcgtggcacgttaccataaggtgggcaagagtcactgagattactttggatgggacactaaagagagagatgacatctctcacctgacttacagtaccacctgtactctgagcctcagtttaatgtccct

SEQ ID NO: 198861 - DNA, 707 bp, Homo sapiens
  Payload ID: 19230
  Gene Name: vanin 2
  ENST ID: ENST00000528801
  CDS Start-End: 1-360
atggtcacttcctcttttccaatctctgtggcagtttttgccctaataaccctgcaggttggtactcaggacagttttatagctgcagtgtatgaacatgctgtcattttgccaaataaaacagaaacaccagtttctcaggaggatgccttgaatctcatgaacgagaatatagacattctggagacagcgatcaagcaggcagctgagcagggtgctcgaatcattgtgactccagaagatgcactttatggatggaaatttaccagggaaactgttttcccttatctggaggatatcccagaccctcaggtgaactggattccgtgtcaagacccccacaggtctgcacactgctgaagtgcaaaactactaatttgacaacttgtggacggccagtagaaactgcttctacaagatttgaaatgttctccctcagtggcacatttggaacagagtatgtttttcctgaagtgctacttaccgaaattcatctgtcacctggaaaatttgaggtgctgaaagatgggcgtttggtaaacaagaatggatcatctgggcctatactaacagtgtcactctttgggaggtggtacacaaaggactcactttacagctcatgtgggaccagcaattcagcaataacttacctgctaatattcatattattaatgatcatagctttgcaaaatattgtaatgttatag

SEQ ID NO: 198862 - DNA, 1034 bp, Homo sapiens
  Payload ID: 19230
  Gene Name: vanin 2
  Uniprot ID: O95498
  ENST ID: ENST00000532053
  CDS Start-End: 1-579
atggtcacttcctcttttccaatctctgtggcagtttttgccctaataaccctgcaggttggtactcaggacagttttatagctgcagtgtatgaacatgctgtcattttgccaaataaaacagaaacaccagtttctcaggaggatgccttgaatctcatgaacgagaatatagacattctggagacagcgatcaagcaggcagctgagcagggtgctcgaatcattgtgactccagaagatgcactttatggatggaaatttaccagggaaactgttttcccttatctggaggatatcccagaccctcaggtgaactggattccgtgtcaagacccccacagatttggtcacacaccagtacaagcaagactcagctgcctggccaaggacaactctatctatgtcttggcaaatttgggggacaaaaagccatgtaattcccgtgactccacatgtcctcctaatggctactttcaatacaataccaatgtggtgtataatacagaaggaaaactcgtggcacgttaccataaggaaaccttacagtctgtcaaaaggagctttgctgtcatttaagctacagaatgttacaaaaagaagagaatgaagtatacgttctaggagcttttacaggattacatggccgaaggagaagagagtactggcaggtctgcacactgctgaagtgcaaaactactaatttgacaacttgtggacggccagtagaaactgcttctacaagatttgaaatgttctccctcagtggcacatttggaacagagtatgtttttcctgaagtgctacttaccgaaattcatctgtcacctggaaaatttgaggtgctgaaagatgggcgtttggtaaacaagaatggatcatctgggcctatactaacagtgtcactctttgggaggtggtacacaaaggactcactttacagctcatgtgggaccagcaattcagcaataacttacctgctaatattcatattattaatgatcatagctttgcaaaatattgtaatgttatag

SEQ ID NO: 198863 - DNA, 587 bp, Homo sapiens
  Payload ID: 19230
  Gene Name: vanin 2
  ENST ID: ENST00000530536
  CDS Start-End: 281-587
ggaggagcacaggccttggaaaggaaagcagctgagatccagaggagtggaaggctcccccttgactaaagctccaaggacagagaaaaacatccagatttgggaacacaataacagatatgattgtccccacttctactgccaaaattataaaactgttaactcctcctcatcagcttacctgactacttaaaagcaaaagagttaattaagtattactaattggtgatactagatcaatgaagaaacaccagtttctcaggaggatgccttgaatctcatgaacgagaatatagacattctggagacagcgatcaagcaggcagctgagcagggtgctcgaatcattgtgactccagaagatgcactttatggatggaaatttaccagggaaactgttttcccttatctggaggatatcccagaccctcaggtgaactggattccgtgtcaagacccccacagatttggtcacacaccagtacaagcaagactcagctgcctggccaaggacaactctatctatgtcttggcaaatttgggggacaaaaagccatgtaattcccgtgactccacatgtcctccta

SEQ ID NO: 198864 - DNA, 1608 bp, Homo sapiens
  Payload ID: 19230
  Gene Name: vanin 2
  Uniprot ID: O95498
  ENST ID: ENST00000525270
  CDS Start-End: 101-1504
acaggccttggaaaggaaagcagctgagatccagaggagtggaaggctcccccttgactaaagctaaacaccagtttctcaggaggatgccttgaatctcatgaacgagaatatagacattctggagacagcgatcaagcaggcagctgagcagggtgctcgaatcattgtgactccagaagatgcactttatggatggaaatttaccagggaaactgttttcccttatctggaggatatcccagaccctcaggtgaactggattccgtgtcaagacccccacagatttggtcacacaccagtacaagcaagactcagctgcctggccaaggacaactctatctatgtcttggcaaatttgggggacaaaaagccatgtaattcccgtgactccacatgtcctcctaatggctactttcaatacaataccaatgtggtgtataatacagaaggaaaactcgtggcacgttaccataagtaccacctgtactctgagcctcagtttaatgtccctgaaaagccggagttggtgactttcaacaccgcatttggaaggtttggcattttcacgtgctttgatatattcttctatgatcctggtgttaccctggtgaaagatttccatgtggacaccatactgtttcccacagcttggatgaacgttttgccccttttgacagctattgaattccattcagcttgggcaatgggaatgggagttaatcttcttgtggccaacacacatcatgtcagcctaaatatgacaggaagtggtatttatgcaccaaatggtcccaaagtgtatcattatgacatgaagacagagttgggaaaacttctcctttcagaggtggattcacatcccctatcctcgcttgcctacccaacagctgttaattggaatgcctacgccaccaccatcaaaccatttccagtacagaaaaacactttcaggggatttatttccagggatgggttcaacttcacagaactttttgaaaatgcaggaaaccttacagtctgtcaaaaggagctttgctgtcatttaagctacagaatgttacaaaaagaagagaatgaagtatacgttctaggagcttttacaggattacatggccgaaggagaagagagtactggcaggtctgcacactgctgaagtgcaaaactactaatttgacaacttgtggacggccagtagaaactgcttctacaagatttgaaatgttctccctcagtggcacatttggaacagagtatgtttttcctgaagtgctacttaccgaaattcatctgtcacctggaaaatttgaggtgctgaaagatgggcgtttggtaaacaagaatggatcatctgggcctatactaacagtgtcactctttgggaggtggtacacaaaggactcactttacagctcatgtgggaccagcaattcagcaataacttacctgctaatattcatattattaatgatcatagctttgcaaaatattgtaatgttatagggcgtctctttatcactcagcttctgcatcatatgcttggctgaatgtgtttatcggcttcccaagtttactaagaaactttgaagggctatttcagtagtata

SEQ ID NO: 198865 - DNA, 1274 bp, Homo sapiens
  Payload ID: 19230
  Gene Name: vanin 2
  Uniprot ID: O95498
  ENST ID: ENST00000525674
  CDS Start-End: 1-588
atggtcacttcctcttttccaatctctgtggcagtttttgccctaataaccctgcaggttggtactcaggacagttttatagctgcagtgtatgaacatgctgtcattttgccaaataaaacagaaacaccagtttctcaggaggatgccttgaatctcatgaacgagaatatagacattctggagacagcgatcaagcaggcagctgagcagggtgctcgaatcattgtgactccagaagatgcactttatggatggaaatttaccagggaaactgttttcccttatctggaggatatcccagaccctcaggtgaactggattccgtgtcaagacccccacagatttggtcacacaccagtacaagcaagactcagctgcctggccaaggacaactctatctatgtcttggcaaatttgggggacaaaaagccatgtaattcccgtgactccacatgtcctcctaatggctactttcaatacaataccaatgtggtgtataatacagaaggaaaactcgtggcacgttaccataaggaagtggtatttatgcaccaaatggtcccaaagtgtatcattatgacatgaagacagagttgggaaaacttctcctttcagaggtggattcacatcccctatcctcgcttgcctacccaacagctgttaattggaatgcctacgccaccaccatcaaaccatttccagtacagaaaaacactttcaggggatttatttccagggatgggttcaacttcacagaactttttgaaaatgcaggaaaccttacagtctgtcaaaaggagctttgctgtcatttaagctacagaatgttacaaaaagaagagaatgaagtatacgttctaggagcttttacaggattacatggccgaaggagaagagagtactggcaggtctgcacactgctgaagtgcaaaactactaatttgacaacttgtggacggccagtagaaactgcttctacaagatttgaaatgttctccctcagtggcacatttggaacagagtatgtttttcctgaagtgctacttaccgaaattcatctgtcacctggaaaatttgaggtgctgaaagatgggcgtttggtaaacaagaatggatcatctgggcctatactaacagtgtcactctttgggaggtggtacacaaaggactcactttacagctcatgtgggaccagcaattcagcaataacttacctgctaatattcatattattaatgatcatagctttgcaaaatattgtaatgttatag

SEQ ID NO: 198866 - DNA, 900 bp, Homo sapiens
  Payload ID: 19230
  Gene Name: vanin 2
  Uniprot ID: O95498
  ENST ID: ENST00000525289
  CDS Start-End: 1-900
atggtcacttcctcttttccaatctctgtggcagtttttgccctaataaccctgcaggttggtactcaggacagttttatagctgcagtgtatgaacatgctgtcattttgccaaataaaacagaaacaccagtttctcaggaggatgccttgaatctcatgaacgagaatatagacattctggagacagcgatcaagcaggcagctgagcagggtgctcgaatcattgtgactccagaagatgcactttatggatggaaatttaccagggaaactgttttcccttatctggaggatatcccagaccctcaggtgaactggattccgtgtcaagacccccacagatttggtcacacaccagtacaagcaagactcagctgcctggccaaggacaactctatctatgtcttggcaaatttgggggacaaaaagccatgtaattcccgtgactccacatgtcctcctaatggctactttcaatacaataccaatgtggtgtataatacagaaggaaaactcgtggcacgttaccataaggtctgcacactgctgaagtgcaaaactactaatttgacaacttgtggacggccagtagaaactgcttctacaagatttgaaatgttctccctcagtggcacatttggaacagagtatgtttttcctgaagtgctacttaccgaaattcatctgtcacctggaaaatttgaggtgctgaaagatgggcgtttggtaaacaagaatggatcatctgggcctatactaacagtgtcactctttgggaggtggtacacaaaggactcactttacagctcatgtgggaccagcaattcagcaataacttacctgctaatattcatattattaatgatcatagctttgcaaaatattgtaatgttatag

SEQ ID NO: 198867 - DNA, 1717 bp, Homo sapiens
  Payload ID: 19231
  Gene Name: vanin 3
  Uniprot ID: Q9NY84
  ENST ID: ENST00000367927
  CDS Start-End: 74-898
aatgtaaagtttttccagtgaaacaaaacgtaagaatctgagtttgtttttcaaagatcactaaattttagttatgattatatcacattttccaaaatgtgtggcagtttttgccctccttgctctgagtgttggtgcactggacacttttattgctgcagtatatgagcatgcggtgatattaccaaacagaacagaaacacctgtttcaaaagaagaagctttgctcctgatgaacaagaacatagatgttttggagaaagcagttaagctggcagcgaagcagggtgcacatatcattgtgaccccagaagatggaatctatggttggatcttcaccagggagagcatttacccctatctagaggatataccagaccctggagtgaactggattccatgtagagacccctggagattcggcaacacaccagtgcaacaaagactcagctgcctggccaaggacaactctatctatgtcgtggctaatattggggacaagaagccatgcaatgccagtgactctcagtgtccccctgatggccgttaccaatacaacactgatgtggtgtttgattctcagggaaaactgttggcacgctaccataagtacaatctttttgcacctgaaattcagtttgatttccccaaggattcagaacttgtgacttttgacactccctttgggaagtttggcatttttacttgctttgacattttttctcatgacccagctgtggtggtggtggatgagtttcaattgacagcattctctaccccacagcatggtacaacacgctgcccctcctctcggctgttcccttccattcagcatgggccaaggccatgggagtcaatctacttgctgcaaatacccacaacaccagcatgcacatgacagggagtggaatctacgccccagaagcagtcaaggtgtaccactatgacatggaaacagagagtggtcagctgttgctatcagaactgaagtctcggccccgccgtgagcccacctaccctgcagctgttgactggcatgcgtatgccagcagtgtcaagccattttcctctgaacagtcagattttctggggatgatttattttgatgagtttaccttcaccaagcttaagagaaatacaggaaattacacagcttgccagaaagatctgtgttgtcacttaacttacaagatgtctgagaagcgaacagacgagatctatgccctaggtgcttttgatggactgcacacagtagaaggccaatattacttacagatatgtgcattactgaagtgtcaaaccactgacctggaaacgtgtggagaacctgtggggtcagcttttaccaagtttgaagacttctccctcagtggcacatttggaacgcgttatgttttcccacagatcattctaagtgggagtcagcttgcccctgaaagacattatgagatttcaagagatggacgcttgaggagccgaagtggagcccctttgcctgtcttagttatggccctgtatggaagagtgtttgagaaggaccctccacgcttagggcagggatctgggaaattccagtgatctcctttagcagagcccttttaggattagcctggctaagaaaggaagaaaaaaaagagatccgttagtgtctgtttagaaaagatgttataaacttacagaaacaaatataataaactgaagcagatttgaaaagcaa

SEQ ID NO: 198868 - DNA, 1377 bp, Homo sapiens
  Payload ID: 19231
  Gene Name: vanin 3
  Uniprot ID: Q9NY84
  ENST ID: ENST00000519686
  CDS Start-End: 1-354
atgattatatcacattttccaaaatgtgtggcagtttttgccctccttgctctgagtgttggtgcactggacacttttattgctgcagtatatgagcatgcggtgatattaccaaacagaacagaaacacctgtttcaaaagaagaagctttgctcctgatgaacaagaacatagatgttttggagaaagcagttaagctggcagcgaagcagggtgcacatatcattgtgaccccagaagatggaatctatggttggatcttcaccagggagagcatttacccctatctagaggatataccagaccctggagtgaactggattccatgtagagacccctggagaaatcactaaaatatagtaagtttgaggaaatgtctattgaattagattcggcaacacaccagtgcaacaaagactcagctgcctggccaaggacaactctatctatgtcgtggctaatattggggacaagaagccatgcaatgccagtgactctcagtgtccccctgatggccgttaccaatacaacactgatgtggtgtttgattctcagggaaaactgttggcacgctaccataagcatggtacaacacgctgcccctcctctcggctgttcccttccattcagcatgggccaaggccatgggagtcaatctacttgctgcaaatacccacaacaccagcatgcacatgacagggagtggaatctacgccccagaagcagtcaaggtgtaccactatgacatggaaacagagagtggtcagctgttgctatcagaactgaagtctcggccccgccgtgagcccacctaccctgcagctgttgactggcatgcgtatgccagcagtgtcaagccattttcctctgaacagtcagattttctggggatgatttattttgatgagtttaccttcaccaagcttaagagaaatacaggaaattacacagcttgccagaaagatctgtgttgtcacttaacttacaagatgtctgagaagcgaacagacgagatctatgccctaggtgcttttgatggactgcacacagtagaaggccaatattacttacagatatgtgcattactgaagtgtcaaaccactgacctggaaacgtgtggagaacctgtggggtcagcttttaccaagtttgaagacttctccctcagtggcacatttggaacgcgttatgttttcccacagatcattctaagtgggagtcagcttgcccctgaaagacattatgagatttcaagagatggacgcttgaggagccgaagtggagcccctttgcctgtcttagttatggccctgtatggaagagtgtttgagaaggaccctccacgcttagggcagggatctgggaaattccagtga

SEQ ID NO: 198869 - DNA, 1761 bp, Homo sapiens
  Payload ID: 19231
  Gene Name: vanin 3
  Uniprot ID: Q9NY84
  ENST ID: ENST00000425515
  CDS Start-End: 74-427
aatgtaaagtttttccagtgaaacaaaacgtaagaatctgagtttgtttttcaaagatcactaaattttagttatgattatatcacattttccaaaatgtgtggcagtttttgccctccttgctctgagtgttggtgcactggacacttttattgctgcagtatatgagcatgcggtgatattaccaaacagaacagaaacacctgtttcaaaagaagaagctttgctcctgatgaacaagaacatagatgttttggagaaagcagttaagctggcagcgaagcagggtgcacatatcattgtgaccccagaagatggaatctatggttggatcttcaccagggagagcatttacccctatctagaggatataccagaccctggagtgaactggattccatgtagagacccctggagaaatcactaaaatatagtaagtttgaggaaatgtctattgaattagattcggcaacacaccagtgcaacaaagactcagctgcctggccaaggacaactctatctatgtcgtggctaatattggggacaagaagccatgcaatgccagtgactctcagtgtccccctgatggccgttaccaatacaacactgatgtggtgtttgattctcagggaaaactgttggcacgctaccataagtacaatctttttgcacctgaaattcagtttgatttccccaaggattcagaacttgtgacttttgacactccctttgggaagtttggcatttttacttgctttgacattttttctcatgacccagctgtggtggtggtggatgagtttcaattgacagcattctctaccccacagcatggtacaacacgctgcccctcctctcggctgttcccttccattcagcatgggccaaggccatgggagtcaatctacttgctgcaaatacccacaacaccagcatgcacatgacagggagtggaatctacgccccagaagcagtcaaggtgtaccactatgacatggaaacagagagtggtcagctgttgctatcagaactgaagtctcggccccgccgtgagcccacctaccctgcagctgttgactggcatgcgtatgccagcagtgtcaagccattttcctctgaacagtcagattttctggggatgatttattttgatgagtttaccttcaccaagcttaagagaaatacaggaaattacacagcttgccagaaagatctgtgttgtcacttaacttacaagatgtctgagaagcgaacagacgagatctatgccctaggtgcttttgatggactgcacacagtagaaggccaatattacttacagatatgtgcattactgaagtgtcaaaccactgacctggaaacgtgtggagaacctgtggggtcagcttttaccaagtttgaagacttctccctcagtggcacatttggaacgcgttatgttttcccacagatcattctaagtgggagtcagcttgcccctgaaagacattatgagatttcaagagatggacgcttgaggagccgaagtggagcccctttgcctgtcttagttatggccctgtatggaagagtgtttgagaaggaccctccacgcttagggcagggatctgggaaattccagtgatctcctttagcagagcccttttaggattagcctggctaagaaaggaagaaaaaaaagagatccgttagtgtctgtttagaaaagatgttataaacttacagaaacaaatataataaactgaagcagatttgaaaagc

SEQ ID NO: 198870 - DNA, 492 bp, Homo sapiens
  Payload ID: 19231
  Gene Name: vanin 3
  ENST ID: ENST00000544102
  CDS Start-End: 1-181
caccagggagagcatttacccctatctagaggatataccagaccctggagtgaactggattccatgtagagacccctggaggaagagtaaaaagatgaatgagcctgtttccaaagagctttgctatcactgtcattcagaatgcaatcaatatggccaatggaaattgtataggacttgaaaaaggaagccctacttctgggaccacattttacgaccacctagctgagtgataaatcactaaaatatagtaagtttgaggaaatgtctattgaattagattcggcaacacaccagtgcaacaaagactcagctgcctggccaaggacaactctatctatgtcgtggctaatattggggacaagaagccatgcaatgccagtgactctcagtgtccccctgatggccgttaccaatacaacactgatgtggtgtttgattctcagggaaaactgttggcacgctaccataagtacaatctttttgcacctg

SEQ ID NO: 198871 - DNA, 596 bp, Homo sapiens
  Payload ID: 19231
  Gene Name: vanin 3
  ENST ID: ENST00000450865
  CDS Start-End: 74-583
aatgtaaagtttttccagtgaaacaaaacgtaagaatctgagtttgtttttcaaagatcactaaattttagttatgattatatcacattttccaaaatgtgtggcagtttttgccctccttgctctgagtgttggtgcactggacacttttattgctgcagtatatgagcatgcggtgatattaccaaacagaacagaaacacctgtttcaaaagaagaagctttgctcctgatgaacaagaacatagatgttttggagaaagcagttaagctggcagcgaagcagcagggtgcacatatcattgtgaccccagaagatggaatctatggttggatcttcaccagggagagcatttacccctatctagaggatataccagaccctggagtgaactggattccatgtagagacccctggagcatggtacaacacgctgcccctcctctcggctgttcccttccattcagcatgggccaaggccatgggagtcaatctacttgctgcaaatacccacaacaccagcatgcacatgacagggagtggaatctacgccccagaagcagtcaaggtgtaccactatgacatggaaacagag

SEQ ID NO: 198872 - DNA, 1685 bp, Homo sapiens
  Payload ID: 19231
  Gene Name: vanin 3
  ENST ID: ENST00000207771
  CDS Start-End: 46-1548
cgtaagaatctgagtttgtttttcaaagatcactaaattttagttatgattatatcacattttccaaaatgtgtggcagtttttgccctccttgctctgagtgttggtgcactggacacttttattgctgcagtatatgagcatgcggtgatattaccaaacagaacagaaacacctgtttcaaaagaagaagctttgctcctgatgaacaagaacatagatgttttggagaaagcagttaagctggcagcgaagcagggtgcacatatcattgtgaccccagaagatggaatctatggttggatcttcaccagggagagcatttacccctatctagaggatataccagaccctggagtgaactggattccatgtagagacccctggagattcggcaacacaccagtgcaacaaagactcagctgcctggccaaggacaactctatctatgtcgtggctaatattggggacaagaagccatgcaatgccagtgactctcagtgtccccctgatggccgttaccaatacaacactgatgtggtgtttgattctcagggaaaactgttggcacgctaccataagtacaatctttttgcacctgaaattcagtttgatttccccaaggattcagaacttgtgacttttgacactccctttgggaagtttggcatttttacttgctttgacattttttctcatgacccagctgtggtggtggtggatgagtcaattgacagcattctctaccccacagcatggtacaacacgctgcccctcctctcggctgttcccttccattcagcatgggccaaggccatgggagtcaatctacttgctgcaaatacccacaacaccagcatgcacatgacagggagtggaatctacgccccagaagcagtcaaggtgtaccactatgacatggaaacagagagtggtcagctgttgctatcagaactgaagtctcggccccgccgtgagcccacctaccctgcagctgttgactggcatgcgtatgccagcagtgtcaagccattttcctctgaacagtcagattttctggggatgatttattttgatgagtttaccttcaccaagcttaagagaaatacaggaaattacacagcttgccagaaagatctgtgttgtcacttaacttacaagatgtctgagaagcgaacagacgagatctatgccctaggtgcttttgatggactgcacacagtagaaggccaatattacttacagatatgtgcattactgaagtgtcaaaccactgacctggaaacgtgtggagaacctgtggggtcagcttttaccaagtttgaagacttctccctcagtggcacatttggaacgcgttatgttttcccacagatcattctaagtgggagtcagcttgcccctgaaagacattatgagatttcaagagatggacgcttgaggagccgaagtggagcccctttgcctgtcttagttatggccctgtatggaagagtgtttgagaaggaccctccacgcttagggcagggatctgggaaattccagtgatctcctttagcagagcccttttaggattagcctggctaagaaaggaagaaaaaaaagagatccgttagtgtctgtttagaaaagatgttataaacttacagaaacaaatataataaactgaagcagatttgaaaagc

SEQ ID NO: 198873 - DNA, 1603 bp, Homo sapiens
  Payload ID: 19231
  Gene Name: vanin 3
  Uniprot ID: Q9NY84
  ENST ID: ENST00000392393
  CDS Start-End: 74-517
aatgtaaagtttttccagtgaaacaaaacgtaagaatctgagtttgtttttcaaagatcactaaattttagttatgattatatcacattttccaaaatgtgtggcagtttttgccctccttgctctgagtgttggtgcactggacacttttattgctgcagtatatgagcatgcggtgatattaccaaacagaacagaaacacctgtttcaaaagaagaagctttgctcctgatgaacaagaacatagatgttttggagaaagcagttaagctggcagcgaagcagggtgcacatatcattgtgaccccagaagatggaatctatggttggatcttcaccagggagagcatttacccctatctagaggatataccagaccctggagtgaactggattccatgtagagacccctggaggaagagtaaaaagatgaatgagcctgtttccaaagagctttgctatcactgtcattcagaatgcaatcaatatggccaatggaaattgtataggacttgaaaaaggaagccctacttctgggaccacattttacgaccacctagctgagtgataaatcactaaaatatagtaagtttgaggaaatgtctattgaattagattcggcaacacaccagtgcaacaaagactcagctgcctggccaaggacaactctatctatgtcgtggctaatattggggacaagaagccatgcaatgccagtgactctcagtgtccccctgatggccgttaccaatacaacactgatgtggtgtttgattctcagggaaaactgttggcacgctaccataagcatggtacaacacgctgcccctcctctcggctgttcccttccattcagcatgggccaaggccatgggagtcaatctacttgctgcaaatacccacaacaccagcatgcacatgacagggagtggaatctacgccccagaagcagtcaaggtgtaccactatgacatggaaacagagagtggtcagctgttgctatcagaactgaagtctcggccccgccgtgagcccacctaccctgcagctgttgactggcatgcgtatgccagcagtgtcaagccattttcctctgaacagtcagattttctggggatgatttattttgatgagtttaccttcaccaagcttaagagaaatacaggaaattacacagcttgccagaaagatctgtgttgtcacttaacttacaagatgtctgagaagcgaacagacgagatctatgccctaggtgcttttgatggactgcacacagtagaaggccaatattacttacagatatgtgcattactgaagtgtcaaaccactgacctggaaacgtgtggagaacctgtggggtcagcttttaccaagtttgaagacttctccctcagtggcacatttggaacgcgttatgttttcccacagatcattctaagtgggagtcagcttgcccctgaaagacattatgagatttcaagagatggacgcttgaggagccgaagtggagcccctttgcctgtcttagttatggccctgtatggaagagtgtttgagaaggaccctccacgcttagggcagggatctgggaaattccagtga

SEQ ID NO: 198874 - DNA, 1260 bp, Homo sapiens
  Payload ID: 19231
  Gene Name: vanin 3
  Uniprot ID: Q9NY84
  ENST ID: ENST00000275223
  CDS Start-End: 1-354
atgattatatcacattttccaaaatgtgtggcagtttttgccctccttgctctgagtgttggtgcactggacacttttattgctgcagtatatgagcatgcggtgatattaccaaacagaacagaaacacctgtttcaaaagaagaagctttgctcctgatgaacaagaacatagatgttttggagaaagcagttaagctggcagcgaagcagggtgcacatatcattgtgaccccagaagatggaatctatggttggatcttcaccagggagagcatttacccctatctagaggatataccagaccctggagtgaactggattccatgtagagacccctggagaaatcactaaaatatagtaagtttgaggaaatgtctattgaattagattcggcaacacaccagtgcaacaaagactcagctgcctggccaaggacaactctatctatgtcgtggctaatattggggacaagaagccatgcaatgccagtgactctcagtgtccccctgatggccgttaccaatacaacactgatgtggtgtttgattctcagggaaaactgttggcacgctaccataagggagtggaatctacgccccagaagcagtcaaggtgtaccactatgacatggaaacagagagtggtcagctgttgctatcagaactgaagtctcggccccgccgtgagcccacctaccctgcagctgttgactggcatgcgtatgccagcagtgtcaagccattttcctctgaacagtcagattttctggggatgatttattttgatgagtttaccttcaccaagcttaagagaaatacaggaaattacacagcttgccagaaagatctgtgttgtcacttaacttacaagatgtctgagaagcgaacagacgagatctatgccctaggtgcttttgatggactgcacacagtagaaggccaatattacttacagatatgtgcattactgaagtgtcaaaccactgacctggaaacgtgtggagaacctgtggggtcagcttttaccaagtttgaagacttctccctcagtggcacatttggaacgcgttatgttttcccacagatcattctaagtgggagtcagcttgcccctgaaagacattatgagatttcaagagatggacgcttgaggagccgaagtggagcccctttgcctgtcttagttatggccctgtatggaagagtgtttgagaaggaccctccacgcttagggcagggatctgggaaattccagtga

SEQ ID NO: 198875 - DNA, 1021 bp, Homo sapiens
  Payload ID: 19231
  Gene Name: vanin 3
  Uniprot ID: Q9NY84
  ENST ID: ENST00000423615
  CDS Start-End: 1-390
atgattatatcacattttccaaaatgtgtggcagtttttgccctccttgctctgagtgttggtgcactggacacttttattgctgcagtatatgagcatgcggtgatattaccaaacagaacagaaacacctgtttcaaaagaagaagctttgctcctgatgaacaagaacatagatgttttggagaaagcagttaagctggcagcgaagcagggtgcacatatcattgtgaccccagaagatggaatctatggttggatcttcaccagggagagcatttacccctatctagaggatataccagaccctggagtgaactggattccatgtagagacccctggagggagtggaatctacgccccagaagcagtcaaggtgtaccactatgacatggaaacagagagtggtcagctgttgctatcagaactgaagtctcggccccgccgtgagcccacctaccctgcagctgttgactggcatgcgtatgccagcagtgtcaagccattttcctctgaacagtcagattttctggggatgatttattttgatgagtttaccttcaccaagcttaagagaaatacaggaaattacacagcttgccagaaagatctgtgttgtcacttaacttacaagatgtctgagaagcgaacagacgagatctatgccctaggtgcttttgatggactgcacacagtagaaggccaatattacttacagatatgtgcattactgaagtgtcaaaccactgacctggaaacgtgtggagaacctgtggggtcagcttttaccaagtttgaagacttctccctcagtggcacatttggaacgcgttatgttttcccacagatcattctaagtgggagtcagcttgcccctgaaagacattatgagatttcaagagatggacgcttgaggagccgaagtggagcccctttgcctgtcttagttatggccctgtatggaagagtgtttgagaaggaccctccacgcttagggcagggatctgggaaattccagtga

SEQ ID NO: 198876 - DNA, 1214 bp, Homo sapiens
  Payload ID: 19231
  Gene Name: vanin 3
  Uniprot ID: Q9NY84
  ENST ID: ENST00000427187
  CDS Start-End: 1-624
atgattatatcacattttccaaaatgtgtggcagtttttgccctccttgctctgagtgttggtgcactggacacttttattgctgcagtatatgagcatgcggtgatattaccaaacagaacagaaacacctgtttcaaaagaagaagctttgctcctgatgaacaagaacatagatgttttggagaaagcagttaagctggcagcgaagcagggtgcacatatcattgtgaccccagaagatggaatctatggttggatcttcaccagggagagcatttacccctatctagaggatataccagaccctggagtgaactggattccatgtagagacccctggagattcggcaacacaccagtgcaacaaagactcagctgcctggccaaggacaactctatctatgtcgtggctaatattggggacaagaagccatgcaatgccagtgactctcagtgtccccctgatggccgttaccaatacaacactgatgtggtgtttgattctcagggaaaactgttggcacgctaccataagggagtggaatctacgccccagaagcagtcaaggtgtaccactatgacatggaaacagagagtggtcagctgttgctatcagaactgaagtctcggccccgccgtgagcccacctaccctgcagctgttgactggcatgcgtatgccagcagtgtcaagccattttcctctgaacagtcagattttctggggatgatttattttgatgagtttaccttcaccaagcttaagagaaatacaggaaattacacagcttgccagaaagatctgtgttgtcacttaacttacaagatgtctgagaagcgaacagacgagatctatgccctaggtgcttttgatggactgcacacagtagaaggccaatattacttacagatatgtgcattactgaagtgtcaaaccactgacctggaaacgtgtggagaacctgtggggtcagcttttaccaagtttgaagacttctccctcagtggcacatttggaacgcgttatgttttcccacagatcattctaagtgggagtcagcttgcccctgaaagacattatgagatttcaagagatggacgcttgaggagccgaagtggagcccctttgcctgtcttagttatggccctgtatggaagagtgtttgagaaggaccctccacgcttagggcagggatctgggaaattccagtga

SEQ ID NO: 198877 - DNA, 1312 bp, Homo sapiens
  Payload ID: 19231
  Gene Name: vanin 3
  Uniprot ID: Q9NY84
  ENST ID: ENST00000414302
  CDS Start-End: 1-402
atgattatatcacattttccaaaatgtgtggcagtttttgccctccttgctctgagtgttggtgcactggacacttttattgctgcagtatatgagcatgcggtgatattaccaaacagaacagaaacacctgtttcaaaagaagaagctttgctcctgatgaacaagaacatagatgttttggagaaagcagttaagctggcagcgaagcagggtgcacatatcattgtgaccccagaagatggaatctatggttggatcttcaccagggagagcatttacccctatctagaggatataccagaccctggagtgaactggattccatgtagagacccctggagtacaatctttttgcacctgaaattcagtttgatttccccaaggattcagaacttgtgacttttgacactccctttgggaagtttggcatttttacttgctttgacattttttctcatgacccagctgtggtggtggtggatgagtttcaattgacagcattctctaccccacagcatggtacaacacgctgcccctcctctcggctgttcccttccattcagcatgggccaaggccatgggagtcaatctacttgctgcaaatacccacaacaccagcatgcacatgacagggagtggaatctacgccccagaagcagtcaaggtgtaccactatgacatggaaacagagagtggtcagctgttgctatcagaactgaagtctcggccccgccgtgagcccacctaccctgcagctgttgactggcatgcgtatgccagcagtgtcaagccattttcctctgaacagtcagattttctggggatgatttattttgatgagtttaccttcaccaagcttaagagaaatacaggaaattacacagcttgccagaaagatctgtgttgtcacttaacttacaagatgtctgagaagcgaacagacgagatctatgccctaggtgcttttgatggactgcacacagtagaaggccaatattacttacagatatgtgcattactgaagtgtcaaaccactgacctggaaacgtgtggagaacctgtggggtcagcttttaccaagtttgaagacttctccctcagtggcacatttggaacgcgttatgttttcccacagatcattctaagtgggagtcagcttgcccctgaaagacattatgagatttcaagagatggacgcttgaggagccgaagtggagcccctttgcctgtcttagttatggccctgtatggaagagtgtttgagaaggaccctccacgcttagggcagggatctgggaaattccagtga

SEQ ID NO: 198878 - DNA, 1117 bp, Homo sapiens
  Payload ID: 19231
  Gene Name: vanin 3
  Uniprot ID: Q9NY84
  ENST ID: ENST00000417437
  CDS Start-End: 1-486
atgattatatcacattttccaaaatgtgtggcagtttttgccctccttgctctgagtgttggtgcactggacacttttattgctgcagtatatgagcatgcggtgatattaccaaacagaacagaaacacctgtttcaaaagaagaagctttgctcctgatgaacaagaacatagatgttttggagaaagcagttaagctggcagcgaagcaggtattacccttttatacttgtaaaggagacttgcagtttggtcaaagagtatttggaattcatgacaaacttttttgccccacttgtttcgagcagggtgcacatatcattgtgaccccagaagatggaatctatggttggatcttcaccagggagagcatttacccctatctagaggatataccagaccctggagtgaactggattccatgtagagacccctggagggagtggaatctacgccccagaagcagtcaaggtgtaccactatgacatggaaacagagagtggtcagctgttgctatcagaactgaagtctcggccccgccgtgagcccacctaccctgcagctgttgactggcatgcgtatgccagcagtgtcaagccattttcctctgaacagtcagattttctggggatgatttattttgatgagtttaccttcaccaagcttaagagaaatacaggaaattacacagcttgccagaaagatctgtgttgtcacttaacttacaagatgtctgagaagcgaacagacgagatctatgccctaggtgcttttgatggactgcacacagtagaaggccaatattacttacagatatgtgcattactgaagtgtcaaaccactgacctggaaacgtgtggagaacctgtggggtcagcttttaccaagtttgaagacttctccctcagtggcacatttggaacgcgttatgttttcccacagatcattctaagtgggagtcagcttgcccctgaaagacattatgagatttcaagagatggacgcttgaggagccgaagtggagcccctttgcctgtcttagttatggccctgtatggaagagtgtttgagaaggaccctccacgcttagggcagggatctgggaaattccagtga

SEQ ID NO: 198879 - DNA, 1700 bp, Homo sapiens
  Payload ID: 19231
  Gene Name: vanin 3
  Uniprot ID: Q9NY84
  ENST ID: ENST00000509351
  CDS Start-End: 1-390
atgattatatcacattttccaaaatgtgtggcagtttttgccctccttgctctgagtgttggtgcactggacacttttattgctgcagtatatgagcatgcggtgatattaccaaacagaacagaaacacctgtttcaaaagaagaagctttgctcctgatgaacaagaacatagatgttttggagaaagcagttaagctggcagcgaagcagggtgcacatatcattgtgaccccagaagatggaatctatggttggatcttcaccagggagagcatttacccctatctagaggatataccagaccctggagtgaactggattccatgtagagacccctggagggagtggaatctacgccccagaagcagtcaaggtgtaccactatgacatggaaacagagagtggtcagctgttgctatcagaactgaagtctcggccccgccgtgagcccacctaccctgcagctgttgactggcatgcgtatgccagcagtgtcaagccattttcctctgaacagtcagattttctggggatgatttattttgatgagtttaccttcaccaagcttaagagaaatacaggaaattacacagcttgccagaaagatctgtgttgtcacttaacttacaagatgtctgagaagcgaacagacgagatctatgccctaggtgcttttgatggactgcacacagtagaaggccaatattacttacagatatgtgcattactgaagtgtcaaaccactgacctggaaacgtgtggagaacctgtggggtcagcttttaccaagtttgaagacttctccctcagtggcacatttggaacgcgttatgttttcccacagatcattctaagtgggagtcagcttgcccctgaaagacattatgaggtaggaggtgtgcaggatgataaattcctttgagcagagtagatgggtagagcagcataatgaaaatctttgaaataatgagagtatagcaatatcgtggttcacattctacaagaaacaccttaaatatgtggaaactatgatatggaatataaattgtggttttagattgccattaggctgtgatggagaatttggggttcatttttttaacataaatgtgatgttgatattcaaggcaacaggaaattcacagagaagctaaaataaaaatgttgactgctgataatggcaataatgttgtcatttgcatggtgtagaaggtgcaaattaaatacattaaataatgcatctacaacttattttctgggtatactattttgagaagttgttataattatagtaataactaatattttgtatagtgtttcatgagtttgaagaacatatttttatacatattatttgaccacctgtgcaacaaatttgttggctgcactttcgcacaaagtccctctactttcagacttgaaacatgaacctgggtcttccaacaccaaatcctgtgtgatttttaccattctacactgctttaggagggagtgatcttgcctgagaagggctctaggttgtaacctaaactctgcactgaagttaaccctttgctttctttgaccagatttcaagagatggacgcttgaggagccgaagtggagcccctttgcctgtcttagttatggccctgtatggaagagtgtttgagaaggaccctccacgcttagggcagggatctgggaaattccagtga

SEQ ID NO: 198880 - DNA, 677 bp, Homo sapiens
  Payload ID: 19232
  Gene Name: variable charge, X-linked
  ENST ID: ENST00000341408
  CDS Start-End: 117-677
accaatcacagctcaggggcgtgattgtctcgtcctgggatcgcgagaggggtatatacagggaggccaggcagcctggagttagccgaccgttgcgagacgttgagctgcggaagatgagtccaaagccgagagcctcgggacctccggccaaggccacggaggcaggaaagaggaagtcctcctctcagccgagccccagtgacccgaagaagaagactaccaaggtggccaagaagggaaaagcagttcgtagagggagacgcgggaagaaaggggctgcgacaaagatggcggccgtgacggcacctgaggcggagagcgcgccagcggcacccggccccagcgaccagcccagccaggagctccctcagcacgagctgccgccggaggagccagtgagcgaggggacccagcacgaccccctgagtcaggaggccgagctggaggaaccactgagtcaggagagcgaggtggaagaaccactgagtcaggagagccaggtggaggaaccactgagtcaggagagcgaggtggaggaaccactgagtcaggagagccaggtggaggaaccactgagtcaggagagcgagatggaagaaccactgagtcaggagagccaggtggaggaaccaccgagtcaggagagcgagatggaagaactaccgagtgtgtag

SEQ ID NO: 198881 - DNA, 967 bp, Homo sapiens
  Payload ID: 19232
  Gene Name: variable charge, X-linked
  Uniprot ID: Q9H320
  ENST ID: ENST00000381059
  CDS Start-End: 220-840
atgtggacactgggagaaggaagtgagatggaaaagttctttgattgcatccaagaagtgaatggtcctcaagggcgaccattggctgggtagtggagtgttgaccaatcacagctcaggggcgtgattgtctcgtcctgggatcgcgagaggggtatatacagggaggccaggcagcctggagttagccgaccgttgcgagacgttgagctgcggaagatgagtccaaagccgagagcctcgggacctccggccaaggccacggaggcaggaaagaggaagtcctcctctcagccgagccccagtgacccgaagaagaagactaccaaggtggccaagaagggaaaagcagttcgtagagggagacgcgggaagaaaggggctgcgacaaagatggcggccgtgacggcacctgaggcggagagcgcgccagcggcacccggccccagcgaccagcccagccaggagctccctcagcacgagctgccgccggaggagccagtgagcgaggggacccagcacgaccccctgagtcaggaggccgagctggaggaaccactgagtcaggagagcgaggtggaagaaccactgagtcaggagagccaggtggaggaaccactgagtcaggagagcgaggtggaagaaccactgagtcaggagagccaggtggaggaaccactgagtcaggagagcgaggtggaggaaccactgagtcaggagagccaggtggaggaaccactgagtcaggagagcgagatggaagaaccactgagtcaggagagccaggtggaggaaccaccgagtcaggagagcgagatggaagaactaccgagtgtgtagacggccaagtactcccctatctccgagagcagcgactaagttcaggcccagccgccagacctcagagatctcaccagcggggtgcttgccattctgaagataataaaatgaatgtgttgcaaattga

SEQ ID NO: 198882 - DNA, 812 bp, Homo sapiens
  Payload ID: 19232
  Gene Name: variable charge, X-linked
  ENST ID: ENST00000620630
  CDS Start-End: 308-724
atgtggacactgggagaaggaagtgagatggaaaagttctttgattgcatccaagaagtgaatggtcctcaaggtgcagcagaggaatttgtaggagagagggatgattgacgtcttcatatagccctccgtctatcccagttagcatggagggattttagggcgaccattggctgggtagtggagtgttgaccaatcacagctcaggggcgtgattgtctcgtcctgggatcgcgagaggggtatatacagggaggccaggcagcctggagttagccgaccgttgcgagacgttgagctgcggaagatgagtccaaagccgagagcctcgggacctccggccaaggccacggaggcaggaaagaggaagtcctcctctcagccgagccccagtgacccgaagaagaagactaccaaggtggccaagaagggaaaagcagttcgtagagggagacgcgggaagaaaggggctgcgacaaagatggcggccgtgacggcacctgaggcggagagcgcgccagcggcacccggccccagcgaccagcccagccaggagctccctcagcacgagctgccgccggaggagccagtgagcgaggggacccagcacgaccccctgagtcaggaggccgagctggaggaaccactgagtcaggagagcgaggtggaagaaccactgagtgtgacggccaagtactcccctatctccgagagcagcgactaagttcaggcccagccgccagacctcagagatctcaccagcggggtgcttgccattctgaagataataaaatgaatgtgttgcaaattga

SEQ ID NO: 198883 - DNA, 815 bp, Homo sapiens
  Payload ID: 19233
  Gene Name: variable charge, X-linked 2
  Uniprot ID: Q9H322
  ENST ID: ENST00000317103
  CDS Start-End: 308-727
atgtggatgctgggagaagtatgtgagatggaaaagttgtttcatggcatccaagaagtgaatgatcctcaaggtgtagcagaggaatttgtaggagagagggatgattgacgtcttcgtatagccctccatccatcccagttagcatggagggattttagggctaccattggctgggtagtggagtgttgaccaatcacagctcaggggcgtgattgtctcgtcctgggatcgcgagaggggtatatacagggaggccaggcagcctggagttagtcgaccgttgcgagacgttgagctgcggaagatgagtccaaagccgagagcctcgggacctccggccaaggccacggaggcaggaaagaggaagtcctcctctcagccgagccccagtgacccgaagaagaagactaccaaggtggccaagaagggaaaagcagttcgtagagggagacgcgggaagaaaggggctgcgacaaagatggcggccgtgacggcacctgaggcggagagcgcgccagcggcacccggccccagcgaccagcccagccaggagctccctcagcacgagctgccgccggaggagccagtgagcgaggggacccagcacgaccccctgagtcaggagagcgaggtggaagaaccactgagtcaggagagcgaggtggaagaaccactgactgtgtggatggccagcttttcccctgtctccgagagcaccgactaagttcaggcccagccgccagacctcagagatctcaccagcggggtgcttgccattctgaagataataaaatgaatgtgttgcaaattga

SEQ ID NO: 198884 - DNA, 995 bp, Homo sapiens
  Payload ID: 19234
  Gene Name: variable charge, X-linked 3A
  Uniprot ID: Q9NNX9
  ENST ID: ENST00000381089
  CDS Start-End: 308-868
atgtggatgctgggagaagtatgtgagatggaaaagttgtttcatggcatccaagaagtgaatgatcctcaaggtgtagcagaggaatctgtaggagagagggatgattgacgtcttcgtatagccctccatccatcccagttagcatggagggattttagggctaccattggctgggtagtggagtgttgaccaatcacagctcaggggcgtgattgtctcgtcctgggatcgcgagaggggtatatacagggaggccaggcagcctggagttagtcgaccgttgcgagacgttgagctgcggaagatgagtccaaagccgagagcctcgggacctccggccaaggccacggaggcaggaaagaggaagtcctcctctcagccgagccccagtgacccgaagaagaagactaccaaggtggccaagaagggaaaagcagttcgtagagggagacgcgggaagaaaggggctgcgacaaagatggcggccgtgacggcacctgaggcggagagcgggccagcggcacccggccccagcgaccagcccagccaggagctccctcagcacgagctgccgccggaggagccagtgagcgaggggacccagcacgaccccctgagtcaggagagcgagctggaggaaccactgagtcaggagagcgaggtggaagaaccactgagtcaggagagccaggtggaggaaccactgagtcaggagagcgaggtggaagaaccactgagtcaggagagccaggtggaggaaccactgagtcaggagagcgaggtggaggaaccactgagtcaggagagccaggtggaggaaccactgagtcaggagagcgagatggaagaactaccgagtgtgtagacggccagctactcccctatctccgagagcagcgactaagttcaggcccagccgccagacctcagagatctcaccagcggggtgcttgccattctgaagataataaaatgaatgtgttgcaaattga

SEQ ID NO: 198885 - DNA, 808 bp, Homo sapiens
  Payload ID: 19234
  Gene Name: variable charge, X-linked 3A
  ENST ID: ENST00000398729
  CDS Start-End: 308-808
atgtggatgctgggagaagtatgtgagatggaaaagttgtttcatggcatccaagaagtgaatgatcctcaaggtgtagcagaggaatctgtaggagagagggatgattgacgtcttcgtatagccctccatccatcccagttagcatggagggattttagggctaccattggctgggtagtggagtgttgaccaatcacagctcaggggcgtgattgtctcgtcctgggatcgcgagaggggtatatacagggaggccaggcagcctggagttagtcgaccgttgcgagacgttgagctgcggaagatgagtccaaagccgagagcctcgggacctccggccaaggccacggaggcaggaaagaggaagtcctcctctcagccgagccccagtgacccgaagaagaagactaccaaggtggccaagaagggaaaagcagttcgtagagggagacgcgggaagaaaggggctgcgacaaagatggcggccgtgacggcacctgaggcggagagcgggccagcggcacccggccccagcgaccagcccagccaggagctccctcagcacgagctgccgccggaggagccagtgagcgaggggacccagcacgaccccctgagtcaggagagcgagctggaggaaccactgagtcaggagagcgaggtggaagaaccactgagtcaggagagccaggtggaggaaccactgagtcaggagagcgaggtggaggaaccactgagtcaggagagccaggtggaggaaccactgagtcaggagagcgagatggaagaactaccgagtgtgtag

SEQ ID NO: 198886 - DNA, 812 bp, Homo sapiens
  Payload ID: 19234
  Gene Name: variable charge, X-linked 3A
  ENST ID: ENST00000612369
  CDS Start-End: 308-724
atgtggatgctgggagaagtatgtgagatggaaaagttgtttcatggcatccaagaagtgaatgatcctcaaggtgtagcagaggaatctgtaggagagagggatgattgacgtcttcgtatagccctccatccatcccagttagcatggagggattttagggctaccattggctgggtagtggagtgttgaccaatcacagctcaggggcgtgattgtctcgtcctgggatcgcgagaggggtatatacagggaggccaggcagcctggagttagtcgaccgttgcgagacgttgagctgcggaagatgagtccaaagccgagagcctcgggacctccggccaaggccacggaggcaggaaagaggaagtcctcctctcagccgagccccagtgacccgaagaagaagactaccaaggtggccaagaagggaaaagcagttcgtagagggagacgcgggaagaaaggggctgcgacaaagatggcggccgtgacggcacctgaggcggagagcgggccagcggcacccggccccagcgaccagcccagccaggagctccctcagcacgagctgccgccggaggagccagtgagcgaggggacccagcacgaccccctgagtcaggagagcgagctggaggaaccactgagtcaggagagcgaggtggaagaaccactgagtgtgacggccagctactcccctatctccgagagcagcgactaagttcaggcccagccgccagacctcagagatctcaccagcggggtgcttgccattctgaagataataaaatgaatgtgttgcaaattga

SEQ ID NO: 198887 - DNA, 756 bp, Homo sapiens
  Payload ID: 19235
  Gene Name: variable charge, X-linked 3B
  ENST ID: ENST00000381029
  CDS Start-End: 26-670
gttgcgagacgttgagctgcggaagatgagtccaaagccgagagcctcgggacctccggccaaggccaaggaggcaggaaagaggaagtcctcctctcagccgagccccagtgacccgaagaagaagactaccaaggtggccaagaagggaaaagcagttcgtagagggagacgcgggaagaaaggggctgcgacaaagatggcggccgtgacggcacctgaggcggagagcgggccagcggcacccggccccagcgaccagcccagccaggagctccctcagcacgagctgccgccggaggagccagtgagcgaggtggaagaaccactgagtcaggagagccaggtggaggaaccactgagtcaggagagcgaggtggaagaaccactgagtcaggagagccaggtggaggaaccactgagtcaggagagcgaggtggaagaaccactgagtcaggagagccaggtggaggaaccactgagtcaggagagcgaggtggaagaaccactgagtcaggagagccaggtggaggaaccactgagtcaggagagcgagatggaagaaccactgagtcaggagagccaggtggaggaaccactgagtcaggagagcgagatggaagaaccactgagtcaggagagcgagatggaagaactaccgagtgtgtagacggccaagtactcccctatctccgagagcagcgactaagttcaggcccagccgccagacctcagagatctcaccagcggggtgct

SEQ ID NO: 198888 - DNA, 1171 bp, Homo sapiens
  Payload ID: 19235
  Gene Name: variable charge, X-linked 3B
  Uniprot ID: Q9H321
  ENST ID: ENST00000381032
  CDS Start-End: 308-1048
atgtggatgctgggagaagtatgtgagatggaaaagttgtttcatggcatccaagaagtgaatgatcctcaaggtgtagcagaggaatttgtaggagagagggatgattgacatcttcgtgtagccctccatccatcccagttagcatggagggattttagggctaccattggctgggtagtggagtgttgaccaatcacagctcaggggcgtgattgtctcgtcctgggatcgcgagaggtgtatatacagggaggccaggcagcctggagttagtcgaccgttgcgagacgttgagctgcggaagatgagtccaaagccgagagcctcgggacctccggccaaggccaaggaggcaggaaagaggaagtcctcctctcagccgagccccagtgacccgaagaagaagactaccaaggtggccaagaagggaaaagcagttcgtagagggagacgcgggaagaaaggggctgcgacaaagatggcggccgtgacggcacctgaggcggagagcgggccagcggcacccggccccagcgaccagcccagccaggagctccctcagcacgagctgccgccggaggagccagtgagcgaggggacccagcacgaccccctgagtcaggagagcgagctggaggaaccactgagtcaggagagcgaggtggaagaaccactgagtcaggagagccaggtggaggaaccactgagtcaggagagcgaggtggaagaaccactgagtcaggagagccaggtggaggaaccactgagtcaggagagcgaggtggaggaaccactgagtcaggagagcgaggtggaagaaccactgagtcaggagagccaggtggaggaaccactgagtcaggagagcgaggtggaagaaccactgagtcaggagagccaggtggaggaaccactgagtcaggagagcgagatggaagaaccactgagtcaggagagccaggtggaggaaccactgagtcaggagagcgagatggaagaaccactgagtcaggagagcgagatggaagaactaccgagtgtgtagacggccaagtactcccctatctccgagagcagcgactaagttcaggcccagccgccagacctcagagatctcaccagcggggtgcttgccattctgatgataataaaatgaatgtgttgcaaa

SEQ ID NO: 198889 - DNA, 868 bp, Homo sapiens
  Payload ID: 19235
  Gene Name: variable charge, X-linked 3B
  ENST ID: ENST00000453306
  CDS Start-End: 308-868
atgtggatgctgggagaagtatgtgagatggaaaagttgtttcatggcatccaagaagtgaatgatcctcaaggtgtagcagaggaatttgtaggagagagggatgattgacatcttcgtgtagccctccatccatcccagttagcatggagggattttagggctaccattggctgggtagtggagtgttgaccaatcacagctcaggggcgtgattgtctcgtcctgggatcgcgagaggtgtatatacagggaggccaggcagcctggagttagtcgaccgttgcgagacgttgagctgcggaagatgagtccaaagccgagagcctcgggacctccggccaaggccaaggaggcaggaaagaggaagtcctcctctcagccgagccccagtgacccgaagaagaagactaccaaggtggccaagaagggaaaagcagttcgtagagggagacgcgggaagaaaggggctgcgacaaagatggcggccgtgacggcacctgaggcggagagcgggccagcggcacccggccccagcgaccagcccagccaggagctccctcagcacgagctgccgccggaggagccagtgagcgaggggacccagcacgaccccctgagtcaggagagcgagctggaggaaccactgagtcaggagagcgaggtggaagaaccactgagtcaggagagccaggtggaggaaccactgagtcaggagagcgaggtggaagaaccactgagtcaggagagccaggtggaggaaccactgagtcaggagagcgaggtggaggaaccactgagtcaggagagcgaggtggaagaaccactgagtcaggagagcgagatggaagaactaccgagtgtgtag

SEQ ID NO: 198890 - DNA, 812 bp, Homo sapiens
  Payload ID: 19235
  Gene Name: variable charge, X-linked 3B
  ENST ID: ENST00000444481
  CDS Start-End: 308-724
atgtggatgctgggagaagtatgtgagatggaaaagttgtttcatggcatccaagaagtgaatgatcctcaaggtgtagcagaggaatttgtaggagagagggatgattgacatcttcgtgtagccctccatccatcccagttagcatggagggattttagggctaccattggctgggtagtggagtgttgaccaatcacagctcaggggcgtgattgtctcgtcctgggatcgcgagaggtgtatatacagggaggccaggcagcctggagttagtcgaccgttgcgagacgttgagctgcggaagatgagtccaaagccgagagcctcgggacctccggccaaggccaaggaggcaggaaagaggaagtcctcctctcagccgagccccagtgacccgaagaagaagactaccaaggtggccaagaagggaaaagcagttcgtagagggagacgcgggaagaaaggggctgcgacaaagatggcggccgtgacggcacctgaggcggagagcgggccagcggcacccggccccagcgaccagcccagccaggagctccctcagcacgagctgccgccggaggagccagtgagcgaggggacccagcacgaccccctgagtcaggagagcgagctggaggaaccactgagtcaggagagcgaggtggaagaaccactgagtgtgacggccaagtactcccctatctccgagagcagcgactaagttcaggcccagccgccagacctcagagatctcaccagcggggtgcttgccattctgatgataataaaatgaatgtgttgcaaattga

SEQ ID NO: 198891 - DNA, 550 bp, Homo sapiens
  Payload ID: 19236
  Gene Name: variable charge, Y-linked
  Uniprot ID: O14598
  ENST ID: ENST00000250825
  CDS Start-End: 74-451
cgagaggggtatacacagggaggccaggcagcctggagttagtcgaccgttgcgagacgttgagctgcggcagatgagtccaaagccgagagcctcgggacctccggccaaggccaaggagacaggaaagaggaagtcctcctctcagccgagccccagtggcccgaagaagaagactaccaaggtggccgagaagggagaagcagttcgtggagggagacgcgggaagaaaggggctgcgacaaagatggcggccgtgacggcacctgaggcggagagcgggccagcggcacccggccccagcgaccagcccagccaggagctccctcagcacgagctgccgccggaggagccagtgagcgaggggacccagcacgaccccctgagtcaggagagcgagctggaggaaccactgagtaaggggcgcccatctactcccctatctccctgagcagcaactaagtttaggcccagctgccagacctcagagatctcaccagcagggtgcttcccatgttgatgacaataaaatgaatgtgttgcaaaccga

SEQ ID NO: 198892 - DNA, 550 bp, Homo sapiens; identical to SEQ ID NO: 198891
  Payload ID: 19237
  Gene Name: variable charge, Y-linked 1B
  Uniprot ID: O14598
  ENST ID: ENST00000250823
  CDS Start-End: 74-451

SEQ ID NO: 198893 - DNA, 3083 bp, Homo sapiens
  Payload ID: 19238
  Gene Name: vascular cell adhesion molecule 1
  Uniprot ID: P19320
  ENST ID: ENST00000294728
  CDS Start-End: 102-2321
ctcactggcttcaggagctgaataccctcccaggcacacacaggtgggacacaaataagggttttggaaccactattttctcatcacgacagcaacttaaaatgcctgggaagatggtcgtgatccttggagcctcaaatatactttggataatgtttgcagcttctcaagcttttaaaatcgagaccaccccagaatctagatatcttgctcagattggtgactccgtctcattgacttgcagcaccacaggctgtgagtccccatttttctcttggagaacccagatagatagtccactgaatgggaaggtgacgaatgaggggaccacatctacgctgacaatgaatcctgttagttttgggaacgaacactcttacctgtgcacagcaacttgtgaatctaggaaattggaaaaaggaatccaggtggagatctactcttttcctaaggatccagagattcatttgagtggccctctggaggctgggaagccgatcacagtcaagtgttcagttgctgatgtatacccatttgacaggctggagatagacttactgaaaggagatcatctcatgaagagtcaggaatttctggaggatgcagacaggaagtccctggaaaccaagagtttggaagtaacctttactcctgtcattgaggatattggaaaagttcttgtttgccgagctaaattacacattgatgaaatggattctgtgcccacagtaaggcaggctgtaaaagaattgcaagtctacatatcacccaagaatacagttatttctgtgaatccatccacaaagctgcaagaaggtggctctgtgaccatgacctgttccagcgagggtctaccagctccagagattttctggagtaagaaattagataatgggaatctacagcacctttctggaaatgcaactctcaccttaattgctatgaggatggaagattctggaatttatgtgtgtgaaggagttaatttgattgggaaaaacagaaaagaggtggaattaattgttcaagagaaaccatttactgttgagatctcccctggaccccggattgctgctcagattggagactcagtcatgttgacatgtagtgtcatgggctgtgaatccccatctttctcctggagaacccagatagacagccctctgagcgggaaggtgaggagtgaggggaccaattccacgctgaccctgagccctgtgagttttgagaacgaacactcttatctgtgcacagtgacttgtggacataagaaactggaaaagggaatccaggtggagctctactcattccctagagatccagaaatcgagatgagtggtggcctcgtgaatgggagctctgtcactgtaagctgcaaggttcctagcgtgtacccccttgaccggctggagattgaattacttaagggggagactattctggagaatatagagtttttggaggatacggatatgaaatctctagagaacaaaagtttggaaatgaccttcatccctaccattgaagatactggaaaagctcttgtttgtcaggctaagttacatattgatgacatggaattcgaacccaaacaaaggcagagtacgcaaacactttatgtcaatgttgcccccagagatacaaccgtcttggtcagcccttcctccatcctggaggaaggcagttctgtgaatatgacatgcttgagccagggctttcctgctccgaaaatcctgtggagcaggcagctccctaacggggagctacagcctctttctgagaatgcaactctcaccttaatttctacaaaaatggaagattctggggtttatttatgtgaaggaattaaccaggctggaagaagcagaaaggaagtggaattaattatccaagttactccaaaagacataaaacttacagcttttccttctgagagtgtcaaagaaggagacactgtcatcatctcttgtacatgtggaaatgttccagaaacatggataatcctgaagaaaaaagcggagacaggagacacagtactaaaatctatagatggcgcctataccatccgaaaggcccagttgaaggatgcgggagtatatgaatgtgaatctaaaaacaaagttggctcacaattaagaagtttaacacttgatgttcaaggaagagaaaacaacaaagactatttttctcctgagcttctcgtgctctattttgcatcctccttaataatacctgccattggaatgataatttactttgcaagaaaagccaacatgaaggggtcatatagtcttgtagaagcacagaagtcaaaagtgtagctaatgcttgatatgttcaactggagacactatttatctgtgcaaatccttgatactgctcatcattccttgagaaaaacaatgagctgagaggcagacttccctgaatgtattgaacttggaaagaaatgcccatctatgtcccttgctgtgagcaagaagtcaaagtaaaacttgctgcctgaagaacagtaactgccatcaagatgagagaactggaggagttccttgatctgtatatacaataacataatttgtacatatgtaaaataaaattatgccatagcaagattgcttaaaatagcaacactctatatttagattgttaaaataactagtgttgcttggactattataatttaatgcatgttaggaaaatttcacattaatatttgctgacagctgacctttgtcatctttcttctattttattccctttcacaaaattttattcctatatagtttattgacaataatttcaggttttgtaaagatgccgggttttatatttttatagacaaataataagcaaagggagcactgggttgactttcaggtactaaatacctcaacctatggtataatggttgactgggtttctctgtatagtactggcatggtacggagatgtttcacgaagtttgttcatcagactcctgtgcaactttcccaatgtggcctaaaaatgcaacttctttttattttcttttgtaaatgtttaggtttttttgtatagtaaagtgataatttctggaattagaa

SEQ ID NO: 198894 - DNA, 2812 bp, Homo sapiens
  Payload ID: 19238
  Gene Name: vascular cell adhesion molecule 1
  Uniprot ID: P19320
  ENST ID: ENST00000347652
  CDS Start-End: 107-2050
cgggcctcactggcttcaggagctgaataccctcccaggcacacacaggtgggacacaaataagggttttggaaccactattttctcatcacgacagcaacttaaaatgcctgggaagatggtcgtgatccttggagcctcaaatatactttggataatgtttgcagcttctcaagcttttaaaatcgagaccaccccagaatctagatatcttgctcagattggtgactccgtctcattgacttgcagcaccacaggctgtgagtccccatttttctcttggagaacccagatagatagtccactgaatgggaaggtgacgaatgaggggaccacatctacgctgacaatgaatcctgttagttttgggaacgaacactcttacctgtgcacagcaacttgtgaatctaggaaattggaaaaaggaatccaggtggagatctactcttttcctaaggatccagagattcatttgagtggccctctggaggctgggaagccgatcacagtcaagtgttcagttgctgatgtatacccatttgacaggctggagatagacttactgaaaggagatcatctcatgaagagtcaggaatttctggaggatgcagacaggaagtccctggaaaccaagagtttggaagtaacctttactcctgtcattgaggatattggaaaagttcttgtttgccgagctaaattacacattgatgaaatggattctgtgcccacagtaaggcaggctgtaaaagaattgcaagtctacatatcacccaagaatacagttatttctgtgaatccatccacaaagctgcaagaaggtggctctgtgaccatgacctgttccagcgagggtctaccagctccagagattttctggagtaagaaattagataatgggaatctacagcacctttctggaaatgcaactctcaccttaattgctatgaggatggaagattctggaatttatgtgtgtgaaggagttaatttgattgggaaaaacagaaaagaggtggaattaattgttcaagcattccctagagatccagaaatcgagatgagtggtggcctcgtgaatgggagctctgtcactgtaagctgcaaggttcctagcgtgtacccccttgaccggctggagattgaattacttaagggggagactattctggagaatatagagtttttggaggatacggatatgaaatctctagagaacaaaagtttggaaatgaccttcatccctaccattgaagatactggaaaagctcttgtttgtcaggctaagttacatattgatgacatggaattcgaacccaaacaaaggcagagtacgcaaacactttatgtcaatgttgcccccagagatacaaccgtcttggtcagcccttcctccatcctggaggaaggcagttctgtgaatatgacatgcttgagccagggctttcctgctccgaaaatcctgtggagcaggcagctccctaacggggagctacagcctctttctgagaatgcaactctcaccttaatttctacaaaaatggaagattctggggtttatttatgtgaaggaattaaccaggctggaagaagcagaaaggaagtggaattaattatccaagttactccaaaagacataaaacttacagcttttccttctgagagtgtcaaagaaggagacactgtcatcatctcttgtacatgtggaaatgttccagaaacatggataatcctgaagaaaaaagcggagacaggagacacagtactaaaatctatagatggcgcctataccatccgaaaggcccagttgaaggatgcgggagtatatgaatgtgaatctaaaaacaaagttggctcacaattaagaagtttaacacttgatgttcaaggaagagaaaacaacaaagactatttttctcctgagcttctcgtgctctattttgcatcctccttaataatacctgccattggaatgataatttactttgcaagaaaagccaacatgaaggggtcatatagtcttgtagaagcacagaagtcaaaagtgtagctaatgcttgatatgttcaactggagacactatttatctgtgcaaatccttgatactgctcatcattccttgagaaaaacaatgagctgagaggcagacttccctgaatgtattgaacttggaaagaaatgcccatctatgtcccttgctgtgagcaagaagtcaaagtaaaacttgctgcctgaagaacagtaactgccatcaagatgagagaactggaggagttccttgatctgtatatacaataacataatttgtacatatgtaaaataaaattatgccatagcaagattgcttaaaatagcaacactctatatttagattgttaaaataactagtgttgcttggactattataatttaatgcatgttaggaaaatttcacattaatatttgctgacagctgacctttgtcatctttcttctattttattccctttcacaaaattttattcctatatagtttattgacaataatttcaggttttgtaaagatgccgggttttatatttttatagacaaataataagcaaagggagcactgggttgactttcaggtactaaatacctcaacctatggtataatggttgactgggtttctctgtatagtactggcatggtacggagatgtttcacgaagtttgttcatcagactcctgtgcaactttcccaatgtggcctaaaaatgcaacttctttttattttcttttgtaaatgtttaggtttttttgtatagtaaagtgataatttctggaattagaa

SEQ ID NO: 198895 - DNA, 2475 bp, Homo sapiens
  Payload ID: 19238
  Gene Name: vascular cell adhesion molecule 1
  ENST ID: ENST00000370115
  CDS Start-End: 98-1720
ctggcttcaggagctgaataccctcccaggcacacacaggtgggacacaaataagggttttggaaccactattttctcatcacgacagcaacttaaaatgcctgggaagatggtcgtgatccttggagcctcaaatatactttggataatgtttgcagcttctcaagcttttaaaatcgagaccaccccagaatctagatatcttgctcagattggtgactccgtctcattgacttgcagcaccacaggctgtgagtccccatttttctcttggagaacccagatagatagtccactgaatgggaaggtgacgaatgaggggaccacatctacgctgacaatgaatcctgttagttttgggaacgaacactcttacctgtgcacagcaacttgtgaatctaggaaattggaaaaaggaatccaggtggagatctactcttttcctaaggatccagagattcatttgagtggccctctggaggctgggaagccgatcacagtcaagtgttcagttgctgatgtatacccatttgacaggctggagatagacttactgaaaggagatcatctcatgaagagtcaggaatttctggaggatgcagacaggaagtccctggaaaccaagagtttggaagtaacctttactcctgtcattgaggatattggaaaagttcttgtttgccgagctaaattacacattgatgaaatggattctgtgcccacagtaaggcaggctgtaaaagaattgcaagtctacatatcacccaagaatacagttatttctgtgaatccatccacaaagctgcaagaaggtggctctgtgaccatgacctgttccagcgagggtctaccagctccagagattttctggagtaagaaattagataatgggaatctacagcacctttctggaaatgcaactctcaccttaattgctatgaggatggaagattctggaatttatgtgtgtgaaggagttaatttgattgggaaaaacagaaaagaggtggaattaattgttcaagttgcccccagagatacaaccgtcttggtcagcccttcctccatcctggaggaaggcagttctgtgaatatgacatgcttgagccagggctttcctgctccgaaaatcctgtggagcaggcagctccctaacggggagctacagcctctttctgagaatgcaactctcaccttaatttctacaaaaatggaagattctggggtttatttatgtgaaggaattaaccaggctggaagaagcagaaaggaagtggaattaattatccaagttactccaaaagacataaaacttacagcttttccttctgagagtgtcaaagaaggagacactgtcatcatctcttgtacatgtggaaatgttccagaaacatggataatcctgaagaaaaaagcggagacaggagacacagtactaaaatctatagatggcgcctataccatccgaaaggcccagttgaaggatgcgggagtatatgaatgtgaatctaaaaacaaagttggctcacaattaagaagtttaacacttgatgttcaaggaagagaaaacaacaaagactatttttctcctgagcttctcgtgctctattttgcatcctccttaataatacctgccattggaatgataatttactttgcaagaaaagccaacatgaaggggtcatatagtcttgtagaagcacagaagtcaaaagtgtagctaatgcttgatatgttcaactggagacactatttatctgtgcaaatccttgatactgctcatcattccttgagaaaaacaatgagctgagaggcagacttccctgaatgtattgaacttggaaagaaatgcccatctatgtcccttgctgtgagcaagaagtcaaagtaaaacttgctgcctgaagaacagtaactgccatcaagatgagagaactggaggagttccttgatctgtatatacaataacataatttgtacatatgtaaaataaaattatgccatagcaagattgcttaaaatagcaacactctatatttagattgttaaaataactagtgttgcttggactattataatttaatgcatgttaggaaaatttcacattaatatttgctgacagctgacctttgtcatctttcttctattttattccctttcacaaaattttattcctatatagtttattgacaataatttcaggttttgtaaagatgccgggttttatatttttatagacaaataataagcaaagggagcactgggttgactttcaggtactaaatacctcaacctatggtataatggttgactgggtttctctgtatagtactggcatggtacggagatgtttcacgaagtttgttcatcagactcctgtgcaactttcccaatgtggcctaaaaatgcaacttctttttattttcttttgtaaatgtttaggtttttttgtatagtaaagtgataatttctgga

SEQ ID NO: 198896 - DNA, 2483 bp, Homo sapiens
  Payload ID: 19238
  Gene Name: vascular cell adhesion molecule 1
  Uniprot ID: P19320
  ENST ID: ENST00000370119
  CDS Start-End: 120-2153
gcggtatctgcatcgggcctcactggcttcaggagctgaataccctcccaggcacacacaggtgggacacaaataagggttttggaaccactattttctcatcacgacagcaacttaaaatgcctgggaagatggtcgtgatccttggagcctcaaatatactttggataatgtttgcagcttctcaagcttttaaaatcgagaccaccccagaatctagatatcttgctcagattggtgactccgtctcattgacttgcagcaccacaggctcttttcctaaggatccagagattcatttgagtggccctctggaggctgggaagccgatcacagtcaagtgttcagttgctgatgtatacccatttgacaggctggagatagacttactgaaaggagatcatctcatgaagagtcaggaatttctggaggatgcagacaggaagtccctggaaaccaagagtttggaagtaacctttactcctgtcattgaggatattggaaaagttcttgtttgccgagctaaattacacattgatgaaatggattctgtgcccacagtaaggcaggctgtaaaagaattgcaagtctacatatcacccaagaatacagttatttctgtgaatccatccacaaagctgcaagaaggtggctctgtgaccatgacctgttccagcgagggtctaccagctccagagattttctggagtaagaaattagataatgggaatctacagcacctttctggaaatgcaactctcaccttaattgctatgaggatggaagattctggaatttatgtgtgtgaaggagttaatttgattgggaaaaacagaaaagaggtggaattaattgttcaagagaaaccatttactgttgagatctcccctggaccccggattgctgctcagattggagactcagtcatgttgacatgtagtgtcatgggctgtgaatccccatctttctcctggagaacccagatagacagccctctgagcgggaaggtgaggagtgaggggaccaattccacgctgaccctgagccctgtgagttttgagaacgaacactcttatctgtgcacagtgacttgtggacataagaaactggaaaagggaatccaggtggagctctactcattccctagagatccagaaatcgagatgagtggtggcctcgtgaatgggagctctgtcactgtaagctgcaaggttcctagcgtgtacccccttgaccggctggagattgaattacttaagggggagactattctggagaatatagagtttttggaggatacggatatgaaatctctagagaacaaaagtttggaaatgaccttcatccctaccattgaagatactggaaaagctcttgtttgtcaggctaagttacatattgatgacatggaattcgaacccaaacaaaggcagagtacgcaaacactttatgtcaatgttgcccccagagatacaaccgtcttggtcagcccttcctccatcctggaggaaggcagttctgtgaatatgacatgcttgagccagggctttcctgctccgaaaatcctgtggagcaggcagctccctaacggggagctacagcctctttctgagaatgcaactctcaccttaatttctacaaaaatggaagattctggggtttatttatgtgaaggaattaaccaggctggaagaagcagaaaggaagtggaattaattatccaagttactccaaaagacataaaacttacagcttttccttctgagagtgtcaaagaaggagacactgtcatcatctcttgtacatgtggaaatgttccagaaacatggataatcctgaagaaaaaagcggagacaggagacacagtactaaaatctatagatggcgcctataccatccgaaaggcccagttgaaggatgcgggagtatatgaatgtgaatctaaaaacaaagttggctcacaattaagaagtttaacacttgatgttcaaggaagagaaaacaacaaagactatttttctcctgagcttctcgtgctctattttgcatcctccttaataatacctgccattggaatgataatttactttgcaagaaaagccaacatgaaggggtcatatagtcttgtagaagcacagaagtcaaaagtgtagctaatgcttgatatgttcaactggagacactatttatctgtgcaaatccttgatactgctcatcattccttgagaaaaacaatgagctgagaggcagacttccctgaatgtattgaacttggaaagaaatgcccatctatgtcccttgctgtgagcaagaagtcaaagtaaaacttgctgcctgaagaacagtaactgccatcaagatgagagaactggaggagttccttgatctgtatatacaataacataatttgtacatatgtaaaataaaattatgccatagcaagattgcttaaaatagcaacactctatatttagattgttaaa

SEQ ID NO: 198897 - DNA, 993 bp, Homo sapiens
  Payload ID: 19239
  Gene Name: vascular endothelial growth factor A
  ENST ID: ENST00000230480
  CDS Start-End: 129-620
gcctggccggccgcgtgttcccggagcctcggctgcccgaatggggagcccagagtggcgagcggcacccctccccccgccagccctccgcgggaaggtgacctctcgagtggtcccaggctgcacccatggcagaaggaggagggcagaatcatcacgaagtggtgaagttcatggatgtctatcagcgcagctactgccatccaatcgagaccctggtggacatcttccaggagtaccctgatgagatcgagtacatcttcaagccatcctgtgtgcccctgatgcgatgcgggggctgctgcaatgacgagggcctggagtgtgtgcccactgaggagtccaacatcaccatgcagattatgcggatcaaacctcaccaaggccagcacataggagagatgagcttcctacagcacaacaaatgtgaatgcagaccaaagaaagatagagcaagacaagaaaatccctgtgggccttgctcagagcggagaaagcatttgtttgtacaagatccgcagacgtgtaaatgttcctgcaaaaacacagactcgcgttgcaaggcgaggcagcttgagttaaacgaacgtacttgcagatgtgacaagccgaggcggtgagccgggcaggaggaaggagcctccctcagggtttcgggaaccagatctctcaccaggaaagactgatacagaacgatcgatacagaaaccacgctgccgccaccacaccatcaccatcgacagaacagtccttaatccagaaacctgaaatgaaggaagaggagactctgcgcagagcactttgggtccggagggcgagactccggcggaagcattcccgggcgggtgacccagcacggtccctcttggaattggattcgccattttatttttcttgctgctaaatcaccgagcccggaagattagagagttttatttctgggattcctgtagacacacccacccacatacatacatttatatatatatatat

SEQ ID NO: 198898 - DNA, 954 bp, Homo sapiens
  Payload ID: 19239
  Gene Name: vascular endothelial growth factor A
  ENST ID: ENST00000324450
  CDS Start-End: 1-954
ctgacggacagacagacagacaccgcccccagccccagctaccacctcctccccggccggcggcggacagtggacgcggcggcgagccgcgggcaggggccggagcccgcgcccggaggcggggtggagggggtcggggctcgcggcgtcgcactgaaacttttcgtccaacttctgggctgttctcgcttcggaggagccgtggtccgcgcgggggaagccgagccgagcggagccgcgagaagtgctagctcgggccgggaggagccgcagccggaggagggggaggaggaagaagagaaggaagaggagagggggccgcagtggcgactcggcgctcggaagccgggctcatggacgggtgaggcggcggtgtgcgcagacagtgctccagccgcgcgcgctccccaggccctggcccgggcctcgggccggggaggaagagtagctcgccgaggcgccgaggagagcgggccgccccacagcccgagccggagagggagcgcgagccgcgccggccccggtcgggcctccgaaaccatgaactttctgctgtcttgggtgcattggagccttgccttgctgctctacctccaccatgccaagtggtcccaggctgcacccatggcagaaggaggagggcagaatcatcacgaagtggtgaagttcatggatgtctatcagcgcagctactgccatccaatcgagaccctggtggacatcttccaggagtaccctgatgagatcgagtacatcttcaagccatcctgtgtgcccctgatgcgatgcgggggctgctgcaatgacgagggcctggagtgtgtgcccactgaggagtccaacatcaccatgcagattatgcggatcaaacctcaccaaggccagcacataggagagatgagcttcctacagcacaacaaatgtgaatgcagatgtgacaagccgaggcggtga

SEQ ID NO: 198899 - DNA, 1286 bp, Homo sapiens
  Payload ID: 19239
  Gene Name: vascular endothelial growth factor A
  ENST ID: ENST00000372055
  CDS Start-End: 1-1239
ctgacggacagacagacagacaccgcccccagccccagctaccacctcctccccggccggcggcggacagtggacgcggcggcgagccgcgggcaggggccggagcccgcgcccggaggcggggtggagggggtcggggctcgcggcgtcgcactgaaacttttcgtccaacttctgggctgttctcgcttcggaggagccgtggtccgcgcgggggaagccgagccgagcggagccgcgagaagtgctagctcgggccgggaggagccgcagccggaggagggggaggaggaagaagagaaggaagaggagagggggccgcagtggcgactcggcgctcggaagccgggctcatggacgggtgaggcggcggtgtgcgcagacagtgctccagccgcgcgcgctccccaggccctggcccgggcctcgggccggggaggaagagtagctcgccgaggcgccgaggagagcgggccgccccacagcccgagccggagagggagcgcgagccgcgccggccccggtcgggcctccgaaaccatgaactttctgctgtcttgggtgcattggagccttgccttgctgctctacctccaccatgccaagtggtcccaggctgcacccatggcagaaggaggagggcagaatcatcacgaagtggtgaagttcatggatgtctatcagcgcagctactgccatccaatcgagaccctggtggacatcttccaggagtaccctgatgagatcgagtacatcttcaagccatcctgtgtgcccctgatgcgatgcgggggctgctgcaatgacgagggcctggagtgtgtgcccactgaggagtccaacatcaccatgcagattatgcggatcaaacctcaccaaggccagcacataggagagatgagcttcctacagcacaacaaatgtgaatgcagaccaaagaaagatagagcaagacaagaaaaaaaatcagttcgaggaaagggaaaggggcaaaaacgaaagcgcaagaaatcccggtataagtcctggagcgtgtacgttggtgcccgctgctgtctaatgccctggagcctccctggcccccatccctgtgggccttgctcagagcggagaaagcatttgtttgtacaagatccgcagacgtgtaaatgttcctgcaaaaacacagactcgcgttgcaaggcgaggcagcttgagttaaacgaacgtacttgcagatgtgacaagccgaggcggtgagccgggcaggaggaaggagcctccctcagggtttcgggaaccagatc

SEQ ID NO: 198900 - DNA, 2909 bp, Homo sapiens
  Payload ID: 19239
  Gene Name: vascular endothelial growth factor A
  ENST ID: ENST00000372064
  CDS Start-End: 1-984
ctgacggacagacagacagacaccgcccccagccccagctaccacctcctccccggccggcggcggacagtggacgcggcggcgagccgcgggcaggggccggagcccgcgcccggaggcggggtggagggggtcggggctcgcggcgtcgcactgaaacttttcgtccaacttctgggctgttctcgcttcggaggagccgtggtccgcgcgggggaagccgagccgagcggagccgcgagaagtgctagctcgggccgggaggagccgcagccggaggagggggaggaggaagaagagaaggaagaggagagggggccgcagtggcgactcggcgctcggaagccgggctcatggacgggtgaggcggcggtgtgcgcagacagtgctccagccgcgcgcgctccccaggccctggcccgggcctcgggccggggaggaagagtagctcgccgaggcgccgaggagagcgggccgccccacagcccgagccggagagggagcgcgagccgcgccggccccggtcgggcctccgaaaccatgaactttctgctgtcttgggtgcattggagccttgccttgctgctctacctccaccatgccaagtggtcccaggctgcacccatggcagaaggaggagggcagaatcatcacgaagtggtgaagttcatggatgtctatcagcgcagctactgccatccaatcgagaccctggtggacatcttccaggagtaccctgatgagatcgagtacatcttcaagccatcctgtgtgcccctgatgcgatgcgggggctgctgcaatgacgagggcctggagtgtgtgcccactgaggagtccaacatcaccatgcagattatgcggatcaaacctcaccaaggccagcacataggagagatgagcttcctacagcacaacaaatgtgaatgcagaccaaagaaagatagagcaagacaagaaaaatgtgacaagccgaggcggtgagccgggcaggaggaaggagcctccctcagggtttcgggaaccagatctctcaccaggaaagactgatacagaacgatcgatacagaaaccacgctgccgccaccacaccatcaccatcgacagaacagtccttaatccagaaacctgaaatgaaggaagaggagactctgcgcagagcactttgggtccggagggcgagactccggcggaagcattcccgggcgggtgacccagcacggtccctcttggaattggattcgccattttatttttcttgctgctaaatcaccgagcccggaagattagagagttttatttctgggattcctgtagacacacccacccacatacatacatttatatatatatatattatatatatataaaaataaatatctctattttatatatataaaatatatatattctttttttaaattaacagtgctaatgttattggtgtcttcactggatgtatttgactgctgtggacttgagttgggaggggaatgttcccactcagatcctgacagggaagaggaggagatgagagactctggcatgatcttttttttgtcccacttggtggggccagggtcctctcccctgcccaggaatgtgcaaggccagggcatgggggcaaatatgacccagttttgggaacaccgacaaacccagccctggcgctgagcctctctaccccaggtcagacggacagaaagacagatcacaggtacagggatgaggacaccggctctgaccaggagtttggggagcttcaggacattgctgtgctttggggattccctccacatgctgcacgcgcatctcgcccccaggggcactgcctggaagattcaggagcctgggcggccttcgcttactctcacctgcttctgagttgcccaggagaccactggcagatgtcccggcgaagagaagagacacattgttggaagaagcagcccatgacagctccccttcctgggactcgccctcatcctcttcctgctccccttcctggggtgcagcctaaaaggacctatgtcctcacaccattgaaaccactagttctgtccccccaggagacctggttgtgtgtgtgtgagtggttgaccttcctccatcccctggtccttcccttcccttcccgaggcacagagagacagggcaggatccacgtgcccattgtggaggcagagaaaagagaaagtgttttatatacggtacttatttaatatccctttttaattagaaattaaaacagttaatttaattaaagagtagggttttttttcagtattcttggttaatatttaatttcaactatttatgagatgtatcttttgctctctcttgctctcttatttgtaccggtttttgtatataaaattcatgtttccaatctctctctccctgatcggtgacagtcactagcttatcttgaacagatatttaattttgctaacactcagctctgccctccccgatcccctggctccccagcacacattcctttgaaataaggtttcaatatacatctacatactatatatatatttggcaacttgtatttgtgtgtatatatatatatatatgtttatgtatatatgtgattctgataaaatagacattgctattctgttttttatatgtaaaaacaaaacaagaaaaaatagagaattctacatactaaatctctctccttttttaattttaatatttgttatcatttatttattggtgctactgtttatccgtaataattgtggggaaaagatattaacatcacgtctttgtctctagtgcagtttttcgagatattccgtagtacatatttatttttaaacaacgacaaagaaatacagatatatcttaaaaaaaaaaaagcattttgtattaaagaatttaattctgatctcaaa

SEQ ID NO: 198901 - DNA, 3535 bp, Homo sapiens
  Payload ID: 19239
  Gene Name: vascular endothelial growth factor A
  ENST ID: ENST00000372067
  CDS Start-End: 495-1610
ggaggcttggggcagccgggtagctcggaggtcgtggcgctgggggctagcaccagcgctctgtcgggaggcgcagcggttaggtggaccggtcagcggactcaccggccagggcgctcggtgctggaatttgatattcattgatccgggttttatccctcttcttttttcttaaacatttttttttaaaactgtattgtttctcgttttaatttatttttgcttgccattccccacttgaatcgggccgacggcttggggagattgctctacttccccaaatcactgtggattttggaaaccagcagaaagaggaaagaggtagcaagagctccagagagaagtcgaggaagagagagacggggtcagagagagcgcgcgggcgtgcgagcagcgaaagcgacaggggcaaagtgagtgacctgcttttgggggtgaccgccggagcgcggcgtgagccctcccccttgggatcccgcagctgaccagtcgcgctgacggacagacagacagacaccgcccccagccccagctaccacctcctccccggccggcggcggacagtggacgcggcggcgagccgcgggcaggggccggagcccgcgcccggaggcggggtggagggggtcggggctcgcggcgtcgcactgaaacttttcgtccaacttctgggctgttctcgcttcggaggagccgtggtccgcgcgggggaagccgagccgagcggagccgcgagaagtgctagctcgggccgggaggagccgcagccggaggagggggaggaggaagaagagaaggaagaggagagggggccgcagtggcgactcggcgctcggaagccgggctcatggacgggtgaggcggcggtgtgcgcagacagtgctccagccgcgcgcgctccccaggccctggcccgggcctcgggccggggaggaagagtagctcgccgaggcgccgaggagagcgggccgccccacagcccgagccggagagggagcgcgagccgcgccggccccggtcgggcctccgaaaccatgaactttctgctgtcttgggtgcattggagccttgccttgctgctctacctccaccatgccaagtggtcccaggctgcacccatggcagaaggaggagggcagaatcatcacgaagtggtgaagttcatggatgtctatcagcgcagctactgccatccaatcgagaccctggtggacatcttccaggagtaccctgatgagatcgagtacatcttcaagccatcctgtgtgcccctgatgcgatgcgggggctgctgcaatgacgagggcctggagtgtgtgcccactgaggagtccaacatcaccatgcagattatgcggatcaaacctcaccaaggccagcacataggagagatgagcttcctacagcacaacaaatgtgaatgcagaccaaagaaagatagagcaagacaagaaaatccctgtgggccttgctcagagcggagaaagcatttgtttgtacaagatccgcagacgtgtaaatgttcctgcaaaaacacagactcgcgttgcaaggcgaggcagcttgagttaaacgaacgtacttgcagatgtgacaagccgaggcggtgagccgggcaggaggaaggagcctccctcagggtttcgggaaccagatctctcaccaggaaagactgatacagaacgatcgatacagaaaccacgctgccgccaccacaccatcaccatcgacagaacagtccttaatccagaaacctgaaatgaaggaagaggagactctgcgcagagcactttgggtccggagggcgagactccggcggaagcattcccgggcgggtgacccagcacggtccctcttggaattggattcgccattttatttttcttgctgctaaatcaccgagcccggaagattagagagttttatttctgggattcctgtagacacacccacccacatacatacatttatatatatatatattatatatatataaaaataaatatctctattttatatatataaaatatatatattctttttttaaattaacagtgctaatgttattggtgtcttcactggatgtatttgactgctgtggacttgagttgggaggggaatgttcccactcagatcctgacagggaagaggaggagatgagagactctggcatgatcttttttttgtcccacttggtggggccagggtcctctcccctgcccaggaatgtgcaaggccagggcatgggggcaaatatgacccagttttgggaacaccgacaaacccagccctggcgctgagcctctctaccccaggtcagacggacagaaagacagatcacaggtacagggatgaggacaccggctctgaccaggagtttggggagcttcaggacattgctgtgctttggggattccctccacatgctgcacgcgcatctcgcccccaggggcactgcctggaagattcaggagcctgggcggccttcgcttactctcacctgcttctgagttgcccaggagaccactggcagatgtcccggcgaagagaagagacacattgttggaagaagcagcccatgacagctccccttcctgggactcgccctcatcctcttcctgctccccttcctggggtgcagcctaaaaggacctatgtcctcacaccattgaaaccactagttctgtccccccaggagacctggttgtgtgtgtgtgagtggttgaccttcctccatcccctggtccttcccttcccttcccgaggcacagagagacagggcaggatccacgtgcccattgtggaggcagagaaaagagaaagtgttttatatacggtacttatttaatatccctttttaattagaaattaaaacagttaatttaattaaagagtagggttttttttcagtattcttggttaatatttaatttcaactatttatgagatgtatcttttgctctctcttgctctcttatttgtaccggtttttgtatataaaattcatgtttccaatctctctctccctgatcggtgacagtcactagcttatcttgaacagatatttaattttgctaacactcagctctgccctccccgatcccctggctccccagcacacattcctttgaaataaggtttcaatatacatctacatactatatatatatttggcaacttgtatttgtgtgtatatatatatatatatgtttatgtatatatgtgattctgataaaatagacattgctattctgttttttatatgtaaaaacaaaacaagaaaaaatagagaattctacatactaaatctctctccttttttaattttaatatttgttatcatttatttattggtgctactgtttatccgtaataattgtggggaaaagatattaacatcacgtctttgtctctagtgcagtttttcgagatattccgtagtacatatttatttttaaacaacgacaaagaaatacagatatatcttaaaaaaaaaaaagcattttgtattaaagaatttaattctgatctcaaa

SEQ ID NO: 198902 - DNA, 2834 bp, Homo sapiens
  Payload ID: 19239
  Gene Name: vascular endothelial growth factor A
  Uniprot ID: P15692
  ENST ID: ENST00000372077
  CDS Start-End: 466-909
gcggcggcgagccgcgggcaggggccggagcccgcgcccggaggcggggtggagggggtcggggctcgcggcgtcgcactgaaacttttcgtccaacttctgggctgttctcgcttcggaggagccgtggtccgcgcgggggaagccgagccgagcggagccgcgagaagtgctagctcgggccgggaggagccgcagccggaggagggggaggaggaagaagagaaggaagaggagagggggccgcagtggcgactcggcgctcggaagccgggctcatggacgggtgaggcggcggtgtgcgcagacagtgctccagccgcgcgcgctccccaggccctggcccgggcctcgggccggggaggaagagtagctcgccgaggcgccgaggagagcgggccgccccacagcccgagccggagagggagcgcgagccgcgccggccccggtcgggcctccgaaaccatgaactttctgctgtcttgggtgcattggagccttgccttgctgctctacctccaccatgccaagtggtcccaggctgcacccatggcagaaggaggagggcagaatcatcacgaagtggtgaagttcatggatgtctatcagcgcagctactgccatccaatcgagaccctggtggacatcttccaggagtaccctgatgagatcgagtacatcttcaagccatcctgtgtgcccctgatgcgatgcgggggctgctgcaatgacgagggcctggagtgtgtgcccactgaggagtccaacatcaccatgcagattatgcggatcaaacctcaccaaggccagcacataggagagatgagcttcctacagcacaacaaatgtgaatgcagaccaaagaaagatagagcaagacaagaaaaatgtgacaagccgaggcggtgagccgggcaggaggaaggagcctccctcagggtttcgggaaccagatctctcaccaggaaagactgatacagaacgatcgatacagaaaccacgctgccgccaccacaccatcaccatcgacagaacagtccttaatccagaaacctgaaatgaaggaagaggagactctgcgcagagcactttgggtccggagggcgagactccggcggaagcattcccgggcgggtgacccagcacggtccctcttggaattggattcgccattttatttttcttgctgctaaatcaccgagcccggaagattagagagttttatttctgggattcctgtagacacacccacccacatacatacatttatatatatatatattatatatatataaaaataaatatctctattttatatatataaaatatatatattctttttttaaattaacagtgctaatgttattggtgtcttcactggatgtatttgactgctgtggacttgagttgggaggggaatgttcccactcagatcctgacagggaagaggaggagatgagagactctggcatgatcttttttttgtcccacttggtggggccagggtcctctcccctgcccaggaatgtgcaaggccagggcatgggggcaaatatgacccagttttgggaacaccgacaaacccagccctggcgctgagcctctctaccccaggtcagacggacagaaagacagatcacaggtacagggatgaggacaccggctctgaccaggagtttggggagcttcaggacattgctgtgctttggggattccctccacatgctgcacgcgcatctcgcccccaggggcactgcctggaagattcaggagcctgggcggccttcgcttactctcacctgcttctgagttgcccaggagaccactggcagatgtcccggcgaagagaagagacacattgttggaagaagcagcccatgacagctccccttcctgggactcgccctcatcctcttcctgctccccttcctggggtgcagcctaaaaggacctatgtcctcacaccattgaaaccactagttctgtccccccaggagacctggttgtgtgtgtgtgagtggttgaccttcctccatcccctggtccttcccttcccttcccgaggcacagagagacagggcaggatccacgtgcccattgtggaggcagagaaaagagaaagtgttttatatacggtacttatttaatatccctttttaattagaaattaaaacagttaatttaattaaagagtagggttttttttcagtattcttggttaatatttaatttcaactatttatgagatgtatcttttgctctctcttgctctcttatttgtaccggtttttgtatataaaattcatgtttccaatctctctctccctgatcggtgacagtcactagcttatcttgaacagatatttaattttgctaacactcagctctgccctccccgatcccctggctccccagcacacattcctttgaaataaggtttcaatatacatctacatactatatatatatttggcaacttgtatttgtgtgtatatatatatatatatgtttatgtatatatgtgattctgataaaatagacattgctattctgttttttatatgtaaaaacaaaacaagaaaaaatagagaattctacatactaaatctctctccttttttaattttaatatttgttatcatttatttattggtgctactgtttatccgtaataattgtggggaaaagatattaacatcacgtctttgtctctagtgcagtttttcgagatattccgtagtacatatttatttttaaacaacgacaaagaaatacagatatatcttaaaaaaaaaaaagcattttgtattaaagaatttaattctgatctcaaa

SEQ ID NO: 198903 - DNA, 1575 bp, Homo sapiens
  Payload ID: 19239
  Gene Name: vascular endothelial growth factor A
  ENST ID: ENST00000425836
  CDS Start-End: 1-1188
ctgacggacagacagacagacaccgcccccagccccagctaccacctcctccccggccggcggcggacagtggacgcggcggcgagccgcgggcaggggccggagcccgcgcccggaggcggggtggagggggtcggggctcgcggcgtcgcactgaaacttttcgtccaacttctgggctgttctcgcttcggaggagccgtggtccgcgcgggggaagccgagccgagcggagccgcgagaagtgctagctcgggccgggaggagccgcagccggaggagggggaggaggaagaagagaaggaagaggagagggggccgcagtggcgactcggcgctcggaagccgggctcatggacgggtgaggcggcggtgtgcgcagacagtgctccagccgcgcgcgctccccaggccctggcccgggcctcgggccggggaggaagagtagctcgccgaggcgccgaggagagcgggccgccccacagcccgagccggagagggagcgcgagccgcgccggccccggtcgggcctccgaaaccatgaactttctgctgtcttgggtgcattggagccttgccttgctgctctacctccaccatgccaagtggtcccaggctgcacccatggcagaaggaggagggcagaatcatcacgaagtggtgaagttcatggatgtctatcagcgcagctactgccatccaatcgagaccctggtggacatcttccaggagtaccctgatgagatcgagtacatcttcaagccatcctgtgtgcccctgatgcgatgcgggggctgctgcaatgacgagggcctggagtgtgtgcccactgaggagtccaacatcaccatgcagattatgcggatcaaacctcaccaaggccagcacataggagagatgagcttcctacagcacaacaaatgtgaatgcagaccaaagaaagatagagcaagacaagaaaaaaaatcagttcgaggaaagggaaaggggcaaaaacgaaagcgcaagaaatcccggtataagtcctggagcgttccctgtgggccttgctcagagcggagaaagcatttgtttgtacaagatccgcagacgtgtaaatgttcctgcaaaaacacagactcgcgttgcaaggcgaggcagcttgagttaaacgaacgtacttgcagatgtgacaagccgaggcggtgagccgggcaggaggaaggagcctccctcagggtttcgggaaccagatctctcaccaggaaagactgatacagaacgatcgatacagaaaccacgctgccgccaccacaccatcaccatcgacagaacagtccttaatccagaaacctgaaatgaaggaagaggagactctgcgcagagcactttgggtccggagggcgagactccggcggaagcattcccgggcgggtgacccagcacggtccctcttggaattggattcgccattttatttttcttgctgctaaatcaccgagcccggaagattagagagttttatttctgggattcctgtagacacacccacccacatacatacatttatatatatatatattatatatatataaa

SEQ ID NO: 198904 - DNA, 1081 bp, Homo sapiens
  Payload ID: 19239
  Gene Name: vascular endothelial growth factor A
  ENST ID: ENST00000417285
  CDS Start-End: 1-1065
ctgacggacagacagacagacaccgcccccagccccagctaccacctcctccccggccggcggcggacagtggacgcggcggcgagccgcgggcaggggccggagcccgcgcccggaggcggggtggagggggtcggggctcgcggcgtcgcactgaaacttttcgtccaacttctgggctgttctcgcttcggaggagccgtggtccgcgcgggggaagccgagccgagcggagccgcgagaagtgctagctcgggccgggaggagccgcagccggaggagggggaggaggaagaagagaaggaagaggagagggggccgcagtggcgactcggcgctcggaagccgggctcatggacgggtgaggcggcggtgtgcgcagacagtgctccagccgcgcgcgctccccaggccctggcccgggcctcgggccggggaggaagagtagctcgccgaggcgccgaggagagcgggccgccccacagcccgagccggagagggagcgcgagccgcgccggccccggtcgggcctccgaaaccatgaactttctgctgtcttgggtgcattggagccttgccttgctgctctacctccaccatgccaagtggtcccaggctgcacccatggcagaaggaggagggcagaatcatcacgaagtggtgaagttcatggatgtctatcagcgcagctactgccatccaatcgagaccctggtggacatcttccaggagtaccctgatgagatcgagtacatcttcaagccatcctgtgtgcccctgatgcgatgcgggggctgctgcaatgacgagggcctggagtgtgtgcccactgaggagtccaacatcaccatgcagattatgcggatcaaacctcaccaaggccagcacataggagagatgagcttcctacagcacaacaaatgtgaatgcagaccaaagaaagatagagcaagacaagaaaatccctgtgggccttgctcagagcggagaaagcatttgtttgtacaagatccgcagacgtgtaaatgttcctgcaaaaacacagactcgcgttgcaagatgtgacaagccgaggcggtga

SEQ ID NO: 198905 - DNA, 1197 bp, Homo sapiens
  Payload ID: 19239
  Gene Name: vascular endothelial growth factor A
  ENST ID: ENST00000413642
  CDS Start-End: 1-1170
ctgacggacagacagacagacaccgcccccagccccagctaccacctcctccccggccggcggcggacagtggacgcggcggcgagccgcgggcaggggccggagcccgcgcccggaggcggggtggagggggtcggggctcgcggcgtcgcactgaaacttttcgtccaacttctgggctgttctcgcttcggaggagccgtggtccgcgcgggggaagccgagccgagcggagccgcgagaagtgctagctcgggccgggaggagccgcagccggaggagggggaggaggaagaagagaaggaagaggagagggggccgcagtggcgactcggcgctcggaagccgggctcatggacgggtgaggcggcggtgtgcgcagacagtgctccagccgcgcgcgctccccaggccctggcccgggcctcgggccggggaggaagagtagctcgccgaggcgccgaggagagcgggccgccccacagcccgagccggagagggagcgcgagccgcgccggccccggtcgggcctccgaaaccatgaactttctgctgtcttgggtgcattggagccttgccttgctgctctacctccaccatgccaagtggtcccaggctgcacccatggcagaaggaggagggcagaatcatcacgaagtggtgaagttcatggatgtctatcagcgcagctactgccatccaatcgagaccctggtggacatcttccaggagtaccctgatgagatcgagtacatcttcaagccatcctgtgtgcccctgatgcgatgcgggggctgctgcaatgacgagggcctggagtgtgtgcccactgaggagtccaacatcaccatgcagattatgcggatcaaacctcaccaaggccagcacataggagagatgagcttcctacagcacaacaaatgtgaatgcagaccaaagaaagatagagcaagacaagaaaaaaaatcagttcgaggaaagggaaaggggcaaaaacgaaagcgcaagaaatcccgtccctgtgggccttgctcagagcggagaaagcatttgtttgtacaagatccgcagacgtgtaaatgttcctgcaaaaacacagactcgcgttgcaaggcgaggcagcttgagttaaacgaacgtacttgcagatgtgacaagccgaggcggtgagccgggcaggaggaaggagcctccctc

SEQ ID NO: 198906 - DNA, 414 bp, Homo sapiens
  Payload ID: 19239
  Gene Name: vascular endothelial growth factor A
  Uniprot ID: P15692
  ENST ID: ENST00000457104
  CDS Start-End: 1-414
atgaactttctgctgtcttgggtgcattggagccttgccttgctgctctacctccaccatgccaagtggtcccaggctgcacccatggcagaaggaggagggcagaatcatcacgaagtggtgaagttcatggatgtctatcagcgcagctactgccatccaatcgagaccctggtggacatcttccaggagtaccctgatgagatcgagtacatcttcaagccatcctgtgtgcccctgatgcgatgcgggggctgctgcaatgacgagggcctggagtgtgtgcccactgaggagtccaacatcaccatgcagattatgcggatcaaacctcaccaaggccagcacataggagagatgagcttcctacagcacaacaaatgtgaatgcagatgtgacaagccgaggcggtga

SEQ ID NO: 198907 - DNA, 1146 bp, Homo sapiens
  Payload ID: 19239
  Gene Name: vascular endothelial growth factor A
  ENST ID: ENST00000482630
  CDS Start-End: 1-1116
ctgacggacagacagacagacaccgcccccagccccagctaccacctcctccccggccggcggcggacagtggacgcggcggcgagccgcgggcaggggccggagcccgcgcccggaggcggggtggagggggtcggggctcgcggcgtcgcactgaaacttttcgtccaacttctgggctgttctcgcttcggaggagccgtggtccgcgcgggggaagccgagccgagcggagccgcgagaagtgctagctcgggccgggaggagccgcagccggaggagggggaggaggaagaagagaaggaagaggagagggggccgcagtggcgactcggcgctcggaagccgggctcatggacgggtgaggcggcggtgtgcgcagacagtgctccagccgcgcgcgctccccaggccctggcccgggcctcgggccggggaggaagagtagctcgccgaggcgccgaggagagcgggccgccccacagcccgagccggagagggagcgcgagccgcgccggccccggtcgggcctccgaaaccatgaactttctgctgtcttgggtgcattggagccttgccttgctgctctacctccaccatgccaagtggtcccaggctgcacccatggcagaaggaggagggcagaatcatcacgaagtggtgaagttcatggatgtctatcagcgcagctactgccatccaatcgagaccctggtggacatcttccaggagtaccctgatgagatcgagtacatcttcaagccatcctgtgtgcccctgatgcgatgcgggggctgctgcaatgacgagggcctggagtgtgtgcccactgaggagtccaacatcaccatgcagattatgcggatcaaacctcaccaaggccagcacataggagagatgagcttcctacagcacaacaaatgtgaatgcagaccaaagaaagatagagcaagacaagaaaatccctgtgggccttgctcagagcggagaaagcatttgtttgtacaagatccgcagacgtgtaaatgttcctgcaaaaacacagactcgcgttgcaaggcgaggcagcttgagttaaacgaacgtacttgcagatctctcaccaggaaagactgatacagaacgatcgatacagaaaccacgctg

SEQ ID NO: 198908 - DNA, 1199 bp, Homo sapiens
  Payload ID: 19239
  Gene Name: vascular endothelial growth factor A
  Uniprot ID: P15692
  ENST ID: ENST00000520948
  CDS Start-End: 165-812
gcgcagacagtgctccagccgcgcgcgctccccaggccctggcccgggcctcgggccggggaggaagagtagctcgccgaggcgccgaggagagcgggccgccccacagcccgagccggagagggagcgcgagccgcgccggccccggtcgggcctccgaaaccatgaactttctgctgtcttgggtgcattggagccttgccttgctgctctacctccaccatgccaagtggtcccaggctgcacccatggcagaaggaggagggcagaatcatcacgaagtggtgaagttcatggatgtctatcagcgcagctactgccatccaatcgagaccctggtggacatcttccaggagtaccctgatgagatcgagtacatcttcaagccatcctgtgtgcccctgatgcgatgcgggggctgctgcaatgacgagggcctggagtgtgtgcccactgaggagtccaacatcaccatgcagattatgcggatcaaacctcaccaaggccagcacataggagagatgagcttcctacagcacaacaaatgtgaatgcagaccaaagaaagatagagcaagacaagaaaaaaaatcagttcgaggaaagggaaaggggcaaaaacgaaagcgcaagaaatcccggtataagtcctggagcgttccctgtgggccttgctcagagcggagaaagcatttgtttgtacaagatccgcagacgtgtaaatgttcctgcaaaaacacagactcgcgttgcaaggcgaggcagcttgagttaaacgaacgtacttgcagatgtgacaagccgaggcggtgagccgggcaggaggaaggagcctccctcagggtttcgggaaccagatctctcaccaggaaagactgatacagaacgatcgatacagaaaccacgctgccgccaccacaccatcaccatcgacagaacagtccttaatccagaaacctgaaatgaaggaagaggagactctgcgcagagcactttgggtccggagggcgagactccggcggaagcattcccgggcgggtgacccagcacggtccctcttggaattggattcgccattttatttttcttgctgctaaatcaccgagcccggaagattagagagttttatttctgggattcctgtagacacacccacccacatacatacatttatatatatatatattatatatatataaa

SEQ ID NO: 198909 - DNA, 541 bp, Homo sapiens
  Payload ID: 19239
  Gene Name: vascular endothelial growth factor A
  Uniprot ID: P15692
  ENST ID: ENST00000523125
  CDS Start-End: 1-525
atgaactttctgctgtcttgggtgcattggagccttgccttgctgctctacctccaccatgccaagtggtcccaggctgcacccatggcagaaggaggagggcagaatcatcacgaagtggtgaagttcatggatgtctatcagcgcagctactgccatccaatcgagaccctggtggacatcttccaggagtaccctgatgagatcgagtacatcttcaagccatcctgtgtgcccctgatgcgatgcgggggctgctgcaatgacgagggcctggagtgtgtgcccactgaggagtccaacatcaccatgcagattatgcggatcaaacctcaccaaggccagcacataggagagatgagcttcctacagcacaacaaatgtgaatgcagaccaaagaaagatagagcaagacaagaaaatccctgtgggccttgctcagagcggagaaagcatttgtttgtacaagatccgcagacgtgtaaatgttcctgcaaaaacacagactcgcgttgcaagatgtgacaagccgaggcggtga

SEQ ID NO: 198910 - DNA, 336 bp, Homo sapiens
  Payload ID: 19239
  Gene Name: vascular endothelial growth factor A
  ENST ID: ENST00000520265
  CDS Start-End: 1-336
gcacccatggcagaaggaggagggcagaatcatcacgaagtggtgaagttcatggatgtctatcagcgcagctactgccatccaatcgagaccctggtggacatcttccaggagtaccctgatgagatcgagtacatcttcaagccatcctgtgtgcccctgatgcgatgcgggggctgctgcaatgacgagggcctggagtgtgtgcccactgaggagtccaacatcaccatgcagacgtgtaaatgttcctgcaaaaacacagactcgcgttgcaaggcgaggcagcttgagttaaacgaacgtacttgcagatgtgacaagccgaggcggtga

SEQ ID NO: 198911 - DNA, 954 bp, Homo sapiens
  Payload ID: 19239
  Gene Name: vascular endothelial growth factor A
  Uniprot ID: P15692
  ENST ID: ENST00000523950
  CDS Start-End: 39-614
gcgcgagccgcgccggccccggtcgggcctccgaaaccatgaactttctgctgtcttgggtgcattggagccttgccttgctgctctacctccaccatgccaagtggtcccaggctgcacccatggcagaaggaggagggcagaatcatcacgaagtggtgaagttcatggatgtctatcagcgcagctactgccatccaatcgagaccctggtggacatcttccaggagtaccctgatgagatcgagtacatcttcaagccatcctgtgtgcccctgatgcgatgcgggggctgctgcaatgacgagggcctggagtgtgtgcccactgaggagtccaacatcaccatgcagattatgcggatcaaacctcaccaaggccagcacataggagagatgagcttcctacagcacaacaaatgtgaatgcagaccaaagaaagatagagcaagacaagaaaatccctgtgggccttgctcagagcggagaaagcatttgtttgtacaagatccgcagacgtgtaaatgttcctgcaaaaacacagactcgcgttgcaaggcgaggcagcttgagttaaacgaacgtacttgcagatgtgacaagccgaggcggtgagccgggcaggaggaaggagcctccctcagggtttcgggaaccagatctctcaccaggaaagactgatacagaacgatcgatacagaaaccacgctgccgccaccacaccatcaccatcgacagaacagtccttaatccagaaacctgaaatgaaggaagaggagactctgcgcagagcactttgggtccggagggcgagactccggcggaagcattcccgggcgggtgacccagcacggtccctcttggaattggattcgccattttatttttcttgctgctaaatcaccgagcccggaagattagagagttttatttctgggattcctgtagacacacc

SEQ ID NO: 198912 - DNA, 606 bp, Homo sapiens
  Payload ID: 19239
  Gene Name: vascular endothelial growth factor A
  Uniprot ID: P15692
  ENST ID: ENST00000518824
  CDS Start-End: 1-576
atgaactttctgctgtcttgggtgcattggagccttgccttgctgctctacctccaccatgccaagtggtcccaggctgcacccatggcagaaggaggagggcagaatcatcacgaagtggtgaagttcatggatgtctatcagcgcagctactgccatccaatcgagaccctggtggacatcttccaggagtaccctgatgagatcgagtacatcttcaagccatcctgtgtgcccctgatgcgatgcgggggctgctgcaatgacgagggcctggagtgtgtgcccactgaggagtccaacatcaccatgcagattatgcggatcaaacctcaccaaggccagcacataggagagatgagcttcctacagcacaacaaatgtgaatgcagaccaaagaaagatagagcaagacaagaaaatccctgtgggccttgctcagagcggagaaagcatttgtttgtacaagatccgcagacgtgtaaatgttcctgcaaaaacacagactcgcgttgcaaggcgaggcagcttgagttaaacgaacgtacttgcagatctctcaccaggaaagactgatacagaacgatcgatacagaaaccacgctg

SEQ ID NO: 198913 - DNA, 784 bp, Homo sapiens
  Payload ID: 19239
  Gene Name: vascular endothelial growth factor A
  Uniprot ID: P15692
  ENST ID: ENST00000523873
  CDS Start-End: 39-737
gcgcgagccgcgccggccccggtcgggcctccgaaaccatgaactttctgctgtcttgggtgcattggagccttgccttgctgctctacctccaccatgccaagtggtcccaggctgcacccatggcagaaggaggagggcagaatcatcacgaagtggtgaagttcatggatgtctatcagcgcagctactgccatccaatcgagaccctggtggacatcttccaggagtaccctgatgagatcgagtacatcttcaagccatcctgtgtgcccctgatgcgatgcgggggctgctgcaatgacgagggcctggagtgtgtgcccactgaggagtccaacatcaccatgcagattatgcggatcaaacctcaccaaggccagcacataggagagatgagcttcctacagcacaacaaatgtgaatgcagaccaaagaaagatagagcaagacaagaaaaaaaatcagttcgaggaaagggaaaggggcaaaaacgaaagcgcaagaaatcccggtataagtcctggagcgtgtacgttggtgcccgctgctgtctaatgccctggagcctccctggcccccatccctgtgggccttgctcagagcggagaaagcatttgtttgtacaagatccgcagacgtgtaaatgttcctgcaaaaacacagactcgcgttgcaaggcgaggcagcttgagttaaacgaacgtacttgcagatgtgacaagccgaggcggtgagccgggcaggaggaaggagcctccctcagggtttcgggaaccagatc

SEQ ID NO: 198914 - DNA, 970 bp, Homo sapiens
  Payload ID: 19239
  Gene Name: vascular endothelial growth factor A
  ENST ID: ENST00000519767
  CDS Start-End: 1-970
ccgcgggcaggggccggagcccgcgcccggaggcggggtggagggggtcggggctcgcggcgtcgcactgaaacttttcgtccaacttctgggctgttctcgcttcggaggagccgtggtccgcgcgggggaagccgagccgagcggagccgcgagaagtgctagctcgggccgggaggagccgcagccggaggagggggaggaggaagaagagaaggaagaggagagggggccgcagtggcgactcggcgctcggaagccgggctcatggacgggtgaggcggcggtgtgcgcagacagtgctccagccgcgcgcgctccccaggccctggcccgggcctcgggccggggaggaagagtagctcgccgaggcgccgaggagagcgggccgccccacagcccgagccggagagggagcgcgagccgcgccggccccggtcgggcctccgaaaccatgaactttctgctgtcttgggtgcattggagccttgccttgctgctctacctccaccatgccaagtggtcccaggctgcacccatggcagaaggaggagggcagaatcatcacgaagtggtgaagttcatggatgtctatcagcgcagctactgccatccaatcgagaccctggtggacatcttccaggagtaccctgatgagatcgagtacatcttcaagccatcctgtgtgcccctgatgcgatgcgggggctgctgcaatgacgagggcctggagtgtgtgcccactgaggagtccaacatcaccatgcagattatgcggatcaaacctcaccaaggccagcacataggagagatgagcttcctacagcacaacaaatgtgaatgcagaccaaagaaagatagagcaagacaagaaaaaaaatcagttcgaggaaagggaaaggggcaaaaacgaaagcgcaagaaatcccggtataagtcctggagcgtatgtgacaagccgaggcggtga

SEQ ID NO: 198915 - DNA, 630 bp, Homo sapiens
  Payload ID: 19239
  Gene Name: vascular endothelial growth factor A
  Uniprot ID: P15692
  ENST ID: ENST00000518689
  CDS Start-End: 1-630
atgaactttctgctgtcttgggtgcattggagccttgccttgctgctctacctccaccatgccaagtggtcccaggctgcacccatggcagaaggaggagggcagaatcatcacgaagtggtgaagttcatggatgtctatcagcgcagctactgccatccaatcgagaccctggtggacatcttccaggagtaccctgatgagatcgagtacatcttcaagccatcctgtgtgcccctgatgcgatgcgggggctgctgcaatgacgagggcctggagtgtgtgcccactgaggagtccaacatcaccatgcagattatgcggatcaaacctcaccaaggccagcacataggagagatgagcttcctacagcacaacaaatgtgaatgcagaccaaagaaagatagagcaagacaagaaaaaaaatcagttcgaggaaagggaaaggggcaaaaacgaaagcgcaagaaatcccgtccctgtgggccttgctcagagcggagaaagcatttgtttgtacaagatccgcagacgtgtaaatgttcctgcaaaaacacagactcgcgttgcaaggcgaggcagcttgagttaaacgaacgtacttgcagatgtgacaagccgaggcggtga

SEQ ID NO: 198916 - DNA, 3404 bp, Homo sapiens
  Payload ID: 19239
  Gene Name: vascular endothelial growth factor A
  ENST ID: ENST00000615393
  CDS Start-End: 499-1482
tcgcggaggcttggggcagccgggtagctcggaggtcgtggcgctgggggctagcaccagcgctctgtcgggaggcgcagcggttaggtggaccggtcagcggactcaccggccagggcgctcggtgctggaatttgatattcattgatccgggttttatccctcttcttttttcttaaacatttttttttaaaactgtattgtttctcgttttaatttatttttgcttgccattccccacttgaatcgggccgacggcttggggagattgctctacttccccaaatcactgtggattttggaaaccagcagaaagaggaaagaggtagcaagagctccagagagaagtcgaggaagagagagacggggtcagagagagcgcgcgggcgtgcgagcagcgaaagcgacaggggcaaagtgagtgacctgcttttgggggtgaccgccggagcgcggcgtgagccctcccccttgggatcccgcagctgaccagtcgcgctgacggacagacagacagacaccgcccccagccccagctaccacctcctccccggccggcggcggacagtggacgcggcggcgagccgcgggcaggggccggagcccgcgcccggaggcggggtggagggggtcggggctcgcggcgtcgcactgaaacttttcgtccaacttctgggctgttctcgcttcggaggagccgtggtccgcgcgggggaagccgagccgagcggagccgcgagaagtgctagctcgggccgggaggagccgcagccggaggagggggaggaggaagaagagaaggaagaggagagggggccgcagtggcgactcggcgctcggaagccgggctcatggacgggtgaggcggcggtgtgcgcagacagtgctccagccgcgcgcgctccccaggccctggcccgggcctcgggccggggaggaagagtagctcgccgaggcgccgaggagagcgggccgccccacagcccgagccggagagggagcgcgagccgcgccggccccggtcgggcctccgaaaccatgaactttctgctgtcttgggtgcattggagccttgccttgctgctctacctccaccatgccaagtggtcccaggctgcacccatggcagaaggaggagggcagaatcatcacgaagtggtgaagttcatggatgtctatcagcgcagctactgccatccaatcgagaccctggtggacatcttccaggagtaccctgatgagatcgagtacatcttcaagccatcctgtgtgcccctgatgcgatgcgggggctgctgcaatgacgagggcctggagtgtgtgcccactgaggagtccaacatcaccatgcagattatgcggatcaaacctcaccaaggccagcacataggagagatgagcttcctacagcacaacaaatgtgaatgcagaccaaagaaagatagagcaagacaagaaaaatgtgacaagccgaggcggtgagccgggcaggaggaaggagcctccctcagggtttcgggaaccagatctctcaccaggaaagactgatacagaacgatcgatacagaaaccacgctgccgccaccacaccatcaccatcgacagaacagtccttaatccagaaacctgaaatgaaggaagaggagactctgcgcagagcactttgggtccggagggcgagactccggcggaagcattcccgggcgggtgacccagcacggtccctcttggaattggattcgccattttatttttcttgctgctaaatcaccgagcccggaagattagagagttttatttctgggattcctgtagacacacccacccacatacatacatttatatatatatatattatatatatataaaaataaatatctctattttatatatataaaatatatatattctttttttaaattaacagtgctaatgttattggtgtcttcactggatgtatttgactgctgtggacttgagttgggaggggaatgttcccactcagatcctgacagggaagaggaggagatgagagactctggcatgatcttttttttgtcccacttggtggggccagggtcctctcccctgcccaggaatgtgcaaggccagggcatgggggcaaatatgacccagttttgggaacaccgacaaacccagccctggcgctgagcctctctaccccaggtcagacggacagaaagacagatcacaggtacagggatgaggacaccggctctgaccaggagtttggggagcttcaggacattgctgtgctttggggattccctccacatgctgcacgcgcatctcgcccccaggggcactgcctggaagattcaggagcctgggcggccttcgcttactctcacctgcttctgagttgcccaggagaccactggcagatgtcccggcgaagagaagagacacattgttggaagaagcagcccatgacagctccccttcctgggactcgccctcatcctcttcctgctccccttcctggggtgcagcctaaaaggacctatgtcctcacaccattgaaaccactagttctgtccccccaggagacctggttgtgtgtgtgtgagtggttgaccttcctccatcccctggtccttcccttcccttcccgaggcacagagagacagggcaggatccacgtgcccattgtggaggcagagaaaagagaaagtgttttatatacggtacttatttaatatccctttttaattagaaattaaaacagttaatttaattaaagagtagggttttttttcagtattcttggttaatatttaatttcaactatttatgagatgtatcttttgctctctcttgctctcttatttgtaccggtttttgtatataaaattcatgtttccaatctctctctccctgatcggtgacagtcactagcttatcttgaacagatatttaattttgctaacactcagctctgccctccccgatcccctggctccccagcacacattcctttgaaataaggtttcaatatacatctacatactatatatatatttggcaacttgtatttgtgtgtatatatatatatatatgtttatgtatatatgtgattctgataaaatagacattgctattctgttttttatatgtaaaaacaaaacaagaaaaaatagagaattctacatactaaatctctctccttttttaattttaatatttgttatcatttatttattggtgctactgtttatccgtaataattgtggggaaaagatattaacatcacgtctttgtctctagtgcagtttttcgagatattccgtagtacatatttatttttaaacaacgacaaagaaatacagatatatcttaaaaaaaaaaaagcattttgtattaaagaatttaattctgatctc

SEQ ID NO: 198917 - DNA, 3659 bp, Homo sapiens
  Payload ID: 19239
  Gene Name: vascular endothelial growth factor A
  ENST ID: ENST00000611736
  CDS Start-End: 499-1737
tcgcggaggcttggggcagccgggtagctcggaggtcgtggcgctgggggctagcaccagcgctctgtcgggaggcgcagcggttaggtggaccggtcagcggactcaccggccagggcgctcggtgctggaatttgatattcattgatccgggttttatccctcttcttttttcttaaacatttttttttaaaactgtattgtttctcgttttaatttatttttgcttgccattccccacttgaatcgggccgacggcttggggagattgctctacttccccaaatcactgtggattttggaaaccagcagaaagaggaaagaggtagcaagagctccagagagaagtcgaggaagagagagacggggtcagagagagcgcgcgggcgtgcgagcagcgaaagcgacaggggcaaagtgagtgacctgcttttgggggtgaccgccggagcgcggcgtgagccctcccccttgggatcccgcagctgaccagtcgcgctgacggacagacagacagacaccgcccccagccccagctaccacctcctccccggccggcggcggacagtggacgcggcggcgagccgcgggcaggggccggagcccgcgcccggaggcggggtggagggggtcggggctcgcggcgtcgcactgaaacttttcgtccaacttctgggctgttctcgcttcggaggagccgtggtccgcgcgggggaagccgagccgagcggagccgcgagaagtgctagctcgggccgggaggagccgcagccggaggagggggaggaggaagaagagaaggaagaggagagggggccgcagtggcgactcggcgctcggaagccgggctcatggacgggtgaggcggcggtgtgcgcagacagtgctccagccgcgcgcgctccccaggccctggcccgggcctcgggccggggaggaagagtagctcgccgaggcgccgaggagagcgggccgccccacagcccgagccggagagggagcgcgagccgcgccggccccggtcgggcctccgaaaccatgaactttctgctgtcttgggtgcattggagccttgccttgctgctctacctccaccatgccaagtggtcccaggctgcacccatggcagaaggaggagggcagaatcatcacgaagtggtgaagttcatggatgtctatcagcgcagctactgccatccaatcgagaccctggtggacatcttccaggagtaccctgatgagatcgagtacatcttcaagccatcctgtgtgcccctgatgcgatgcgggggctgctgcaatgacgagggcctggagtgtgtgcccactgaggagtccaacatcaccatgcagattatgcggatcaaacctcaccaaggccagcacataggagagatgagcttcctacagcacaacaaatgtgaatgcagaccaaagaaagatagagcaagacaagaaaaaaaatcagttcgaggaaagggaaaggggcaaaaacgaaagcgcaagaaatcccggtataagtcctggagcgtgtacgttggtgcccgctgctgtctaatgccctggagcctccctggcccccatccctgtgggccttgctcagagcggagaaagcatttgtttgtacaagatccgcagacgtgtaaatgttcctgcaaaaacacagactcgcgttgcaaggcgaggcagcttgagttaaacgaacgtacttgcagatgtgacaagccgaggcggtgagccgggcaggaggaaggagcctccctcagggtttcgggaaccagatctctcaccaggaaagactgatacagaacgatcgatacagaaaccacgctgccgccaccacaccatcaccatcgacagaacagtccttaatccagaaacctgaaatgaaggaagaggagactctgcgcagagcactttgggtccggagggcgagactccggcggaagcattcccgggcgggtgacccagcacggtccctcttggaattggattcgccattttatttttcttgctgctaaatcaccgagcccggaagattagagagttttatttctgggattcctgtagacacacccacccacatacatacatttatatatatatatattatatatatataaaaataaatatctctattttatatatataaaatatatatattctttttttaaattaacagtgctaatgttattggtgtcttcactggatgtatttgactgctgtggacttgagttgggaggggaatgttcccactcagatcctgacagggaagaggaggagatgagagactctggcatgatcttttttttgtcccacttggtggggccagggtcctctcccctgcccaggaatgtgcaaggccagggcatgggggcaaatatgacccagttttgggaacaccgacaaacccagccctggcgctgagcctctctaccccaggtcagacggacagaaagacagatcacaggtacagggatgaggacaccggctctgaccaggagtttggggagcttcaggacattgctgtgctttggggattccctccacatgctgcacgcgcatctcgcccccaggggcactgcctggaagattcaggagcctgggcggccttcgcttactctcacctgcttctgagttgcccaggagaccactggcagatgtcccggcgaagagaagagacacattgttggaagaagcagcccatgacagctccccttcctgggactcgccctcatcctcttcctgctccccttcctggggtgcagcctaaaaggacctatgtcctcacaccattgaaaccactagttctgtccccccaggagacctggttgtgtgtgtgtgagtggttgaccttcctccatcccctggtccttcccttcccttcccgaggcacagagagacagggcaggatccacgtgcccattgtggaggcagagaaaagagaaagtgttttatatacggtacttatttaatatccctttttaattagaaattaaaacagttaatttaattaaagagtagggttttttttcagtattcttggttaatatttaatttcaactatttatgagatgtatcttttgctctctcttgctctcttatttgtaccggtttttgtatataaaattcatgtttccaatctctctctccctgatcggtgacagtcactagcttatcttgaacagatatttaattttgctaacactcagctctgccctccccgatcccctggctccccagcacacattcctttgaaataaggtttcaatatacatctacatactatatatatatttggcaacttgtatttgtgtgtatatatatatatatatgtttatgtatatatgtgattctgataaaatagacattgctattctgttttttatatgtaaaaacaaaacaagaaaaaatagagaattctacatactaaatctctctccttttttaattttaatatttgttatcatttatttattggtgctactgtttatccgtaataattgtggggaaaagatattaacatcacgtctttgtctctagtgcagtttttcgagatattccgtagtacatatttatttttaaacaacgacaaagaaatacagatatatcttaaaaaaaaaaaagcattttgtattaaagaatttaattctgatctc

SEQ ID NO: 198918 - DNA, 3536 bp, Homo sapiens
  Payload ID: 19239
  Gene Name: vascular endothelial growth factor A
  ENST ID: ENST00000621747
  CDS Start-End: 499-1614
tcgcggaggcttggggcagccgggtagctcggaggtcgtggcgctgggggctagcaccagcgctctgtcgggaggcgcagcggttaggtggaccggtcagcggactcaccggccagggcgctcggtgctggaatttgatattcattgatccgggttttatccctcttcttttttcttaaacatttttttttaaaactgtattgtttctcgttttaatttatttttgcttgccattccccacttgaatcgggccgacggcttggggagattgctctacttccccaaatcactgtggattttggaaaccagcagaaagaggaaagaggtagcaagagctccagagagaagtcgaggaagagagagacggggtcagagagagcgcgcgggcgtgcgagcagcgaaagcgacaggggcaaagtgagtgacctgcttttgggggtgaccgccggagcgcggcgtgagccctcccccttgggatcccgcagctgaccagtcgcgctgacggacagacagacagacaccgcccccagccccagctaccacctcctccccggccggcggcggacagtggacgcggcggcgagccgcgggcaggggccggagcccgcgcccggaggcggggtggagggggtcggggctcgcggcgtcgcactgaaacttttcgtccaacttctgggctgttctcgcttcggaggagccgtggtccgcgcgggggaagccgagccgagcggagccgcgagaagtgctagctcgggccgggaggagccgcagccggaggagggggaggaggaagaagagaaggaagaggagagggggccgcagtggcgactcggcgctcggaagccgggctcatggacgggtgaggcggcggtgtgcgcagacagtgctccagccgcgcgcgctccccaggccctggcccgggcctcgggccggggaggaagagtagctcgccgaggcgccgaggagagcgggccgccccacagcccgagccggagagggagcgcgagccgcgccggccccggtcgggcctccgaaaccatgaactttctgctgtcttgggtgcattggagccttgccttgctgctctacctccaccatgccaagtggtcccaggctgcacccatggcagaaggaggagggcagaatcatcacgaagtggtgaagttcatggatgtctatcagcgcagctactgccatccaatcgagaccctggtggacatcttccaggagtaccctgatgagatcgagtacatcttcaagccatcctgtgtgcccctgatgcgatgcgggggctgctgcaatgacgagggcctggagtgtgtgcccactgaggagtccaacatcaccatgcagattatgcggatcaaacctcaccaaggccagcacataggagagatgagcttcctacagcacaacaaatgtgaatgcagaccaaagaaagatagagcaagacaagaaaatccctgtgggccttgctcagagcggagaaagcatttgtttgtacaagatccgcagacgtgtaaatgttcctgcaaaaacacagactcgcgttgcaaggcgaggcagcttgagttaaacgaacgtacttgcagatgtgacaagccgaggcggtgagccgggcaggaggaaggagcctccctcagggtttcgggaaccagatctctcaccaggaaagactgatacagaacgatcgatacagaaaccacgctgccgccaccacaccatcaccatcgacagaacagtccttaatccagaaacctgaaatgaaggaagaggagactctgcgcagagcactttgggtccggagggcgagactccggcggaagcattcccgggcgggtgacccagcacggtccctcttggaattggattcgccattttatttttcttgctgctaaatcaccgagcccggaagattagagagttttatttctgggattcctgtagacacacccacccacatacatacatttatatatatatatattatatatatataaaaataaatatctctattttatatatataaaatatatatattctttttttaaattaacagtgctaatgttattggtgtcttcactggatgtatttgactgctgtggacttgagttgggaggggaatgttcccactcagatcctgacagggaagaggaggagatgagagactctggcatgatcttttttttgtcccacttggtggggccagggtcctctcccctgcccaggaatgtgcaaggccagggcatgggggcaaatatgacccagttttgggaacaccgacaaacccagccctggcgctgagcctctctaccccaggtcagacggacagaaagacagatcacaggtacagggatgaggacaccggctctgaccaggagtttggggagcttcaggacattgctgtgctttggggattccctccacatgctgcacgcgcatctcgcccccaggggcactgcctggaagattcaggagcctgggcggccttcgcttactctcacctgcttctgagttgcccaggagaccactggcagatgtcccggcgaagagaagagacacattgttggaagaagcagcccatgacagctccccttcctgggactcgccctcatcctcttcctgctccccttcctggggtgcagcctaaaaggacctatgtcctcacaccattgaaaccactagttctgtccccccaggagacctggttgtgtgtgtgtgagtggttgaccttcctccatcccctggtccttcccttcccttcccgaggcacagagagacagggcaggatccacgtgcccattgtggaggcagagaaaagagaaagtgttttatatacggtacttatttaatatccctttttaattagaaattaaaacagttaatttaattaaagagtagggttttttttcagtattcttggttaatatttaatttcaactatttatgagatgtatcttttgctctctcttgctctcttatttgtaccggtttttgtatataaaattcatgtttccaatctctctctccctgatcggtgacagtcactagcttatcttgaacagatatttaattttgctaacactcagctctgccctccccgatcccctggctccccagcacacattcctttgaaataaggtttcaatatacatctacatactatatatatatttggcaacttgtatttgtgtgtatatatatatatatatgtttatgtatatatgtgattctgataaaatagacattgctattctgttttttatatgtaaaaacaaaacaagaaaaaatagagaattctacatactaaatctctctccttttttaattttaatatttgttatcatttatttattggtgctactgtttatccgtaataattgtggggaaaagatattaacatcacgtctttgtctctagtgcagtttttcgagatattccgtagtacatatttatttttaaacaacgacaaagaaatacagatatatcttaaaaaaaaaaaagcattttgtattaaagaatttaattctgatctc

SEQ ID NO: 198919 - DNA, 3374 bp, Homo sapiens
  Payload ID: 19239
  Gene Name: vascular endothelial growth factor A
  ENST ID: ENST00000617771
  CDS Start-End: 499-1452
tcgcggaggcttggggcagccgggtagctcggaggtcgtggcgctgggggctagcaccagcgctctgtcgggaggcgcagcggttaggtggaccggtcagcggactcaccggccagggcgctcggtgctggaatttgatattcattgatccgggttttatccctcttcttttttcttaaacatttttttttaaaactgtattgtttctcgttttaatttatttttgcttgccattccccacttgaatcgggccgacggcttggggagattgctctacttccccaaatcactgtggattttggaaaccagcagaaagaggaaagaggtagcaagagctccagagagaagtcgaggaagagagagacggggtcagagagagcgcgcgggcgtgcgagcagcgaaagcgacaggggcaaagtgagtgacctgcttttgggggtgaccgccggagcgcggcgtgagccctcccccttgggatcccgcagctgaccagtcgcgctgacggacagacagacagacaccgcccccagccccagctaccacctcctccccggccggcggcggacagtggacgcggcggcgagccgcgggcaggggccggagcccgcgcccggaggcggggtggagggggtcggggctcgcggcgtcgcactgaaacttttcgtccaacttctgggctgttctcgcttcggaggagccgtggtccgcgcgggggaagccgagccgagcggagccgcgagaagtgctagctcgggccgggaggagccgcagccggaggagggggaggaggaagaagagaaggaagaggagagggggccgcagtggcgactcggcgctcggaagccgggctcatggacgggtgaggcggcggtgtgcgcagacagtgctccagccgcgcgcgctccccaggccctggcccgggcctcgggccggggaggaagagtagctcgccgaggcgccgaggagagcgggccgccccacagcccgagccggagagggagcgcgagccgcgccggccccggtcgggcctccgaaaccatgaactttctgctgtcttgggtgcattggagccttgccttgctgctctacctccaccatgccaagtggtcccaggctgcacccatggcagaaggaggagggcagaatcatcacgaagtggtgaagttcatggatgtctatcagcgcagctactgccatccaatcgagaccctggtggacatcttccaggagtaccctgatgagatcgagtacatcttcaagccatcctgtgtgcccctgatgcgatgcgggggctgctgcaatgacgagggcctggagtgtgtgcccactgaggagtccaacatcaccatgcagattatgcggatcaaacctcaccaaggccagcacataggagagatgagcttcctacagcacaacaaatgtgaatgcagatgtgacaagccgaggcggtgagccgggcaggaggaaggagcctccctcagggtttcgggaaccagatctctcaccaggaaagactgatacagaacgatcgatacagaaaccacgctgccgccaccacaccatcaccatcgacagaacagtccttaatccagaaacctgaaatgaaggaagaggagactctgcgcagagcactttgggtccggagggcgagactccggcggaagcattcccgggcgggtgacccagcacggtccctcttggaattggattcgccattttatttttcttgctgctaaatcaccgagcccggaagattagagagttttatttctgggattcctgtagacacacccacccacatacatacatttatatatatatatattatatatatataaaaataaatatctctattttatatatataaaatatatatattctttttttaaattaacagtgctaatgttattggtgtcttcactggatgtatttgactgctgtggacttgagttgggaggggaatgttcccactcagatcctgacagggaagaggaggagatgagagactctggcatgatcttttttttgtcccacttggtggggccagggtcctctcccctgcccaggaatgtgcaaggccagggcatgggggcaaatatgacccagttttgggaacaccgacaaacccagccctggcgctgagcctctctaccccaggtcagacggacagaaagacagatcacaggtacagggatgaggacaccggctctgaccaggagtttggggagcttcaggacattgctgtgctttggggattccctccacatgctgcacgcgcatctcgcccccaggggcactgcctggaagattcaggagcctgggcggccttcgcttactctcacctgcttctgagttgcccaggagaccactggcagatgtcccggcgaagagaagagacacattgttggaagaagcagcccatgacagctccccttcctgggactcgccctcatcctcttcctgctccccttcctggggtgcagcctaaaaggacctatgtcctcacaccattgaaaccactagttctgtccccccaggagacctggttgtgtgtgtgtgagtggttgaccttcctccatcccctggtccttcccttcccttcccgaggcacagagagacagggcaggatccacgtgcccattgtggaggcagagaaaagagaaagtgttttatatacggtacttatttaatatccctttttaattagaaattaaaacagttaatttaattaaagagtagggttttttttcagtattcttggttaatatttaatttcaactatttatgagatgtatcttttgctctctcttgctctcttatttgtaccggtttttgtatataaaattcatgtttccaatctctctctccctgatcggtgacagtcactagcttatcttgaacagatatttaattttgctaacactcagctctgccctccccgatcccctggctccccagcacacattcctttgaaataaggtttcaatatacatctacatactatatatatatttggcaacttgtatttgtgtgtatatatatatatatatgtttatgtatatatgtgattctgataaaatagacattgctattctgttttttatatgtaaaaacaaaacaagaaaaaatagagaattctacatactaaatctctctccttttttaattttaatatttgttatcatttatttattggtgctactgtttatccgtaataattgtggggaaaagatattaacatcacgtctttgtctctagtgcagtttttcgagatattccgtagtacatatttatttttaaacaacgacaaagaaatacagatatatcttaaaaaaaaaaaagcattttgtattaaagaatttaattctgatctc

SEQ ID NO: 198920 - DNA, 1380 bp, Homo sapiens
  Payload ID: 19240
  Gene Name: vascular endothelial growth factor B
  Uniprot ID: P49765
  ENST ID: ENST00000309422
  CDS Start-End: 297-920
atgagccgcctgcccgccagcccgggcccagccccccgccgcccccgccgtccccgccgccgctgcccgccgccaccggccgcccgcccgcccggctcctccggccgcctccgctgcgctgcgctgcgctgcctgcacccagggctcgggagggggccgcggaggagtcgccccccgcgcccggcccccgcccgccgcgcccgggcccgcgccatggggctctggctgtcgccgccccccgcgccgccgggctagggcgatgcgggcgcccccggcgggcggccccggcgggcaccatgagccctctgctccgccgcctgctgctcgccgcactcctgcagctggcccccgcccaggcccctgtctcccagcctgatgcccctggccaccagaggaaagtggtgtcatggatagatgtgtatactcgcgctacctgccagccccgggaggtggtggtgcccttgactgtggagctcatgggcaccgtggccaaacagctggtgcccagctgcgtgactgtgcagcgctgtggtggctgctgccctgacgatggcctggagtgtgtgcccactgggcagcaccaagtccggatgcagatcctcatgatccggtacccgagcagtcagctgggggagatgtccctggaagaacacagccagtgtgaatgcagacctaaaaaaaaggacagtgctgtgaagccagacagggctgccactccccaccaccgtccccagccccgttctgttccgggctgggactctgcccccggagcaccctccccagctgacatcacccatcccactccagccccaggcccctctgcccacgctgcacccagcaccaccagcgccctgacccccggacctgccgctgccgctgccgacgccgcagcttcctccgttgccaagggcggggcttagagctcaacccagacacctgcaggtgccggaagctgcgaaggtgacacatggcttttcagactcagcagggtgacttgcctcagaggctatatcccagtgggggaacaaagaggagcctggtaaaaaacagccaagcccccaagacctcagcccaggcagaagctgctctaggacctgggcctctcagagggctcttctgccatcccttgtctccctgaggccatcatcaaacaggacagagttggaagaggagactgggaggcagcaagaggggtcacataccagctcaggggagaatggagtactgtctcagtttctaaccactctgtgcaagtaagcatcttacaactggctcttcctcccctcactaagaagacccaaacctctgcataatgggatttgggctttggtacaagaactgtgacccccaaccctgataaaagagatggaaggagctgtc

SEQ ID NO: 198921 - DNA, 979 bp, Homo sapiens
  Payload ID: 19240
  Gene Name: vascular endothelial growth factor B
  Uniprot ID: P49765
  ENST ID: ENST00000426086
  CDS Start-End: 15-581
ccccggcgggcaccatgagccctctgctccgccgcctgctgctcgccgcactcctgcagctggcccccgcccaggcccctgtctcccagcctgatgcccctggccaccagaggaaagtggtgtcatggatagatgtgtatactcgcgctacctgccagccccgggaggtggtggtgcccttgactgtggagctcatgggcaccgtggccaaacagctggtgcccagctgcgtgactgtgcagcgctgtggtggctgctgccctgacgatggcctggagtgtgtgcccactgggcagcaccaagtccggatgcagatcctcatgatccggtacccgagcagtcagctgggggagatgtccctggaagaacacagccagtgtgaatgcagacctaaaaaaaaggacagtgctgtgaagccagacagccccaggcccctctgcccacgctgcacccagcaccaccagcgccctgacccccggacctgccgctgccgctgccgacgccgcagcttcctccgttgccaagggcggggcttagagctcaacccagacacctgcaggtgccggaagctgcgaaggtgacacatggcttttcagactcagcagggtgacttgcctcagaggctatatcccagtgggggaacaaagaggagcctggtaaaaaacagccaagcccccaagacctcagcccaggcagaagctgctctaggacctgggcctctcagagggctcttctgccatcccttgtctccctgaggccatcatcaaacaggacagagttggaagaggagactgggaggcagcaagaggggtcacataccagctcaggggagaatggagtactgtctcagtttctaaccactctgtgcaagtaagcatcttacaactggctcttcctcccctcactaagaagacccaaacctctgcataatgggatttgggctttggtacaagaactgtgacccccaaccctgataaaa

SEQ ID NO: 198922 - DNA, 225 bp, Homo sapiens
  Payload ID: 19240
  Gene Name: vascular endothelial growth factor B
  ENST ID: ENST00000541681
  CDS Start-End: 1-98
cccacgctgcacccagcaccaccagcgccctgacccccggacctgccgctgccgctgccgacgccgcagcttcctccgttgccaagggcggggcttagagctcaacccagacacctgcagctgctggcacctggagctgtataagcaagtccaacattctaactcaggagtcagatacaggagggacaatgccagcagaggatgtcaagggctgtggtgaggggt

SEQ ID NO: 198923 - DNA, 2064 bp, Homo sapiens
  Payload ID: 19241
  Gene Name: vascular endothelial growth factor C
  Uniprot ID: P49767
  ENST ID: ENST00000618562
  CDS Start-End: 417-1676
gaggagggggacgagggctctggcgggtttggaggggctgaacatcgcggggtgttctggtgtcccccgccccgcctctccaaaaagctacaccgacgcggaccgcggcggcgtcctccctcgccctcgcttcacctcgcgggctccgaatgcggggagctcggatgtccggtttcctgtgaggcttttacctgacacccgccgcctttccccggcactggctgggagggcgccctgcaaagttgggaacgcggagccccggacccgctcccgccgcctccggctcgcccagggggggtcgccgggaggagcccgggggagagggaccaggaggggcccgcggcctcgcaggggcgcccgcgcccccacccctgcccccgccagcggaccggtcccccacccccggtccttccaccatgcacttgctgggcttcttctctgtggcgtgttctctgctcgccgctgcgctgctcccgggtcctcgcgaggcgcccgccgccgccgccgccttcgagtccggactcgacctctcggacgcggagcccgacgcgggcgaggccacggcttatgcaagcaaagatctggaggagcagttacggtctgtgtccagtgtagatgaactcatgactgtactctacccagaatattggaaaatgtacaagtgtcagctaaggaaaggaggctggcaacataacagagaacaggccaacctcaactcaaggacagaagagactataaaatttgctgcagcacattataatacagagatcttgaaaagtattgataatgagtggagaaagactcaatgcatgccacgggaggtgtgtatagatgtggggaaggagtttggagtcgcgacaaacaccttctttaaacctccatgtgtgtccgtctacagatgtgggggttgctgcaatagtgaggggctgcagtgcatgaacaccagcacgagctacctcagcaagacgttatttgaaattacagtgcctctctctcaaggccccaaaccagtaacaatcagttttgccaatcacacttcctgccgatgcatgtctaaactggatgtttacagacaagttcattccattattagacgttccctgccagcaacactaccacagtgtcaggcagcgaacaagacctgccccaccaattacatgtggaataatcacatctgcagatgcctggctcaggaagattttatgttttcctcggatgctggagatgactcaacagatggattccatgacatctgtggaccaaacaaggagctggatgaagagacctgtcagtgtgtctgcagagcggggcttcggcctgccagctgtggaccccacaaagaactagacagaaactcatgccagtgtgtctgtaaaaacaaactcttccccagccaatgtggggccaaccgagaatttgatgaaaacacatgccagtgtgtatgtaaaagaacctgccccagaaatcaacccctaaatcctggaaaatgtgcctgtgaatgtacagaaagtccacagaaatgcttgttaaaaggaaagaagttccaccaccaaacatgcagctgttacagacggccatgtacgaaccgccagaaggcttgtgagccaggattttcatatagtgaagaagtgtgtcgttgtgtcccttcatattggaaaagaccacaaatgagctaagattgtactgttttccagttcatcgattttctattatggaaaactgtgttgccacagtagaactgtctgtgaacagagagacccttgtgggtccatgctaacaaagacaaaagtctgtctttcctgaaccatgtggataactttacagaaatggactggagctcatctgcaaaaggcctcttgtaaagactggttttctgccaatgaccaaacagccaagattttcctcttgtgatttctttaaaagaatgactatataatttatttccactaaaaatattgtttctgcattcatttttatagcaacaacaattggtaaaactcactgtgatcaatatttttatatcatgcaaaatatgtttaaaataaaatgaaaattgtattataa

SEQ ID NO: 198924 - DNA, 3948 bp, Homo sapiens
  Payload ID: 19242
  Gene Name: vascular endothelial zinc finger 1
  ENST ID: ENST00000258963
  CDS Start-End: 1-1022
atctcaatcgacacaagctctcccattcagatgagaaaccctttgagtgtcctatttgtaatcagcgcttcaagaggaaggaccggatgacttaccatgtgaggtctcatgaaggaggcatcaccaaaccctatacttgcagtgtttgtgggaaaggcttctcaaggcctgaccacttaagctgtcatgtaaaacatgtccattcaacagaaagacccttcaaatgccaattttcctccctcatgcagacgtgcactgctgcctttgccaccaaagacagactgcggacacacatggtgcgccatgaaggcaaggtatcatgtaacatctgtgggaagctcctgagtgcagcatacatcaccagccacttaaagactcatgggcagagccaaagtatcaactgtaatacatgtaaacaaggcatcagtaaaacatgcatgagtgaagagaccagtaaccaaaagcagcagcagcagcagcagcagcagcagcagcagcagcaacaacaacaacaacaacatgtgacaagctggccagggaagcaagtagaaacactgagactgtgggaagaagctgttaaagcaaggaagaaagaagctgctaacctgtgccaaacctccacggctgctacgacacctgtgactctcactactccattcagtataacatcctctgtgtcgtctgggactatgtcaaacccagtcacagtggcagctgcaatgagcatgagaagtccagtaaatgtttcaagtgcagttaacataaccagcccaatgaacatagggcatcctgtaactataaccagtccattatccatgacctctcctttaacactcactaccccagtcaacctccccacccccgtcactgccccagtgaatatagcacaccctgtcaccatcacatctccaatgaatctacccacacctatgacattagccgcccctctcaatatagcaatgagacctgtagagagcatgcctttcttgccccaagctttgcctacatcaccgccttggtaaacagtattataaaatcaaaatatgggtaaaagtaaatatttaccagcaacttaacttttagttgattaaagcaaaaagtaaaccatgaaattgggagattttattacattagttaataagagtgtggtagcatttttctccaatttggctgggattattcaaagtagggtgtgtatgtaacttatcactggaccactttagtttaatcagaaattccttttagctgacaacattgcttaaacaggatagtagttggcaagatgaaatgccagaattaaaaccaatcataagtagaacccacttcaaaataaaaaaacagcattactatttctaatcccaaggaatcactttattgtaaacactagcagaactcttctccctatacaaggtggatggctgattttaacctgaaattttaaatccacagattgagagctagtgtagaattgtctgtgtttattgtttttatgagtaaatacatgcattgtcataataaaatgcatttcagagaatatgcattttacctttgggaatatgttaatttcaggcagcattccctatgggaaaggtgataccagctctgatatgcaaagcatatgataatttatcattctaacttcaacgtataatagggattgtgacctgatatttggagatgtaaatattgctcagcatattaatcccgatggaatatagcattgtagttgactttttaaaaaaaaaaaaaatttaaaaaaaatctacaaattgtgttttgctaagaaaagcctcaactgacagaggagaagtcaagtgtgtggacaggcaagctcctaataaacagagtccagtgggattcctatttaggagccaaggagtactttggaacagtacaaatatattgctttaaattggaagacgctggaggcactgggatgtgatatgcccctctctctcccaatcagagcctgttgatattacaacagggacagatgtgttagttgctcactagagtttatgtcttatattaaattgtatacagtttttattctaaccactaactaggtagtgtatgccccttcagaacatgcagagtgtatctttttttaaatttctccttccgtttcttaagtattgcgcagatttgttcaactttgtaaatatggacatcactttttttttctttgagaaaacacttgtatcagctttgtggtgttttcagggagacagctgtctgcattccctgtagaaacccagcaatgattatgcacgttgagacatgtgctttttatttcttagcaagatattttatctctgtacataaagtagaaaccaaaagctagggaaacagatactctttacaccatcatgccacgcattgtttttaaagcattgcgttaaaaaaaaaattaactaaaccaagatgctgtgattttttaagttgcaatatgtttttggtttttttcattttttaatcattgcagttaagagaaatggaaattagttgtgttaatcttgcagaatgtttgcaggactgactatcaaactggatgatttccatttataccctactgtgtcagttcaagcatcaaaataccttgcatctgagacagacttcctacatcagggacaggtatctgtgtgtcattatacaaaacagttctagggggttgaactacatagtaaaaaaataaaataaatagtacttagtgtaaaataattttataaatgatcttttgtactttaggacattaaattgtacaacttttgtatatataaaagcttaggaactttctgtttagcaggaaggcaacacattcctacacttttaatgtatatgtttgttataatgtccatgtaaacatgccctatgtttgtgccttttaattagtttgtctcaataaacaaaatgtagagaaaaatatgtagctatgactttgttacaactgttcttatccacagtacaaaaatggtttgtttttaatatgtagagcattatgtgtggactactggaaggactcgtgtagggaaagcccaagaatgaccttgctgaggcctggattgggaggcacagtggccacatttggaggaagttcacatttcctggcatgcagacccaaaactgggttctggctctgcctgctgggatctgttatctctggtgggctggcagtcataattcacaattcagacagcccaggcttcctccacagtggtccaaggagcagtcctcagtgggggcaggtgtgggccctacccctaagctagaatgtggttgtcagaaccctgaaagtattagttctaaaaaaaaaaagatatatactagaagtaattgttttatcaattcattgtataataaacaggagtgagacttcattgtatgacttcagttaaaatactattttgtatgcattctttattcacttaagaagcttgtctgcaataataaagccacgtcatgtcttcttttgggagggagagagtcgatggcaggagggggttttgggtgggccactgaaaaggggtaccgaataggttgtgtgatgaaattctgtgtcttggaactggaattgagtttcgatgttgatgaactgattcaaccaggtgttgaaggcacgacagccactgctctacgaaaaggcagagtacgtttttcccttctggttgtaacctggttgagagcttcccctttatcagattggcagctaaacagttgtattagataatccttaaatctgacatccagcctgttacgctctagggctcgctgcttggcctgcgtttgctttttattgtgtatccgttcccctcctacggtgtgctcctgaatgaaggtttctatgtaagcagatgatgattttacctgtcaataccagcactgtattactaacatgcaaaatactgcagatttattttgaaaattaaagttaactggtcacaaatgtta

SEQ ID NO: 198925 - DNA, 2321 bp, Homo sapiens
  Payload ID: 19242
  Gene Name: vascular endothelial zinc finger 1
  Uniprot ID: Q14119
  ENST ID: ENST00000581208
  CDS Start-End: 42-1607
agcggggggagtggggaggaggggggtcggccgccgcagccatggaggccaactggaccgcgttcctgttccaggcccatgaagcttcccatcaccaacagcaggcagcacagaacagcttgctgcccctcctgagctctgccgtggagccccctgatcagaaaccattgcttccaataccaataactcagaaacctcagggtgcaccagaaacattaaaggatgccattgggattaaaaaagaaaaacccaaaacttcatttgtgtgcacttactgcagtaaagctttcagggacagctatcacctgaggcgccacgaatcctgccacacagggatcaagttggtgtcccggccaaagaaaacccccaccacggtggttccccttatctctaccatcgctggggacagcagccgaacttcgttggtctcgaccattgcaggcatcttgtcaacagtcactacatcttcctcgggcaccaaccccagtagcagtgccagcaccacagctatgccagtgacccagtctgtcaagaaacccagtaagcctgtcaagaagaaccatgcttgtgagatgtgtgggaaggccttccgagatgtgtaccatctcaatcgacacaagctctcccattcagatgagaaaccctttgagtgtcctatttgtaatcagcgcttcaagaggaaggaccggatgacttaccatgtgaggtctcatgaaggaggcatcaccaaaccctatacttgcagtgtttgtgggaaaggcttctcaaggcctgaccacttaagctgtcatgtaaaacatgtccattcaacagaaagacccttcaaatgccaaacgtgcactgctgcctttgccaccaaagacagactgcggacacacatggtgcgccatgaaggcaaggtatcatgtaacatctgtgggaagctcctgagtgcagcatacatcaccagccacttaaagactcatgggcagagccaaagtatcaactgtaatacatgtaaacaaggcatcagtaaaacatgcatgagtgaagagaccagtaaccaaaagcagcagcagcagcagcagcagcagcagcagcagcagcaacaacaacaacaacaacatgtgacaagctggccagggaagcaagtagaaacactgagactgtgggaagaagctgttaaagcaaggaagaaagaagctgctaacctgtgccaaacctccacggctgctacgacacctgtgactctcactactccattcagtataacatcctctgtgtcgtctgggactatgtcaaacccagtcacagtggcagctgcaatgagcatgagaagtccagtaaatgtttcaagtgcagttaacataaccagcccaatgaacatagggcatcctgtaactataaccagtccattatccatgacctctcctttaacactcactaccccagtcaacctccccacccccgtcactgccccagtgaatatagcacaccctgtcaccatcacatctccaatgaatctacccacacctatgacattagccgcccctctcaatatagcaatgagacctgtagagagcatgcctttcttgccccaagctttgcctacatcaccgccttggtaaacagtattataaaatcaaaatatgggtaaaagtaaatatttaccagcaacttaacttttagttgattaaagcaaaaagtaaaccatgaaattgggagattttattacattagttaataagagtgtggtagcatttttctccaatttggctgggattattcaaagtagggtgtgtatgtaacttatcactggaccactttagtttaatcagaaattccttttagctgacaacattgcttaaacaggatagtagttggcaagatgaaatgccagaattaaaaccaatcataagtagaacccacttcaaaataaaaaaacagcattactatttctaatcccaaggaatcactttattgtaaacactagcagaactcttctccctatacaaggtggatggctgattttaacctgaaattttaaatccacagattgagagctagtgtagaattgtctgtgtttattgtttttatgagtaaatacatgcattgtcataataaaatgcatttcagagaatatgcattttacctttgggaatatgttaatttcaggcagcattccctatgggaaaggtgataccagctctgatatgcaaagcatatgataatttatcattctaacttcaacgtataatagggattgtgacctgatatttggagatgtaaatattgctcagcatattaatcccgatggaatatagcattgtagttgacttttt

SEQ ID NO: 198926 - DNA, 825 bp, Homo sapiens
  Payload ID: 19242
  Gene Name: vascular endothelial zinc finger 1
  ENST ID: ENST00000583932
  CDS Start-End: 777-825
cggaagtggccgcgctcggcgctgccatgttgaggagccgccgctgccgttgccgccgccgccgccgccgctttgttgtcgcctcctccggctgaggaggctccccgagcggggggagtggggaggaggggggtcggccgccgcagccatggaggccaactggaccgcgttcctgttccagctattaaaatctttttttccacctgatggagaagtgtgaaaacaaatatttaatcctgggcttggcaatgtgtgcagtgaaatttgttggaaaacttaaaatttagagccgagagcagttgaatgggtaaagagaatatttcagtcttttctatggaaaggcccatgaagcttcccatcaccaacagcaggcagcacagaacagcttgctgcccctcctgagctctgccgtggagccccctgatcagaaaccattgcttccaataccaataactcagaaacctcagggtgcaccagaaacattaaaggatgccattgggattaaaaaagaaaaacccaaaacttcatttgtgtgcacttactgcagtaaagctttcagggacagctatcacctgaggcgccacgaatcctgccacacagggatcaagttggtgtcccggccaaagaaaacccccaccacggtggttccccttatctctaccatcgctggggacagcagccgaacttcgttggtctcgaccattgcaggcatcttgtcaacagtcactacatcttcctcgggcaccaaccccagtagcagtgccagcaccacagctatgccagtgacccagtctgtcaagaaacccagtaagcctgtcaagaaga

SEQ ID NO: 198927 - DNA, 2342 bp, Homo sapiens
  Payload ID: 19242
  Gene Name: vascular endothelial zinc finger 1
  ENST ID: ENST00000584396
  CDS Start-End: 90-1628
cagggacctggtgtgaccctcctgtgagagtgagcttcagcaatgctgtaaaaatactttatgttgccacagacatctgaattggtaaaatggcagcccatgaagcttcccatcaccaacagcaggcagcacagaacagcttgctgcccctcctgagctctgccgtggagccccctgatcagaaaccattgcttccaataccaataactcagaaacctcagggtgcaccagaaacattaaaggatgccattgggattaaaaaagaaaaacccaaaacttcatttgtgtgcacttactgcagtaaagctttcagggacagctatcacctgaggcgccacgaatcctgccacacagggatcaagttggtgtcccggccaaagaaaacccccaccacggtggttccccttatctctaccatcgctggggacagcagccgaacttcgttggtctcgaccattgcaggcatcttgtcaacagtcactacatcttcctcgggcaccaaccccagtagcagtgccagcaccacagctatgccagtgacccagtctgtcaagaaacccagtaagcctgtcaagaagaaccatgcttgtgagatgtgtgggaaggccttccgagatgtgtaccatctcaatcgacacaagctctcccattcagatgagaaaccctttgagtgtcctatttgtaatcagcgcttcaagaggaaggaccggatgacttaccatgtgaggtctcatgaaggaggcatcaccaaaccctatacttgcagtgtttgtgggaaaggcttctcaaggcctgaccacttaagctgtcatgtaaaacatgtccattcaacagaaagacccttcaaatgccaaacgtgcactgctgcctttgccaccaaagacagactgcggacacacatggtgcgccatgaaggcaaggtatcatgtaacatctgtgggaagctcctgagtgcagcatacatcaccagccacttaaagactcatgggcagagccaaagtatcaactgtaatacatgtaaacaaggcatcagtaaaacatgcatgagtgaagagaccagtaaccaaaagcagcagcagcagcagcagcagcagcagcagcagcagcaacaacaacaacaacaacatgtgacaagctggccagggaagcaagtagaaacactgagactgtgggaagaagctgttaaagcaaggaagaaagaagctgctaacctgtgccaaacctccacggctgctacgacacctgtgactctcactactccattcagtataacatcctctgtgtcgtctgggactatgtcaaacccagtcacagtggcagctgcaatgagcatgagaagtccagtaaatgtttcaagtgcagttaacataaccagcccaatgaacatagggcatcctgtaactataaccagtccattatccatgacctctcctttaacactcactaccccagtcaacctccccacccccgtcactgccccagtgaatatagcacaccctgtcaccatcacatctccaatgaatctacccacacctatgacattagccgcccctctcaatatagcaatgagacctgtagagagcatgcctttcttgccccaagctttgcctacatcaccgccttggtaaacagtattataaaatcaaaatatgggtaaaagtaaatatttaccagcaacttaacttttagttgattaaagcaaaaagtaaaccatgaaattgggagattttattacattagttaataagagtgtggtagcatttttctccaatttggctgggattattcaaagtagggtgtgtatgtaacttatcactggaccactttagtttaatcagaaattccttttagctgacaacattgcttaaacaggatagtagttggcaagatgaaatgccagaattaaaaccaatcataagtagaacccacttcaaaataaaaaaacagcattactatttctaatcccaaggaatcactttattgtaaacactagcagaactcttctccctatacaaggtggatggctgattttaacctgaaattttaaatccacagattgagagctagtgtagaattgtctgtgtttattgtttttatgagtaaatacatgcattgtcataataaaatgcatttcagagaatatgcattttacctttgggaatatgttaatttcaggcagcattccctatgggaaaggtgataccagctctgatatgcaaagcatatgataatttatcattctaacttcaacgtataatagggattgtgacctgatatttggagatgtaaatattgctcagcatattaatcccgatggaatatagcattgtagttgacttttt

SEQ ID NO: 198928 - DNA, 1581 bp, Homo sapiens
  Payload ID: 19243
  Gene Name: vasoactive intestinal peptide
  Uniprot ID: P01282
  ENST ID: ENST00000367243
  CDS Start-End: 173-682
gggtagagtgagaagcaccagcaggcagtaacagccaacccttagccattgctaagggcagagaactggtggagcctttctcttactcccaggacttcagcacctaagacagctccaaaacaaaccagaacagtcagctccgggggagcacgactgggcgagaggcacagaaatggacaccagaaataaggcccagctccttgtgctcctgactcttctcagtgtgctcttctcacagacttcggcatggcctctttacagggcaccttctgctctcaggttgggtgacagaataccctttgagggagcaaatgaacctgatcaagtttcattaaaagaagacattgacatgttgcaaaatgcattagctgaaaatgacacaccctattatgatgtatccagaaatgccaggcatgctgatggagttttcaccagtgacttcagtaaactcttgggtcaactttctgccaaaaagtaccttgagtctcttatgggaaaacgtgttagtaacatctcagaagaccctgtaccagtcaaacgtcactcagatgcagtcttcactgacaactatacccgccttagaaaacaaatggctgtaaagaaatatttgaactcaattctgaatggaaagaggagcagtgagggagaatctcccgactttccagaagagttagaaaaatgatgaaaaagacctttggagcaaagctgatgacaacttcccagtgaattcttgaaggaaaatgatacgcaacataattaaattttgagttctacataagtaattcaagaaaacaacttcaatatccaaaccaaataaaaatattgtgttgtgaatgttgtgatgtattctagctaatgtaataactgtgaagtttacattgtaaatagtatttgagagttctaaattttgtctttaactcataaaaagcctgcaatttcatatgctgtatatcctttctaacaaaaaaatatatttaatgataagtaaatgctaggttaattccaattatatgagacgtttttggaagagtagtaatagagcaaaattgatgtgtttatttatagagtgtacttaactattcaggagagtagaacagataatcagtgtgtctaaatttgaatgttaagcagatggaatgctgtgttaaataaacctcaaaatgtctaagatagtaacaatgaagataaaaagacattcttccaaaaagattttcagaaaatattatgtgtttccatattttataggcaacctttatttttaatggtgttttaaaaaatctcaaatttggattgctaatcaccaaaggctctctcctgatagtctttcagttaaggagaacgacccctgcttctgacactgaaacttccctttctgcttgtgttaagtatgtgtaaaatgtgaagtgaatgaaacactcagttgttcaataataaatatttttgccataatgactcagaatattgctttggtcatatgagcttccttctgtgaaagtacatttggagacacaactatttttccaaaataattttaagaaatcaaagagagaaaataaagaccttgcttatgattgcagataa

SEQ ID NO: 198929 - DNA, 1584 bp, Homo sapiens
  Payload ID: 19243
  Gene Name: vasoactive intestinal peptide
  Uniprot ID: P01282
  ENST ID: ENST00000367244
  CDS Start-End: 173-685
gggtagagtgagaagcaccagcaggcagtaacagccaacccttagccattgctaagggcagagaactggtggagcctttctcttactcccaggacttcagcacctaagacagctccaaaacaaaccagaacagtcagctccgggggagcacgactgggcgagaggcacagaaatggacaccagaaataaggcccagctccttgtgctcctgactcttctcagtgtgctcttctcacagacttcggcatggcctctttacagggcaccttctgctctcaggttgggtgacagaataccctttgagggagcaaatgaacctgatcaagtttcattaaaagaagacattgacatgttgcaaaatgcattagctgaaaatgacacaccctattatgatgtatccagaaatgccaggcatgctgatggagttttcaccagtgacttcagtaaactcttgggtcaactttctgccaaaaagtaccttgagtctcttatgggaaaacgtgttagcagtaacatctcagaagaccctgtaccagtcaaacgtcactcagatgcagtcttcactgacaactatacccgccttagaaaacaaatggctgtaaagaaatatttgaactcaattctgaatggaaagaggagcagtgagggagaatctcccgactttccagaagagttagaaaaatgatgaaaaagacctttggagcaaagctgatgacaacttcccagtgaattcttgaaggaaaatgatacgcaacataattaaattttgagttctacataagtaattcaagaaaacaacttcaatatccaaaccaaataaaaatattgtgttgtgaatgttgtgatgtattctagctaatgtaataactgtgaagtttacattgtaaatagtatttgagagttctaaattttgtctttaactcataaaaagcctgcaatttcatatgctgtatatcctttctaacaaaaaaatatatttaatgataagtaaatgctaggttaattccaattatatgagacgtttttggaagagtagtaatagagcaaaattgatgtgtttatttatagagtgtacttaactattcaggagagtagaacagataatcagtgtgtctaaatttgaatgttaagcagatggaatgctgtgttaaataaacctcaaaatgtctaagatagtaacaatgaagataaaaagacattcttccaaaaagattttcagaaaatattatgtgtttccatattttataggcaacctttatttttaatggtgttttaaaaaatctcaaatttggattgctaatcaccaaaggctctctcctgatagtctttcagttaaggagaacgacccctgcttctgacactgaaacttccctttctgcttgtgttaagtatgtgtaaaatgtgaagtgaatgaaacactcagttgttcaataataaatatttttgccataatgactcagaatattgctttggtcatatgagcttccttctgtgaaagtacatttggagacacaactatttttccaaaataattttaagaaatcaaagagagaaaataaagaccttgcttatgattgcagataa

SEQ ID NO: 198930 - DNA, 1257 bp, Homo sapiens
  Payload ID: 19243
  Gene Name: vasoactive intestinal peptide
  ENST ID: ENST00000431366
  CDS Start-End: 1-358
agtttcattaaaagaagacattgacatgttgcaaaatgcattagctgaaaatgacacaccctattatgatgtatccagaaatgccaggcatgctgatggagttttcaccagtgacttcagtaaactcttgggtcaactttctgccaaaaagtaccttgagtctcttatgggaaaacgtgttagcagtaacatctcagaagaccctgtaccagtcaaacgtcactcagatgcagtcttcactgacaactatacccgccttagaaaacaaatggctgtaaagaaatatttgaactcaattctgaatggaaagaggagtgagggagaatctcccgactttccagaagagttagaaaaatgatgaaaaagacctttggagcaaagctgatgacaacttcccagtgaattcttgaaggaaaatgatacgcaacataattaaattttgagttctacataagtaattcaagaaaacaacttcaatatccaaaccaaataaaaatattgtgttgtgaatgttgtgatgtattctagctaatgtaataactgtgaagtttacattgtaaatagtatttgagagttctaaattttgtctttaactcataaaaagcctgcaatttcatatgctgtatatcctttctaacaaaaaaatatatttaatgataagtaaatgctaggttaattccaattatatgagacgtttttggaagagtagtaatagagcaaaattgatgtgtttatttatagagtgtacttaactattcaggagagtagaacagataatcagtgtgtctaaatttgaatgttaagcagatggaatgctgtgttaaataaacctcaaaatgtctaagatagtaacaatgaagataaaaagacattcttccaaaaagattttcagaaaatattatgtgtttccatattttataggcaacctttatttttaatggtgttttaaaaaatctcaaatttggattgctaatcaccaaaggctctctcctgatagtctttcagttaaggagaacgacccctgcttctgacactgaaacttccctttctgcttgtgttaagtatgtgtaaaatgtgaagtgaatgaaacactcagttgttcaataataaatatttttgccataatgactcagaatattgctttggtcatatgagcttccttctgtgaaagtacatttggagacacaactatttttccaaaataattttaagaaatcaaagagagaaaataaagaccttgcttatgattgcagataa

SEQ ID NO: 198931 - DNA, 2773 bp, Homo sapiens
  Payload ID: 19244
  Gene Name: vasoactive intestinal peptide receptor 1
  Uniprot ID: P32241
  ENST ID: ENST00000325123
  CDS Start-End: 114-1487
ggggccacagcgccagcgccactctgccaggctcccggccatcgcccgcctggtgcgccgcccgccagctctttgcccgcgcggggccgcccgccgcgggctcagggcagaccatgcgcccgccaagtccgctgcccgcccgctggctatgcgtgctggcaggcgccctcgcctgggcccttgggccggcgggcggccaggcggccaggctgcaggaggagtgtgactatgtgcagatgatcgaggtgcagcacaagcagtgcctggaggaggcccagctggagaatgagacaataggctgcagcaagatgtgggacaacctcacctgctggccagccacccctcggggccaggtagttgtcttggcctgtcccctcatcttcaagctcttctcctccattcaaggccgcaatgtaagccgcagctgcaccgacgaaggctggacgcacctggagcctggcccgtaccccattgcctgtggtttggatgacaaggcagcgagtttggatgagcagcagaccatgttctacggttctgtgaagaccggctacaccattggctacggcctgtccctcgccacccttctggtcgccacagctatcctgagcctgttcaggaagctccactgcacgcggaactacatccacatgcacctcttcatatccttcatcctgagggctgccgctgtcttcatcaaagacttggccctcttcgacagcggggagtcggaccagtgctccgagggctcggtgggctgtaaggcagccatggtctttttccaatattgtgtcatggctaacttcttctggctgctggtggagggcctctacctgtacaccctgcttgccgtctccttcttctctgagcggaagtacttctgggggtacatactcatcggctggggggtacccagcacattcaccatggtgtggaccatcgccaggatccattttgaggattatgggtgctgggacaccatcaactcctcactgtggtggatcataaagggccccatcctcacctccatcttggtaaacttcatcctgtttatttgcatcatccgaatcctgcttcagaaactgcggcccccagatatcaggaagagtgacagcagtccatactcaaggctagccaggtccacactcctgctgatccccctgtttggagtacactacatcatgttcgccttctttccggacaattttaagcctgaagtgaagatggtctttgagctcgtcgtggggtctttccagggttttgtggtggctatcctctactgcttcctcaatggtgaggtgcaggcggagctgaggcggaagtggcggcgctggcacctgcagggcgtcctgggctggaaccccaaataccggcacccgtcgggaggcagcaacggcgccacgtgcagcacgcaggtttccatgctgacccgcgtcagcccaggtgcccgccgctcctccagcttccaagccgaagtctccctggtctgaccaccaggatcccaggggcccaaggcggcccctcccgccccttcccactcaccccggcagacgccggggacagaggcctgcccgggcgcggccagccccggccctgggctcggaggctgcccccggccccctggtctctggtccggacactcctagagaacgcagccctagagcctgcctggagcgtttctagcaagtgagagagatgggagctcctctcctggaggattgcaggtggaactcagtcattagactcctcctccaaaggccccctacgccaatcaagggcaaaaagtctacatactttcatcctgactctgccccctgctggctcttctgcccaattggaggaaagcaaccggtggatcctcaaacaacactggtgtgacctgagggcagaaaggttctgcccgggaaggtcaccagcaccaacaccacggtagtgcctgaaatttcaccattgctgtcaagttcctttgggttaagcattaccactcaggcatttgactgaagatgcagctcactaccctattctctctttacgcttagttatcagctttttaaagtgggttattctggagtttttgtttggagagcacacctatcttagtggttccccaccgaagtggactggcccctgggtcagtctggtgggaggacggtgcaacccaaggactgagggactctgaagcctctgggaaatgagaaggcagccaccagcgaatgctaggtctcggactaagcctacctgctctccaagtctcagtggcttcatctgtcaagtgggatctgtcacaccagccatacttatctctctgtgctgtggaagcaacaggaatcaagagctgccctccttgtccacccacctatgtgccaactgttgtaactaggctcagagatgtgcacccatgggctctgacagaaagcagatacctcaccctgctacacatacaggatttgaactcagatctgtctgataggaatgtgaaagcacggactcttactgctaacttttgtgtatcgtaaccagccagatcctcttggttatttgtttaccacttgtattattaatgccattatccctgaatcccccttgccaccccaccctccctggagtgtggctgaggaggcctccatctcatgtatcatctggataggagcctgctggtcacagcctcctctgtctgcccttcaccccagtggccactcagcttcctacccacacctctgccagaagatcccctcaggactgcaacaggcttgtgcaacaataaatgttggcttgg

SEQ ID NO: 198932 - DNA, 1505 bp, Homo sapiens
  Payload ID: 19244
  Gene Name: vasoactive intestinal peptide receptor 1
  ENST ID: ENST00000443646
  CDS Start-End: 125-262
ctcttagctctggggccacagcgccagcgccactctgccaggctcccggccatcgcccgcctggtgcgccgcccgccagctctttgcccgcgcggggccgcccgccgcgggctcagggcagaccatgcgcccgccaagtccgctgcccgcccgctggctatgcgtgctggcaggcgccctcgcctgggcccttgggccggcggctgcagcaagatgtgggacaacctcacctgctggccagccacccctcggggccaggtagttgtcttggcctgtcccctcatcttcaagctcttctcctccattcaaggccgcaatgtaagccgcagctgcaccgacgaaggctggacgcacctggagcctggcccgtaccccattgcctgtggtttggatgacaaggcagcgagtttggatgagcagcagaccatgttctacggttctgtgaagaccggctacaccattggctacggcctgtccctcgccacccttctggtcgccacagctatcctgagcctgttcaggaagctccactgcacgcggaactacatccacatgcacctcttcatatccttcatcctgagggctgccgctgtcttcatcaaagacttggccctcttcgacagcggggagtcggaccagtgctccgagggctcggtgggctgtaaggcagccatggtctttttccaatattgtgtcatggctaacttcttctggctgctggtggagggcctctacctgtacaccctgcttgccgtctccttcttctctgagcggaagtacttctgggggtacatactcatcggctggggggtacccagcacattcaccatggtgtggaccatcgccaggatccattttgaggattatgggtgctgggacaccatcaactcctcactgtggtggatcataaagggccccatcctcacctccatcttggtaaacttcatcctgtttatttgcatcatccgaatcctgcttcagaaactgcggcccccagatatcaggaagagtgacagcagtccatactcaaggctagccaggtccacactcctgctgatccccctgtttggagtacactacatcatgttcgccttctttccggacaattttaagcctgaagtgaagatggtctttgagctcgtcgtggggtctttccagggttttgtggtggctatcctctactgcttcctcaatggtgaggtgcaggcggagctgaggcggaagtggcggcgctggcacctgcagggcgtcctgggctggaaccccaaataccggcacccgtcgggaggcagcaacggcgccacgtgcagcacgcaggtttccatgctgacccgcgtcagcccaggtgcccgccgctcctccagcttccaagccgaagtctccctggtctgaccaccaggatcccaggggcccaaggcggcccctcccgccccttcccactcaccccggcagacgccggggacagaggcctgcccgggcgcggccagccccggccctgggctcgg

SEQ ID NO: 198933 - DNA, 1002 bp, Homo sapiens
  Payload ID: 19244
  Gene Name: vasoactive intestinal peptide receptor 1
  ENST ID: ENST00000436487
  CDS Start-End: 125-262
ctcttagctctggggccacagcgccagcgccactctgccaggctcccggccatcgcccgcctggtgcgccgcccgccagctctttgcccgcgcggggccgcccgccgcgggctcagggcagaccatgcgcccgccaagtccgctgcccgcccgctggctatgcgtgctggcaggcgccctcgcctgggcccttgggccggcggctgcagcaagatgtgggacaacctcacctgctggccagccacccctcggggccaggtagttgtcttggcctgtcccctcatcttcaagctcttctcctccattcaaggccgcaatgtaagccgcagctgcaccgacgaaggctggacgcacctggagcctggcccgtaccccattgcctgtggtttggatgacaaggcagcgagtttggatgagcagaccatgttctacggttctgtgaagaccggctacaccattggctacggcctgtccctcgccacccttctggtcgccacagctatcctgagcctgttcaggaagctccactgcacgcggaactacatccacatgcacctcttcatatccttcatcctgagggctgccgctgtcttcatcaaagacttggccctcttcgacagcggggagtcggaccagtgctccgagggctcggtgggctgtaaggcagccatggtctttttccaatattgtgtcatggctaacttcttctggctgctggtggagggcctctacctgtacaccctgcttgccgtctccttcttctctgagcggaagtacttctgggggtacatactcatcggctggggggtacccagcacattcaccatggtgtggaccatcgccaggatccattttgaggattatgggtgctgggacaccatcaactcctcactgtggtggatcataaagggccccatcctcacctccatcttggtaaacttcatcctgtttatttgcatcatccgaatcctgcttcagaaactgcggcccccagatatcagg

SEQ ID NO: 198934 - DNA, 3161 bp, Homo sapiens
  Payload ID: 19244
  Gene Name: vasoactive intestinal peptide receptor 1
  Uniprot ID: P32241
  ENST ID: ENST00000433647
  CDS Start-End: 625-1875
attttcccagcttactagtggaaaagcagcttctttcccacagttccagcaaaagccccagggctgatgctcattggcccaggttggggcatgtgaccattggcaagactcccattggccaggcctggggcaggtgctcactactggagccagagcggagtataagccctacccaatcactgaactacgtgggtcaagagtaaaggagctgtggcttccccccaatcagaagggcactggatgatggatgaactctgtgtggtgcgtcttcacactgacaccaggaggataaggaagtgactccctcagctgagtggctggcatgtgccaggctagagcagcttggctatggcagaacatccagccccaccgtgtggacggcagagatgaggaaactggtgtggggttgccggggccagcaaccacttttctaaagccaaagacgcagaaggtgctgccagtccaacgcttcctccatggaggccttcacccacccacacccatctaagagttcccaagacctgttttttctggctattcctagacagccatcacccccactcacatgtcttccacaagggcggccaggcggccaggctgcaggaggagtgtgactatgtgcagatgatcgaggtgcagcacaagcagtgcctggaggaggcccagctggagaatgagacaataggctgcagcaagatgtgggacaacctcacctgctggccagccacccctcggggccaggtagttgtcttggcctgtcccctcatcttcaagctcttctcctccattcaaggccgcaatgtaagccgcagctgcaccgacgaaggctggacgcacctggagcctggcccgtaccccattgcctgtggtttggatgacaaggcagcgagtttggatgagcagcagaccatgttctacggttctgtgaagaccggctacaccattggctacggcctgtccctcgccacccttctggtcgccacagctatcctgagcctgttcaggaagctccactgcacgcggaactacatccacatgcacctcttcatatccttcatcctgagggctgccgctgtcttcatcaaagacttggccctcttcgacagcggggagtcggaccagtgctccgagggctcggtgggctgtaaggcagccatggtctttttccaatattgtgtcatggctaacttcttctggctgctggtggagggcctctacctgtacaccctgcttgccgtctccttcttctctgagcggaagtacttctgggggtacatactcatcggctggggggtacccagcacattcaccatggtgtggaccatcgccaggatccattttgaggattatgggtgctgggacaccatcaactcctcactgtggtggatcataaagggccccatcctcacctccatcttggtaaacttcatcctgtttatttgcatcatccgaatcctgcttcagaaactgcggcccccagatatcaggaagagtgacagcagtccatactcaaggctagccaggtccacactcctgctgatccccctgtttggagtacactacatcatgttcgccttctttccggacaattttaagcctgaagtgaagatggtctttgagctcgtcgtggggtctttccagggttttgtggtggctatcctctactgcttcctcaatggtgaggtgcaggcggagctgaggcggaagtggcggcgctggcacctgcagggcgtcctgggctggaaccccaaataccggcacccgtcgggaggcagcaacggcgccacgtgcagcacgcaggtttccatgctgacccgcgtcagcccaggtgcccgccgctcctccagcttccaagccgaagtctccctggtctgaccaccaggatcccaggggcccaaggcggcccctcccgccccttcccactcaccccggcagacgccggggacagaggcctgcccgggcgcggccagccccggccctgggctcggaggctgcccccggccccctggtctctggtccggacactcctagagaacgcagccctagagcctgcctggagcgtttctagcaagtgagagagatgggagctcctctcctggaggattgcaggtggaactcagtcattagactcctcctccaaaggccccctacgccaatcaagggcaaaaagtctacatactttcatcctgactctgccccctgctggctcttctgcccaattggaggaaagcaaccggtggatcctcaaacaacactggtgtgacctgagggcagaaaggttctgcccgggaaggtcaccagcaccaacaccacggtagtgcctgaaatttcaccattgctgtcaagttcctttgggttaagcattaccactcaggcatttgactgaagatgcagctcactaccctattctctctttacgcttagttatcagctttttaaagtgggttattctggagtttttgtttggagagcacacctatcttagtggttccccaccgaagtggactggcccctgggtcagtctggtgggaggacggtgcaacccaaggactgagggactctgaagcctctgggaaatgagaaggcagccaccagcgaatgctaggtctcggactaagcctacctgctctccaagtctcagtggcttcatctgtcaagtgggatctgtcacaccagccatacttatctctctgtgctgtggaagcaacaggaatcaagagctgccctccttgtccacccacctatgtgccaactgttgtaactaggctcagagatgtgcacccatgggctctgacagaaagcagatacctcaccctgctacacatacaggatttgaactcagatctgtctgataggaatgtgaaagcacggactcttactgctaacttttgtgtatcgtaaccagccagatcctcttggttatttgtttaccacttgtattattaatgccattatccctgaatcccccttgccaccccaccctccctggagtgtggctgaggaggcctccatctcatgtatcatctggataggagcctgctggtcacagcctcctctgtctgcccttcaccccagtggccactcagcttcctacccacacctctgccagaagatcccctcaggactgcaacaggcttgtgcaacaataaatgttggcttgg

SEQ ID NO: 198935 - DNA, 822 bp, Homo sapiens
  Payload ID: 19244
  Gene Name: vasoactive intestinal peptide receptor 1
  ENST ID: ENST00000446673
  CDS Start-End: 73-210
tcgcccgcctggtgcgccgcccgccagctctttgcccgcgcggggccgcccgccgcgggctcagggcagaccatgcgcccgccaagtccgctgcccgcccgctggctatgcgtgctggcaggcgccctcgcctgggcccttgggccggcggctgcagcaagatgtgggacaacctcacctgctggccagccacccctcggggccaggtagttgtcttggcctgtcccctcatcttcaagctcttctcctccattcaaggccgcaatgtaagccgcagctgcaccgacgaaggctggacgcacctggagcctggcccgtaccccattgcctgtggtttggatgacaaggcagcgagtttggatgagcagcagaccatgttctacggttctgtgaagaccggctacaccattggctacggcctgtccctcgccacccttctggtcgccacagctatcctgagcctgttcaggaagctccactgcacgcggaactacatccacatgcacctcttcatatccttcatcctgagggctgccgctgtcttcatcaaagacttggccctcttcgacagcggggagtcggaccagtgctccgagggctcggggtacccagcacattcaccatggtgtggaccatcgccaggatccattttgaggattatgggtgctgggacaccatcaactcctcactgtggtggatcataaagggccccatcctcacctccatcttggtaaacttcatcctgtttatttgcatcatccgaatcctgcttcagaaactgcggcccccagatatcaggaagagtgacagcagtccatactc

SEQ ID NO: 198936 - DNA, 770 bp, Homo sapiens
  Payload ID: 19244
  Gene Name: vasoactive intestinal peptide receptor 1
  ENST ID: ENST00000439731
  CDS Start-End: 114-770
ggggccacagcgccagcgccactctgccaggctcccggccatcgcccgcctggtgcgccgcccgccagctctttgcccgcgcggggccgcccgccgcgggctcagggcagaccatgcgcccgccaagtccgctgcccgcccgctggctatgcgtgctggcaggcgccctcgcctgggcccttgggccggcgggcggccaggcggccaggctgcaggaggagtgtgactatgtgcagatgatcgaggtgcagcacaagcagtgcctggaggaggcccagctggagaatgagacaataggctgcagcaagatgtgggacaacctcacctgctggccagccacccctcggggccaggtagttgtcttggcctgtcccctcatcttcaagctcttctcctccattcaaggccgcaatgtaagccgcagctgcaccgacgaaggctggacgcacctggagcctggcccgtaccccattgcctgtggtttggatgacaaggcagcgagtttggatgagcagcagaccatgttctacggttctgtgaagaccggctacaccattggctacggcctgtccctcgccacccttctggtcgccacagctatcctgagcctgttcaggtgggctgtaaggcagccatggtctttttccaatattgtgtcatggctaacttcttctggctgctggtggagggcctctacctgtacaccctgcttgccgtctccttcttctctgagcggaagtacttctgggggtacatactcatcggctggg

SEQ ID NO: 198937 - DNA, 1393 bp, Homo sapiens
  Payload ID: 19244
  Gene Name: vasoactive intestinal peptide receptor 1
  ENST ID: ENST00000439910
  CDS Start-End: 120-257
agctctggggccacagcgccagcgccactctgccaggctcccggccatcgcccgcctggtgcgccgcccgccagctctttgcccgcgcggggccgcccgccgcgggctcagggcagaccatgcgcccgccaagtccgctgcccgcccgctggctatgcgtgctggcaggcgccctcgcctgggcccttgggccggcggctgcagcaagatgtgggacaacctcacctgctggccagccacccctcggggccaggtagttgtcttggcctgtcccctcatcttcaagctcttctcctccattcaaggccgcaatgtaagccgcagctgcaccgacgaaggctggacgcacctggagcctggcccgtaccccattgcctgtggtttggatgacaaggcagcgagtttggatgaggtgggctgtaaggcagccatggtctttttccaatattgtgtcatggctaacttcttctggctgctggtggagggcctctacctgtacaccctgcttgccgtctccttcttctctgagcggaagtacttctgggggggtacccagcacattcaccatggtgtggaccatcgccaggatccattttgaggattatgggtgctgggacaccatcaactcctcactgtggtggatcataaagggccccatcctcacctccatcttggtaaacttcatcctgtttatttgcatcatccgaatcctgcttcagaaactgcggcccccagatatcaggaagagtgacagcagtccatactcaaggctagccaggtccacactcctgctgatccccctgtttggagtacactacatcatgttcgccttctttccggacaattttaagcctgaagtgaagatggtctttgagctcgtcgtggggtctttccagggttttgtggtggctatcctctactgcttcctcaatggtgaggtgcaggcggagctgaggcggaagtggcggcgctggcacctgcagggcgtcctgggctggaaccccaaataccggcacccgtcgggaggcagcaacggcgccacgtgcagcacgcaggtttccatgctgacccgcgtcagcccaggtgcccgccgctcctccagcttccaagccgaagtctccctggtctgaccaccaggatcccaggggcccaaggcggcccctcccgccccttcccactcaccccggcagacgccggggacagaggcctgcccgggcgcggccagccccggccctgggctcggaggctgcccccggccccctggtctctggtccggacactcctagagaacgcagccctagagcctgcctggagcgtttctagcaagtgagagagatgggagctcctctcctggaggattgcaggtggaactcagtcattagactcctcctcc

SEQ ID NO: 198938 - DNA, 743 bp, Homo sapiens
  Payload ID: 19244
  Gene Name: vasoactive intestinal peptide receptor 1
  ENST ID: ENST00000450274
  CDS Start-End: 364-743
acctcatcctccctggagcaggtctcccgaggcttgaagggccagggcacccaacaggtgctgagcgcgccccaccaggtcacccgggagcagggaacaccaaggaacccagagtcgggcctctttcgagccctcgcttcctctcgcctggcttcttcggcgcgaaggatgaattggggttgttgaaaattgatcaaacaacccgatctctgtcagcgcctggacacttgctgggccccagctcgcagcctgggaagataagtggcacttcctgtctcgtaatcggatttgcgcgcacgaaccctcggagacgcacagggcggccaggcggccaggctgcaggaggagtgtgactatgtgcagatgatcgaggtgcagcacaagcagtgcctggaggaggcccagctggagaatgagacaataggctgcagcaagatgtgggacaacctcacctgctggccagccacccctcggggccaggtagttgtcttggcctgtcccctcatcttcaagctcttctcctccattcaaggccgcaatgtaagccgcagctgcaccgacgaaggctggacgcacctggagcctggcccgtaccccattgcctgtggtttggatgacaaggcagcgagtttggatgagcagcagaccatgttctacggttctgtgaagaccggctacaccattggctacggcctgtccctcgccacccttctggtcgccacagctatcctgagcctgttcag

SEQ ID NO: 198939 - DNA, 2427 bp, Homo sapiens
  Payload ID: 19244
  Gene Name: vasoactive intestinal peptide receptor 1
  Uniprot ID: P32241
  ENST ID: ENST00000438259
  CDS Start-End: 392-1135
ctcttagctctggggccacagcgccagcgccactctgccaggctcccggccatcgcccgcctggtgcgccgcccgccagctctttgcccgcgcggggccgcccgccgcgggctcagggcagaccatgcgcccgccaagtccgctgcccgcccgctggctatgcgtgctggcaggcgccctcgcctgggcccttgggccggcggctgcagcaagatgtgggacaacctcacctgctggccagccacccctcggggccaggtagttgtcttggcctgtcccctcatcttcaagctcttctcctccattcaaggccgcaatgtaagccgcagctgcaccgacgaaggctggacgcacctggagcctggcccgtaccccattgcctgtggtttggatgacaaggcagcgagtttggatgaggtgggctgtaaggcagccatggtctttttccaatattgtgtcatggctaacttcttctggctgctggtggagggcctctacctgtacaccctgcttgccgtctccttcttctctgagcggaagtacttctgggggggtacccagcacattcaccatggtgtggaccatcgccaggatccattttgaggattatgggtgctgggacaccatcaactcctcactgtggtggatcataaagggccccatcctcacctccatcttggtaaacttcatcctgtttatttgcatcatccgaatcctgcttcagaaactgcggcccccagatatcaggaagagtgacagcagtccatactcaaggctagccaggtccacactcctgctgatccccctgtttggagtacactacatcatgttcgccttctttccggacaattttaagcctgaagtgaagatggtctttgagctcgtcgtggggtctttccagggttttgtggtggctatcctctactgcttcctcaatggtgaggtgcaggcggagctgaggcggaagtggcggcgctggcacctgcagggcgtcctgggctggaaccccaaataccggcacccgtcgggaggcagcaacggcgccacgtgcagcacgcaggtttccatgctgacccgcgtcagcccaggtgcccgccgctcctccagcttccaagccgaagtctccctggtctgaccaccaggatcccaggggcccaaggcggcccctcccgccccttcccactcaccccggcagacgccggggacagaggcctgcccgggcgcggccagccccggccctgggctcggaggctgcccccggccccctggtctctggtccggacactcctagagaacgcagccctagagcctgcctggagcgtttctagcaagtgagagagatgggagctcctctcctggaggattgcaggtggaactcagtcattagactcctcctccaaaggccccctacgccaatcaagggcaaaaagtctacatactttcatcctgactctgccccctgctggctcttctgcccaattggaggaaagcaaccggtggatcctcaaacaacactggtgtgacctgagggcagaaaggttctgcccgggaaggtcaccagcaccaacaccacggtagtgcctgaaatttcaccattgctgtcaagttcctttgggttaagcattaccactcaggcatttgactgaagatgcagctcactaccctattctctctttacgcttagttatcagctttttaaagtgggttattctggagtttttgtttggagagcacacctatcttagtggttccccaccgaagtggactggcccctgggtcagtctggtgggaggacggtgcaacccaaggactgagggactctgaagcctctgggaaatgagaaggcagccaccagcgaatgctaggtctcggactaagcctacctgctctccaagtctcagtggcttcatctgtcaagtgggatctgtcacaccagccatacttatctctctgtgctgtggaagcaacaggaatcaagagctgccctccttgtccacccacctatgtgccaactgttgtaactaggctcagagatgtgcacccatgggctctgacagaaagcagatacctcaccctgctacacatacaggatttgaactcagatctgtctgataggaatgtgaaagcacggactcttactgctaacttttgtgtatcgtaaccagccagatcctcttggttatttgtttaccacttgtattattaatgccattatccctgaatcccccttgccaccccaccctccctggagtgtggctgaggaggcctccatctcatgtatcatctggataggagcctgctggtcacagcctcctctgtctgcccttcaccccagtggccactcagcttcctacccacacctctgccagaagatcccctcaggactgcaacaggcttgtgcaacaataaatgttggcttggattggc

SEQ ID NO: 198940 - DNA, 2681 bp, Homo sapiens
  Payload ID: 19244
  Gene Name: vasoactive intestinal peptide receptor 1
  Uniprot ID: P32241
  ENST ID: ENST00000543411
  CDS Start-End: 160-1389
ctcttagctctggggccacagcgccagcgccactctgccaggctcccggccatcgcccgcctggtgcgccgcccgccagctctttgcccgcgcggggccgcccgccgcgggctcagggcagaccatgcgcccgccaagtccgctgcccgcccgctggctatgcgtgctggcaggcgccctcgcctgggcccttgggccggcggctgcagcaagatgtgggacaacctcacctgctggccagccacccctcggggccaggtagttgtcttggcctgtcccctcatcttcaagctcttctcctccattcaaggccgcaatgtaagccgcagctgcaccgacgaaggctggacgcacctggagcctggcccgtaccccattgcctgtggtttggatgacaaggcagcgagtttggatgagcagaccatgttctacggttctgtgaagaccggctacaccattggctacggcctgtccctcgccacccttctggtcgccacagctatcctgagcctgttcaggaagctccactgcacgcggaactacatccacatgcacctcttcatatccttcatcctgagggctgccgctgtcttcatcaaagacttggccctcttcgacagcggggagtcggaccagtgctccgagggctcggtgggctgtaaggcagccatggtctttttccaatattgtgtcatggctaacttcttctggctgctggtggagggcctctacctgtacaccctgcttgccgtctccttcttctctgagcggaagtacttctgggggtacatactcatcggctggggggtacccagcacattcaccatggtgtggaccatcgccaggatccattttgaggattatgggtgctgggacaccatcaactcctcactgtggtggatcataaagggccccatcctcacctccatcttggtaaacttcatcctgtttatttgcatcatccgaatcctgcttcagaaactgcggcccccagatatcaggaagagtgacagcagtccatactcaaggctagccaggtccacactcctgctgatccccctgtttggagtacactacatcatgttcgccttctttccggacaattttaagcctgaagtgaagatggtctttgagctcgtcgtggggtctttccagggttttgtggtggctatcctctactgcttcctcaatggtgaggtgcaggcggagctgaggcggaagtggcggcgctggcacctgcagggcgtcctgggctggaaccccaaataccggcacccgtcgggaggcagcaacggcgccacgtgcagcacgcaggtttccatgctgacccgcgtcagcccaggtgcccgccgctcctccagcttccaagccgaagtctccctggtctgaccaccaggatcccaggggcccaaggcggcccctcccgccccttcccactcaccccggcagacgccggggacagaggcctgcccgggcgcggccagccccggccctgggctcggaggctgcccccggccccctggtctctggtccggacactcctagagaacgcagccctagagcctgcctggagcgtttctagcaagtgagagagatgggagctcctctcctggaggattgcaggtggaactcagtcattagactcctcctccaaaggccccctacgccaatcaagggcaaaaagtctacatactttcatcctgactctgccccctgctggctcttctgcccaattggaggaaagcaaccggtggatcctcaaacaacactggtgtgacctgagggcagaaaggttctgcccgggaaggtcaccagcaccaacaccacggtagtgcctgaaatttcaccattgctgtcaagttcctttgggttaagcattaccactcaggcatttgactgaagatgcagctcactaccctattctctctttacgcttagttatcagctttttaaagtgggttattctggagtttttgtttggagagcacacctatcttagtggttccccaccgaagtggactggcccctgggtcagtctggtgggaggacggtgcaacccaaggactgagggactctgaagcctctgggaaatgagaaggcagccaccagcgaatgctaggtctcggactaagcctacctgctctccaagtctcagtggcttcatctgtcaagtgggatctgtcacaccagccatacttatctctctgtgctgtggaagcaacaggaatcaagagctgccctccttgtccacccacctatgtgccaactgttgtaactaggctcagagatgtgcacccatgggctctgacagaaagcagatacctcaccctgctacacatacaggatttgaactcagatctgtctgataggaatgtgaaagcacggactcttactgctaacttttgtgtatcgtaaccagccagatcctcttggttatttgtttaccacttgtattattaatgccattatccctgaatcccccttgccaccccaccctccctggagtgtggctgaggaggcctccatctcatgtatcatctggataggagcctgctggtcacagcctcctctgtctgcccttcaccccagtggccactcagcttcctacccacacctctgccagaagatcccctcaggactgcaacaggcttgtgcaacaataaatgttggcttggattggc

SEQ ID NO: 198941 - DNA, 3944 bp, Homo sapiens
  Payload ID: 19245
  Gene Name: vasoactive intestinal peptide receptor 2
  Uniprot ID: P41587
  ENST ID: ENST00000262178
  CDS Start-End: 187-1503
gtgcattgagcgcgctccagctgccgggacggagggggcggcccccgcgctcgggcgctcggctacagctgcggggcccgaggtctccgcgcactcgctcccggcccatgctggaggcggcggaaccgcggggacctaggacggaggcggcgggcgctgggcggcccccggcacgctgagctcgggatgcggacgctgctgcctcccgcgctgctgacctgctggctgctcgcccccgtgaacagcattcacccagaatgccgatttcatctggaaatacaggaggaagaaacaaaatgtgcagagcttctgaggtctcaaacagaaaaacacaaagcctgcagtggcgtctgggacaacatcacgtgctggcggcctgccaatgtgggagagaccgtcacggtgccctgcccaaaagtcttcagcaatttttacagcaaagcaggaaacataagcaaaaactgtacgagtgacggatggtcagagacgttcccagatttcgtcgatgcctgtggctacagcgacccggaggatgagagcaagatcacgttttatattctggtgaaggccatttatacactgggctacagtgtctctctgatgtctcttgcaacaggaagcataattctgtgcctcttcaggaagctgcactgcaccaggaattacatccacctgaacctgttcctgtccttcatcctgagagccatctcagtgctggtcaaggacgacgttctctactccagctctggcacgttgcactgccctgaccagccatcctcctgggtgggctgcaagctgagcctggtcttcctgcagtactgcatcatggccaacttcttctggctgctggtggaggggctctacctccacaccctcctggtggccatgctcccccctagaaggtgcttcctggcctacctcctgatcggatggggcctccccaccgtctgcatcggtgcatggactgcggccaggctctacttagaagacaccggttgctgggatacaaacgaccacagtgtgccctggtgggtcatacgaataccgattttaatttccatcatcgtcaattttgtccttttcattagtattatacgaattttgctgcagaagttaacatccccagatgtcggcggcaacgaccagtctcagtacaagaggctggccaagtccacgctcctgcttatcccgctgttcggcgtccactacatggtgtttgccgtgtttcccatcagcatctcctccaaataccagatactgtttgagctgtgcctcgggtcgttccagggcctggtggtggccgtcctctactgtttcctgaacagtgaggtgcagtgcgagctgaagcgaaaatggcgaagccggtgcccgaccccgtccgcgagccgggattacagggtctgcggttcctccttctcccgcaacggctcggagggcgccctgcagttccaccgcggctcccgcgcccagtccttcctgcaaacggagacctcggtcatctagccccacccctgcctgtcggacgcggcgggaggcccacggttcggggcttctgcggggctgagacgccggcttcctccttccagatgcccgagcaccgtgtcgggcaggtcagcgcggtcctgactccgtcaagctggttgtccactaaaccccatacctggaattggagtcgtgttgtcattgactcgatttaaactccagcatttagataatcttgtgcaaaatgtgtttcagccgtatagtggatccacttttttttttttttttttttttgagacggagtctcgctctgtcgcccaggctggactgcagtggcctgatctctgctccctgcaagctccgcctcccgggttcacgccattctcctgcctcagcctcccatagctgggactacaggcgcccgccaacacgcctggctaattttttgtatttttagtagagacagggtttcaccatgttagccaggatggtctcgatctcctgacctcgtgatgggcccgcctcggcctcccaaagtgctgggattaaggcgtgagccactgcgcccggcccaagagaataggggagccaaggaggaaatgtggaaacgcagttgtgtggcccagcacgagcctgggcgaccaccgggtgacatccgtcccacatcagggcggcctcccaggtcccataagggtagccccctcatctgcaggacagagggaagccagtcagggcccccctgacgttaggaccaggagaaatcaacaggagggcagcccgtcctctctcttggggcgcccacccggcccggctgagccctgccccacccaactccacagggctgttttgcctccccacggaaggcgggctgaggagacaaccagatcaggagagcaaggtcatgaaggaggggacctctccacacaggtgttccgtgggaccctcagcagctctggctctgcctcaggaggtcacctgccgccctgtgggagccgcagagcctgacgctcagccccaggccagctgcggccaggcctgcgggcccctggtgatggggttacgtggggtgcgggatacagctgagtgggaaccggaaacctattctctttttaacaaaaataatcttaggataagaattattttaacaacatataaaactgtttcaagccctcctccccagagctggcgctcagcagccctagcggctgctccttcaggcgaagggtggtttgcagatgtggggagggtgtctggggacgttgctgagccagctgcagaagggtggggatatcagggcacagtctccatgtgtgtgccaagccctggcccccacagcgctcgatggacctcagcaagctgcccagccctggcccaggtgccccgactgtgggactcagttgttctgagcacatttgactccacttttcccttaaaaatgaatgtcttgttcctgtgcattggtggcatcacagaccccagctggggcgcgatgtcaaaggtcgggacagctgtgccgggaggcagccacagggaagctcacacatcctgtcagtgtcaccttggtttgcaaaacccatatccccggtaaaatgaggccggacagaggggctgttaggacagcaaagcagcagtgtccagagacccctcaatccccaaaggtccgcaccctgtcctgcacaccctgggccacgccggccacacccctctgctgcaacaagctcatccctggacttctgggagaatgaacccgaggttggtttggggagacaggtgaggcggtcggatctacagaacaacccaccatttctgggggccgcagaggatccatcacagacggatactggggagtaaacggcccaggccaggtgcccaggaaaggacggctgagcatgtggagcgagagggaggcaggtggacgctgcagaccccaggttcagtgcggcccctcggctgttcctcccctgtagggtttggacagacccacccccagccttgcccagctttcaaaggacaaaagggagcatcccccacctactctcaggtttttgaggaaacaaagatttgtggtaactgaaggtgttgggtcagtggccaggtgccgacactgagctgtgacccagaggggacgctgaggaagtgggcgtgagtggacgtgtcaggtggttaccaggcactggttgttgatggtcggtggttgggtgtgggcagtcatcagtcatcaggtgtgctcaggggacaatctcccctcaaccgcacatgtgccactgttcagcggagctgactggtttctcctggtagaggggccggctgtttcctgacagatgcctggtgagcaggggaagcaggacccagtggtcagcaggtgtctttaactgtcattgtgtgtggaatgtcgcagactcctccacgtggcgggaatgagctgtgtaaatacttcaataaagcctgacttcacatctgca

SEQ ID NO: 198942 - DNA, 1491 bp, Homo sapiens
  Payload ID: 19245
  Gene Name: vasoactive intestinal peptide receptor 2
  Uniprot ID: P41587
  ENST ID: ENST00000377633
  CDS Start-End: 62-1330
aaacttcactccccagggctcccatccctggtgacaaagatcacagcagctggcactgcagatgcctttgtgggaggcaccatctgatcatcccgccaaccctcctgcaaccctgcaaggacacaccagcctcccagggtgccaggaggagcctgccagagacccccagagcggcctgccccaaatcacctctgagagcagcagcttttctgaaggaagcctcccctcatggtcctcaggcccagcaggtgccaagctcaatgccagccacgagggcattggctcatcgagtgatgggaacggggacagcaaggcggccacagagagggtggtctcagccatggacacagtacggcggaagcatcccgagatcacgttttatattctggtgaaggccatttatacactgggctacagtgtctctctgatgtctcttgcaacaggaagcataattctgtgcctcttcaggaagctgcactgcaccaggaattacatccacctgaacctgttcctgtccttcatcctgagagccatctcagtgctggtcaaggacgacgttctctactccagctctggcacgttgcactgccctgaccagccatcctcctgggtgggctgcaagctgagcctggtcttcctgcagtactgcatcatggccaacttcttctggctgctggtggaggggctctacctccacaccctcctggtggccatgctcccccctagaaggtgcttcctggcctacctcctgatcggatggggcctccccaccgtctgcatcggtgcatggactgcggccaggctctacttagaagacaccggttgctgggatacaaacgaccacagtgtgccctggtgggtcatacgaataccgattttaatttccatcatcgtcaattttgtccttttcattagtattatacgaattttgctgcagaagttaacatccccagatgtcggcggcaacgaccagtctcagtacaagaggctggccaagtccacgctcctgcttatcccgctgttcggcgtccactacatggtgtttgccgtgtttcccatcagcatctcctccaaataccagatactgtttgagctgtgcctcgggtcgttccagggcctggtggtggccgtcctctactgtttcctgaacagtgaggtgcagtgcgagctgaagcgaaaatggcgaagccggtgcccgaccccgtccgcgagccgggattacagggtctgcggttcctccttctcccgcaacggctcggagggcgccctgcagttccaccgcggctcccgcgcccagtccttcctgcaaacggagacctcggtcatctagccccacccctgcctgtcggacgcggcgggaggcccacggttcggggcttctgcggggctgagacgccggcttcctccttccagatgcccgagcaccgtgtcgggcaggtcagcgcggtcctgactccgtcaagctggttgtccactaaaccccatacctgg

SEQ ID NO: 198943 - DNA, 1926 bp, Homo sapiens
  Payload ID: 19245
  Gene Name: vasoactive intestinal peptide receptor 2
  ENST ID: ENST00000402066
  CDS Start-End: 89-1828
tcccggcccatgctggaggcggcggaaccgcggggacctaggacggaggcggcgggcgctgggcggcccccggcacgctgagctcgggatgcggacgctgctgcctcccgcgctgctgacctgctggctgctcgcccccgtgagtgcgcccgcgacccccgccccacggcgcctcggacccggttctccccttccgagaagagcgctcctcccgccggtcttcgccttcctcccgggtgctggagcgcgggcggggtccgggagagggagcggggtcgcccggggtccggagcttcctcccggagagcgtgaagcgctgagctccggtcccgccgggttgcgggactcgggttgggaggctgcctgcgcccttccccgcgccccaccgtccggggtttgctggaaacgggatcgtttcttcctggacgcgtcaacgatgagctcgttcggggccgtcccgggagctgggagctgcgggcgcctgcgcgggctgcgcgtttcacggggagatcggggttggcgttggccgcagatgcctctcggtccctccctgtacttactggtgaacagcattcacccagaatgccgatttcatctggaaatacaggaggaagaaacaaaatgtgcagagcttctgaggtctcaaacagaaaaacacaaagcctgcagtggcgtctgggacaacatcacgtgctggcggcctgccaatgtgggagagaccgtcacggtgccctgcccaaaagtcttcagcaatttttacagcaaagcaggaaacataagcaaaaactgtacgagtgacggatggtcagagacgttcccagatttcgtcgatgcctgtggctacagcgacccggaggatgagagcaagatcacgttttatattctggtgaaggccatttatacactgggctacagtgtctctctgatgtctcttgcaacaggaagcataattctgtgcctcttcaggaagctgcactgcaccaggaattacatccacctgaacctgttcctgtccttcatcctgagagccatctcagtgctggtcaaggacgacgttctctactccagctctggcacgttgcactgccctgaccagccatcctcctgggtgggctgcaagctgagcctggtcttcctgcagtactgcatcatggccaacttcttctggctgctggtggaggggctctacctccacaccctcctggtggccatgctcccccctagaaggtgcttcctggcctacctcctgatcggatggggcctccccaccgtctgcatcggtgcatggactgcggccaggctctacttagaagacaccggttgctgggatacaaacgaccacagtgtgccctggtgggtcatacgaataccgattttaatttccatcatcgtcaattttgtccttttcattagtattatacgaattttgctgcagaagttaacatccccagatgtcggcggcaacgaccagtctcagtacaagaggctggccaagtccacgctcctgcttatcccgctgttcggcgtccactacatggtgtttgccgtgtttcccatcagcatctcctccaaataccagatactgtttgagctgtgcctcgggtcgttccagggcctggtggtggccgtcctctactgtttcctgaacagtgaggtgcagtgcgagctgaagcgaaaatggcgaagccggtgcccgaccccgtccgcgagccgggattacagggtctgcggttcctccttctcccgcaacggctcggagggcgccctgcagttccaccgcggctcccgcgcccagtccttcctgcaaacggagacctcggtcatctagccccacccctgcctgtcggacgcggcgggaggcccacggttcggggcttctgcggggctgagacgccggcttcctccttccagatgcccgagcaccgt

SEQ ID NO: 198944 - DNA, 717 bp, Homo sapiens
  Payload ID: 19245
  Gene Name: vasoactive intestinal peptide receptor 2
  ENST ID: ENST00000421760
  CDS Start-End: 82-315
ccatgctggaggcggcggaaccgcggggacctaggacggaggcggcgggcgctgggcggcccccggcacgctgagctcgggatgcggacgctgctgcctcccgcgctgctgacctgctggctgctcgcccccgtgaacagcattcacccagaatgccgatttcatctggaaatacaggaggaagaaacaaaatgtgcagagcttctgaggtctcaaacagaaaaacacaaaggccatacaaagggattcatcctcattcacgccggaggtttaaagaggatcctggacccacatacctacccattggctccatgaccagtgcttttataattacaaaatcattgagaaattaagtcacaggaagcctcgtgtgtggtatacactggtgataaagcaagtcccatgcagtctgagatggcaagggaccttctagggaaagggcagtgacccagaagcccgactgctcggctggctcccgcactccgtcctgtggtcagagtgtgtttcctcccctctgtgaacctggtctcctccccagtgtgaggacaggggctctcgccttcttcagggagttgctgggaggacaaaatggagtatatgtaaaagtcatttcctagataagggggagcatgtcgtaagagtctcttgaaatttaattgatgtttatgtcattgacattgaaataatgagaaaataaatccaaatccagagctcaaa

SEQ ID NO: 198945 - DNA, 2305 bp, Homo sapiens
  Payload ID: 19246
  Gene Name: vasodilator-stimulated phosphoprotein
  Uniprot ID: P50552
  ENST ID: ENST00000245932
  CDS Start-End: 357-1499
aaggcgcggggcattgtgggtgcggggagtggaattttggaacgaaatgtaacgaagagaagtacagtagtaagagtaacactgtagccgccaccggcaaggggtgcgcgctggggagcggacgctgcatcccctttctgctgcaggaacctctcatcagaccgcctgagggaagcggcgcccggagacccgccccggcccggtccacattctccccaggaagccggactctatggggcgggaccctgggggagcctgagccgagcccggagccagccccgaacccctgaacctccagccaggggcgccccgggagcagccagcccgtgggcgagccgcccgcccgccgagcagccatgagcgagacggtcatctgttccagccgggccactgtgatgctttatgatgatggcaacaagcgatggctccctgctggcacgggtccccaggccttcagccgcgtccagatctaccacaaccccacggccaattcctttcgcgtcgtgggccggaagatgcagcccgaccagcaggtggtcatcaactgtgccatcgtccggggtgtcaagtataaccaggccacccccaacttccatcagtggcgcgacgctcgccaggtctggggcctcaacttcggcagcaaggaggatgcggcccagtttgccgccggcatggccagtgccctagaggcgttggaaggaggtgggccccctccacccccagcacttcccacctggtcggtcccgaacggcccctccccggaggaggtggagcagcagaaaaggcagcagcccggcccgtcggagcacatagagcgccgggtctccaatgcaggaggcccacctgctccccccgctgggggtccacccccaccaccaggacctccccctcctccaggtccccccccacccccaggtttgcccccttcgggggtcccagctgcagcgcacggagcagggggaggaccaccccctgcaccccctctcccggcagcacagggccctggtggtgggggagctggggccccaggcctggccgcagctattgctggagccaaactcaggaaagtcagcaagcaggaggaggcctcaggggggcccacagcccccaaagctgagagtggtcgaagcggaggtgggggactcatggaagagatgaacgccatgctggcccggagaaggaaagccacgcaagttggggagaaaacccccaaggatgaatctgccaatcaggaggagccagaggccagagtcccggcccagagtgaatctgtgcggagaccctgggagaagaacagcacaaccttgccaaggatgaagtcgtcttcttcggtgaccacttccgagacccaaccctgcacgcccagctccagtgattactcggacctacagagggtgaaacaggagcttctggaagaggtgaagaaggaattgcagaaagtgaaagaggaaatcattgaagccttcgtccaggagctgaggaagcggggttctccctgaccacagggacccagaagacccgcttctcctttccgcacacccggcctgtcaccctgctttccctgcctctacttgacttggaattggctgaagactacacaggaatgcatcgttcccactccccatcccacttggaaaactccaagggggtgtggcttccctgctcacacccacactggctgctgattggctggggaggcccccgcccttttctccctttggtccttcccctctgccatccccttggggccggtccctctgctggggatgcaccaatgaaccccacaggaagggggaaggaaggagggaatttcacattcccttgttctagattcactttaacgcttaatgccttcaaagttttggtttttttaagaaaaaaaaatatatatatatttgggttttgggggaaaagggaaatttttttttctctttggttttgataaaatgggatgtgggagtttttaaatgctatagccctgggcttgccccatttggggcagctatttaaggggaggggatgtctcaccgggctgggggtgagatatccccccaccccagggactccccttccctctggctccttccccttttctatgaggaaataagatgctgtaactttttggaacctcagttttttgattttttatttgggtaggttttggggtccaggccattttttttaccccttggaggaaataagatgagggagaaaggagaaggggaggaaacttctcccctcccaccttcacctttagcttcttgaaaatgggcccctgcagaataaatctgccagtttttataaa

SEQ ID NO: 198946 - DNA, 424 bp, Homo sapiens
  Payload ID: 19246
  Gene Name: vasodilator-stimulated phosphoprotein
  ENST ID: ENST00000592139
  CDS Start-End: 285-424
agagtaacactgtagccgccaccggcaaggggtgcgcgctggggagcggacgctgcatcccctttctgctgcaggaacctctcatcagaccgcctgagggaagcggcgcccggagacccgccccggcccggtccacattctccccaggaagccggactctatggggcgggaccctgggggagcctgagccgagcccggagccagccccgaacccctgaacctccagccaggggcgccccgggagcagccagcccgtgggcgagccgcccgcccgccgagcagccatgagcgagacggtcatctgttccagccgggccactgtgatgctttatgatgatggcaacaagcgatggctccctgctggcacgggtccccaggcctggccgcagctattgctggagccaaactcaggaaagtcagcaag

SEQ ID NO: 198947 - DNA, 804 bp, Homo sapiens
  Payload ID: 19246
  Gene Name: vasodilator-stimulated phosphoprotein
  ENST ID: ENST00000588482
  CDS Start-End: 1-551
gagccaaactcaggaaagtcagcaagcaggaggaggcctcaggggggcccacagcccccaaagctgagagtggtcgaagcggaggtgggggactcatggaagagatgaacgccatgctggcccggagaaggaaagccacgcaagttggggagaaaacccccaaggatgaatctgccaatcaggaggagccagaggccagagtcccggcccagagtgaatctgtgcggagaccctgggagaagaacagcacaaccttgccaaggatgaagtcgtcttcttcggtgaccacttccgagacccaaccctgcacgcccagctccagtgattactcggacctacagagggtgaaacagatgagtgccttgaattctttccgcacattgacccagctgtccatcaccaattggagttggcaggaggctggaatgcgcttgccaaccttggtactggatgttctccagtacttttccggctccaaggatccagaattctcccctagaatcctccagtcactctgcgaccttgacagcgatgtcatggtgtcgatgtaggggagcttctggaagaggtgaagaaggaattgcagaaagtgaaagaggaaatcattgaagccttcgtccaggagctgaggaagcggggttctccctgaccacagggacccagaagacccgcttctcctttccgcacacccggcctgtcaccctgctttccctgcctctacttgacttggaattggctgaagactacacaggaatgcatcgttcccactccccatcccacttggaaaactccaagggggtgtgg

SEQ ID NO: 198948 - DNA, 1725 bp, Homo sapiens
  Payload ID: 19246
  Gene Name: vasodilator-stimulated phosphoprotein
  ENST ID: ENST00000586014
  CDS Start-End: 267-578
ccaccggcaaggggtgcgcgctggggagcggacgctgcatcccctttctgctgcaggaacctctcatcagaccgcctgagggaagcggcgcccggagacccgccccggcccggtccacattctccccaggaagccggactctatggggcgggaccctgggggagcctgagccgagcccggagccagccccgaacccctgaacctccagccaggggcgccccgggagcagccagcccgtgggcgagccgcccgcccgccgagcagccatgagcgagacggtcatctgttccagccgggccactgtgatgctttatgatgatggcaacaagcgatggctccctgctggcacgggtccccaggccttcagccgcgtccagatctaccacaaccccacggccaattcctttcgcgtcgtgggccggaagatgcagcccgaccagcaggtggtcatcaactgtgccatcgtccggggtgtcaactggggccccaggcctggccgcagctattgctggagccaaactcaggaaagtcagcaagcaggaggaggcctcaggggggcccacagcccccaaagctgagagtggtcgaagcggaggtgggggactcatggaagagatgaacgccatgctggcccggagaaggaaagccacgcaagttggggagaaaacccccaaggatgaatctgccaatcaggaggagccagaggccagagtcccggcccagagtgaatctgtgcggagaccctgggagaagaacagcacaaccttgccaaggatgaagtcgtcttcttcggtgaccacttccgagacccaaccctgcacgcccagctccagtgattactcggacctacagagggtgaaacaggagcttctggaagaggtgaagaaggaattgcagaaagtgaaagaggaaatcattgaagccttcgtccaggagctgaggaagcggggttctccctgaccacagggacccagaagacccgcttctcctttccgcacacccggcctgtcaccctgctttccctgcctctacttgacttggaattggctgaagactacacaggaatgcatcgttcccactccccatcccacttggaaaactccaagggggtgtggcttccctgctcacacccacactggctgctgattggctggggaggcccccgcccttttctccctttggtccttcccctctgccatccccttggggccggtccctctgctggggatgcaccaatgaaccccacaggaagggggaaggaaggagggaatttcacattcccttgttctagattcactttaacgcttaatgccttcaaagttttggtttttttaagaaaaaaaaatatatatatatttgggttttgggggaaaagggaaatttttttttctctttggttttgataaaatgggatgtgggagtttttaaatgctatagccctgggcttgccccatttggggcagctatttaaggggaggggatgtctcaccgggctgggggtgagatatccccccaccccagggactccccttccctctggctccttccccttttctatgaggaaataagatgctgtaactttttggaacctcagttttttgattttttatttgggtaggttttggggtccaggccattttttttaccccttggaggaaataagatgagggagaaaggagaaggggaggaaacttctcccctcccaccttcacctttagcttcttg

SEQ ID NO: 198949 - DNA, 696 bp, Homo sapiens
  Payload ID: 19246
  Gene Name: vasodilator-stimulated phosphoprotein
  ENST ID: ENST00000589627
  CDS Start-End: 520-696
actcggggcggggccggcaagacacgctgcggaagcctcagagggtgtctgggctcagcccggagccggcgtgtgggggcgggggctcccgggagggtctcctcacctccgggccctcctgagggctgggatgatcctgctgtcctccgcaggcgaaactgagtcagagcggggcgtgcgtgggccggaggctttacacaccaaagaagccggcgcctcctgcccaccccgggcgaatgccgggccccccactcccgcactcctcgccagtccccacctccaccccaccccacccccgaccctgcggctgaacctctcatcagaccgcctgagggaagcggcgcccggagacccgccccggcccggtccacattctccccaggaagccggactctatggggcgggaccctgggggagcctgagccgagcccggagccagccccgaacccctgaacctccagccaggggcgccccgggagcagccagcccgtgggcgagccgcccgcccgccgagcagccatgagcgagacggtcatctgttccagccgggccactgtgatgctttatgatgatggcaacaagcgatggctccctgctggcacgggtccccaggccttcagccgcgtccagatctaccacaaccccacggccaattcctttcgcgtcgtgggccggaagatgcagcccgaccagcag

SEQ ID NO: 198950 - DNA, 388 bp, Homo sapiens
  Payload ID: 19246
  Gene Name: vasodilator-stimulated phosphoprotein
  ENST ID: ENST00000590603
  CDS Start-End: 282-388
gtaacactgtagccgccaccggcaaggggtgcgcgctggggagcggacgctgcatcccctttctgctgcaggaacctctcatcagaccgcctgagggaagcggcgcccggagacccgccccggcccggtccacattctccccaggaagccggactctatggggcgggaccctgggggagcctgagccgagcccggagccagccccgaacccctgaacctccagccaggggcgccccgggagcagccagcccgtgggcgagccgcccgcccgccgagcagccatgaggcagcagcccggcccgtcggagcacatagagcgccgggtctccaatgcaggaggcccacctgctccccccgctgggggtccacccccaccaccaggacctcc

SEQ ID NO: 198951 - DNA, 5728 bp, Homo sapiens
  Payload ID: 19247
  Gene Name: vasohibin 1
  Uniprot ID: Q7L8A9
  ENST ID: ENST00000167106
  CDS Start-End: 634-1731
gctcccggccagctgcgagtcttggctcccggacttgtctcgtcgcgtcggagaaatcgccccccagcgccgctctcccgcccgggggtcttggttccgagctcgcgcggccgggagtcgcctcggtcttccttggggcgcgcgcagatgtgagcgtgcgagagttgtgtaggggattttgttccctccgaaactgagacccagggcgcccagtgggcacccgtgccttgactctgtcctttctgcagccgctggtccgagctgtctggcctcagtttccctccgacttttctccgctctgccagccctcactgctgcccgtcattgttctcgcagttagatgggggtgctttgtgacggctgccaagttggggtgtgttctctttattccgtttttcaaacagaacaaggcctccaaggctgaccccagacaacccaccccctcggaccctaattcaccttattgcactgattttttttatcaagtcgtattttattgtacaggagccacgccctgatttcttaaaggcgccttgcactctggccatgtgttatctctgcagccggtgtgtgggaggcctcttgtgagccagttgttttcccgcctccaccacccccctcgaagatttagggatgccaggggggaagaaggtggctgggggtggcagcagcggtgccactccaacgtccgctgcggccaccgccccctctggggtcaggcgtttggagaccagcgaaggaacctcagcccagagagatgaggagccagaagaggaaggggaagaggacctgcgagacggaggcgtccccttctttgtcaaccggggtgggctacctgtggatgaggccacctgggaaaggatgtggaaacacgtggccaagatccaccccgatggagagaaggtggcgcaacggatccgtggggccacagacctgcccaagatccccataccgagtgtgcctacgttccagccgtctacacctgtccctgagcgcctggaagctgtgcagcgctacatcagagagctgcagtacaatcacacagggacacagttctttgaaattaagaagagcagacctctgacagggctgatggacctggccaaggaaatgaccaaagaggccctgccaatcaaatgcctggaagccgtgatcctgggaatttacctcaccaacagcatgcccaccctggagcgcttccccatcagcttcaagacctacttctcagggaactacttccgccacatcgtgctgggggtgaacttcgcgggccgctacggtgcgctgggcatgagtcggcgcgaggacctgatgtacaagccgcccgccttccgcacgctcagcgagctcgtgctggacttcgaggccgcctacggccgctgctggcacgtgctcaagaaggtgaagctgggccagagcgtgtcacacgacccgcacagcgtggagcagatcgagtggaagcactcggtgctggacgtggagcgcctgggccgcgatgacttccgcaaggagctggagcgccacgcccgcgacatgcggctcaagattggcaaagggacgggccctccctctcccaccaaggaccggaagaaggatgtttcttccccgcagcgggcccagtccagcccccaccgcaggaacagccgcagtgaaagacggccctcgggtgacaagaagacttccgagcccaaagccatgccagaccttaacgggtaccagatccgggtctgaggcggatgccagcaccccaggccccacccactcttgggggccaggatccacctgctggaaccagccttatgcatggggaaggcggggctggtgacaaggcagggcaagaggctgcaggaagagtgtgttccagctcagccccccaagctgctctcgctcccactgagccaagccccctaactttgggcctagaggccgttagtattttatttggagtttttaactctacaactgaagtttaaggtatttggggaaaacttagtccaaatggatctgctgatggtgggaaggccagtgcttaacaaatccatgtgtcatggggccaggtgagggaaactgctggttctgctggtgcctctgcccctggcttctctctgggagttgggtgcatcttatcagtgggaaatctcccagccttaccaggcctgtgatggggggtgggggtggggtggagatgtttctccagttctgcctgccctggcagaatcttgacccagggaaagggaagcagggtaggagtccttctgagaaaggtctgtgtagcccattaaccaggagcttggcacaggccacatctgccccaagagcatgagctcgtggctcaggagagccttcaggcccttgaggcccccatgggcagtgctgtgtgggcagaggaggggtgatatgagagcgagcccagggaaggacctctgggcaaaaagttcccaggccctaactgcgtctacttgctcagtcccagctctgcctgttgctctagcccacaggctccctgcggagggtctgggcttggcggaggacccagaatggcactgaggccagcatggctgtgggagttgagcaaaccctgggtgccagtccaggagctgtggctggacatggggtgatggggcgggatgcttgggcctgggtctctccgccagcagtgccaggagcccttgctggggaaatcaagaccagactaggatgcttctgccccaggcctgccttccattctttaacagcccatcttggcttggggttgcaatgatggctgggccagtcacttgtggcagggcatcagggccctggcagggaagaacctaggcacctggggttgtccccagcctgcccgtcagcatgagatacccagtgggaaagtgagaggatgcggagaggttggcagagccaggggtaggttctggaggctcaagcaacaaggaggtgcaggtaaagggtgcagtgcagccactgagggacagctgggaactgggggatgcaagtgagaaagggatgtgggggagagttcaggatcaggctgcttgaggagtaatgggttacctacagcagagacgagatggctgtttgtcaggaggcggtagaaaggtagaaaggattcagattgtggaagggtaaacggatgagatgaccattaaggttttgttttactgagaggctgtaagtctgccagggacagctgtcagtaaggctgcagaagggctggggggctacacaaggaagagcagaactagggttgtaagctcaaatgacgagcaaacggtgagaaggaggcctgaagggctgtgtggggactatggctacctgaagagggcacaccctgttaaaggggccacagctgctcagctgttcttacagtgccggccctgtgttgccagattgtctgctttgtcagaggccagaattctgactttttatgtgaaataggatttttaaatgctggtgatcacttaaaaaaaacttaaaaacccaatactggcaaaagaggatgccagtttgcaatccctgaagtagagagagctcgtgctggggagaagtccaccaagatgctttgaggcgggctgtagcaaagtcctgtttctcagagctgggctgggctggggtaggatccttgcagctgaggaggaggaaaagccactgagtctcctcccagagcgggacaaaccagaggccctttgcagttgctgggtcaccagcgggggtggcgcatggagtacagacagtgtagctcttggcctgccagggagacggatggtgcctttgaagcaaagaggaagggaaggcagaaccagggatgcctttgctgatgagagtgcctgtcagggaaggcgccacaggctggcagctcttcaaaccagcagcgcttgacccagagccagatccagcatggcctggccagaggcaccctgggaggccagctggtcagtcccttgcctccccaagttccccctggggtcaatgagccctgggaggatgcctaacctaactccagccagactaataggggcatggtgacccttgactcaccatcccatcccagctttcagggagtgggggtagtgtggtctccatgttcctactatgcctaagaagagatggctcaccttgggaggtgccaggctgaaactaggtcctttccgggtctggatgctgccgctcaggagcaggggcgtggcctcagctgcctctgggagcttcccgggaatgacagggtttgaggggagtagatatgagagggagccgctcctggttctggagtcttaggaggttccaacttgcaggatcctttcccagagccctccatggagaaaacagcaaaatgaagcccttacctgcttgctgtctgcaagggagggagccgagccccagctgataatcccccagcactcacccttcctgagctgagacttcggggctgtggagaccagcacaggacatagtggtgctttttaaatttatttttaactgtttctcatatgtagcaacccctcctcccctcctgggcatgtttacacaggctctgctctgggggctggcctggctgtgaggtttctggggaggcagagaggcagggactttggggccttagtcaccatccatggtatcacctcatctcacttcctgtgagggacagggcctggctgatgtgatcccagctccccccagttcaggactgtctttcagctcctttgcccctggaggtgggggctgctggctgaggaggggtcaaggtgagttcaagaaagctacctgtggaaaatggaccaggttgggggggtgattgcaaagtctccccaaagcctggctcctcatgctcagtgccaggggcagaacactggggagccaggtatagagagccttcctgtcataactgccagtcctcttcctccaaggcctctgcatattctcatgttcccctcacccatcatgccagccacccctatccctcttctagcagggccaagatggggacagcagcagccctctggccttgggatgtgatgataaagcaagcctagggccagggtttggggagcagagagagccaagaagttgaccacgtgtgatttccagcccttcccactgggacttgacttcccaggtcaaggagtccgtctcattctggctggtcgagtgaccagaggcctgtgtgaatgtgtgcacctgcttttcctgcctggaatgttttctggctcagctgcagcaacatctgtgagcccagtgtctgccctgtgtccctgggctcgctccaagtgcaggaacatacatgcagggcccaacatgatgatggtgtgaagggcaggaaacagtcctctgaaggagtggggaggtgggcagtctgcccccgccaggtaccatcgcctcctgccagcttccttagaccaggcagggctgccatggtgctagctgcaagtccatcagtattgaccgtctcgctccatcttggtcctccggagtcccaagtttccttttcatcaaatctgacaagagagaagaaacatgggtgtgcttggcccacagggcctggtggtgatggacctccccgctccctcaagctctggatggctgcagtgttgtactagactttgttcaggctgttctcatctcagtattgccccttcctttcactttcacacttcatctcattcctgttgtcactttccccgaaacgaataaagtctccccagctcctgctgtgtaggctgggcagaaaccacaa

SEQ ID NO: 198952 - DNA, 1462 bp, Homo sapiens
  Payload ID: 19247
  Gene Name: vasohibin 1
  Uniprot ID: Q7L8A9
  ENST ID: ENST00000554237
  CDS Start-End: 494-1108
cgcgcagatgtgagcgtgcgagagttgtgtaggggattttgttccctccgaaactgagacccagggcgcccagtgggcacccgtgccttgactctgtcctttctgcagccgctggtccgagctgtctggcctcagtttccctccgacttttctccgctctgccagccctcactgctgcccgtcattgttctcgcagttagatgggggtgctttgtgacggctgccaagttggggtgtgttctctttattccgtttttcaaacagaacaaggcctccaaggctgaccccagacaacccaccccctcggaccctaattcaccttattgcactgattttttttatcaagtcgtattttattgtacaggagccacgccctgatttcttaaaggcgccttgcactctggccatgtgttatctctgcagccggtgtgtgggaggcctcttgtgagccagttgttttcccgcctccaccacccccctcgaagatttagggatgccaggggggaagaaggtggctgggggtggcagcagcggtgccactccaacgtccgctgcggccaccgccccctctggggtcaggcgtttggagaccagcgaaggaacctcagcccagagagatgaggagccagaagaggaaggggaagaggacctgcgagacggaggcgtccccttctttgtcaaccggggtgggctacctgtggatgaggccacctgggaaaggatgtggaaacacgtggccaagatccaccccgatggagagaaggtggcgcaacggatccgtggggccacagacctgcccaagatccccataccgagtgtgcctacgttccagccgtctacacctgtccctgagcgcctggaagctgtgcagcgctacatcagagagctgcagtacaatcacacagggacacagttctttgaaattaagaagagcagacctctgacagggctgatggacctggccaaggaaatgaccaaagaggccctgccaatcaaatgcctggaagccgtgatcctgggaatgtatccttcctcacctgaaggggaggggtccgggcttctctgggcctcagcttcctgctctgaaagtgagggtggggtaggttgaatgggctccagggctctcccatatgcagtcatctgcttggccccaagatggagaagcaccccactaaagtggaagaaccccccaaaatggaggagccccgaggtcccagtaccccacatctcagttgctaccttcccaggcttactgggcagctcttttttgagtcacgtggatacagggaccgttttctgaaccccaaatcagggcacagtgtctcacaaagacagttgtaccatttccaagaactagacagtctgggaggcacagttggaatgcccagatgttggcatttccagaacatgttgatttctggacgagatattaaagcaaaactgccttaaaaaaaaaaaaaac

SEQ ID NO: 198953 - DNA, 1096 bp, Homo sapiens
  Payload ID: 19247
  Gene Name: vasohibin 1
  ENST ID: ENST00000554743
  CDS Start-End: 456-731
ggatgtttcttccccgcagcgggcccagtccagcccccaccgcaggaacagccgcagtgaaagacggccctcgggtgacaagaagacttccgagcccaaagccatgccagaccttaacgggtaccagatccgggtctgaggcggatgccagcaccccaggccccacccactcttgggggccaggatccacctgctggaaccagccttatgcatggggaaggcggggctggtgacaaggcagggcaagaggctgcaggaagagtgtgttccagctcagccccccaagctgctctcgctcccactgagccaagccccctaactttgggcctagaggccgttagtattttatttggagtttttaactctacaactgaagtttaaggtatttggggaaaacttagtccaaatggatctgctgatggtgggaaggccagtgcttaacaaatccatgtgtcatggggccaggtgagggaaactgctggttctgctggtgcctctgcccctggcttctctctgggagttgggtgcatcttatcagtgggaaatctcccagccttaccaggcctgtgatggggggtgggggtggggtggagatgtttctccagttctgcctgccctggcagaatcttgacccagggaaagggaagcagggtaggagtccttctgagaaaggtctgtgtagcccattaaccaggagcttggcacaggccacatctgccccaagagcatgagctcgtggctcaggagagccttcaggcccttgaggcccccatgggcagtgctgtgtgggcagaggaggggtgatatgagagcgagcccagggaaggacctctgggcaaaaagttcccaggccctaactgcgtctacttgctcagtcccagctctgcctgttgctctagcccacaggctccctgcggagggtctgggcttggcggaggacccagaatggcactgaggccagcatggctgtgggagttgagcaaaccctgggtgccagtccaggagctgtggctggacatggggtgatggggcgggatgcttgggcctgggtctctccgccagcagtgccaggagcccttgctggggaaatcaagac

SEQ ID NO: 198954 - DNA, 2960 bp, Homo sapiens
  Payload ID: 19248
  Gene Name: vasohibin 2
  Uniprot ID: Q86V25
  ENST ID: ENST00000366964
  CDS Start-End: 328-837
ggcgacggccccagcaagccccagcagccccagccccagccccaggcccagcagcagcagcagcagcccctgctctcccgccgcccggagaggctctgcagccatgaagccaaccgtcccgaggcaccgccggtaagcagggagcctccgcggagctcccgccgccgctcccccttggtgagtcctgccgcagcgagaggcatggagaaggccgcccccgcggggcgctgatcccctcgccgcgcccgcgcgcacacgccccccgccgccgccgccgctgccgccgccgcgcgcccccagtacctcgctccccgcccaggccccaccatgaccggctccgcggccgacactcaccgctgcccccaccccaaaggcgccaaaggcacccggtcccggagcagccacgcgcggcccgtgagcctcgccaccagcgggggctcagaggaggaggacaaagacggcggggtgctgttccacgtcaacaagagcggcttccccatcgacagccacacctgggagcgcatgtggatgcacgtggccaaggtgcaccctaaggggggagaaatggtgggcgccatcaggaacgccgccttcttggcaaagccttcaataccccaggtcccaaactacaggctgtcgatgacgatcccagactggctccaggcgatccagaattacatgaagaccctacaatataatcacacagggacccagttctttgaaattaggaaaatgagaccgctgagtgggttaatggaaacagcaaaagaaatgacccgagagtccttgcctatcaaatgccttgaagctgtcatcctgggcataacccacagctaaaacaagggtctagcttctcccacactttctgttccatttttcaccagactcccggctcttcagcctgagaggaatatggtgcagagaaactgtgatggcatcgacatattggtggtgatgaccacctcccttacacaatagtctcatccctgcacaattttatacattcgagcatcatgccattggaatcacccacaaccctttgaaattgtggggatagacccaggaacagcctttgagcctgatctgccacaatcagatagaagagcaaagatgctccgaagtcctatgggatggatggctgtaagggacagtggaaaaggaaacactgcaagacaggagcttgagagatggtcccaggcaagatcagttaggtccttgagcgctgtgctgagaaatgacttttttccaaaaggcaatgggcaacccagatgaaagctctgaagcagaggtgtggcatgcttaggtatatgctctagagaggtagttctccaaagcacaggctgaaggacagattgggaaaggctgggctggatcagcaaagcccgttgggagctgttacatgagggaatggtgaggctagactcatggccctggggatgggaatggatttcagggaatggttttaagagctatcaaggagatagaatgtataggacttgcaggccaaccagacgcaggagttaatgaggaaggagtcaacgtctccaggtttctgaattgggcaatcgactgcgggattagctggaggaatgagagtggcagagaaaggatatgcgtcaatgcagacctgaactaagacagtgccagtgaaggtggagggaagggatggaggcatacatcatcaccaccactaggggactgcttagatgggaggagttattggagaaaggcagtgactccacatttctggcttgcatgataatgccacaagggaagaacttcaaggagaggatcggatttagggaaagatgagctcagatttggacatgtgaaatttgaggtgccttgtgggatgtcggaatgaggtatttgcaatgtggagctcacaggggaatctgcactggaaatgcgaatttaggagctgtgattaggaggttgtgcttactgttcaataagtgaaaggagaaaaagatcaaagatgaaatcagtattttttggtctagtttggcacaaagagcccatgaaagagacttaagaaggaaagagaggtagaaagaaaaccaggagagaaaggggatggagaggtcagtggaaggacatgtggctcagaattagactggggacaggaggattggtctagtctgttttctgggtctcctggacatctttgtgggaaggagaatctctgtgcctctctgcagtctgtggaacacttgcagccctgatctgaaaccagattgaccacaggtgccttggctgacatttgaaaaatggaaacttgaaccttactgaggcccctccccaaccctcttgtcatcctcctccctgtttcccacaaaggagatgaaacatgtgcctggggaacccagcaggaagctgggaatgggggtcggggcagcagatggctcagggccccaactctttagtggcaggagtcagccacagctgttcagcgaagcctcctgcaagtttaatgggggcagatgattggctggggatttgctggtggaagagatcaacgaaggggaacacaagcccaggcccttcatggggtagacaagctaacttcagactctttgttgaggggtgtctgagtgcctctggatttaggtcattgaaatgaccacctcccttacacaatagtctcatccctgcacaattttatacatttgcgcatcatgccactggaatcacccacgaccttttggaattgtggggatagacccaggaacagcctttgagcctgtccaaatcagagacagtgtgctcgtggttttcctttgttcttatccttctgacatttcagaaaagtgcaggaaggtggagagcttcagttcacgctgctgaactcagggaaatttgactcttgcacacagacaggaaacacagatccgaattcttcttcttttttttttttttttgagacggagtcttggtctgtcgcccaagctggagtgcag

SEQ ID NO: 198955 - DNA, 3572 bp, Homo sapiens
  Payload ID: 19248
  Gene Name: vasohibin 2
  Uniprot ID: Q86V25
  ENST ID: ENST00000366965
  CDS Start-End: 311-1246
gccccagcagccccagccccagccccaggcccagcagcagcagcagcagcccctgctctcccgccgcccggagaggctctgcagccatgaagccaaccgtcccgaggcaccgccggtaagcagggagcctccgcggagctcccgccgccgctcccccttggtgagtcctgccgcagcgagaggcatggagaaggccgcccccgcggggcgctgatcccctcgccgcgcccgcgcgcacacgccccccgccgccgccgccgctgccgccgccgcgcgcccccagtacctcgctccccgcccaggccccaccatgaccggctccgcggccgacactcaccgctgcccccaccccaaaggcgccaaaggcacccggtcccggagcagccacgcgcggcccgtgagcctcgccaccagcgggggctcagaggaggaggacaaagacggcggggtgctgttccacgtcaacaagagcggcttccccatcgacagccacacctgggagcgcatgtggatgcacgtggccaaggtgcaccctaaggggggagaaatggtgggcgccatcaggaacgccgccttcttggcaaagccttcaataccccaggtcccaaactacaggctgtcgatgacgatcccagactggctccaggcgatccagaattacatgaagaccctacactacttaaccaatgggcagccttccattgagcggttccccatcagctttaaaacctacttctcaggaaactactttcaccacgttgtgctggggatttactgcaatggccgctatggctcattgggcatgagccgcagggctgagctgatggacaagccattgacttttcggactctgagtgacctcatctttgactttgaggactcttacaagaaatacctgcacacagtcaagaaggtcaagattgggctgtacgtcccccatgagcctcatagcttccagcccattgagtggaagcagctggtcctcaacgtctcaaagatgctgagggctgacataaggaaggagctggagaaatatgccagggacatgagaatgaagatcctgaaacctgcaagtgcccactctccgacccaagtgagaagccggggaaaatccctgtcccccagaaggagacaggcaagccccccgaggaggctcggccggcgagagaagtcgcctgcactgcctgaaaagaaggtggctgatctgagcactctgaatgaagtgggctatcaaatccgaatttagccaagccataccggccagcaagagggtttctgtggtgcttctctctgcactttacccagcatcttcaggaggaactgcaactatttattaagaacttgtgaattttatttttaaggattcacctggaaatagaatctgagtgggtggtaaccattagctttaaaaaattcactaaaaggcaccatgaaaaggctgaagtaataagccccactggggttggactatgtccctcactcaagatcttaaggataaccgtaactgaagttttatatttttccatttacctactttcttttacttgctttgaacattatgcctcaccaatagtaaatgttcatgaaataatctcttgaacttttggtatagtaaggtaactctaacagtattactgtctttttcagcaataacagaaagcaaaaatgggtgggttttttttaagcagttattacctcagcattttgacatcagatatgcaaacttaatggcgttttgtttttttatattctatttgtattctttccccagtatttcccatggggatctccacaagtttggagttttttcctggtgcacacacgtgaggagatttaaggtactatatgcaagtgttttactaaaaagcactgaaattcttctggcaatacaagaaccattttcaggatcttggagttacttccttcttaatctttcttaaagcattcactgatgtttttgttttttcaaaatgaaacaaaaatatcacattgagaagctagtctatgttctgtcactaacatttaaactttgcagactctaacaaaaagcacaagaggtcacgtactattatacaaatttagcggtactggatttacctctgacattaacacactcaggcagagaccaggagtgatcagcaggtcttcagaaccaaaaaacctttctgttcacatttcatctgatttttaaactgaggcaggctttgattcttctgaaggatgccaagaatcaaactaagggaggactcactgttaaagatgtgttctgatgtcttatattaagaccaaatgtgacatgatgtgattatcttccagtactttgcttttaggtaccatttcatgacattttaggaatgagtattggaaaatataaagaattagaaaagcagcactttttttttaatggaaaagtcttcggtccagtgttacaccttatagtgtaattcagtccctaagcacagaatgaatgtctggcctgcatatggtagttacagtgtaacctctggctgcagaccacacaggacaaccctaacagcctagtcttgtatggtgtaaatatcaagagtacagcttcaatttcatttgctttatcttagcaacaatgccaactcaggagagcagacggccgatttcagtgaagtctggtagtcaacagatgttatttcagtctcagtgcatctcctctggctttctttgactgaaggtgtttataggaaggaagttaaaaaaaaaaaaagctcattgagattctttaccaattctttacaagatttctgggggtgacagggaaagcaaaaggacttcaaagcaaaagggtgcacaagagcttacttcaccctgaaaatcagtattattaatgaaaagtactgttttcttaaagaagtcgaatgtcctttagatgaacaagaccaagtatacatctccattagattaaaatgtagcacagggttaaaaattatcagtttaatctctttaagaacagtattatcagagtttaaaatgagttagctctgtttatctacacacagcaaacccattcgcagcctcttggccacatgtattcagatgtttgaaatagtgaatcatttcattttcattctaaaacaatactgacttagccatataccttctgtttgtcaatctgaaacttgcttacatctaataagtagacctcttataacactgcaaccattctaagagttggaatttatttttgccaagtattaagtactgttacatctaaaatacagaatgtcaaatggttgcatagcttgtttcccacaacaaggaggaaaagaacaggaatacaaactctgtaatatgctgataaagaagccttagaactgccaactggcttgatggttcaattagtaagctaatttctcccacacccgctccttgatttttagactaattttcccaaagcaaggtttagtcacacaaacttgaaagtacatttaaaatgttcttagttgtcatcctacttttattgcctatggaatatgctaatttctaaaaaaaatacgggagaggcaccaaacccctaaattctagtgcaataatttaaaaaa

SEQ ID NO: 198956 - DNA, 4224 bp, Homo sapiens
  Payload ID: 19248
  Gene Name: vasohibin 2
  Uniprot ID: Q86V25
  ENST ID: ENST00000366968
  CDS Start-End: 351-1223
attcgagaatgggacatggaatgaggcgacggccccagcaagccccagcagccccagccccagccccaggcccagcagcagcagcagcagcccctgctctcccgccgcccggagaggctctgcagccatgaagccaaccgtcccgaggcaccgccggtaagcagggagcctccgcggagctcccgccgccgctcccccttggcgccaaaggcacccggtcccggagcagccacgcgcggcccgtgagcctcgccaccagcgggggctcagaggaggaggacaaagacggcggggtgctgttccacgtcaacaagagcggcttccccatcgacagccacacctgggagcgcatgtggatgcacgtggccaaggtgcaccctaaggggggagaaatggtgggcgccatcaggaacgccgccttcttggcaaagccttcaataccccaggtcccaaactacaggctgtcgatgacgatcccagactggctccaggcgatccagaattacatgaagaccctacaatataatcacacagggacccagttctttgaaattaggaaaatgagaccgctgagtgggttaatggaaacagcaaaagaaatgacccgagagtccttgcctatcaaatgccttgaagctgtcatcctgggcatctacttaaccaatgggcagccttccattgagcggttccccatcagctttaaaacctacttctcaggaaactactttcaccacgttgtgctggggatttactgcaatggccgctatggctcattgggcatgagccgcagggctgagctgatggacaagccattgacttttcggactctgagtgacctcatctttgactttgaggactcttacaagaaatacctgcacacagtcaagaaggtcaagattgggctgtacgtcccccatgagcctcatagcttccagcccattgagtggaagcagctggtcctcaacgtctcaaagatgctgagggctgacataaggaaggagctggagaaatatgccagggacatgagaatgaagatcctgaaacctgcaagtgcccactctccgacccaagtgagaagccggggaaaatccctgtcccccagaaggagacaggcaagccccccgaggaggctcggccggcgagagaagtcgcctgcactgcctgaaaagaaggtggctgatctgagcactctgaatgaagtgggctatcaaatccgaatttagccaagccataccggccagcaagagggtttctgtggtgcttctctctgcactttacccagcatcttcaggaggaactgcaactatttattaagaacttgtgaattttatttttaaggattcacctggaaatagaatctgagtgggtggtaaccattagctttaaaaaattcactaaaaggcaccatgaaaaggctgaagtaataagccccactggggttggactatgtccctcactcaagatcttaaggataaccgtaactgaagttttatatttttccatttacctactttcttttacttgctttgaacattatgcctcaccaatagtaaatgttcatgaaataatctcttgaacttttggtatagtaaggtaactctaacagtattactgtctttttcagcaataacagaaagcaaaaatgggtgggttttttttaagcagttattacctcagcattttgacatcagatatgcaaacttaatggcgttttgtttttttatattctatttgtattctttccccagtatttcccatggggatctccacaagtttggagttttttcctggtgcacacacgtgaggagatttaaggtactatatgcaagtgttttactaaaaagcactgaaattcttctggcaatacaagaaccattttcaggatcttggagttacttccttcttaatctttcttaaagcattcactgatgtttttgttttttcaaaatgaaacaaaaatatcacattgagaagctagtctatgttctgtcactaacatttaaactttgcagactctaacaaaaagcacaagaggtcacgtactattatacaaatttagcggtactggatttacctctgacattaacacactcaggcagagaccaggagtgatcagcaggtcttcagaaccaaaaaacctttctgttcacatttcatctgatttttaaactgaggcaggctttgattcttctgaaggatgccaagaatcaaactaagggaggactcactgttaaagatgtgttctgatgtcttatattaagaccaaatgtgacatgatgtgattatcttccagtactttgcttttaggtaccatttcatgacattttaggaatgagtattggaaaatataaagaattagaaaagcagcactttttttttaatggaaaagtcttcggtccagtgttacaccttatagtgtaattcagtccctaagcacagaatgaatgtctggcctgcatatggtagttacagtgtaacctctggctgcagaccacacaggacaaccctaacagcctagtcttgtatggtgtaaatatcaagagtacagcttcaatttcatttgctttatcttagcaacaatgccaactcaggagagcagacggccgatttcagtgaagtctggtagtcaacagatgttatttcagtctcagtgcatctcctctggctttctttgactgaaggtgtttataggaaggaagttaaaaaaaaaaaaagctcattgagattctttaccaattctttacaagatttctgggggtgacagggaaagcaaaaggacttcaaagcaaaagggtgcacaagagcttacttcaccctgaaaatcagtattattaatgaaaagtactgttttcttaaagaagtcgaatgtcctttagatgaacaagaccaagtatacatctccattagattaaaatgtagcacagggttaaaaattatcagtttaatctctttaagaacagtattatcagagtttaaaatgagttagctctgtttatctacacacagcaaacccattcgcagcctcttggccacatgtattcagatgtttgaaatagtgaatcatttcattttcattctaaaacaatactgacttagccatataccttctgtttgtcaatctgaaacttgcttacatctaataagtagacctcttataacactgcaaccattctaagagttggaatttatttttgccaagtattaagtactgttacatctaaaatacagaatgtcaaatggttgcatagcttgtttcccacaacaaggaggaaaagaacaggaatacaaactctgtaatatgctgataaagaagccttagaactgccaactggcttgatggttcaattagtaagctaatttctcccacacccgctccttgatttttagactaattttcccaaagcaaggtttagtcacacaaacttgaaagtacatttaaaatgttcttagttgtcatcctacttttattgcctatggaatatgctaatttctaaaaaaaatacgggagaggcaccaaacccctaaattctagtgcaataatttaaaaaacaaaaaacaaaacaaaacaaaaaacatgttatatgcacccccctcccaaagctgattttaagactggctagaattcaaaatataaaaaataaaactatgaagtgatttgaaatcggttttaaaaagttgttagtgcaagagaaattttatgtttaagccatcatggcaatatatgcaaagtttaaatgaatgacagaaatcttgattttagactgtatgttgtgctgttttgagtacactttatttcggagatatttagtattttctatacactctgaaatcatgagcatttcactttttctaagtcaattatttcataaggattttattaatagatattggtaaatagaactttggaaatcttaattcagaattcttactatacctgagtcttttgtaagctatagttttatgtacaaccttgtacagtttttttgacatacaattcagaactttgtttattctcttggactttgttctggccaatacattttttttaaatctttaagaagaactgtgattgttttagtgggtatttttctaattaaatgaaaacttgtataatggtattttagagaatgccagtaagtgcatgtttcaagttaatgtttttctcatcacttgtatgtttctaacacagcatgggactttaataaaaccatcctggaaacttaa

SEQ ID NO: 198957 - DNA, 581 bp, Homo sapiens
  Payload ID: 19248
  Gene Name: vasohibin 2
  ENST ID: ENST00000490792
  CDS Start-End: 507-581
ttcgagaatgggacatggaatgaggcgacggccccagcaagccccagcagccccagccccagccccaggcccagcagcagcagcagcagcccctgctctcccgccgcccggagaggctctgcagccatgaagccaaccgtcccgaggtaatcgcagggctggaagcccgtcatcgattctcagggaggctgtcagcgtgcaggggggagcggggagtgtcgtggagacactccgggacccctcactcggttccgctgtgcgtccacttagctgtggtgtcagctgtgtctccgctgatttcaggcaccgccggtaagcagggagcctccgcggagctcccgccgccgctcccccttggcgccaaaggcacccggtcccggagcagccacgcgcggcccgtgagcctcgccaccagcgggggctcagaggaggaggacaaagacggcggggtgctgttccacgtcaacaagagcggcttccccatcgacagccacacctgggagcgcatgtggatgcacgtggccaaggtgcaccctaaggggggagaaatggtgggcgccatcaggaacgccgccttcttg

SEQ ID NO: 198958 - DNA, 1068 bp, Homo sapiens
  Payload ID: 19248
  Gene Name: vasohibin 2
  Uniprot ID: Q86V25
  ENST ID: ENST00000517399
  CDS Start-End: 1-1068
atgaccggctccgcggccgacactcaccgctgcccccaccccaaaggcgccaaaggcacccggtcccggagcagccacgcgcggcccgtgagcctcgccaccagcgggggctcagaggaggaggacaaagacggcggggtgctgttccacgtcaacaagagcggcttccccatcgacagccacacctgggagcgcatgtggatgcacgtggccaaggtgcaccctaaggggggagaaatggtgggcgccatcaggaacgccgccttcttggcaaagccttcaataccccaggtcccaaactacaggctgtcgatgacgatcccagactggctccaggcgatccagaattacatgaagaccctacaatataatcacacagggacccagttctttgaaattaggaaaatgagaccgctgagtgggttaatggaaacagcaaaagaaatgacccgagagtccttgcctatcaaatgccttgaagctgtcatcctgggcatctacttaaccaatgggcagccttccattgagcggttccccatcagctttaaaacctacttctcaggaaactactttcaccacgttgtgctggggatttactgcaatggccgctatggctcattgggcatgagccgcagggctgagctgatggacaagccattgacttttcggactctgagtgacctcatctttgactttgaggactcttacaagaaatacctgcacacagtcaagaaggtcaagattgggctgtacgtcccccatgagcctcatagcttccagcccattgagtggaagcagctggtcctcaacgtctcaaagatgctgagggctgacataaggaaggagctggagaaatatgccagggacatgagaatgaagatcctgaaacctgcaagtgcccactctccgacccaagtgagaagccggggaaaatccctgtcccccagaaggagacaggcaagccccccgaggaggctcggccggcgagagaagtcgcctgcactgcctgaaaagaaggtggctgatctgagcactctgaatgaagtgggctatcaaatccgaatttag

SEQ ID NO: 198959 - DNA, 1206 bp, Homo sapiens
  Payload ID: 19248
  Gene Name: vasohibin 2
  Uniprot ID: Q86V25
  ENST ID: ENST00000366967
  CDS Start-End: 111-866
agcagcagcagcagcagcccctgctctcccgccgcccggagaggctctgcagccatgaagccaaccgtcccgagccttcaataccccaggtcccaaactacaggctgtcgatgacgatcccagactggctccaggcgatccagaattacatgaagaccctacaatataatcacacagggacccagttctttgaaattaggaaaatgagaccgctgagtgggttaatggaaacagcaaaagaaatgacccgagagtccttgcctatcaaatgccttgaagctgtcatcctgggcatctacttaaccaatgggcagccttccattgagcggttccccatcagctttaaaacctacttctcaggaaactactttcaccacgttgtgctggggatttactgcaatggccgctatggctcattgggcatgagccgcagggctgagctgatggacaagccattgacttttcggactctgagtgacctcatctttgactttgaggactcttacaagaaatacctgcacacagtcaagaaggtcaagattgggctgtacgtcccccatgagcctcatagcttccagcccattgagtggaagcagctggtcctcaacgtctcaaagatgctgagggctgacataaggaaggagctggagaaatatgccagggacatgagaatgaagatcctgaaacctgcaagtgcccactctccgacccaagtgagaagccggggaaaatccctgtcccccagaaggagacaggcaagccccccgaggaggctcggccggcgagagaagtcgcctgcactgcctgaaaagaaggtggctgatctgagcactctgaatgaagtgggctatcaaatccgaatttagccaagccataccggccagcaagagggtttctgtggtgcttctctctgcactttacccagcatcttcaggaggaactgcaactatttattaagaacttgtgaattttatttttaaggattcacctggaaatagaatctgagtgggtggtaaccattagctttaaaaaattcactaaaaggcaccatgaaaaggctgaagtaataagccccactggggttggactatgtccctcactcaagatcttaaggataaccgtaactgaagttttatatttttccatttacctactttcttttacttgctttgaacattatgcctcaccaatagtaaatgttcatga

SEQ ID NO: 198960 - DNA, 1369 bp, Homo sapiens
  Payload ID: 19248
  Gene Name: vasohibin 2
  Uniprot ID: Q86V25
  ENST ID: ENST00000366966
  CDS Start-End: 383-1255
gttgcggtggccaatagacgcattcggaacatcggcggctgcccgggtgacttggttatatgtcacagaataacattcgagaatgggacatggaatgaggcgacggccccagcaagccccagcagccccagccccagccccaggcccagcagcagcagcagcagcccctgctctcccgccgcccggagaggctctgcagccatgaagccaaccgtcccgaggcaccgccggtaagcagggagcctccgcggagctcccgccgccgctcccccttggtgacctcgccaccagcgggggctcagaggaggaggacaaagacggcggggtgctgttccacgtcaacaagagcggcttccccatcgacagccacacctgggagcgcatgtggatgcacgtggccaaggtgcaccctaaggggggagaaatggtgggcgccatcaggaacgccgccttcttggcaaagccttcaataccccaggtcccaaactacaggctgtcgatgacgatcccagactggctccaggcgatccagaattacatgaagaccctacaatataatcacacagggacccagttctttgaaattaggaaaatgagaccgctgagtgggttaatggaaacagcaaaagaaatgacccgagagtccttgcctatcaaatgccttgaagctgtcatcctgggcatctacttaaccaatgggcagccttccattgagcggttccccatcagctttaaaacctacttctcaggaaactactttcaccacgttgtgctggggatttactgcaatggccgctatggctcattgggcatgagccgcagggctgagctgatggacaagccattgacttttcggactctgagtgacctcatctttgactttgaggactcttacaagaaatacctgcacacagtcaagaaggtcaagattgggctgtacgtcccccatgagcctcatagcttccagcccattgagtggaagcagctggtcctcaacgtctcaaagatgctgagggctgacataaggaaggagctggagaaatatgccagggacatgagaatgaagatcctgaaacctgcaagtgcccactctccgacccaagtgagaagccggggaaaatccctgtcccccagaaggagacaggcaagccccccgaggaggctcggccggcgagagaagtcgcctgcactgcctgaaaagaaggtggctgatctgagcactctgaatgaagtgggctatcaaatccgaatttagccaagccataccggccagcaagagggtttctgtggtgcttctctctgcactttacccagcatcttcaggaggaactgcaactatttattaagaacttgtgaattttatttttaa

SEQ ID NO: 198961 - DNA, 2806 bp, Homo sapiens
  Payload ID: 19249
  Gene Name: vasorin
  Uniprot ID: Q6EMK4
  ENST ID: ENST00000304735
  CDS Start-End: 156-2177
gactccggagcccgagcccggggcgggtggacgcggactcgaacgcagttgcttcgggacccaggaccccctcgggcccgacccgccaggaaagactgaggccgcggcctgccccgcccggctccctgcgccgccgccgcctcccgggacagaagatgtgctccagggtccctctgctgctgccgctgctcctgctactggccctggggcctggggtgcagggctgcccatccggctgccagtgcagccagccacagacagtcttctgcactgcccgccaggggaccacggtgccccgagacgtgccacccgacacggtggggctgtacgtctttgagaacggcatcaccatgctcgacgcaggcagctttgccggcctgccgggcctgcagctcctggacctgtcacagaaccagatcgccagcctgcccagcggggtcttccagccactcgccaacctcagcaacctggacctgacagccaacaggctgcatgaaatcaccaatgagaccttccgtggcctgcggcgcctcgagcgcctctacctgggcaagaaccgcatccgccacatccagcctggtgccttcgacacgctcgaccgcctcctggagctcaagctgcaggacaacgagctgcgggcactgcccccgctgcgcctgccccgcctgctgctgctggacctcagccacaacagcctcctggccctggagcccggcatcctggacactgccaacgtggaggcgctgcggctggctggtctggggctgcagcagctggacgaggggctcttcagccgcttgcgcaacctccacgacctggatgtgtccgacaaccagctggagcgagtgccacctgtgatccgaggcctccggggcctgacgcgcctgcggctggccggcaacacccgcattgcccagctgcggcccgaggacctggccggcctggctgccctgcaggagctggatgtgagcaacctaagcctgcaggccctgcctggcgacctctcgggcctcttcccccgcctgcggctgctggcagctgcccgcaaccccttcaactgcgtgtgccccctgagctggtttggcccctgggtgcgcgagagccacgtcacactggccagccctgaggagacgcgctgccacttcccgcccaagaacgctggccggctgctcctggagcttgactacgccgactttggctgcccagccaccaccaccacagccacagtgcccaccacgaggcccgtggtgcgggagcccacagccttgtcttctagcttggctcctacctggcttagccccacagagccggccactgaggcccccagcccgccctccactgccccaccgactgtagggcctgtcccccagccccaggactgcccaccgtccacctgcctcaatgggggcacatgccacctggggacacggcaccacctggcgtgcttgtgccccgaaggcttcacgggcctgtactgtgagagccagatggggcaggggacacggcccagccctacaccagtcacgccgaggccaccacggtccctgaccctgggcatcgagccggtgagccccacctccctgcgcgtggggctgcagcgctacctccaggggagctccgtgcagctcaggagcctccgtctcacctatcgcaacctatcgggccctgataagcggctggtgacgctgcgactgcctgcctcgctcgctgagtacacggtcacccagctgcggcccaacgccacttactccgtctgtgtcatgcctttggggcccgggcgggtgccggagggcgaggaggcctgcggggaggcccatacacccccagccgtccactccaaccacgccccagtcacccaggcccgcgagggcaacctgccgctcctcattgcgcccgccctggccgcggtgctcctggccgcgctggctgcggtgggggcagcctactgtgtgcggcgggggcgggccatggcagcagcggctcaggacaaagggcaggtggggccaggggctgggcccctggaactggagggagtgaaggtccccttggagccaggcccgaaggcaacagagggcggtggagaggccctgcccagcgggtctgagtgtgaggtgccactcatgggcttcccagggcctggcctccagtcacccctccacgcaaagccctacatctaagccagagagagacagggcagctggggccgggctctcagccagtgagatggccagccccctcctgctgccacaccacgtaagttctcagtcccaacctcggggatgtgtgcagacagggctgtgtgaccacagctgggccctgttccctctggacctcggtctcctcatctgtgagatgctgtggcccagctgacgagccctaacgtccccagaaccgagtgcctatgaggacagtgtccgccctgccctccgcaacgtgcagtccctgggcacggcgggccctgccatgtgctggtaacgcatgcctgggccctgctgggctctcccactccaggcggaccctgggggccagtgaaggaagctcccggaaagagcagagggagagcgggtaggcggctgtgtgactctagtcttggccccaggaagcgaaggaacaaaagaaactggaaaggaagatgctttaggaacatgttttgcttttttaaaatatatatatatttataagagatcctttcccatttattctgggaagatgtttttcaaactcagagacaaggactttggtttttgtaagacaaacgatgatatgaaggccttttgtaagaaaaaataaaagatgaagtgtgttt

SEQ ID NO: 198962 - DNA, 2806 bp, Homo sapiens; identical to SEQ ID NO: 198961
  Payload ID: 19249
  Gene Name: vasorin
  Uniprot ID: Q6EMK4
  ENST ID: ENST00000622615
  CDS Start-End: 156-2177

SEQ ID NO: 198963 - DNA, 2825 bp, Homo sapiens
  Payload ID: 19250
  Gene Name: vav 1 guanine nucleotide exchange factor
  ENST ID: ENST00000304076
  CDS Start-End: 95-2566
agctgtcgctccacaggcgagcagggcaggcgtgcgggcgggtgggtggtggaggctgcgagggtgcacggccggccctgggcaggcggtagccatggagctgtggcgccaatgcacccactggctcatccagtgccgggtgctgccgcccagccaccgcgtgacctgggatggggctcaggtgtgtgaactggcccaggccctccgggatggtgtccttctgtgtcagctgcttaacaacctgctaccccatgccatcaacctgcgtgaggtcaacctgcgcccccagatgtcccagttcctgtgccttaagaacattagaaccttcctgtccacctgctgtgagaagttcggcctcaagcggagcgagctcttcgaagcctttgacctcttcgatgtgcaggattttggcaaggtcatctacaccctgtctgctctgtcctggaccccgatcgcccagaacagggggatcatgcccttccccaccgaggaggagagtgtaggtgatgaagacatctacagtggcctgtccgaccagatcgacgacacggtggaggaggatgaggacctgtatgactgcgtggagaatgaggaggcggaaggcgacgagatctatgaggacctcatgcgctcggagcccgtgtccatgccgcccaagatgacagagtatgacaagcgctgctgctgcctgcgggagatccagcagacggaggagaagtacactgacacgctgggctccatccagcagcatttcttgaagcccctgcaacggttcctgaaacctcaagacattgagatcatctttatcaacattgaggacctgcttcgtgttcatactcacttcctaaaggagatgaaggaagccctgggcacccctggcgcagccaatctctaccaggtcttcatcaaatacaaggagaggttcctcgtctatggccgctactgcagccaggtggagtcagccagcaaacacctggaccgtgtggccgcagcccgggaggacgtgcagatgaagctggaggaatgttctcagagagccaacaacgggaggttcaccctgcgggacctgctgatggtgcctatgcagcgagttctcaaatatcacctccttctccaggagctggtgaaacacacgcaggaggcgatggagaaggagaacctgcggctggccctggatgccatgagggacctggctcagtgcgtgaacgaggtcaagcgagacaacgagacactgcgacagatcaccaatttccagctgtccattgagaacctggaccagtctctggctcactatggccggcccaagatcgacggggaactcaagatcacctcggtggaacggcgctccaagatggacaggtatgccttcctgctcgacaaagctctactcatctgtaagcgcaggggagactcctatgacctcaaggactttgtaaacctgcacagcttccaggttcgggatgactcttcaggagaccgagacaacaagaagtggagccacatgttcctcctgatcgaggaccaaggtgcccagggctatgagctgttcttcaagacaagagaattgaagaagaagtggatggagcagtttgagatggccatctccaacatctatccggagaatgccaccgccaacgggcatgacttccagatgttctcctttgaggagaccacatcctgcaaggcctgtcagatgctgcttagaggtaccttctatcagggctaccgctgccatcggtgccgggcatctgcacacaaggagtgtctggggagggtccctccatgtggccgacatgggcaagatttcccaggaactatgaagaaggacaaactacatcgcagggctcaggacaaaaagaggaatgagctgggtctgcccaagatggaggtgtttcaggaatactacgggcttcctccaccccctggagccattggaccctttctacggctcaaccctggagacattgtggagctcacgaaggctgaggctgaacagaactggtgggagggccctcctcaggacctgtctgttcatctctggtacgcaggccccatggagcgggcaggggcagagagcatcctggccaaccgctcggacgggactttcttggtgcggcagagggtgaaggatgcagcagaatttgccatcagcattaaatataacgtcgaggtcaagcacattaaaatcatgacagcagaaggactgtaccggatcacagagaaaaaggctttccgggggcttacggagctggtggagttttaccagcagaactctctaaaggattgcttcaagtctctggacaccaccttgcagttccccttcaaggagcctgaaaagagaaccatcagcaggccagcagtgggaagcacaaagtattttggcacagccaaagcccgctatgacttctgcgcccgagaccgatcagagctgtcgctcaaggagggtgacatcatcaagatccttaacaagaagggacagcaaggctggtggcgaggggagatctatggccgggttggctggttccctgccaactacgtggaggaagattattctgaatactgctgagccctggtgccttggcagagagacgagaaactccaggctctgagcccggcgtgggcaggcagcggagccaggggctgtgacagctcccggcgggtggagactttgggatggactggaggaggccagcgtccagctggcggtgctcccgggatgtgccctgacatggttaatttataacaccccgatttcctcttgggtcccctcaagcagacggggctcaagggggttacatttaataaaaggatgaagatggatagaa

SEQ ID NO: 198964 - DNA, 2627 bp, Homo sapiens
  Payload ID: 19250
  Gene Name: vav 1 guanine nucleotide exchange factor
  ENST ID: ENST00000539284
  CDS Start-End: 1-2370
atgattgcatcgctgcactccagcctggacaacagattcctgtgccttaagaacattagaaccttcctgtccacctgctgtgagaagttcggcctcaagcggagcgagctcttcgaagcctttgacctcttcgatgtgcaggattttggcaaggtcatctacaccctgtctgctctgtcctggaccccgatcgcccagaacagggggatcatgcccttccccaccgaggaggagagtgtaggtgatgaagacatctacagtggcctgtccgaccagatcgacgacacggtggaggaggatgaggacctgtatgactgcgtggagaatgaggaggcggaaggcgacgagatctatgaggacctcatgcgctcggagcccgtgtccatgccgcccaagatgacagagtatgacaagcgctgctgctgcctgcgggagatccagcagacggaggagaagtacactgacacgctgggctccatccagcagcatttcttgaagcccctgcaacggttcctgaaacctcaagacattgagatcatctttatcaacattgaggacctgcttcgtgttcatactcacttcctaaaggagatgaaggaagccctgggcacccctggcgcagccaatctctaccaggtcttcatcaaatacaaggagaggttcctcgtctatggccgctactgcagccaggtggagtcagccagcaaacacctggaccgtgtggccgcagcccgggaggacgtgcagatgaagctggaggaatgttctcagagagccaacaacgggaggttcaccctgcgggacctgctgatggtgcctatgcagcgagttctcaaatatcacctccttctccaggagctggtgaaacacacgcaggaggcgatggagaaggagaacctgcggctggccctggatgccatgagggacctggctcagtgcgtgaacgaggtcaagcgagacaacgagacactgcgacagatcaccaatttccagctgtccattgagaacctggaccagtctctggctcactatggccggcccaagatcgacggggaactcaagatcacctcggtggaacggcgctccaagatggacaggtatgccttcctgctcgacaaagctctactcatctgtaagcgcaggggagactcctatgacctcaaggactttgtaaacctgcacagcttccaggttcgggatgactcttcaggagaccgagacaacaagaagtggagccacatgttcctcctgatcgaggaccaaggtgcccagggctatgagctgttcttcaagacaagagaattgaagaagaagtggatggagcagtttgagatggccatctccaacatctatccggagaatgccaccgccaacgggcatgacttccagatgttctcctttgaggagaccacatcctgcaaggcctgtcagatgctgcttagaggtaccttctatcagggctaccgctgccatcggtgccgggcatctgcacacaaggagtgtctggggagggtccctccatgtggccgacatgggcaagatttcccaggaactatgaagaaggacaaactacatcgcagggctcaggacaaaaagaggaatgagctgggtctgcccaagatggaggtgtttcaggaatactacgggcttcctccaccccctggagccattggaccctttctacggctcaaccctggagacattgtggagctcacgaaggctgaggctgaacagaactggtgggagggcagaaatacatctactaatgaaattggctggtttccttgtaacagggtgaagccctatgtccatggccctcctcaggacctgtctgttcatctctggtacgcaggccccatggagcgggcaggggcagagagcatcctggccaaccgctcggacgggactttcttggtgcggcagagggtgaaggatgcagcagaatttgccatcagcattaaatataacgtcgaggtcaagcacattaaaatcatgacagcagaaggactgtaccggatcacagagaaaaaggctttccgggggcttacggagctggtggagttttaccagcagaactctctaaaggattgcttcaagtctctggacaccaccttgcagttccccttcaaggagcctgaaaagagaaccatcagcaggccagcagtgggaagcacaaagtattttggcacagccaaagcccgctatgacttctgcgcccgagaccgatcagagctgtcgctcaaggagggtgacatcatcaagatccttaacaagaagggacagcaaggctggtggcgaggggagatctatggccgggttggctggttccctgccaactacgtggaggaagattattctgaatactgctgagccctggtgccttggcagagagacgagaaactccaggctctgagcccggcgtgggcaggcagcggagccaggggctgtgacagctcccggcgggtggagactttgggatggactggaggaggccagcgtccagctggcggtgctcccgggatgtgccctgacatggttaatttataacaccccgatttcctcttgggtcccctcaagcagacggggctcaagggggttacatttaataaaaggatgaagatggatag

SEQ ID NO: 198965 - DNA, 2775 bp, Homo sapiens
  Payload ID: 19250
  Gene Name: vav 1 guanine nucleotide exchange factor
  Uniprot ID: P15498
  ENST ID: ENST00000596764
  CDS Start-End: 81-2522
aggcgagcagggcaggcgtgcgggcgggtgggtggtggaggctgcgagggtgcacggccggccctgggcaggcggtagccatggagctgtggcgccaatgcacccactggctcatccagtgccgggtgctgccgcccagccaccgcgtgacctgggatggggctcaggtgtgtgaactggcccaggccctccgggatggtgtccttctgtgtcagctgcttaacaacctgctaccccatgccatcaacctgcgtgaggtcaacctgcgcccccagatgtcccagttcctgtgccttaagaacattagaaccttcctgtccacctgctgtgagaagttcggcctcaagcggagcgagctcttcgaagcctttgacctcttcgatgtgcaggattttggcaaggtcatctacaccctgtctgctctgtcctggaccccgatcgcccagaacagggggatcatgcccttccccaccgaggaggagagtgtaggtgatgaagacatctacagtggcctgtccgaccagatcgacgacacggtggaggaggatgaggacctgtatgactgcgtggagaatgaggaggcggaaggcgacgagatctatgaggacctcatgcgctcggagcccgtgtccatgccgcatttcttgaagcccctgcaacggttcctgaaacctcaagacattgagatcatctttatcaacattgaggacctgcttcgtgttcatactcacttcctaaaggagatgaaggaagccctgggcacccctggcgcagccaatctctaccaggtcttcatcaaatacaaggagaggttcctcgtctatggccgctactgcagccaggtggagtcagccagcaaacacctggaccgtgtggccgcagcccgggaggacgtgcagatgaagctggaggaatgttctcagagagccaacaacgggaggttcaccctgcgggacctgctgatggtgcctatgcagcgagttctcaaatatcacctccttctccaggagctggtgaaacacacgcaggaggcgatggagaaggagaacctgcggctggccctggatgccatgagggacctggctcagtgcgtgaacgaggtcaagcgagacaacgagacactgcgacagatcaccaatttccagctgtccattgagaacctggaccagtctctggctcactatggccggcccaagatcgacggggaactcaagatcacctcggtggaacggcgctccaagatggacaggtatgccttcctgctcgacaaagctctactcatctgtaagcgcaggggagactcctatgacctcaaggactttgtaaacctgcacagcttccaggttcgggatgactcttcaggagaccgagacaacaagaagtggagccacatgttcctcctgatcgaggaccaaggtgcccagggctatgagctgttcttcaagacaagagaattgaagaagaagtggatggagcagtttgagatggccatctccaacatctatccggagaatgccaccgccaacgggcatgacttccagatgttctcctttgaggagaccacatcctgcaaggcctgtcagatgctgcttagaggtaccttctatcagggctaccgctgccatcggtgccgggcatctgcacacaaggagtgtctggggagggtccctccatgtggccgacatgggcaagatttcccaggaactatgaagaaggacaaactacatcgcagggctcaggacaaaaagaggaatgagctgggtctgcccaagatggaggtgtttcaggaatactacgggcttcctccaccccctggagccattggaccctttctacggctcaaccctggagacattgtggagctcacgaaggctgaggctgaacagaactggtgggagggcagaaatacatctactaatgaaattggctggtttccttgtaacagggtgaagccctatgtccatggccctcctcaggacctgtctgttcatctctggtacgcaggccccatggagcgggcaggggcagagagcatcctggccaaccgctcggacgggactttcttggtgcggcagagggtgaaggatgcagcagaatttgccatcagcattaaatataacgtcgaggtcaagcacattaaaatcatgacagcagaaggactgtaccggatcacagagaaaaaggctttccgggggcttacggagctggtggagttttaccagcagaactctctaaaggattgcttcaagtctctggacaccaccttgcagttccccttcaaggagcctgaaaagagaaccatcagcaggccagcagtgggaagcacaaagtattttggcacagccaaagcccgctatgacttctgcgcccgagaccgatcagagctgtcgctcaaggagggtgacatcatcaagatccttaacaagaagggacagcaaggctggtggcgaggggagatctatggccgggttggctggttccctgccaactacgtggaggaagattattctgaatactgctgagccctggtgccttggcagagagacgagaaactccaggctctgagcccggcgtgggcaggcagcggagccaggggctgtgacagctcccggcgggtggagactttgggatggactggaggaggccagcgtccagctggcggtgctcccgggatgtgccctgacatggttaatttataacaccccgatttcctcttgggtcccctcaagcagacggggctcaagggggttacatttaataaaaggatgaagatgg

SEQ ID NO: 198966 - DNA, 2717 bp, Homo sapiens
  Payload ID: 19250
  Gene Name: vav 1 guanine nucleotide exchange factor
  ENST ID: ENST00000599806
  CDS Start-End: 86-2458
gtggtgcacgcctatagtctcagctactcaggaagttgaggcaggaggatcgcttgagcccaggagtttgatgctgcagtgagctatgattgtgctaccactgtactccagactggacaaaagattcctgtgccttaagaacattagaaccttcctgtccacctgctgtgagaagttcggcctcaagcggagcgagctcttcgaagcctttgacctcttcgatgtgcaggattttggcaaggtcatctacaccctgtctgctctgtcctggaccccgatcgcccagaacagggggatcatgcccttccccaccgaggaggagagtgtaggtgatgaagacatctacagtggcctgtccgaccagatcgacgacacggtggaggaggatgaggacctgtatgactgcgtggagaatgaggaggcggaaggcgacgagatctatgaggacctcatgcgctcggagcccgtgtccatgccgcccaagatgacagagtatgacaagcgctgctgctgcctgcgggagatccagcagacggaggagaagtacactgacacgctgggctccatccagcagcatttcttgaagcccctgcaacggttcctgaaacctcaagacattgagatcatctttatcaacattgaggacctgcttcgtgttcatactcacttcctaaaggagatgaaggaagccctgggcacccctggcgcagccaatctctaccaggtcttcatcaaatacaaggagaggttcctcgtctatggccgctactgcagccaggtggagtcagccagcaaacacctggaccgtgtggccgcagcccgggaggacgtgcagatgaagctggaggaatgttctcagagagccaacaacgggaggttcaccctgcgggacctgctgatggtgcctatgcagcgagttctcaaatatcacctccttctccaggagctggtgaaacacacgcaggaggcgatggagaaggagaacctgcggctggccctggatgccatgagggacctggctcagtgcgtgaacgaggtcaagcgagacaacgagacactgcgacagatcaccaatttccagctgtccattgagaacctggaccagtctctggctcactatggccggcccaagatcgacggggaactcaagatcacctcggtggaacggcgctccaagatggacaggtatgccttcctgctcgacaaagctctactcatctgtaagcgcaggggagactcctatgacctcaaggactttgtaaacctgcacagcttccaggttcgggatgactcttcaggagaccgagacaacaagaagtggagccacatgttcctcctgatcgaggaccaaggtgcccagggctatgagctgttcttcaagacaagagaattgaagaagaagtggatggagcagtttgagatggccatctccaacatctatccggagaatgccaccgccaacgggcatgacttccagatgttctcctttgaggagaccacatcctgcaaggcctgtcagatgctgcttagaggtaccttctatcagggctaccgctgccatcggtgccgggcatctgcacacaaggagtgtctggggagggtccctccatgtggccgacatgggcaagatttcccaggaactatgaagaaggacaaactacatcgcagggctcaggacaaaaagaggaatgagctgggtctgcccaagatggaggtgtttcaggaatactacgggcttcctccaccccctggagccattggaccctttctacggctcaaccctggagacattgtggagctcacgaaggctgaggctgaacagaactggtgggagggcagaaatacatctactaatgaaattggctggtttccttgtaacagggtgaagccctatgtccatggccctcctcaggacctgtctgttcatctctggtacgcaggccccatggagcgggcaggggcagagagcatcctggccaaccgctcggacgggactttcttggtgcggcagagggtgaaggatgcagcagaatttgccatcagcattaaatataacgtcgaggtcaagcacattaaaatcatgacagcagaaggactgtaccggatcacagagaaaaaggctttccgggggcttacggagctggtggagttttaccagcagaactctctaaaggattgcttcaagtctctggacaccaccttgcagttccccttcaaggagcctgaaaagagaaccatcagcaggccagcagtgggaagcacaaagtattttggcacagccaaagcccgctatgacttctgcgcccgagaccgatcagagctgtcgctcaaggagggtgacatcatcaagatccttaacaagaagggacagcaaggctggtggcgaggggagatctatggccgggttggctggttccctgccaactacgtggaggaagattattctgaatactgctgagccctggtgccttggcagagagacgagaaactccaggctctgagcccggcgtgggcaggcagcggagccaggggctgtgacagctcccggcgggtggagactttgggatggactggaggaggccagcgtccagctggcggtgctcccgggatgtgccctgacatggttaatttataacaccccgatttcctcttgggtcccctcaagcagacggggctcaagggggttacatttaataaaaggatgaagatggatagaa

SEQ ID NO: 198967 - DNA, 2620 bp, Homo sapiens
  Payload ID: 19250
  Gene Name: vav 1 guanine nucleotide exchange factor
  Uniprot ID: P15498
  ENST ID: ENST00000602142
  CDS Start-End: 83-2620
acaggcgagcagggcaggcgtgcgggcgggtgggtggtggaggctgcgagggtgcacggccggccctgggcaggcggtagccatggagctgtggcgccaatgcacccactggctcatccagtgccgggtgctgccgcccagccaccgcgtgacctgggatggggctcaggtgtgtgaactggcccaggccctccgggatggtgtccttctgtgtcagctgcttaacaacctgctaccccatgccatcaacctgcgtgaggtcaacctgcgcccccagatgtcccagttcctgtgccttaagaacattagaaccttcctgtccacctgctgtgagaagttcggcctcaagcggagcgagctcttcgaagcctttgacctcttcgatgtgcaggattttggcaaggtcatctacaccctgtctgctctgtcctggaccccgatcgcccagaacagggggatcatgcccttccccaccgaggaggagagtgtaggtgatgaagacatctacagtggcctgtccgaccagatcgacgacacggtggaggaggatgaggacctgtatgactgcgtggagaatgaggaggcggaaggcgacgagatctatgaggacctcatgcgctcggagcccgtgtccatgccgcccaagatgacagagtatgacaagcgctgctgctgcctgcgggagatccagcagacggaggagaagtacactgacacgctgggctccatccagcagcatttcttgaagcccctgcaacggttcctgaaacctcaagacattgagatcatctttatcaacattgaggacctgcttcgtgttcatactcacttcctaaaggagatgaaggaagccctgggcacccctggcgcagccaatctctaccaggtcttcatcaaatacaaggagaggttcctcgtctatggccgctactgcagccaggtggagtcagccagcaaacacctggaccgtgtggccgcagcccgggaggacgtgcagatgaagctggaggaatgttctcagagagccaacaacgggaggttcaccctgcgggacctgctgatggtgcctatgcagcgagttctcaaatatcacctccttctccaggagctggtgaaacacacgcaggaggcgatggagaaggagaacctgcggctggccctggatgccatgagggacctggctcagtgcgtgaacgaggtcaagcgagacaacgagacactgcgacagatcaccaatttccagctgtccattgagaacctggaccagtctctggctcactatggccggcccaagatcgacggggaactcaagatcacctcggtggaacggcgctccaagatggacaggtatgccttcctgctcgacaaagctctactcatctgtaagcgcaggggagactcctatgacctcaaggactttgtaaacctgcacagcttccaggttcgggatgactcttcaggagaccgagacaacaagaagtggagccacatgttcctcctgatcgaggaccaaggtgcccagggctatgagctgttcttcaagacaagagaattgaagaagaagtggatggagcagtttgagatggccatctccaacatctatccggagaatgccaccgccaacgggcatgacttccagatgttctcctttgaggagaccacatcctgcaaggcctgtcagatgctgcttagaggtaccttctatcagggctaccgctgccatcggtgccgggcatctgcacacaaggagtgtctggggagggtccctccatgtggccgacatgggcaagatttcccaggaactatgaagaaggacaaactacatcgcagggctcaggacaaaaagaggaatgagctgggtctgcccaagatggaggtgtttcaggaatactacgggcttcctccaccccctggagccattggaccctttctacggctcaaccctggagacattgtggagctcacgaaggctgaggctgaacagaactggtgggagggcagaaatacatctactaatgaaattggctggtttccttgtaacagggtgaagccctatgtccatggccctcctcaggacctgtctgttcatctctggtacgcaggccccatggagcgggcaggggcagagagcatcctggccaaccgctcggacgggactttcttggtgcggcagagggtgaaggatgcagcagaatttgccatcagcattaaatataacgtcgaggtcaagcacattaaaatcatgacagcagaaggactgtaccggatcacagagaaaaaggctttccgggggcttacggagctggtggagttttaccagcagaactctctaaaggattgcttcaagtctctggacaccaccttgcagttccccttcaaggagcctgaaaagagaaccatcagcaggccagcagtgggaagcacaaagtattttggcacagccaaagcccgctatgacttctgcgcccgagaccgatcagagctgtcgctcaaggagggtgacatcatcaagatccttaacaagaagggacagcaaggctggtggcgaggggagatctatggccgggttggctggttccctgccaactacgtggaggaagattattctgaatactgctga

SEQ ID NO: 198968 - DNA, 4837 bp, Homo sapiens
  Payload ID: 19251
  Gene Name: vav 2 guanine nucleotide exchange factor
  Uniprot ID: P52735
  ENST ID: ENST00000371850
  CDS Start-End: 33-2669
actgccctgagccggtcgggcccgcgggcgccatggagcagtggcggcagtgcggccgctggctcatcgattgcaaggtcctgccgcccaaccaccgggtggtgtggccctcggccgtggtcttcgacctggcgcaggcgctgcgcgacggggtccttctgtgccagctgctgcacaacctctcccccggctccatcgacctcaaggacatcaacttccggccgcagatgtcccagtttctgtgtttgaagaacatacgcaccttcctgaaagtctgccacgataaatttggattaaggaacagcgagctgtttgacccctttgacctcttcgatgtgcgagactttggaaaggtcatctccgcggtgtcgaggctctccctgcacagcatcgcgcagaacaaagggatcaggccttttccctcagaggagaccacagagaatgacgatgacgtctaccgcagcctggaggagctggccgacgagcatgacctgggggaggacatctacgactgcgtcccgtgtgaggatggaggggacgacatctacgaggacatcatcaaggtggaggtgcagcagcccatgattagatacatgcagaaaatgggcatgactgaagatgacaagaggaactgctgcctgctggagatccaggagaccgaggccaagtactaccgcaccctggaggacattgagaagaactacatgagccccctgcggctggtgctgagcccggcggacatggcagctgtcttcattaacctggaggacctgatcaaggtgcatcacagcttcctgagggccatcgacgtgtccgtgatggtggggggcagcacgctggccaaggtcttcctcgatttcaaggaaaggcttctgatctacggggagtactgcagccacatggagcacgcccagaacacactgaaccagctcctggccagccgggaggacttcaggcagaaagtcgaggagtgcacactgaaggtccaggatggaaaatttaagctgcaagacctgctggtggtccccatgcagagggtgctcaaataccacctgctcttgaaggagcttctgagccattctgcggaacggcctgagaggcagcagctcaaagaagcactggaagccatgcaggacttggcgatgtacatcaatgaagttaaacgggacaaggagaccttgaggaaaatcagcgaatttcagagttctatagaaaatttgcaagtgaaactggaggaatttggaagaccaaagattgacggggaactgaaagtccggtccatagtcaaccacaccaagcaggacaggtacttgttcctgtttgacaaggtggtcatcgtctgcaagcggaagggctacagctacgagctcaaggagatcatcgagctgctgttccacaagatgaccgacgaccccatgaacaacaaggacgtcaagaagtctcacgggaaaatgtggtcctacggcttctacctaattcaccttcaaggaaagcagggcttccagtttttctgcaaaacagaagatatgaagaggaagtggatggagcagtttgagatggccatgtcaaacatcaagccagacaaagccaatgccaaccaccacagtttccagatgtacacgtttgacaagaccaccaactgcaaagcctgcaaaatgttcctcaggggcaccttctaccagggatacatgtgtaccaagtgtggcgtcggggcacacaaggagtgcctggaagtgatacctccctgcaagttcacttctcctgcagatctggacgcctccggagcgggaccaggtcccaagatggtggccatgcagaattaccatggcaacccagcccctcccgggaagcctgtgctgaccttccagacgggcgacgtgcttgagctgctgaggggcgaccctgagtctccgtggtgggagggtcgtctggtacaaaccaggaagtcagggtatttccccagctcatctgtgaagccctgccctgtggatggaaggccgcccatcagccggccgccatcccgggagatcgactacactgcatacccctggtttgcaggtaacatggagaggcagcagacggacaacctgctcaagtcccacgccagcgggacctacctgatcagggagcggcctgccgaggctgagcgctttgcaataagcatcaagttcaatgatgaggtgaagcacatcaaggtggtggagaaggacaactggatccacatcacagaggccaagaaattcgacagcctcctggagttggtggagtactaccagtgccactcactgaaggagagcttcaagcagctggacaccacactcaagtacccctacaagtcccgggaacgttcggcctccagggcctccagccggtccccagcttcctgtgcttcctacaacttttcttttctcagtcctcagggcctcagctttgcttctcagggcccctccgctcccttctggtcagtgttcacgccccgcgtcatcggcacagctgtggccaggtataactttgccgcccgagatatgagggagctttcgctgcgggagggtgacgtggtgaggatctacagccgcatcggcggagaccagggctggtggaagggcgagaccaacggacggattggctggtttccttcaacgtacgtagaagaggagggcatccagtgacggcaggaacgtggacaagactcgcagattttcttgggagagtcactccagccctgaagtctgtctctagctcctctgtgactcagaggggaaataccaacctcccagtcttccactgcccacagggatagggagggtgttgagaatcctaaactcgaaccgtttcactgtcagcctgccctcggcgacccatcactgggtatgctattgtacatagaggaaacctgggctagccccacccagagcgcagaggagggggcaccgacagcgctgcgagccaggctctgggtagtggctgaggccagaggcccatcgcctgcccctgtccaactgagatggccttcaggagcctaggtttgaacagcagatgctgtcccaggaagggctagggacatcggaggggacctgcccccacaccctctgctcagcccctggactcagccttgcctgtcttttcctgctgctcccagggggaggtgtcagacctcgggaggcagacgggaccagagccaggctgttcactgtgggcccacttgccccactgtgctagggcgcgggaggagagagcactgtggtcgccctctgcagccactctggctcccaagacttccctgactcccccactcccctccttgccaggggcacacccggaccccacacggcaggcccctctcttgggaggggcctttggaatgatgaaattccaaccctgctgcccggtcagcggtaccgtttcctgccctctctctgagaggccctttctggagtcctgggaaggtgtctgcctggccgcgctgccagatcagtacatcttttgtaaaaaccctgaaatgggcagggaagaaaacagggatttcccctctctagatccctgccaggtccctctccaggaggcccctctgctctcctgaagggtggtccctgagggtctgcccagccttggcacgagaggttggttccagcccctggcagggcttccttccaagggcccctgcagcctacaaactgggcctcgggcgactcaaaataagtgctcttgggggtggctctaccccattacctcccccagccacaactcctggccttcgacttctggctgggttagccagaccctggtttctctaccctgatgttgcatgagacctggtaacagtgtctccctcccagctccttgccaaagcctctgttgagacctgggcttcttgtagccccttctccctctggccagctgcacagcctgtgggaggtgcccggcccaggctgggtgtgggggaagctggtccctgctgtgggtggcgctggggacctaggggctccttctgaggttggccttgtggcctctgggctgtatgcctctggggtgtagggaagaggcgggaggagtcatggggatggggagcggcagggggagagaggggccctcgacaaaggcttgggaaatgaggggaggtggaggcagggcaggggaagcgaagagtcagccttggagagagcaccctggggcctccgtgtcggggtacacccagcactttgcgacctgcggcccagcaggcgcggaggatggcggggaggaagccagcagcccctgtgtttactgtcgtcagaaaggtcttgtgttttggttttggggtttttgttttgtttgtgttttgtttggcttgtttgttttttaaggggaaaaaagtttgtaattatttcatccaaatctcccgttatatatctgtgaataataagagattttataatagcaagaaaatgatgtatattttagtttgttgacaaataagtcatcatgatcacgaaggacactgagaaaaaataatttagaaccctggtttttgtgaatttttttgttttgtgtttctttgttttgagatttgtgtttggtttggtttttgcactgcactaaggcaggagggttggagggctgggtgcagcctgggagtccgatggttttcagcaggagacggggtgtcccctgcagggggctaaactgcaggggcctgagattagctgtgaacatgtgggagcccgatgcatgtgggtcagggatctgggggcccccccagctggcgggaaccccaaatggacacaaactgtacatttgccaatgggtttttttcagaccatggtttttacttgcaaataaacctgagttcttttctgca

SEQ ID NO: 198969 - DNA, 5101 bp, Homo sapiens
  Payload ID: 19251
  Gene Name: vav 2 guanine nucleotide exchange factor
  Uniprot ID: P52735
  ENST ID: ENST00000371851
  CDS Start-End: 327-2933
cgcggattggggagcgctgcggcgactggctgcgtggagcccggcccggggcccgcaggcacttgcgtgtgtgaagcggggagatccggcgcgctgcccgttgcccgccccgcggccgcacgtgggcgggagcggcggcccgagaggagcccgaggagtaggaggaggaagaggaggggacgcacggcggcgcagcgggggacctggggcagcccgcgcgaagccccgccccggccctgagccccgcgcgcgcgcgggcgggatgccccgcggccgctgcactttggctcgagcactgccctgagccggtcgggcccgcgggcgccatggagcagtggcggcagtgcggccgctggctcatcgattgcaaggtcctgccgcccaaccaccgggtggtgtggccctcggccgtggtcttcgacctggcgcaggcgctgcgcgacggggtccttctgtgccagctgctgcacaacctctcccccggctccatcgacctcaaggacatcaacttccggccgcagatgtcccagtttctgtgtttgaagaacatacgcaccttcctgaaagtctgccacgataaatttggattaaggaacagcgagctgtttgacccctttgacctcttcgatgtgcgagactttggaaaggtcatctccgcggtgtcgaggctctccctgcacagcatcgcgcagaacaaagggatcaggccttttccctcagaggagaccacagagaatgacgatgacgtctaccgcagcctggaggagctggccgacgagcatgacctgggggaggacatctacgactgcgtcccgtgtgaggatggaggggacgacatctacgaggacatcatcaaggtggaggtgcagcagcccatgaaaatgggcatgactgaagatgacaagaggaactgctgcctgctggagatccaggagaccgaggccaagtactaccgcaccctggaggacattgagaagaactacatgagccccctgcggctggtgctgagcccggcggacatggcagctgtcttcattaacctggaggacctgatcaaggtgcatcacagcttcctgagggccatcgacgtgtccgtgatggtggggggcagcacgctggccaaggtcttcctcgatttcaaggaaaggcttctgatctacggggagtactgcagccacatggagcacgcccagaacacactgaaccagctcctggccagccgggaggacttcaggcagaaagtcgaggagtgcacactgaaggtccaggatggaaaatttaagctgcaagacctgctggtggtccccatgcagagggtgctcaaataccacctgctcttgaaggagcttctgagccattctgcggaacggcctgagaggcagcagctcaaagaagcactggaagccatgcaggacttggcgatgtacatcaatgaagttaaacgggacaaggagaccttgaggaaaatcagcgaatttcagagttctatagaaaatttgcaagtgaaactggaggaatttggaagaccaaagattgacggggaactgaaagtccggtccatagtcaaccacaccaagcaggacaggtacttgttcctgtttgacaaggtggtcatcgtctgcaagcggaagggctacagctacgagctcaaggagatcatcgagctgctgttccacaagatgaccgacgaccccatgaacaacaaggacgtcaagaagtggtcctacggcttctacctaattcaccttcaaggaaagcagggcttccagtttttctgcaaaacagaagatatgaagaggaagtggatggagcagtttgagatggccatgtcaaacatcaagccagacaaagccaatgccaaccaccacagtttccagatgtacacgtttgacaagaccaccaactgcaaagcctgcaaaatgttcctcaggggcaccttctaccagggatacatgtgtaccaagtgtggcgtcggggcacacaaggagtgcctggaagtgatacctccctgcaagttcacttctcctgcagatctggacgcctccggagcgggaccaggtcccaagatggtggccatgcagaattaccatggcaacccagcccctcccgggaagcctgtgctgaccttccagacgggcgacgtgcttgagctgctgaggggcgaccctgagtctccgtggtgggagggtcgtctggtacaaaccaggaagtcagggtatttccccagctcatctgtgaagccctgccctgtggatggaaggccgcccatcagccggccgccatcccgggagatcgactacactgcatacccctggtttgcaggtaacatggagaggcagcagacggacaacctgctcaagtcccacgccagcgggacctacctgatcagggagcggcctgccgaggctgagcgctttgcaataagcatcaagttcaatgatgaggtgaagcacatcaaggtggtggagaaggacaactggatccacatcacagaggccaagaaattcgacagcctcctggagttggtggagtactaccagtgccactcactgaaggagagcttcaagcagctggacaccacactcaagtacccctacaagtcccgggaacgttcggcctccagggcctccagccggtccccagcttcctgtgcttcctacaacttttcttttctcagtcctcagggcctcagctttgcttctcagggcccctccgctcccttctggtcagtgttcacgccccgcgtcatcggcacagctgtggccaggtataactttgccgcccgagatatgagggagctttcgctgcgggagggtgacgtggtgaggatctacagccgcatcggcggagaccagggctggtggaagggcgagaccaacggacggattggctggtttccttcaacgtacgtagaagaggagggcatccagtgacggcaggaacgtggacaagactcgcagattttcttgggagagtcactccagccctgaagtctgtctctagctcctctgtgactcagaggggaaataccaacctcccagtcttccactgcccacagggatagggagggtgttgagaatcctaaactcgaaccgtttcactgtcagcctgccctcggcgacccatcactgggtatgctattgtacatagaggaaacctgggctagccccacccagagcgcagaggagggggcaccgacagcgctgcgagccaggctctgggtagtggctgaggccagaggcccatcgcctgcccctgtccaactgagatggccttcaggagcctaggtttgaacagcagatgctgtcccaggaagggctagggacatcggaggggacctgcccccacaccctctgctcagcccctggactcagccttgcctgtcttttcctgctgctcccagggggaggtgtcagacctcgggaggcagacgggaccagagccaggctgttcactgtgggcccacttgccccactgtgctagggcgcgggaggagagagcactgtggtcgccctctgcagccactctggctcccaagacttccctgactcccccactcccctccttgccaggggcacacccggaccccacacggcaggcccctctcttgggaggggcctttggaatgatgaaattccaaccctgctgcccggtcagcggtaccgtttcctgccctctctctgagaggccctttctggagtcctgggaaggtgtctgcctggccgcgctgccagatcagtacatcttttgtaaaaaccctgaaatgggcagggaagaaaacagggatttcccctctctagatccctgccaggtccctctccaggaggcccctctgctctcctgaagggtggtccctgagggtctgcccagccttggcacgagaggttggttccagcccctggcagggcttccttccaagggcccctgcagcctacaaactgggcctcgggcgactcaaaataagtgctcttgggggtggctctaccccattacctcccccagccacaactcctggccttcgacttctggctgggttagccagaccctggtttctctaccctgatgttgcatgagacctggtaacagtgtctccctcccagctccttgccaaagcctctgttgagacctgggcttcttgtagccccttctccctctggccagctgcacagcctgtgggaggtgcccggcccaggctgggtgtgggggaagctggtccctgctgtgggtggcgctggggacctaggggctccttctgaggttggccttgtggcctctgggctgtatgcctctggggtgtagggaagaggcgggaggagtcatggggatggggagcggcagggggagagaggggccctcgacaaaggcttgggaaatgaggggaggtggaggcagggcaggggaagcgaagagtcagccttggagagagcaccctggggcctccgtgtcggggtacacccagcactttgcgacctgcggcccagcaggcgcggaggatggcggggaggaagccagcagcccctgtgtttactgtcgtcagaaaggtcttgtgttttggttttggggtttttgttttgtttgtgttttgtttggcttgtttgttttttaaggggaaaaaagtttgtaattatttcatccaaatctcccgttatatatctgtgaataataagagattttataatagcaagaaaatgatgtatattttagtttgttgacaaataagtcatcatgatcacgaaggacactgagaaaaaataatttagaaccctggtttttgtgaatttttttgttttgtgtttctttgttttgagatttgtgtttggtttggtttttgcactgcactaaggcaggagggttggagggctgggtgcagcctgggagtccgatggttttcagcaggagacggggtgtcccctgcagggggctaaactgcaggggcctgagattagctgtgaacatgtgggagcccgatgcatgtgggtcagggatctgggggcccccccagctggcgggaaccccaaatggacacaaactgtacatttgccaatgggtttttttcagaccatggtttttacttgcaaataaacctgagttcttttctgca

SEQ ID NO: 198970 - DNA, 4691 bp, Homo sapiens
  Payload ID: 19251
  Gene Name: vav 2 guanine nucleotide exchange factor
  Uniprot ID: P52735
  ENST ID: ENST00000406606
  CDS Start-End: 4-2523
gccatggagcagtggcggcagtgcggccgctggctcatcgattgcaaggtcctgccgcccaaccaccgggtggtgtggccctcggccgtggtcttcgacctggcgcaggcgctgcgcgacggggtccttctgtgccagctgctgcacaacctctcccccggctccatcgacctcaaggacatcaacttccggccgcagatgtcccagtttctgtgtttgaagaacatacgcaccttcctgaaagtctgccacgataaatttggattaaggaacagcgagctgtttgacccctttgacctcttcgatgtgcgagactttggaaaggtcatctccgcggtgtcgaggctctccctgcacagcatcgcgcagaacaaagggatcaggccttttccctcagaggagaccacagagaatgacgatgacgtctaccgcagcctggaggagctggccgacgagcatgacctgggggaggacatctacgactgcgtcccgtgtgaggatggaggggacgacatctacgaggacatcatcaaggtggaggtgcagcagcccatgaaaatgggcatgactgaagatgacaagaggaactgctgcctgctggagatccaggagaccgaggccaagtactaccgcaccctggaggacattgagaagaactacatgagccccctgcggctggtgctgagcccggcggacatggcagctgtcttcattaacctggaggacctgatcaaggtgcatcacagcttcctgagggccatcgacgtgtccgtgatggtggggggcagcacgctggccaaggtcttcctcgatttcaaggaaaggcttctgatctacggggagtactgcagccacatggagcacgcccagaacacactgaaccagctcctggccagccgggaggacttcaggcagaaagtcgaggagtgcacactgaaggtccaggatggaaaatttaagctgcaagacctgctggtggtccccatgcagagggtgctcaaataccacctgctcttgaaggagcttctgagccattctgcggaacggcctgagaggcagcagctcaaagaagcactggaagccatgcaggacttggcgatgtacatcaatgaagttaaacgggacaaggagaccttgaggaaaatcagcgaatttcagagttctatagaaaatttgcaagtgaaactggaggaatttggaagaccaaagattgacggggaactgaaagtccggtccatagtcaaccacaccaagcaggacaggtacttgttcctgtttgacaaggtggtcatcgtctgcaagcggaagggctacagctacgagctcaaggagatcatcgagctgctgttccacaagatgaccgacgaccccatgaacaacaaggacgtcaagaagtggtcctacggcttctacctaattcaccttcaaggaaagcagggcttccagtttttctgcaaaacagaagatatgaagaggaagtggatggagcagtttgagatggccatgtcaaacatcaagccagacaaagccaatgccaaccaccacagtttccagatgtacacgtttgacaagaccaccaactgcaaagcctgcaaaatgttcctcaggggcaccttctaccagggatacatgtgtaccaagtgtggcgtcggggcacacaaggagtgcctggaagtgatacctccctgcaagttcacttctcctgcagatctggacgcctccggagcgggaccaggtcccaagatggtggccatgcagaattaccatggcaacccagcccctcccgggaagcctgtgctgaccttccagacgggcgacgtgcttgagctgctgaggggcgaccctgagtctccgtggtgggagggtcgtctggtacaaaccaggaagtcagggtatttccccagctcatctgtgaagccctgccctgtggatggaaggccgcccatcagccggccgccatcccgggagatcgactacactgcatacccctggtttgcaggtaacatggagaggcagcagacggacaacctgctcaagtcccacgccagcgggacctacctgatcagggagcggcctgccgaggctgagcgctttgcaataagcatcaagttcaatgatgaggtgaagcacatcaaggtggtggagaaggacaactggatccacatcacagaggccaagaaattcgacagcctcctggagttggtggagtactaccagtgccactcactgaaggagagcttcaagcagctggacaccacactcaagtacccctacaagtcccgggaacgttcggcctccagggcctccagccggtccccagtgttcacgccccgcgtcatcggcacagctgtggccaggtataactttgccgcccgagatatgagggagctttcgctgcgggagggtgacgtggtgaggatctacagccgcatcggcggagaccagggctggtggaagggcgagaccaacggacggattggctggtttccttcaacgtacgtagaagaggagggcatccagtgacggcaggaacgtggacaagactcgcagattttcttgggagagtcactccagccctgaagtctgtctctagctcctctgtgactcagaggggaaataccaacctcccagtcttccactgcccacagggatagggagggtgttgagaatcctaaactcgaaccgtttcactgtcagcctgccctcggcgacccatcactgggtatgctattgtacatagaggaaacctgggctagccccacccagagcgcagaggagggggcaccgacagcgctgcgagccaggctctgggtagtggctgaggccagaggcccatcgcctgcccctgtccaactgagatggccttcaggagcctaggtttgaacagcagatgctgtcccaggaagggctagggacatcggaggggacctgcccccacaccctctgctcagcccctggactcagccttgcctgtcttttcctgctgctcccagggggaggtgtcagacctcgggaggcagacgggaccagagccaggctgttcactgtgggcccacttgccccactgtgctagggcgcgggaggagagagcactgtggtcgccctctgcagccactctggctcccaagacttccctgactcccccactcccctccttgccaggggcacacccggaccccacacggcaggcccctctcttgggaggggcctttggaatgatgaaattccaaccctgctgcccggtcagcggtaccgtttcctgccctctctctgagaggccctttctggagtcctgggaaggtgtctgcctggccgcgctgccagatcagtacatcttttgtaaaaaccctgaaatgggcagggaagaaaacagggatttcccctctctagatccctgccaggtccctctccaggaggcccctctgctctcctgaagggtggtccctgagggtctgcccagccttggcacgagaggttggttccagcccctggcagggcttccttccaagggcccctgcagcctacaaactgggcctcgggcgactcaaaataagtgctcttgggggtggctctaccccattacctcccccagccacaactcctggccttcgacttctggctgggttagccagaccctggtttctctaccctgatgttgcatgagacctggtaacagtgtctccctcccagctccttgccaaagcctctgttgagacctgggcttcttgtagccccttctccctctggccagctgcacagcctgtgggaggtgcccggcccaggctgggtgtgggggaagctggtccctgctgtgggtggcgctggggacctaggggctccttctgaggttggccttgtggcctctgggctgtatgcctctggggtgtagggaagaggcgggaggagtcatggggatggggagcggcagggggagagaggggccctcgacaaaggcttgggaaatgaggggaggtggaggcagggcaggggaagcgaagagtcagccttggagagagcaccctggggcctccgtgtcggggtacacccagcactttgcgacctgcggcccagcaggcgcggaggatggcggggaggaagccagcagcccctgtgtttactgtcgtcagaaaggtcttgtgttttggttttggggtttttgttttgtttgtgttttgtttggcttgtttgttttttaaggggaaaaaagtttgtaattatttcatccaaatctcccgttatatatctgtgaataataagagattttataatagcaagaaaatgatgtatattttagtttgttgacaaataagtcatcatgatcacgaaggacactgagaaaaaataatttagaaccctggtttttgtgaatttttttgttttgtgtttctttgttttgagatttgtgtttggtttggtttttgcactgcactaaggcaggagggttggagggctgggtgcagcctgggagtccgatggttttcagcaggagacggggtgtcccctgcagggggctaaactgcaggggcctgagattagctgtgaacatgtgggagcccgatgcatgtgggtcagggatctgggggcccccccagctggcgggaaccccaaatggacacaaactgtacatttgccaatgggtttttttcagaccatggtttttacttgcaaataaacctgagttcttttctgca

SEQ ID NO: 198971 - DNA, 4990 bp, Homo sapiens
  Payload ID: 19252
  Gene Name: vav 3 guanine nucleotide exchange factor
  Uniprot ID: Q9UKW4
  ENST ID: ENST00000370056
  CDS Start-End: 276-2819
gcggcagccgccgccgagccggccggggcgcacggagagcgcgcgggactcgctgcagcggcggccgggtcgcggcgcacccgggccgggaccggagccgagcctagcgcggcgcccgcgacccgtcagccgcggctcctgctccctcgatcccgcgcggggaaagggccggcggctgttggcgtcggcggggcgcggaggaaccgcggcggcggcggcggcggccgcatccttgccgcccgccccggcccagccgcgtcccggagccgtcgggcatggagccgtggaagcagtgcgcgcagtggctcatccattgcaaggtgctgcccaccaaccaccgggtgacctgggactcggctcaggtgttcgaccttgcgcagaccctccgcgatggagtcctgctctgccagctgcttaacaacctccgggcgcactccatcaacctgaaggagatcaacctgaggccgcagatgtcccagtttctctgtttgaagaacataaggacatttctcacggcctgttgtgagacgtttggaatgaggaaaagtgaacttttcgaggcatttgacttgtttgatgttcgtgactttggaaaggttatagaaacattatcacgactttctcgaacacctatagcattggccacaggaatcaggcccttcccaacagaagaaagcattaatgatgaagacatctacaaaggccttcctgatttaatagatgaaacccttgtggaagatgaagaagatctctatgactgtgtttatggggaagatgaaggtggagaagtctatgaggacttaatgaaggcagaggaagcacatcagcccaaatgtccagaaaatgatatacgaagttgttgtctagcagaaattaagcagacagaagaaaaatatacagaaactttggagtcaatagaaaagtatttcatggcaccactaaaaagatttctgacagcagcagaatttgattcagtattcatcaacattcctgaacttgtaaaacttcatcggaacctaatgcaagagattcatgattccattgtaaataaaaatgaccagaacttgtaccaagtttttattaactacaaggaaagattggttatttacgggcagtactgcagtggagtggagtcagccatctctagtttagactacatttctaagacaaaagaagatgtcaaactgaaattagaggaatgttccaaaagagcaaataatgggaaatttactcttcgagacttgcttgtggttcctatgcaacgtgttttaaagtaccaccttctcctccaggaactggtcaaacataccactgatccgactgagaaggcaaatctgaaactggctcttgatgccatgaaggacttggcacaatatgtgaatgaagtgaaaagagataatgagacccttcgtgaaattaaacagtttcagctatctatagagaatttgaaccaaccagttttgctttttggacgacctcagggagatggtgaaattcgaataaccactctagacaagcataccaaacaagaaaggcatatcttcttatttgatttggcagtgatcgtatgtaagagaaaaggtgataactatgaaatgaaggaaataatagatcttcagcagtacaagatagccaataatcctacaaccgataaagaaaacaaaaagtggtcttatggcttctacctcatccatacccaaggacaaaatgggttagaattttattgcaaaacaaaagatttaaagaagaaatggctagaacagtttgaaatggctttgtctaacataagaccagactatgcagactccaatttccacgacttcaagatgcataccttcactcgagtcacatcctgcaaagtctgccagatgctcctgaggggaacattttatcaaggctatttatgttttaagtgtggagcgagagcacacaaagaatgtttgggaagagtagacaattgtggcagagttaattctggtgaacaagggacactcaaactaccagagaaacggaccaatggactgcgaagaactcctaaacaggtggatccaggtttaccaaagatgcaggtcattaggaactattctggaacaccacccccagctctgcatgaaggaccccctttacagctccaggccggggataccgttgaacttctgaaaggagatgcacacagtctgttttggcagggcagaaatttagcatctggagaggttggattttttccaagtgatgcagtcaagccttgcccatgtgtgcccaaaccagtagattattcttgccaaccctggtatgctggagcaatggaaagattgcaagcagagaccgaacttattaatagggtaaatagtacttaccttgtgaggcacaggaccaaagagtcaggagaatatgcaattagcattaagtacaataatgaagcaaagcacatcaagattttaacaagagatggcttttttcacattgcagaaaatagaaaatttaaaagtttaatggaacttgtggagtactacaagcatcattctctcaaggaagggttcagaaccttagatacaactctgcagtttccatacaaggagccagaacattcagctggacagaggggtaatagagcaggcaacagcttgttaagtccaaaagtgctgggcattgccatcgctcggtatgacttctgtgcaagagatatgagagagttgtccttgttgaaaggagatgtggtgaagatttacacaaagatgagtgcaaatggctggtggagaggagaagtaaatggcagggtgggctggtttccatccacatatgtggaagaggatgaataaattcaaatcccgtgttgcaccctgcaccaaaaatttcagagaagggataaatagaagcctgcacagcatcgtgaattaactgaagtgtttaaaaagctgcatttctggctgttcaacatcctccctccttagcccctcctaagtcttaatgctgagatttctaaagatgctggtactgacagattaatggcttgcctagagctgtgcaagaaacagcctgccagtctgtcattgtcagggaccagggcaaaaccaagagctgttcttcccagaagagccctgcaaacacattggttcgtgcttccctttacttcttctggtcagataccatgaatgccagtcatcagtaaatcttaatacacttttgctttattctcacatgccattcaccagattatttgatggtacaaagaagcagaagtgtaattttccttttcccagcatgacgaaaaattggagttctgccatttgagcagcttactggaaagatccagccttacttgtcttaaattgtccaacaaggtgactcattgcccggcaaacacttttaccctcagatgttactcatgatattataaaatatgaggccagtgctcaggtttgcatcataagtgagctatccctgaagggttttaattacttatttggtgtcctgattatatttgcaaacttctttataaaaggtgaaaaaagcacacaaaagagagggtgtcttcatattaaaccttcacaaccttcatgatttcataggattattttggaaatatagcacttgactttatgaaaggatctgggctaggtatattaagggtagttgccaataacctgaagaagctggcattgtttacagaaacagatcaagggctataatttatgtcattttatagcagcagtatctattaatacatgccttttcctcccatccacctcccccgcacacacacaaagatgacctgggacatgatttttttattcccacattttcttggagcacaaacaactttgttgaggattttggaaggaaagcacaactgggtcctttattcatttctgggacagaaagagggtcagtggacttttgtgggcctccagcttctctcagagtctccccctctgcagcccatcctgggagtgtattaactggagggaagatgggtcttgcagtacatttgttttgcccagccatcactcttttttgtgaggagcctaaatacattcttcctggggtccagagtccccattcaaggcagtcaagttaagacactaacttggccctttcctgatggaaatatttcctccatagcagaagttgtgttctgacaagactgagagagttacatgttgggaaaaaaaagaagcattaacttagtagaactgaaccaggagcattaagttctgaaattttgaatcatctctgaaatgaagcaggtgtagcctgccctctcatcaatccgtctgggtgccagaactcaaggttcagtggacacatccccctgttagagaccctcatgggctaggacttttcatctaggatagattcaagacctttacctcagaattatgtaaactgtgattgtgttttagaaaaattattatttgctaaaaccatttaagtctttgtatatgtgtaaatgatcacaaaaatgtattttataaaatgttctgtacaataaagttacacctcaaagtgtactcttggaatggattctttcctgtaaagtcttatctgcgactctgtctcgggaatgttttgtctgttgccgtcagccgaactttgttatggagggagcagcctcacacaagcagaaacactcctgtggatggtattgtagcatgtattgtttattttagtcaatagaccctctccttataaatggtgtttagtcttcctgttgcatttcatgggcctgggggtttcctagcagaggatattggagcccctttttgtgacattaccaattacatctttgtccacgtttaatactttgttttggaaaatttaaatgctgcagatttgtgtagagttctaataccaaagacagaagtaaatgttttccatatactttgtcttgcctgtatgcagccctcgtgtaatacggtgaattagagtggtatttcactttgtattattttgtaaatatgtcaatataataaatagtgactaaattgat

SEQ ID NO: 198972 - DNA, 1293 bp, Homo sapiens
  Payload ID: 19252
  Gene Name: vav 3 guanine nucleotide exchange factor
  Uniprot ID: Q9UKW4
  ENST ID: ENST00000415432
  CDS Start-End: 74-937
aaagcagtggtgttttaccactctgcagagaaagctaaggttgctaaccaaacaaaataactttacactgacaatgccaatttttacatttctttcagaacaagggacactcaaactaccagagaaacggaccaatggactgcgaagaactcctaaacaggtggatccaggtttaccaaagatgcaggtcattaggaactattctggaacaccacccccagctctgcatgaaggaccccctttacagctccaggccggggataccgttgaacttctgaaaggagatgcacacagtctgttttggcagggcagaaatttagcatctggagaggttggattttttccaagtgatgcagtcaagccttgcccatgtgtgcccaaaccagtagattattcttgccaaccctggtatgctggagcaatggaaagattgcaagcagagaccgaacttattaatagggtaaatagtacttaccttgtgaggcacaggaccaaagagtcaggagaatatgcaattagcattaagtacaataatgaagcaaagcacatcaagattttaacaagagatggcttttttcacattgcagaaaatagaaaatttaaaagtttaatggaacttgtggagtactacaagcatcattctctcaaggaagggttcagaaccttagatacaactctgcagtttccatacaaggagccagaacattcagctggacagaggggtaatagagcaggcaacagcttgttaagtccaaaagtgctgggcattgccatcgctcggtatgacttctgtgcaagagatatgagagagttgtccttgttgaaaggagatgtggtgaagatttacacaaagatgagtgcaaatggctggtggagaggagaagtaaatggcagggtgggctggtttccatccacatatgtggaagaggatgaataaattcaaatcccgtgttgcaccctgcaccaaaaatttcagagaagggataaatagaagcctgcacagcatcgtgaattaactgaagtgtttaaaaagctgcatttctggctgttcaacatcctccctccttagcccctcctaagtcttaatgctgagatttctaaagatgctggtactgacagattaatggcttgcctagagctgtgcaagaaacagcctgccagtctgtcattgtcagggaccagggcaaaaccaagagctgttcttcccagaagagccctgcaaacacattggttcgtgcttccctttacttcttctggtcagataccatgaatgccagtcatcagtaaatctta

SEQ ID NO: 198973 - DNA, 546 bp, Homo sapiens
  Payload ID: 19252
  Gene Name: vav 3 guanine nucleotide exchange factor
  ENST ID: ENST00000529809
  CDS Start-End: 1-546
agtacaagatagccaataatcctacaaccgataaagaaaacaaaaagtggtcttatggcttctacctcatccatacccaaggacaaaatgggttagaattttattgcaaaacaaaagatttaaagaagaaatggctagaacagtttgaaatggctttgtctaacataagaccagactatgcagactccaatttccacgacttcaagatgcataccttcactcgagtcacatcctgcaaagtctgccagatgctcctgaggggaacattttatcaaggctatttatgttttaagtgtggagcgagagcacacaaagaatgtttgggaagagtagacaattgtggcagagttaattctggtggtttaccaaagatgcaggtcattaggaactattctggaacaccacccccagctctgcatgaaggaccccctttacagctccaggccggggataccgttgaacttctgaaaggagatgcacacagtctgttttggcagggcagaaatttagcatctggagaggttggattttttccaagtgatgcag

SEQ ID NO: 198974 - DNA, 4510 bp, Homo sapiens
  Payload ID: 19252
  Gene Name: vav 3 guanine nucleotide exchange factor
  Uniprot ID: Q9UKW4
  ENST ID: ENST00000527011
  CDS Start-End: 141-2768
ctcctgctccctcgatcccgcgcggggaaagggccggcggctgttggcgtcggcggggcgcggaggaaccgcggcggcggcggcggcggccgcatccttgccgcccgccccggcccagccgcgtcccggagccgtcgggcatggagccgtggaagcagtgcgcgcagtggctcatccattgcaaggtgctgcccaccaaccaccgggtgacctgggactcggctcaggtgttcgaccttgcgcagaccctccgcgatggagtcctgctctgccagctgcttaacaacctccgggcgcactccatcaacctgaaggagatcaacctgaggccgcagatgtcccagtttctctgtttgaagaacataaggacatttctcacggcctgttgtgagacgtttggaatgaggaaaagtgaacttttcgaggcatttgacttgtttgatgttcgtgactttggaaaggttatagaaacattatcacgactttctcgaacacctatagcattggccacaggaatcaggcccttcccaacagaagaaagcattaatgatgaagacatctacaaaggccttcctgatttaatagatgaaacccttgtggaagatgaagaagatctctatgactgtgtttatggggaagatgaaggtggagaagtctatgaggacttaatgaaggcagaggaagcacatcagcccaaatgtccagaaaatgatatacgaagttgttgtctagcagaaattaagcagacagaagaaaaatatacagaaactttggagtcaatagaaaagtatttcatggcaccactaaaaagatttctgacagcagcagaatttgattcagtattcatcaacattcctgaacttgtaaaacttcatcggaacctaatgcaagagattcatgattccattgtaaataaaaatgaccagaacttgtaccaagtttttattaactacaaggaaagattggttatttacgggcagtactgcagtggagtggagtcagccatctctagtttagactacatttctaagacaaaagaagatgtcaaactgaaattagaggaatgttccaaaagagcaaataatgggaaatttactcttcgagacttgcttgtggttcctatgcaacgtgttttaaagtaccaccttctcctccaggaactggtcaaacataccactgatccgactgagaaggcaaatctgaaactggctcttgatgccatgaaggacttggcacaatatgtgaatgaagtgaaaagagataatgagacccttcgtgaaattaaacagtttcagctatctatagagaatttgaaccaaccagttttgctttttggacgacctcagggagatggtgaaattcgaataaccactctagacaagcataccaaacaagaaaggcatatcttcttatttgatttggcagtgatcgtatgtaagagaaaaggtgataactatgaaatgaaggaaataatagatcttcagcagtacaagatagccaataatcctacaaccgataaagaaaacaaaaagtggtcttatggcttctacctcatccatacccaaggacaaaatgggttagaattttattgcaaaacaaaagatttaaagaagaaatggctagaacagtttgaaatggctttgtctaacataagaccagactatgcagactccaatttccacgacttcaagatgcataccttcactcgagtcacatcctgcaaagtctgccagatgctcctgaggggaacattttatcaaggctatttatgttttaagtgtggagcgagagcacacaaagaatgtttgggaagagtagacaattgtggcagagttaattctggtgaacaagggacactcaaactaccagagaaacggaccaatggactgcgaagaactcctaaacaggtggatccaggtttaccaaagatgcaggtcattaggaactattctggaacaccacccccagctctgcatgaaggaccccctttacagctccaggccggggataccgttgaacttctgaaaggagatgcacacagtctgttttggcagggcagaaatttagcatctggagaggttggattttttccaagtgatgcagtcaagccttgcccatgtgtgcccaaaccagtagattattcttgccaaccctggtatgctggagcaatggaaagattgcaagcagagaccgaacttattaatagggtaaatagtacttaccttgtgaggcacaggaccaaagagtcaggagaatatgcaattagcattaagtacaataatgaagcaaagcacatcaagattttaacaagagatggcttttttcacattgcagaaaatagaaaatttaaaagtttaatggaacttgtggagtactacaagcatcattctctcaaggaagggttcagaaccttagatacaactctgcagtttccatacaaggagccagaacattcagctggacagaggggtaatagagcaggcaacagctccccctctttgttctgtggcttttcttttgtaactcctccagactacagctttgttcccccttcttccactcctttctggtcagtgttaagtccaaaagtgctgggcattgccatcgctcggtatgacttctgtgcaagagatatgagagagttgtccttgttgaaaggagatgtggtgaagatttacacaaagatgagtgcaaatggctggtggagaggagaagtaaatggcagggtgggctggtttccatccacatatgtggaagaggatgaataaattcaaatcccgtgttgcaccctgcaccaaaaatttcagagaagggataaatagaagcctgcacagcatcgtgaattaactgaagtgtttaaaaagctgcatttctggctgttcaacatcctccctccttagcccctcctaagtcttaatgctgagatttctaaagatgctggtactgacagattaatggcttgcctagagctgtgcaagaaacagcctgccagtctgtcattgtcagggaccagggcaaaaccaagagctgttcttcccagaagagccctgcaaacacattggttcgtgcttccctttacttcttctggtcagataccatgaatgccagtcatcagtaaatcttaatacacttttgctttattctcacatgccattcaccagattatttgatggtacaaagaagcagaagtgtaattttccttttcccagcatgacgaaaaattggagttctgccatttgagcagcttactggaaagatccagccttacttgtcttaaattgtccaacaaggtgactcattgcccggcaaacacttttaccctcagatgttactcatgatattataaaatatgaggccagtgctcaggtttgcatcataagtgagctatccctgaagggttttaattacttatttggtgtcctgattatatttgcaaacttctttataaaaggtgaaaaaagcacacaaaagagagggtgtcttcatattaaaccttcacaaccttcatgatttcataggattattttggaaatatagcacttgactttatgaaaggatctgggctaggtatattaagggtagttgccaataacctgaagaagctggcattgtttacagaaacagatcaagggctataatttatgtcattttatagcagcagtatctattaatacatgccttttcctcccatccacctcccccgcacacacacaaagatgacctgggacatgatttttttattcccacattttcttggagcacaaacaactttgttgaggattttggaaggaaagcacaactgggtcctttattcatttctgggacagaaagagggtcagtggacttttgtgggcctccagcttctctcagagtctccccctctgcagcccatcctgggagtgtattaactggagggaagatgggtcttgcagtacatttgttttgcccagccatcactcttttttgtgaggagcctaaatacattcttcctggggtccagagtccccattcaaggcagtcaagttaagacactaacttggccctttcctgatggaaatatttcctccatagcagaagttgtgttctgacaagactgagagagttacatgttgggaaaaaaaagaagcattaacttagtagaactgaaccaggagcattaagttctgaaattttgaatcatctctgaaatgaagcaggtgtagcctgccctctcatcaatccgtctgggtgccagaactcaaggttcagtggacacatccccctgttagagaccctcatgggctaggacttttcatctaggatagattcaagacctttacctcagaattatgtaaactgtgattgtgttttagaaaaattattatttgctaaaaccatttaagtctttgtatatgtgtaaatgatcacaaaaatgtattttataaaatgttctgtacaataaagttacacctcaaagtgtactcttggaatggattctttcctgtaaagtcttatctgcgactctgtctcg

SEQ ID NO: 198975 - DNA, 1374 bp, Homo sapiens
  Payload ID: 19252
  Gene Name: vav 3 guanine nucleotide exchange factor
  ENST ID: ENST00000529413
  CDS Start-End: 74-232
aaagcagtggtgttttaccactctgcagagaaagctaaggttgctaaccaaacaaaataactttacactgacaatgccaatttttacatttctttcagaacaagggacactcaaactaccagaggtttaccaaagatgcaggtcattaggaactattctggaacaccacccccagctctgcatgaaggaccccctttacagctccaggccggggataccgttgaacttctgaaaggagatgcacacagtctgttttggcagggcagaaatttagcatctggagaggttggattttttccaagtgatgcagtcaagccttgcccatgtgtgcccaaaccagtagattattcttgccaaccctggtatgctggagcaatggaaagattgcaagcagagaccgaacttattaatagggtaaatagtacttaccttgtgaggcacaggaccaaagagtcaggagaatatgcaattagcattaagtacaataatgaagcaaagcacatcaagattttaacaagagatggcttttttcacattgcagaaaatagaaaatttaaaagtttaatggaacttgtggagtactacaagcatcattctctcaaggaagggttcagaaccttagatacaactctgcagtttccatacaaggagccagaacattcagctggacagaggggtaatagagcaggcaacagcttgttaagtccaaaagtgctgggcattgccatcgctcggtatgacttctgtgcaagagatatgagagagttgtccttgttgaaaggagatgtggtgaagatttacacaaagatgagtgcaaatggctggtggagaggagaagtaaatggcagggtgggctggtttccatccacatatgtggaagaggatgaataaattcaaatcccgtgttgcaccctgcaccaaaaatttcagagaagggataaatagaagcctgcacagcatcgtgaattaactgaagtgtttaaaaagctgcatttctggctgttcaacatcctccctccttagcccctcctaagtcttaatgctgagatttctaaagatgctggtactgacagattaatggcttgcctagagctgtgcaagaaacagcctgccagtctgtcattgtcagggaccagggcaaaaccaagagctgttcttcccagaagagccctgcaaacacattggttcgtgcttccctttacttcttctggtcagataccatgaatgccagtcatcagtaaatcttaatacacttttgctttattctcacatgccattcaccagattatttgatggtacaaagaagcagaagtgtaattttccttttcccagcatgacgaaaaattggagttctgccatttgagcagcttactg

SEQ ID NO: 198976 - DNA, 2271 bp, Homo sapiens
  Payload ID: 19252
  Gene Name: vav 3 guanine nucleotide exchange factor
  ENST ID: ENST00000490388
  CDS Start-End: 1-1850
agtgcgcgcagtggctcatccattgcaaggtgctgcccaccaaccaccgggtgacctgggactcggctcaggtgttcgaccttgcgcagaccctccgcgatggagtcctgctctgccagctgcttaacaacctccgggcgcactccatcaacctgaaggagatcaacctgaggccgcagatgtcccagtttctctgtttgaagaacataaggacatttctcacggcctgttgtgagacgtttggaatgaggaaaagtgaacttttcgaggcatttgacttgtttgatgttcgtgactttggaaaggttatagaaacattatcacgactttctcgaacacctatagcattggccacaggaatcaggcccttcccaacagaagaaagcattaatgatgaagacatctacaaaggccttcctgatttaatagatgaaacccttgtggaagatgaagaagatctctatgactgtgtttatggggaagatgaaggtggagaagtctatgaggacttaatgaaggcagaggaagcacatcagcccaaatgtccagaaaatgatatacgaagttgttgtctagcagaaattaagcagacagaagaaaaatatacagaaactttggagtcaatagaaaagtatttcatggcaccactaaaaagatttctgacagcagcagaatttgattcagtattcatcaacattcctgaacttgtaaaacttcatcggaacctaatgcaagagattcatgattccattgtaaataaaaatgaccagaacttgtaccaagtttttattaactacaaggaaagattggttatttacgggcagtactgcagtggagtggagtcagccatctctagtttagactacatttctaagacaaaagaagatgtcaaactgaaattagaggaatgttccaaaagagcaaataatgggaaatttactcttcgagacttgcttgtggttcctatgcaacgtgttttaaagtaccaccttctcctccaggaactggtcaaacataccactgatccgactgagaaggcaaatctgaaactggctcttgatgccatgaaggacttggcacaatatgtgaatgaagtgaaaagagataatgagacccttcgtgaaattaaacagtttcagctatctatagagaatttgaaccaaccagttttgctttttggacgacctcagggagatggtgaaattcgaataaccactctagacaagcataccaaacaagaaaggcatatcttcttatttgatttggcagtgatcgtatgtaagagaaaaggtgataactatgaaatgaaggaaataatagatcttcagcagtacaagatagccaataatcctacaaccgataaagaaaacaaaaagtggtcttatggcttctacctcatccatacccaaggacaaaatgggttagaattttattgcaaaacaaaagatttaaagaagaaatggctagaacagtttgaaatggctttgtctaacataagaccagactatgcagactccaatttccacgacttcaagatgcataccttcactcgagtcacatcctgcaaagtctgccagatgctcctgaggggaacattttatcaaggctatttatgttttaagtgtggagcgagagcacacaaagaatgtttgggaagagtagacaattgtggcagagttaattctggtgaacaagggacactcaaactaccagagaaacggaccaatggactgcgaagaactcctaaacaggtggatccagatgtgccctgtctccttcatttctttatttccatggcccctgctactagaagcattgtaaaaagccaaaagaagaacaagaaattctgaggacatgggtgaaaatgcagccttgaggtttctgaaaataacaggagacagacaaggctggtgtccagcaacaatactgggtagctctttttgtccccacttacacagcgaaggataaagaagagatcctatggacacttagtaaggattacttcatgttttaattcaaagtactttggaaagaagactttgagcagagtggaatagcaggaggtttttgtaaggtgaaatagaatgaaagtgcagccaagaatttttctgtcttcaattttaaagaacaccggcataactcatttttctttttttcccctgtgttctttttgaccttcttagcagctcctgactttctcccttggggatttttctctgtatagtcagcgctgactcccttagaaatcctgaaccccacacccgtatcgcg

SEQ ID NO: 198977 - DNA, 545 bp, Homo sapiens
  Payload ID: 19252
  Gene Name: vav 3 guanine nucleotide exchange factor
  ENST ID: ENST00000525231
  CDS Start-End: 74-232
aaagcagtggtgttttaccactctgcagagaaagctaaggttgctaaccaaacaaaataactttacactgacaatgccaatttttacatttctttcagaacaagggacactcaaactaccagaggtttaccaaagatgcaggtcattaggaactattctggaacaccacccccagctctgcatgaaggaccccctttacagctccaggccggggataccgttgaacttctgaaaggagatgcacacagtctgttttggcagggcagaaatttagcatctggagaggttggattttttccaagtgatgcagtcaagccttgcccatgtgtgcccaaaccagtagattattcttgccaaccctgttttagagatggggtcttgctctgtcacccaggatggagtgcagcgatgccatcataacccattgcagccttgaactcctgggctgaagtgatcctccaaagtgctgggattacaggtatgctggagcaatggaaagattgcaagcagagaccgaacttattaatagggtaaatagtacttac

SEQ ID NO: 198978 - DNA, 1439 bp, Homo sapiens
  Payload ID: 19253
  Gene Name: VCP-interacting membrane selenoprotein
  Uniprot ID: Q9BQE4
  ENST ID: ENST00000398226
  CDS Start-End: 34-603
cggcagggctgggcggcggcggcggcggcggtcatggaacgccaagaggagtctctgtccgcgcggccggccctggagaccgaggggctgcgcttcctgcacaccacggtgggctccctgctggccacctatggctggtacatcgtcttcagctgcatccttctctacgtggtctttcagaagctttccgcccggctaagagccttgaggcagaggcagctggaccgagctgcggctgctgtggaacctgatgttgttgttaaacgacaagaagctttagcagctgctcgactgaaaatgcaagaagaactaaatgcgcaagttgaaaagcataaggaaaaactgaaacaacttgaagaagaaaaaaggagacagaagattgaaatgtgggacagcatgcaagaaggaaaaagttacaaaggaaatgcaaagaagccccaggaggaagacagtcctgggccttccacttcatctgtcctgaaacggaaatcggacagaaagcctttgcggggaggaggttataacccgttgtctggtgaaggaggcggagcttgctcctggagacctggacgcagaggcccgtcatctggcggatgaggctaagaatcttgtagaatattccgtggttgcttcttgaccaagggaaatacagtctggctgtgagagacttaaaatctcttgaggagcgctctggagaatggctgaaggagaggaaacaggagccttgagcagtgtaattacaaacaaataggttggcatagtcttaagtctttgagtctagagagatttgagttttgttttgcctgtggaggcaattgggggtttcaggtcaaagagagggtcagtggaaacaagggtgggccttgtgaggtgtggggaagccctgggaccctcactccccttccagtgtgtaactggattggctcccaccagcccagaagatttacgacgtgggaaatggtatacttggattaaaatatttcatccagatttgtttacatctagagagaaccccttgtaggttataaggaaactttttaacattcttccttgaatatattttctgtagctgaaaatgtttgtgaagtggctgtcaactacacatcgcatgagtagaggggctctgggtcggggtttcatatgcagcagagcagctcccttgctgccgtccatcaagagccctcaacacaagagtttgttataaatagaaataaacgacaaaaagtagaggggtatgtttaagtacactattagatgtgactgactaccttgaaacctgatttttttccatggggagaaacagtgcttgaattctgcatgccccccttgcatctagcaccttttggtaggggtggaaggagggtgtcagggagaatgattaggagataatggaggggaggggaaacttgcgttgtgtaatagcatttgaagagcactta

SEQ ID NO: 198979 - DNA, 1188 bp, Homo sapiens
  Payload ID: 19253
  Gene Name: VCP-interacting membrane selenoprotein
  Uniprot ID: Q9BQE4
  ENST ID: ENST00000526049
  CDS Start-End: 30-599
agggctgggcggcggcggcggcggcggtcatggaacgccaagaggagtctctgtccgcgcggccggccctggagaccgaggggctgcgcttcctgcacaccacggtgggctccctgctggccacctatggctggtacatcgtcttcagctgcatccttctctacgtggtctttcagaagctttccgcccggctaagagccttgaggcagaggcagctggaccgagctgcggctgctgtggaacctgatgttgttgttaaacgacaagaagctttagcagctgctcgactgaaaatgcaagaagaactaaatgcgcaagttgaaaagcataaggaaaaactgaaacaacttgaagaagaaaaaaggagacagaagattgaaatgtgggacagcatgcaagaaggaaaaagttacaaaggaaatgcaaagaagccccaggaggaagacagtcctgggccttccacttcatctgtcctgaaacggaaatcggacagaaagcctttgcggggaggaggttataacccgttgtctggtgaaggaggcggagcttgctcctggagacctggacgcagaggcccgtcatctggcggatgaggctaagaatcttgttagtgtcacttttgacattagcaagatgaacccttaaccctcgattcaattgccttacgcacgcttttcacagtgactagccaaggggaggtggggttgatttctgttcctaactacacctgcatatgtcagggctccagtcagcaaaaggtatagatgttgcctctaggcatgaggtcattggtcacattctacttggagacagtgattgcattcattgatttcatggttaattgctagttggtaggtaaaggcctctagatgattagcaatcttgataaaagaggcctagtaatgttcttttgaggttagaaatccttgctgctaggacagtctctgtgacaggttgcgttgaatgatgtcttccttatcaatggtgagcccaccagtgaggattactgatgtggacagttgatggggtttgtttctgtatatttatttttatgtacagaactttgtaaaaacgaaactatttaaaaaacaagaataacatttttagcatctttattcaaggagatttatggacttcaatttgtctatcaaacattaaatagctttttattacaacctctaactatta

SEQ ID NO: 198980 - DNA, 764 bp, Homo sapiens
  Payload ID: 19253
  Gene Name: VCP-interacting membrane selenoprotein
  ENST ID: ENST00000531964
  CDS Start-End: 28-528
gcgccgccacttttgcgacgcgcagccatgatggtgggctccctgctggccacctatggctggtacatcgtcttcagctgcatccttctctacgtggtctttcagaagctttccgcccggctaagagccttgaggcagaggcagctggaccgagctgcggctgctgtggaacctgatgttgttgttaaacgacaagaagctttagcagctgctcgactgaaaatgcaagaagaactaaatgcgcaagttgaaaagcataaggaaaaactgaaacaacttgaagaagaaaaaaggagacagaagattgaaatgtgggacagcatgcaagaaggaaaaagttacaaaggaaatgcaaagaagccccaggaggaagacagtcctgggccttccacttcatctgtcctgaaacggaaatcggacagaaagcctttgcggggaggaggttataacccgttgtctggtgaaggaggcggagcttgctcctggagacctggacgcagaggcccgtcatctggcggatgaggctaagaatcttgtagaatattccgtggttgcttcttgaccaagggaaatacagtctggctgtgagagacttaaaatctcttgaggagcgctctggagaatggctgaaggagaggaaacaggagccttgagcagtgtaattacaaacaaataggttggcatagtcttaagtctttgagtctagagagatttgagttttgttttgcctgtggaggcaattgggggtttcaggtcaaagagag

SEQ ID NO: 198981 - DNA, 655 bp, Homo sapiens
  Payload ID: 19253
  Gene Name: VCP-interacting membrane selenoprotein
  ENST ID: ENST00000528346
  CDS Start-End: 1-655
atgatgggtgggtcgtccgccgctgcaccgggcgccggagcctgggaggcctgggaacggtcgggcgttggcgcttacgcggaccttgggcagcaggcccggaccttgcgcggaggcttctcgggagccgcacttccctgggcggctcggctgtcccttgtttgcgcaagtcttttttgcgaaccaagcccttccttgggctccctgctggccacctatggctggtacatcgtcttcagctgcatccttctctacgtggtctttcagaagctttccgcccggctaagagccttgaggcagaggcagctggaccgagctgcggctgctgtggaacctgatgttgttgttaaacgacaagaagctttagcagctgctcgactgaaaatgcaagaagaactaaatgcgcaagttgaaaagcataaggaaaaactgaaacaacttgaagaagaaaaaaggagacagaagattgaaatgtgggacagcatgcaagaaggaaaaagttacaaaggaaatgcaaagaagccccaggaggaagacagtcctgggccttccacttcatctgtcctgaaacggaaatcggacagaaagcctttgcggggaggaggttataacccgttgtctggtgaaggaggcggagcttgctcctggagacctg

SEQ ID NO: 198982 - DNA, 3880 bp, Homo sapiens
  Payload ID: 19254
  Gene Name: v-crk avian sarcoma virus CT10 oncogene homolog
  Uniprot ID: P46108
  ENST ID: ENST00000300574
  CDS Start-End: 142-1056
gggggaggcccgcggctgccgccgccatttcgggcgctgctgtgaagctgaaaccggagccggtccgctgggcggcgggcgccgggggccggaggggcgcgcgcggcggcggcaccccagcgtttaggcgcggaggcagccatggcgggcaacttcgactcggaggagcggagtagctggtactgggggaggttgagtcggcaggaggcggtggcgctgctgcagggccagcggcacggggtgttcctggtgcgggactcgagcaccagccccggggactatgtgctcagcgtctcagagaactcgcgcgtctcccactacatcatcaacagcagcggcccgcgcccgccggtgccaccgtcgcccgcccagcctccgcccggggtgagcccctccagactccgaataggagatcaagagtttgattcattgcctgctttactggaattctacaaaatacactatttggacactacaacgttgatagaaccagtttccagatccaggcagggtagtggagtgattctcaggcaggaggaggcggagtatgtgcgagccctctttgactttaatgggaatgatgaggaagatcttccctttaagaaaggagacatcttgagaatccgggacaagcctgaagagcagtggtggaatgcggaggacagcgaaggcaagagagggatgattccagtcccttacgtcgagaagtatagacctgcctccgcctcagtatcggctctgattggaggtaaccaggagggttcccacccacagccactgggtgggccggagcctgggccctatgcccaacccagcgtcaacactccgctccctaacctccagaatgggcccatatatgccagggttatccagaagcgagtccccaatgcctacgacaagacagccttggctttggaggtcggtgagctggtaaaggttacgaagattaatgtgagtggtcagtgggaaggggagtgtaatggcaaacgaggtcacttcccattcacacatgtccgtctgctggatcaacagaatcccgatgaggacttcagctgagtatagttcaacagttttgctgacagatgggaacaatcttttttttttttttccaactgccatctatacaattttcttacagatgtcaaaagcagtctagtttatataagcattctgttacctgtgatattttttagactgaactgctccattcctagtcttaattaccatattcagggtacgaactggagggcttgtgtgttagcttctgaattggcaattggaggcggtagtggtcgtgcctgtgtgtatcagaagggataggtatcttgcctcctttctctcaggcagtgcaaatcaccctgtggaaaaccgatggacaggaaggagtgttacacactgcttaccctgatttattcagtggttttgttttcattctggaaccatactatcaaatggcgacagactgttccgttccacccccgtgaagtaatcatgcaccgtgtgaatagtatcaagcaggattgctttcattgtatggagcatgaccagcgtgtgactcattctgacatttcagatcctaagaattctaagaacactactagaagcatttgttccctcctagtcaatgcttcatactttttcttgggattcttttagcccttgacattcttgtcccccaaacctgtaagtaggtgaattcctaagataagtgtgtattttcattccaggtgaaaagcaggatgtaccgagcactttattcagtgcatagctttaagccagtgttggattcactaagtggacagccagtctcccagctctctgccttccccaaaagggtcgtagtaggtcacccttctacagcagctaactagagtcctaactaatgggatccagcagggccatttctccagagggccagtatcctattaggagactcttggaattcttaggttctactcaagagtggaaggaccaatcacctctgatattctgtggaaggttttggggtcaaattctgccctctgcattctgtgcaacttgtataaaagtcaagttagtattacatgaatttggggtagggttagtgctttgaaaaaatgttgaaccggctgggcgcggtggctcacgtctgtaatcccagcactttgggaggccgaggcgggtggatcatgaggtcaggagttcgagaccagcctggccaacatagtgaaaccccatctctgctaaagatataaaaaattagcccggcgtggtggtgcacgcctgtaatcccagctactcgggaggctgaggcaggagaattgcttcaacctgggaggtggaggctgcagtgagccgagatcgcaccactgcgttccagcctgagcgacagggcaagactcagtctcaaaaaaaaaaaaaaggaaaaaaaaaagaaaaaaaaatgttgaaccaattgtgaattacttatgtattattcatttctcatggggagagtaatgctgttgaagaacattacattgtaaactgccttcatttttggctctttgtttatgttcaggtttagtttacaaacccatttaagtatggaatgatttatatggggtcaggtgctccacaaaatagacctatgagaccaaaaatgacctaggctatttagacgacagcatgaaacttccacgttagttctcagtctataaaggcacttaccggtctctggtgtggtatgaccaatagaaacaccttatagtttgctttggacctcattttggaaaaataatctgcctttctaattgttctgcataggttaaaatgataaatttacattctttgaacctataccagattgtggtgtccgagtgaccggcacactgtctgacacacagtcagtgtgcacgtatttgtctgagtgaatgaggagacctgagaaaccggtgacgtggcacagggaagccagctggcccaggattccgtacatggccgcaagcagactaacgcgttgacgctaatttaatgtattttacctcacactaaggtcatgcttgataaagacgttaaactcaacttgtaaaatggtagcccagtgctatgcacagagtgggtgctcattagtgttgaatgaacacatttgtaatactacatgtaattccatctgactgctttgttaaattttcagttagaacgtagatactgtaaagtccacacacacattaaatcttgttttcctgaaagtatggcatcaaaaatacttgtagaaaaaccttgtcacaactgatttgaatgttcctattttcttttcctttgactttgatattggcttgtaatgtctcttttcatcatatgtaatatcagtggaacaggcagcgctactcaagtcctaaggattcctcagtgatcagtgatccagggccgttcatgaaccactgggctggatttgactgttgagtgtggcagttaatgcccctcaagaaatcaaaggatgtcttataagtgtcttccaaaaaaaagcaaatgctgaaatcctattggcaaagtaaactgaaattggctgctatattttatataatcatttctgcaaatcccattttttgaatactaatatttgacatggttaattcttattaatttgttggaattgtttattgttaataatgcaaatagataatttttaattatccacaagtaacatttcactgttaatggtttgaaataggtgataagcaaaccaatttgaaataaaatataaacatgtgccattgtattataacactatacactttcttgacagttaaatttaaaaaaaaattttttttggtagcatgtattgtatatgtttatagtatatgtagtaaataaaaatatggccaaatgtttggcttggtgatcttttgcaaaaaagtaa

SEQ ID NO: 198983 - DNA, 3675 bp, Homo sapiens
  Payload ID: 19254
  Gene Name: v-crk avian sarcoma virus CT10 oncogene homolog
  Uniprot ID: P46108
  ENST ID: ENST00000398970
  CDS Start-End: 107-721
gctgctgtgaagctgaaaccggagccggtccgctgggcggcgggcgccgggggccggaggggcgcgcgcggcggcggcaccccagcgtttaggcgcggaggcagccatggcgggcaacttcgactcggaggagcggagtagctggtactgggggaggttgagtcggcaggaggcggtggcgctgctgcagggccagcggcacggggtgttcctggtgcgggactcgagcaccagccccggggactatgtgctcagcgtctcagagaactcgcgcgtctcccactacatcatcaacagcagcggcccgcgcccgccggtgccaccgtcgcccgcccagcctccgcccggggtgagcccctccagactccgaataggagatcaagagtttgattcattgcctgctttactggaattctacaaaatacactatttggacactacaacgttgatagaaccagtttccagatccaggcagggtagtggagtgattctcaggcaggaggaggcggagtatgtgcgagccctctttgactttaatgggaatgatgaggaagatcttccctttaagaaaggagacatcttgagaatccgggacaagcctgaagagcagtggtggaatgcggaggacagcgaaggcaagagagggatgattccagtcccttacgtcgagaagtatagacctgcctccgcctcagtatcggctctgattggaggtcggtgagctggtaaaggttacgaagattaatgtgagtggtcagtgggaaggggagtgtaatggcaaacgaggtcacttcccattcacacatgtccgtctgctggatcaacagaatcccgatgaggacttcagctgagtatagttcaacagttttgctgacagatgggaacaatcttttttttttttttccaactgccatctatacaattttcttacagatgtcaaaagcagtctagtttatataagcattctgttacctgtgatattttttagactgaactgctccattcctagtcttaattaccatattcagggtacgaactggagggcttgtgtgttagcttctgaattggcaattggaggcggtagtggtcgtgcctgtgtgtatcagaagggataggtatcttgcctcctttctctcaggcagtgcaaatcaccctgtggaaaaccgatggacaggaaggagtgttacacactgcttaccctgatttattcagtggttttgttttcattctggaaccatactatcaaatggcgacagactgttccgttccacccccgtgaagtaatcatgcaccgtgtgaatagtatcaagcaggattgctttcattgtatggagcatgaccagcgtgtgactcattctgacatttcagatcctaagaattctaagaacactactagaagcatttgttccctcctagtcaatgcttcatactttttcttgggattcttttagcccttgacattcttgtcccccaaacctgtaagtaggtgaattcctaagataagtgtgtattttcattccaggtgaaaagcaggatgtaccgagcactttattcagtgcatagctttaagccagtgttggattcactaagtggacagccagtctcccagctctctgccttccccaaaagggtcgtagtaggtcacccttctacagcagctaactagagtcctaactaatgggatccagcagggccatttctccagagggccagtatcctattaggagactcttggaattcttaggttctactcaagagtggaaggaccaatcacctctgatattctgtggaaggttttggggtcaaattctgccctctgcattctgtgcaacttgtataaaagtcaagttagtattacatgaatttggggtagggttagtgctttgaaaaaatgttgaaccggctgggcgcggtggctcacgtctgtaatcccagcactttgggaggccgaggcgggtggatcatgaggtcaggagttcgagaccagcctggccaacatagtgaaaccccatctctgctaaagatataaaaaattagcccggcgtggtggtgcacgcctgtaatcccagctactcgggaggctgaggcaggagaattgcttcaacctgggaggtggaggctgcagtgagccgagatcgcaccactgcgttccagcctgagcgacagggcaagactcagtctcaaaaaaaaaaaaaaggaaaaaaaaaagaaaaaaaaatgttgaaccaattgtgaattacttatgtattattcatttctcatggggagagtaatgctgttgaagaacattacattgtaaactgccttcatttttggctctttgtttatgttcaggtttagtttacaaacccatttaagtatggaatgatttatatggggtcaggtgctccacaaaatagacctatgagaccaaaaatgacctaggctatttagacgacagcatgaaacttccacgttagttctcagtctataaaggcacttaccggtctctggtgtggtatgaccaatagaaacaccttatagtttgctttggacctcattttggaaaaataatctgcctttctaattgttctgcataggttaaaatgataaatttacattctttgaacctataccagattgtggtgtccgagtgaccggcacactgtctgacacacagtcagtgtgcacgtatttgtctgagtgaatgaggagacctgagaaaccggtgacgtggcacagggaagccagctggcccaggattccgtacatggccgcaagcagactaacgcgttgacgctaatttaatgtattttacctcacactaaggtcatgcttgataaagacgttaaactcaacttgtaaaatggtagcccagtgctatgcacagagtgggtgctcattagtgttgaatgaacacatttgtaatactacatgtaattccatctgactgctttgttaaattttcagttagaacgtagatactgtaaagtccacacacacattaaatcttgttttcctgaaagtatggcatcaaaaatacttgtagaaaaaccttgtcacaactgatttgaatgttcctattttcttttcctttgactttgatattggcttgtaatgtctcttttcatcatatgtaatatcagtggaacaggcagcgctactcaagtcctaaggattcctcagtgatcagtgatccagggccgttcatgaaccactgggctggatttgactgttgagtgtggcagttaatgcccctcaagaaatcaaaggatgtcttataagtgtcttccaaaaaaaagcaaatgctgaaatcctattggcaaagtaaactgaaattggctgctatattttatataatcatttctgcaaatcccattttttgaatactaatatttgacatggttaattcttattaatttgttggaattgtttattgttaataatgcaaatagataatttttaattatccacaagtaacatttcactgttaatggtttgaaataggtgataagcaaaccaatttgaaataaaatataaacatgtgccattgtattataacactatacactttcttgacagttaaatttaaaaaaaaattttttttggtagcatgtattgtatatgtttatagtatatgtagtaaataaaaatatggccaaatgtttggcttggtgatcttttgcaaaaaagtaa

SEQ ID NO: 198984 - DNA, 1391 bp, Homo sapiens
  Payload ID: 19254
  Gene Name: v-crk avian sarcoma virus CT10 oncogene homolog
  ENST ID: ENST00000574295
  CDS Start-End: 33-704
cggcaccccagcgtttaggcgcggaggcagccatggcgggcaacttcgactcggaggagcggagtagctggtactgggggaggttgagtcggcaggaggcggtggcgctgctgcagggccagcggcacggggtgttcctggtgcgggactcgagcaccagccccggggactatgtgctcagcgtctcagagaactcgcgcgtctcccactacatcatcaacagcagcggcccgcgcccgccggtgccaccgtcgcccgcccagcctccgcccggggtgagcccctccagactccgaataggagatcaagagtttgattcattgcctgctttactggaattctacaaaatacactatttggacactacaacgttgatagaaccagtttccagatccaggcagggtagtggagtgattctcaggcaggaggaggagtgttacacactgcttaccctgatttattcagtggttttgttttcattctggaaccatactatcaaatggcgacagactgttccgttccacccccgtgaagtaatcatgcaccgtgtgaatagtatcaagcaggattgctttcattgtatggagcatgaccagcgtgtgactcattctgacatttcagatcctaagaattctaagaacactactagaagcatttgttccctcctagtcaatgcttcatactttttcttgggattcttttagcccttgacattcttgtcccccaaacctgtaagtaggtgaattcctaagataagtgtgtattttcattccaggtgaaaagcaggatgtaccgagcactttattcagtgcatagctttaagccagtgttggattcactaagtggacagccagtctcccagctctctgccttccccaaaagggtcgtagtaggtcacccttctacagcagctaactagagtcctaactaatgggatccagcagggccatttctccagagggccagtatcctattaggagactcttggaattcttaggttctactcaagagtggaaggaccaatcacctctgatattctgtggaaggttttggggtcaaattctgccctctgcattctgtgcaacttgtataaaagtcaagttagtattacatgaatttggggtagggttagtgctttgaaaaaatgttgaaccggctgggcgcggtggctcacgtctgtaatcccagcactttgggaggccgaggcgggtggatcatgaggtcaggagttcgagaccagcctggccaacatagtgaaaccccatctctgctaaagatataaaaaattagcccggcgtggtggtgcacgcctgtaatcccagctactcgggaggctgaggcaggagaattgcttcaacctgggaggtggaggctgcagtgagccgagatcg

SEQ ID NO: 198985 - DNA, 5325 bp, Homo sapiens
  Payload ID: 19255
  Gene Name: v-crk avian sarcoma virus CT10 oncogene homolog-like
  Uniprot ID: P46109
  ENST ID: ENST00000354336
  CDS Start-End: 510-1421
cggagggggaggtggctgccgcttctcccgcgtccgccattttgttgctgtggctattgggaacaagctgggcaaaagcaccccggaggcgcgacgctccttcgagttcggtgcctcgtgtgacggcgggggtcggtgaagacccgtcgagctgcggcgccggcgcgttccaggccgggagtcactggaggcacccctgggacgccgagcagcccgagaaccccggggtggcctccgctgcggctcgggtttgcctgccccgaccccccggctctgccgtgcattcccgggcggctctctccgtgtggcggccccggagcaggcgggcggcgtcggaggatgctgcgggcccggagccgagaggaaagtgctggcccagccctctgagcgctcctcgaggtgtgcgagaggcccttcctcggccccaaagccgtctgccgggctaaggcgtgcagagcaggcgaggacagccgccgcccctaccgccgcagagtccccggtccaacaccatgtcctccgccaggttcgactcctcggaccgctccgcctggtatatggggccggtgtctcgccaggaggcgcagacccggctccagggccagcgccacggtatgttcctcgtccgcgattcttccacctgccctggggactatgtgctgtcggtgtccgagaactcgcgggtctcccactacatcatcaactcgctgcccaaccgccgttttaagatcggggaccaggaatttgaccatttgccggccctgctggagttttacaagatccactacctggacaccaccaccctcatcgagcctgcgcccaggtatccaagcccaccaatgggatctgtctcagcacccaacctgcctacagcagaagataacctggaatatgtacggactctgtatgattttcctgggaatgatgccgaagacctgccctttaaaaagggtgagatcctagtgataatagagaagcctgaagaacagtggtggagtgcccggaacaaggatggccgggttgggatgattcctgtcccttatgtcgaaaagcttgtgagatcctcaccacacggaaagcatggaaataggaattccaacagttatgggatcccagaacctgctcatgcatacgctcaacctcagaccacaactcctctacctgcagtttccggttctcctggggcagcaatcacccctttgccatccacacagaatggacctgtctttgcgaaagcaatccagaaaagagtaccctgtgcttatgacaagactgccttggcattagaggttggtgacatcgtgaaagtcacaaggatgaatataaatggccagtgggaaggcgaagtgaacgggcgcaaagggcttttcccctttacgcacgtcaaaatctttgaccctcaaaacccagatgaaaacgagtgattgctgttgccctgtttcctgctgctttgttgttctgcctgtcctagtctcctttgaagtgggaaagcattttctctcataggcaagtcacactgcattgccgaagtccagctttctgcagactggcagtcgcacacacatttggaatgcacacagcggctgcctcctgatgtttgtatcatagtcgtattgtcaaagagtagccgattttagagttcttttggatcataaactggaaatactgatggaagcacacaagtggagagaagttgacatggaaagggtcttccttctcattgctgcccgtttgtacatgggactgattctgttgtgttcaccagagaaagcttgaggccatggcgagatactgcatgtttgctgttccacaaagcagtggcttagctgccatcttgcttttctttggacaacaggaagtgaaccttaaggaagagagaattctgttctaaaactccaaaatctggcttttttttttcttttgttttggtttggttttggaaaactaattaattagacttgtgtgggggtttttttttgttttgttttgtttgttttgttttgtttttttgagacggtgtctcgctgcatcacccaggctggagtgcagtggcgcaatctcgccttcctgcagtctccgcctcctgagttcaagcgattctcctgcctcagcctcccaagtagctgggactgcaggcgcgcacaccacgcccagctaatttttgtatttttagtagagacggggtttcatcatgttgaccaggctggtctcaaactcctgacttcaggtgatccacccgccttcagcctcccaacgtgctgggattacagccgtgagccgccgcgcctggcctagacttgtgtgttctaaacaggttaagtagcaggttgggtttttatgatagtgcaaggaatgactcatgcctctgagcttctaaactgaagctgctgtaactaaaggaatctgaaaagaacaaccctgaagcagaggcctttattgtcttggttgccagtagtaccttgttttgccatgtagcagacaacacacaaaataatgcagttgtggtgtgccatgctatgtgcacagccccttggattactttgttttaaaaagcatcagagttgggggtactttagggaaacctttgcttaccttgttttgccagtgataagagcagtgggttggagggcacttggccagttttctgttcagcttttcagtgaatgtacccctttaaggttcagacttaaacttccttaaaaagtggcgttgttcatagaatcgttggactcattaatgaatcgttcaactccactcactgaagcccagacctccgtgcccaggcccaatctcgtcaggctgccagagaaagttggtgctgctcatactggtctcacagtctaagtaagtgtctgtgatgctcccaagcaaaggaaatgcaagctctggaaattcgttaatgtatttgatgtcttagtgttttagtgactagggagaccattaactagtttatcattaaccacttatcagtgtattgatgttaaagcatttccctgttagctaaaagaggcctgttcatacaagccaactggtatatacgtgtggttcatccatcatctgctgcacatagcagactagaattctgggaaccctgtgcaattcagtctgctctcccttgtggaccctggtaaagaaaagcctcagctcatagtgaacacagcagacctagaaatgtagcagcagcctactgagtagctttcatttactgatcatctgctgtgactgtggccctgtctggaggttcctaggttttgagatttagagcaatgcattctggagacagaaccagcagaacagccatttttcaatttttctttaaatcagtattccatcaggcagataactgctgtattcatgaatcttgagagtgttcctgagacagaattaatggtcatttgggaaaactatcgccatggcttcccatctgtggttttcctctaaaagccttggagattagcccttccttgccagtgagaacggtgaccgcctcctgctctgcacggtctgcggcagttgccgcttctggttaggtgtgtcaggttggcttattttgggttcaggcctggcgtagcacccacaagtggcagacatatcacaagagtccccagactctgcctagaaacagtgtttgccctttggccagtgacgtggttcatcccggcccatgttgagccatgagtggagtttccaacagagggaggaatgtgtgccttgttcaaggagggcacgacccttaggcctttttcaaccagatttagctgaagggcttgacacctttgaattacagcagttgactcagagtgcaagaagtctggccattttggaaagcaaggtttcctttcagccctgtctactgaccaataccccgactcaccttgtgtggcgcacttcagaatcagatatacctagagtatacctgtggtttggttttataattaatcagctcgttacttcagcccatgaaaatggcatccagggctgccaggagattcagagctcaaaacaaggcgagcttgagttctgcactccagatatgtgccaaaactagtaaaacttaacggacttacaaccttgtcagtttttttaatgaggcagggatactctgtttttcacactaaacatatgaatgcagcactgctgcctcagctcagcttcgtgcctgggttccccactggtctgggaagactgttgtgctccatagagcagtgcacatctgacccagagggtgggtgttcataactgctacttgctctgctctaccatgtttaaagaaatatttggatgttaaattaactcactatggtttttcacctgggaaggaaacaaattacgtactagagggcattgactggttaaaaacttgtgtatcccgggaaggacctgcggtacaggagtcagccatgtctgtgctgtgtggaaccacctgatgacatggttaacgaggaagacgatgtgttgaccggctgccgtttgaggactttggtcacccagactagacaccttctgtgctcatgtttggaaagctgaaagggaaggacagctgtgccctcctgggagctcatgtgtccctggcgctgtgctagctttcctttacagctgtttacagacaaggcaggcctgaggcagatggccactgctcttgtgatgtttgctcagaggaatatgaacattttatttttgaaaagggatgatgtggttttttgccaggtgtttataattaatcctttaatattatggttattaacctcttaaacatgaatgaattcttgattgttttaacacagtacctaagactaatgctttctgtggacaccactgagctctgcctcaactccaccctctgcgaccggaggactatgcccctagtaactgctgtcggtgtggacgctgtgctggttctgttttctaaaggagcagaaggacaggtctctgagacaggatcgttgtccctacaggaggaacagtggccttgcttcttagacggtcttcactgtgtgttttaaaacaacaacaacaacaacaacaacaacataaaactcttttgacctgtaacttaaagatcataaacttcaggcaataatattttctgtgtaagcttttaaaattatttttggggatcatagcttgttttattttgtgctataaaattaacagtattaaatgacttatattcttagaatacatcgagtgtcttttcttaacagattagtgcctttttatttttgtattccgttttacgttactggtcccagcatcaaaacccttgtttccatggcctgtttgtatattgtctcaataaaacttgcatcagccggtggtggcggcagc

SEQ ID NO: 198986 - DNA, 2037 bp, Homo sapiens
  Payload ID: 19255
  Gene Name: v-crk avian sarcoma virus CT10 oncogene homolog-like
  Uniprot ID: P46109
  ENST ID: ENST00000411769
  CDS Start-End: 502-1413
gaggtggctgccgcttctcccgcgtccgccattttgttgctgtggctattgggaacaagctgggcaaaagcaccccggaggcgcgacgctccttcgagttcggtgcctcgtgtgacggcgggggtcggtgaagacccgtcgagctgcggcgccggcgcgttccaggccgggagtcactggaggcacccctgggacgccgagcagcccgagaaccccggggtggcctccgctgcggctcgggtttgcctgccccgaccccccggctctgccgtgcattcccgggcggctctctccgtgtggcggccccggagcaggcgggcggcgtcggaggatgctgcgggcccggagccgagaggaaagtgctggcccagccctctgagcgctcctcgaggtgtgcgagaggcccttcctcggccccaaagccgtctgccgggctaaggcgtgcagagcaggcgaggacagccgccgcccctaccgccgcagagtccccggtccaacaccatgtcctccgccaggttcgactcctcggaccgctccgcctggtatatggggccggtgtctcgccaggaggcgcagacccggctccagggccagcgccacggtatgttcctcgtccgcgattcttccacctgccctggggactatgtgctgtcggtgtccgagaactcgcgggtctcccactacatcatcaactcgctgcccaaccgccgttttaagatcggggaccaggaatttgaccatttgccggccctgctggagttttacaagatccactacctggacaccaccaccctcatcgagcctgcgcccaggtatccaagcccaccaatgggatctgtctcagcacccaacctgcctacagcagaagataacctggaatatgtacggactctgtatgattttcctgggaatgatgccgaagacctgccctttaaaaagggtgagatcctagtgataatagagaagcctgaagaacagtggtggagtgcccggaacaaggatggccgggttgggatgattcctgtcccttatgtcgaaaagcttgtgagatcctcaccacacggaaagcatggaaataggaattccaacagttatgggatcccagaacctgctcatgcatacgctcaacctcagaccacaactcctctacctgcagtttccggttctcctggggcagcaatcacccctttgccatccacacagaatggacctgtctttgcgaaagcaatccagaaaagagtaccctgtgcttatgacaagactgccttggcattagaggttggtgacatcgtgaaagtcacaaggatgaatataaatggccagtgggaaggcgaagtgaacgggcgcaaagggcttttcccctttacgcacgtcaaaatctttgaccctcaaaacccagatgaaaacgagtgattgctgttgccctgtttcctgctgctttgttgttctgcctgtcctagtctcctttgaagtgggaaagcattttctctcatagtacctaagactaatgctttctgtggacaccactgagctctgcctcaactccaccctctgcgaccggaggactatgcccctagtaactgctgtcggtgtggacgctgtgctggttctgttttctaaaggagcagaaggacaggtctctgagacaggatcgttgtccctacaggaggaacagtggccttgcttcttagacggtcttcactgtgtgttttaaaacaacaacaacaacaacaacaacaacataaaactcttttgacctgtaacttaaagatcataaacttcaggcaataatattttctgtgtaagcttttaaaattatttttggggatcatagcttgttttattttgtgctataaaattaacagtattaaatgacttatattcttagaatacatcgagtgtcttttcttaacagattagtgcctttttatttttgtattccgttttacgttactggtcccagcatcaaaacccttgtttccatggcctgtttgtatattgtctcaataaaacttgcatcagccggtggtggcggca

SEQ ID NO: 198987 - DNA, 2911 bp, Homo sapiens
  Payload ID: 19256
  Gene Name: VENT homeobox
  Uniprot ID: O95231
  ENST ID: ENST00000325980
  CDS Start-End: 512-1288
gggcaccggcctgactctcccaccccgaagcctgctcccaacctaagtccgccctgactctcccagcctgaagcctgctcgccctcgggtgtccgggctgggcacaggcgccagcgtccccctggagaggagaggtcgcccggcacctcccaggacaggcccaagtgggagtgggaccctcctaccttcctgcagcctcggcccgcggggtggggggttgggagagatgaaaggaggtgaccgatcccgaaccatcgcctctccattaaccagggcccgcagccccgcccctcccccagacatcgaggagccggggaggtgtgaacggcctcctttgtgcctctgaatcgaaggcaattaggcgctgcttatctgggcattagccgtgtatgcaaaccgggctcccgccccctcctcctgggcttataaacgccgccgcctggcgaggcccgaggtggatcctgcgcctggccagccccgcctggccttccctccggcccacctggccgccatgcgcctctcctcctccccacctcgtggcccgcagcagctctccagctttggctccgtggactggctctcccagagcagctgctcagggccgacccacacccccaggcctgccgacttctccctggggagcctccctggcccaggccagacatccggcgcccgggagccccctcaggccgtcagcatcaaggaggccgccgggtcctcaaatctgcctgcgccggagaggaccatggccgggttgagtaaggagccaaataccttgcgggccccccgtgtccgcacagccttcaccatggagcaggtccgcaccttggagggcgtcttccagcaccaccagtacctgagccctctggagcggaagaggctggccagggagatgcagctctcagaggtccagataaaaacctggtttcagaatcgccgcatgaaacacaaacggcaaatgcaggacccccagctgcacagccccttctcggggtctctccatgcgcccccagctttctactcaacgtcttctggccttgccaatggcctgcagctgctgtgcccttgggcacccctgtccgggccccaggctctgatgctgccccctggctccttctggggtctctgccaagtggcacaagaggccctggcatctgcgggagcttcctgctgcgggcagcctctggcgtcccacccccctaccccaggccggccttcgctgggaccagccctgtccacggggccccggggcctgtgtgctatgccacagacgggggatgcattttgaggaggcacctctgactcccacactcgcggtcttgctgatcgcacctggctcctacctggaggactcagttgttctgtttacatcctggtggcacctctcaccctgacccacacaaaggttctggagattactggagaatatatataaatatatatatgtacgtatatatgtaaatacacatatacgtatatataaatatatatatacatatgtgtgtgtatatatatatatatttttttttttttttttttttttgagacggagtgttgctctgtcacccaggctggagtgcaatgacgcaatctcggctcactgcaacctccgcctcctgggttcaagcgattctccagcctcagcctcccgagtagctgggattacagacacccgccaccacgcccggctaattttttctatttttagtagaaatggggtttcaccatgttagccaggctggtctcaaactcctgaccctgtgatccgcccgcctcggcctcccaaagtgctgggattacaggcatgagccactgcacccggccctgagaatatatttattaaagccacctcttcactgaaagttaccgaaagagtcggtttaggaaggaaacgaagggtcagtgaacagagtcaaatgcagaagtgggcttgtcatgggtagggctttcggcgtacgataaaaggatcatttgttttttaaaaggggttggaaaaactggttttccagttggaaacagtaaaggttgtaagctttgtgtgtacaaaagaaaacagggaatgcaggtgtgtttatagcgttgtggttcaagtccctcttaacaagaactccaaagctggaaagcaggagggaacaaaggtgaacatgaaggcgaggatgctggggccctgcagtgcgctctaggctgtgcgtgagccgggactgtacccacagcttgctgagggctgctcttcttgggccagggaaagcagggcagccgggacctgcggctgtgcctggactgaagctgtcccgcaggtccccaccctccaacacgtgctcacctgtccccctgctcgcagcagcctcgggacaaaacaatgactcaaggacagcacttcttgcagaaggtctggaagtgcccagaatgggaggcacggaagcccctcccggggaggactcccgcgttgatggaccgttcttggtgcagactcctgactgcgtgcatgaaacctgagacaagtgcaattccttccatgtcgccccagagtgcccaggaggcaggcagtgcggggtgcccaggcagacgggttcagcctgcagaactggaggcgacctgtgaaacccacccgggcaccccaacaggaacagaagcgtggtcctgcggctgcgtccccagcgagtttcactttccccttgctcgtttctcccttgttgtaagtgtttacaactggcatgtgcttttaaacgtcaggtaagaggggaacagctgctgtacatcgtcctggcgagtgacaatgtgacagaagcctgggcgaggccctcggagggcagcagctggacagggactactgggtttggcctggacagcactgatttgtggatgtggatgggggcacgttgtccgtgataaaagtacaagtgcccctcac

SEQ ID NO: 198988 - DNA, 4494 bp, Homo sapiens
  Payload ID: 19257
  Gene Name: ventral anterior homeobox 1
  Uniprot ID: Q5SQQ9
  ENST ID: ENST00000277905
  CDS Start-End: 246-806
accagactggccgcctctcggcgagcgcgccactctcccgtcgccgctgacccgcgcgcggccgccgaagcctccccgcggggacattcattcttgccccttgcctgtcgccgggccgggcgtacgggccgcgttgtcgggggttttgtcccctttttcctcttttttttttccttctccgccccccccccttttttttttttttgctttttttttcctttctgtttttgttgttgttcttgcctatgttcgggaaaccagacaaaatggacgttcgatgccactcggacgccgaggctgcccgggtctcgaagaacgcgcacaaggagagtcgggagagcaagggcgcggaggggaacctcccagccgccttcctcaaggagccgcagggcgccttctcagcgtcgggcgctgctgaggattgtaacaaaagtaaatccaattccgcagcggacccggattactgccgccggatcctggtccgagatgccaaggggtccatccgagagatcatcctgcccaagggcctggacttggaccggcctaagaggacgcgcacgtccttcaccgcggagcagctctatcggctggagatggagttccagcgctgccagtacgtggtgggccgcgagaggaccgagctcgcccggcagcttaacctctccgagacccaggcaaatagtgaagaaaataatgaacgattcaaacgcgggataaaaaaacaaaagaagaaaaggaagaaagagccagcaaatgatgagtctcggcgtggggactccgggggcagagggtggcagcccctatagtgcggggccctgcgactggtaccgtgagcgcctgggatgaggtttgggcggatttcgggtttccggagaggcagagacgcctggctacgacgatttgttccacttccttgagtgtttcgctctcgatttctctatctgtccctctgaggtcggcccctcagaccctcctccttaatttcccactgcgtaattcttagtttatttaggaactcatctctgggcactataaagtctctgcctcctaatgctaggtttctagagtcttccagctgcatcttcatgccggcagcattttggattttgtgcaatcatgggcccagaataggcaaggttttattttcttctgacttagaatataagtctcgccatcgtcaaagagaaactttgaaggagcaggagactgaaatcgatattaattcctgcaaagagacctcctcaccctggtgcttatgcggtggtgacgggtgtagacgttgcaaacaaatcttgggaagcgaggagggccggggaggacacttccggacacgctcttctaaagcgtgtgcagcacggggcgaagtccgcgctgcgggggcagcggccccggctccttcttgtagcgcctgcacacctgggtgttgcagggacccgcagctcccgtgcggcaccggccctagccaggccttactgcccctactcgtgtactgtgcctgaagctgaagttggaggcatccaaaataaggcggggcacagtgtgggcggcggagtccctgagccttgagctccgctttttgctgagatcacagcagccgcccacagacagttcacttttatttctcaaagttgctgcagatccctcagcttggcttctcttggctcttcccctccctgtccgcctctccttactttctcttgcttgaaactgcttttccttttctactcttttcttccgcgctcctgtcccgtaaacgcctgcgcttcctttaaggagttctctctctgtggtgtgggctcccctctcgttccccctgtctccctcctccattacttcttccttccaggtctctctctctcttttggttttctggtttttttctcctgctcaaggggtcccaaaggccaaggcagtgggtggctctcgctgcagcttcaaggctggtggctgggaccctccaggggtgagaaggaagggagaaggtggcataactttttggaacaaaagaaaacacaaaatcctagcttgggattcccaacaaattcagcctcctctcccaggggcctcagcctgggaagtcaccaagcagatccctccttccagcttcctgctctttctcctttttgctttcttacccctgaaagagggaaggacaagtcacctcataacttctgctctcacctcccttccctccctggctttgggaagagctgctgagctctttgcctgccactcagggagtgcaattgttcttaaagagcctcttctgcatagaaaaagaattgcaattttaatttaaaaacatttatagaaaattcatttaattttagtgactatcttcttttccctccttccccaagggcctccagtaagctgccttggtccctggaggcttctggcttccaactggagactcacaggccttggaggaggaggcaggtaccctctatgccaatagctgggcctgcctggggaaaggtggaaggagaaacagctgcaggaggggggagctgaaaggaatctgatgctcaggcctgcacaaagcaaccgccaaattgtttcagagcagaaaagaaaaagggagaaaacctcttagcaaagccctgtgagtttgggggtcaggttcaagaaagatgtgggaagtcacttggagagctaaacgggacacatgctcctatccacacttgcagttggtctaaccttcagccagaatgtattcataagtagcatttggcaaccctttatagtttacaaatagcattttacatacaccattctactattcctcatggtggctttgggaggtccagctccgttttaaagactcacacaggactgaagcaaataacttgctcaaagccacatagctgctcagaacccaagattgtaagctccccctagggccagaggcctctttctttcagtttttttctttcgtccccctttgacccctctttccttcttccctttctcccctccttcctcctttccttctttttgtgcccacagtgtctggatcatggtacctgaattctttagcctatttgcacccacatctgctaatgtccatatctagccatctattacaccagctgctgaggatttacttggtgccctcatcaagaagtttgaatttctccctccttcctttttttttcctgccactgtcccaactctttccctctacgtctctctagaatgacatctttaaaccccttacactctttggtcttacacatccttaaaaatgattatttataaattgaattataatatccatgaggtaaacactcatagggtaaagtacacaaagcttaactatacaagttgatgatttacacacacacacacacacacacacacacaccccttcttgaatggctccaaggatacccttttaacttcttcccttcagccacataagccatatgatgacacacagtgtctttctcctgtttgaaaagaaattgtgtcatattggtgtgctgttcttgcatagaaagccttttttaagaagtctttttaagatttcttgaaggattttagaaatcatatatctcttctaaccccctgaaatcctgagtttaagtggcttgattaaatggctgatcaaaacttaaaaacacactaggtcaatgtttttcaagatacaactgaggaccagctgcttcagaatcatctggggactggctaaaattccaggttcctaagccctagtcccatctgatgaatcagaaactaggttggggcttaggaacgtgcattttaaacacttttccaaagtgattcttatccagactaatatttgagaagtactgtattaaatggcaaactcccaaaacactgcagcctcctgcatctggcccagggcctggcatttggtaggaatacaatgaatgtttgttaaacaaattaatccacagtttctgacacagtttagaatttcttggaccacattatgctattgtaatttaacaccatttctacgtcgggaaatctttacatttcagtctttttcattttcatggaggtttcattttaatggagcaggagagaaaagagagatctactttggtggtttctcaggtctcagggaaggtcttttataaactcaatggggaccaccttcctggagaggctgctcccttacagacctggtagtttggggaaaggaggaggagagcccttcaggtttgctgaaaagcattcagatgcacacccttcttggttggaactgaaagcttctgtttgaagagacatgagttctggaaggagcaaggccaccaggtccagagaacctggcatgcaatggacatggaagctgaaaattacttgggtattctctgatttctagctaatatgaaaataattttctttctagaaacacatttgcctatcttcttaccctgaaacagaaaataaatattgtgctttatgtggtagtgttgtacccattcttaaaaataaatcacatcatatatatgtgtaaaatat

SEQ ID NO: 198989 - DNA, 1723 bp, Homo sapiens
  Payload ID: 19257
  Gene Name: ventral anterior homeobox 1
  Uniprot ID: Q5SQQ9
  ENST ID: ENST00000369206
  CDS Start-End: 1-1005
atgttcgggaaaccagacaaaatggacgttcgatgccactcggacgccgaggctgcccgggtctcgaagaacgcgcacaaggagagtcgggagagcaagggcgcggaggggaacctcccagccgccttcctcaaggagccgcagggcgccttctcagcgtcgggcgctgctgaggattgtaacaaaagtaaatccaattccgcagcggacccggattactgccgccggatcctggtccgagatgccaaggggtccatccgagagatcatcctgcccaagggcctggacttggaccggcctaagaggacgcgcacgtccttcaccgcggagcagctctatcggctggagatggagttccagcgctgccagtacgtggtgggccgcgagaggaccgagctcgcccggcagcttaacctctccgagacccaggtgaaggtctggttccagaaccggcgcaccaagcagaagaaggaccagggcaaggactcggagctacgctcggtggtgtcggagaccgcggccacgtgcagcgtgctacggctgctggagcagggccgcctgttgtcgccgcccggcctgcctgcgctgctgccgccttgcgccacgggcgctctcggctcagcgctgcgcgggcccagcttgccggccctgggcgcgggcgccgctgcaggctcggccgccgcagccgccgccgccgccccgggcccagcgggcgctgcatccccgcacccgccggctgtgggcggtgctccaggtcccgggcccgccgggccggggggattgcacgcaggcgccccggccgcgggccacagcctcttcagcctgccggtgccctcgctgctcggctccgtcgccagccgcctgtcctccgccccgttaacaatggctggttcgctagctgggaatttgcaagaactctccgcccgatatctgagctcctcggccttcgagccttactcccggaccaacaataaagaaggggccgagaaaaaagcgctggactgattttaagtgtttccctgtatttatatttatagtatctattgtggtgatatttatggactcacgcgcattaggtgcccagagctcctgcgctgggctcctggctcccaccaggcctctgacagctctcctttcccactagactctgctaccaatttcatctcattcgggctattttttttttctactacctttcctctgagattcctccccaacccccaacttccttctgaatccaggagcgatccaaagaattgggaaaaatgcccgagttagtcaacctgatgccctgaccccgtgcccagcccaggagggaaaagactggttctaactccaaagcacaggacgtttgctctagatccgcggctgctgcggctgctgccgctgccgactattcctaggaatatttgaaagaggaaaactgcgcgcagaccccaggggcttccaggtttctttagaccaaaaaaggaggacgttccttcctcttgccagggaaaccagggcttgtgggagcccctgggccccgctttgcggacctctcgggatagtcggtacacaacacagcttcctggcgggcaaatcctgcggtttttctcccctttagggcaactccaatcacaaccacccccgaccccaggaaacagtaacaaacgtcgtagtaggcaacgacactgataaatttgatctaatcagcaataaaagcaattgctacgtaaaacca

SEQ ID NO: 198990 - DNA, 1147 bp, Homo sapiens
  Payload ID: 19258
  Gene Name: ventral anterior homeobox 2
  Uniprot ID: Q9UIW0
  ENST ID: ENST00000234392
  CDS Start-End: 33-905
ccgccgtagaggggttggcagtggcggtcagcatgggcgatgggggcgccgagcgcgaccggggccccgcgcgccgggcggagtctggtggcggcggtgggcgctgcggagaccgcagcggagcgggggacttgcgagctgatggcggtggccacagcccaacggaggtggccgggacctcagcctccagtcccgcaggctccagggagagtggagccgacagcgacgggcagcccgggcccggcgaggcagaccactgccgccgcatactggtgcgagatgccaaagggacaattcgggaaattgtcctgcctaagggcctggacctggaccggcccaagcggacacgtacatccttcactgccgagcagctgtaccgcctggagatggagttccagcgctgccagtatgtggtgggccgcgagcgcactgagctggcccgccagctgaacctctccgagacccaggtgaaggtctggttccagaaccgccgcaccaagcagaagaaagaccagagcagagacctggagaagcgggcgtcctcctcagcctccgaggcctttgccacctccaacattctgcggctgctggagcagggccggctgctctctgtgcccagggcccctagcctcctggcgctgacccctagcctgccaggcctacctgccagccacaggggcacctccttaggtgaccccaggaactcctccccacgcctcaacccgctgtcctcggcctcagcgtcccccccactgccgccccctctgccagctgtctgcttttcctcggccccgctcctggatctgcctgccggctacgaactgggttcctcggccttcgagccatacagctggctagaacggaaagtgggcagcgccagcagctgcaagaaagctaacacttaagactcccaccctgtgacactgagtcccgagcacagcaccttcccagtctcctgtgccccagcggacagcactgagcaggccccggagaggaggggctgcagccacacactcttccccacctgccccccagctcagagactcgtgaccaaatggccttggtcccgcagcttgtgtgcgtgagtgcagtgtgagtgtgtgtgtctctcactgaaataaaaggaaaacaatgacaagaagggaaa

SEQ ID NO: 198991 - DNA, 4202 bp, Homo sapiens
  Payload ID: 19259
  Gene Name: ventricular zone expressed PH domain-containing 1
  Uniprot ID: Q14D04
  ENST ID: ENST00000362010
  CDS Start-End: 309-2810
ggcagctcagggagacgcggctgcagcccacaggactgggcagcagctgcaaggctgcctctgagcatggtcatgggtcccagctgcagtgctctaaagatcaaggattttgccttctattttctatgaccagagattcctgtgcaaagagagagtgtcaatgaagacctcaaagtctggagaaaaatgacctttcatggaataagaagtatacctccttctacatgtttttgtcttactgacctctgataactggaacacatgactctgggtctgtagaaagtcaactgatcaaactcatcctcaccatgcatcaactgttcagactggttttgggacaaaaagatctttcacgagctggggacctcttctccttagatgactctgagattgaagacagccttacagaagctttggagcaaattaagataattagctcatcttcagattaccaaaccaataacaatgaccaggcagtagttgaaatctgtatcacaagaatcacaacagccatcagagagaccgagtccattgaaaagcatgcaaaggcccttgtggggctctgggactcctgcttggaacataacctgagaccctttgggaaagacgaagacactcctcatgcaaaaatcgcatctgatatcatgagttgcattttacagaattacaaccgacccccagtgatggcattagccatccccattgcagtgaaattcctccacagaggcaacaaggaactgtgcaggaatatgtctaactacctgtctctggctgcaattaccaaggcagatctcctggctgatcacacggaagttatagtaaagagcatactccaaggtaacaccatgttgttgagagtgttacctgctgtgtatgaaaagcagcctcagccaattaatagacacctgacagaactcctggccttgatgtctcagctggaacagccagaacagtaccatctactacggcttttgcatgtagcagcaaagaaaaaacaactcgaggtagttcagaagtgtattcctttcctaattgggcatttgaaggattcaacccataatgacatcatcctaaacatcctcatagagatagcagtctatgagccagtggctttgaacagttttcttccaatgctgaaagagattggtgagagattcccctacctcactggacagatggcaaggatttatggagctgttgggcatgtggatgaagagagagccaggagctgcctgacatacctggtgagccaactggccaacatggagcattcgtttcaccatattctcctgctggagattaaaagcatcaccgacaccttctcctcaatcttgggccctcagagcagagacatcttccgcatgagcaacagcttcaccgccattgctaaactccttacccgacaactggaaaataccaaggctggaagtggcaggagaaaaatcagcactgaaattgaattccctgagaaactggaagaaaccaagctcatagtaactgaaaatgaagaccatgaaaaactccaagttaaaatccaggcttttgaagacaagataaatgcagggagcaatacccctggctctatcagaagatatagtctgggccaagtttctaaagaagaaagaaaaaacattagatttaacaggtcaaaaagtttggctttccacactatgctcacaaagggtgtgggttcagatgacggcgaagatgaaaacaggggagacataccagccagcatctctctttcagaaatagacccacttggccaaggaaatgacaagctgccgtttaagacagacactgagagatcacagctgggggagtcttcagtttcatacccaaatattatacatatagactcagagaatttgtcagaaactgttaaagaaaactcccaggaagaaactccagagacaactgcaagtcctatagaataccaagataagctctacttgcacttaaaaaaaaacctcagcaaagtgaaagcatatgccatggaaattggaaagaagattccagtccctgatcagtgtaccattgaagacactgtgagaagttgtgtagcaaagttgttcttcacctgctccctgaagggtcattactgcctatacagtaagtccagttttattctcatcagccaagaacctcagccatggatccagatcatgtttctatttcagcagagcctgtttcctgaacccctgtccattcagagtcattctgtgcaattcctcagagctctgtgggagaagacccaggcagggggtgctcacagctttgaaactgccatgatggagtccacgtttccacagcagaaggatctggaccaggtacagctccatctggaagaagtgaggttctttgacgtgtttggcttcagtgaaacagcaggagcatggcaatgcttcatgtgcaacaatcctgagaaagcaactgttgtaaatcaagatggccagcctctcatagaaggaaaacttaaagagaagcaagtcagatggaagttcatcaaaaggtggaaaacacgctattttacactggctggaaatcaacttctgtttcaaaaaggaaagtctaaagatgaccctgacgactgcccaatagaactcagcaaagtacagagtgtgaaggctgtggccaagaaacgcagggaccgctctctcccccgggctttcgaaatcttcacagacaataaaacctatgtctttaaggccaaggatgagaagaatgcagaagaatggctccagtgcatcaacgtggcagttgcccaagccaaagaaagggaaagtagagaagtaaccacatatctgtagggatttataagtcagccatgacaattatacaccacaggcattgtattatcattgccaatgtcaagaaaaagagctaaatttaccaagccatgttgttttttactaaataccaatggaattgttgtcctttaagaagaagggcctaaaatggcaggattcttagtaaatgtcatactctaacagctttagtattgacttcagaatatatctgatgcccacaaaaataaaataaaataaaaggagctacagagtatgccctcagatagtgtggggccaggaagggaaaagtcactgataaaagaacttctgtagatatgtcatttaaaactgtgagaaaacaacatgaaaagatgcctgaactctccatcctgaggaaagattagcacttctgatgaaaatcacagtctgtcaaaggtattaaaagaaaactttaaaaaaaaaaacctttagaaacgttgaactaatgtacactgagaaaaaccatataacttacttatagacatataattacatgatcctctcttactacaactgaggctaacacatggtaaaatggttcccaaatcaagccagttatgtcattaaatacttgtctttcagaattacttatttaattattccatttaagttcatataatataatctacagtttagatacttggacatatatcctgcccaaggcactaagtgtaatataggaaaaggatagaaagccattttctctatcttcaaaataatgtgccatctccgttaaaattaagactttaaagttctataattttttctttgtattcaactttttaatacctccaaattacaaacatctatttttttcactacatagatatataattacactatgatagacagaattctagagtgattctcaataatccatgccttggtataatcctctcccccattgagtgtgggtgggacatgtaacctgcttctaaccaacagaatatggcaaaagtgatgggatcatctctcccatattatgttatgttatataacaaaagtgaagagaagttgcagatatacataaggtttctaatcagctgactttgagttaatcaaagagatcccctgggtgggcctgacctaatcagactagtcctttaaaagagagtgaaccagtcagagactctctctcctattagccttaaataagcaagctgccatgagctctacggctgcaaggaaataagttttgtgaacaaccatgtgatcttggaagaagcatctgaacctcagataaaagcccagccccagccaacgccttgcttgcagctttgtgaaactctgagcagaggacccagctaaatcacgtttggactcctgacccacagaaactttcagataataaatgtatgctgttttaaatctaaa

SEQ ID NO: 198992 - DNA, 3044 bp, Homo sapiens
  Payload ID: 19259
  Gene Name: ventricular zone expressed PH domain-containing 1
  Uniprot ID: Q14D04
  ENST ID: ENST00000392832
  CDS Start-End: 318-2819
attcttccacccggcaccggctccgcaatgaacaacttcaggttcactgagctgagcggattccactcgctgtgccctcggagcctgcctgaatctcccgcccagtctcaaaccatgcagctgagtaactgcaagggcgcctttgaggagtagcacgcagagagtgtcaatgaagacctcaaagtctggagaaaaatgacctttcatggaataagaagtatacctccttctacatgtttttgtcttactgacctctgataactggaacacatgactctgggtctgtagaaagtcaactgatcaaactcatcctcaccatgcatcaactgttcagactggttttgggacaaaaagatctttcacgagctggggacctcttctccttagatgactctgagattgaagacagccttacagaagctttggagcaaattaagataattagctcatcttcagattaccaaaccaataacaatgaccaggcagtagttgaaatctgtatcacaagaatcacaacagccatcagagagaccgagtccattgaaaagcatgcaaaggcccttgtggggctctgggactcctgcttggaacataacctgagaccctttgggaaagacgaagacactcctcatgcaaaaatcgcatctgatatcatgagttgcattttacagaattacaaccgacccccagtgatggcattagccatccccattgcagtgaaattcctccacagaggcaacaaggaactgtgcaggaatatgtctaactacctgtctctggctgcaattaccaaggcagatctcctggctgatcacacggaagttatagtaaagagcatactccaaggtaacaccatgttgttgagagtgttacctgctgtgtatgaaaagcagcctcagccaattaatagacacctgacagaactcctggccttgatgtctcagctggaacagccagaacagtaccatctactacggcttttgcatgtagcagcaaagaaaaaacaactcgaggtagttcagaagtgtattcctttcctaattgggcatttgaaggattcaacccataatgacatcatcctaaacatcctcatagagatagcagtctatgagccagtggctttgaacagttttcttccaatgctgaaagagattggtgagagattcccctacctcactggacagatggcaaggatttatggagctgttgggcatgtggatgaagagagagccaggagctgcctgacatacctggtgagccaactggccaacatggagcattcgtttcaccatattctcctgctggagattaaaagcatcaccgacaccttctcctcaatcttgggccctcagagcagagacatcttccgcatgagcaacagcttcaccgccattgctaaactccttacccgacaactggaaaataccaaggctggaagtggcaggagaaaaatcagcactgaaattgaattccctgagaaactggaagaaaccaagctcatagtaactgaaaatgaagaccatgaaaaactccaagttaaaatccaggcttttgaagacaagataaatgcagggagcaatacccctggctctatcagaagatatagtctgggccaagtttctaaagaagaaagaaaaaacattagatttaacaggtcaaaaagtttggctttccacactatgctcacaaagggtgtgggttcagatgacggcgaagatgaaaacaggggagacataccagccagcatctctctttcagaaatagacccacttggccaaggaaatgacaagctgccgtttaagacagacactgagagatcacagctgggggagtcttcagtttcatacccaaatattatacatatagactcagagaatttgtcagaaactgttaaagaaaactcccaggaagaaactccagagacaactgcaagtcctatagaataccaagataagctctacttgcacttaaaaaaaaacctcagcaaagtgaaagcatatgccatggaaattggaaagaagattccagtccctgatcagtgtaccattgaagacactgtgagaagttgtgtagcaaagttgttcttcacctgctccctgaagggtcattactgcctatacagtaagtccagttttattctcatcagccaagaacctcagccatggatccagatcatgtttctatttcagcagagcctgtttcctgaacccctgtccattcagagtcattctgtgcaattcctcagagctctgtgggagaagacccaggcagggggtgctcacagctttgaaactgccatgatggagtccacgtttccacagcagaaggatctggaccaggtacagctccatctggaagaagtgaggttctttgacgtgtttggcttcagtgaaacagcaggagcatggcaatgcttcatgtgcaacaatcctgagaaagcaactgttgtaaatcaagatggccagcctctcatagaaggaaaacttaaagagaagcaagtcagatggaagttcatcaaaaggtggaaaacacgctattttacactggctggaaatcaacttctgtttcaaaaaggaaagtctaaagatgaccctgacgactgcccaatagaactcagcaaagtacagagtgtgaaggctgtggccaagaaacgcagggaccgctctctcccccgggctttcgaaatcttcacagacaataaaacctatgtctttaaggccaaggatgagaagaatgcagaagaatggctccagtgcatcaacgtggcagttgcccaagccaaagaaagggaaagtagagaagtaaccacatatctgtagggatttataagtcagccatgacaattatacaccacaggcattgtattatcattgccaatgtcaagaaaaagagctaaatttaccaagccatgttgttttttactaaataccaatggaattgttgtcctttaagaagaagggcctaaaatggcaggattcttagtaaatgtcatactctaacagctttagtattgacttcagaatatatctgatgcccacaaaaat

SEQ ID NO: 198993 - DNA, 3979 bp, Homo sapiens
  Payload ID: 19259
  Gene Name: ventricular zone expressed PH domain-containing 1
  Uniprot ID: Q14D04
  ENST ID: ENST00000392833
  CDS Start-End: 221-2587
gtgctctaaagatcaaggattttgccttctattttctatgaccagagattcctgtgcaaagagagagtgtcaatgaagacctcaaagtctggagaaaaatgacctttcatggaataagaagtatacctccttctacatgtttttgtcttactgacctctgataactggaacacatgactctgggtctgtagaaagtcaactgatcaaactcatcctcaccatgcatcaactgttcagactggttttgggacaaaaagatctttcacgagctggggacctcttctccttagatgactctgagattgaagacagccttacagaagctttggagcaaattaagataattagctcatcttcagattaccaaaccaataacaatgaccaggcagtagttgaaatctgtatcacaagaatcacaacagccatcagagagaccgagtccattgaaaagcatgcaaaggcccttgtggggctctgggactcctgcttggaacataacctgagaccctttgggaaagacgaagacactcctcatgcaaaaatcgcatctgatatcatgagttgcattttacagaattacaaccgacccccagtgatggcattagccatccccattgcagtgaaattcctccacagaggcaacaaggaactgtgcaggaatatgtctaactacctgtctctggctgcaattaccaaggcagatctcctggctgatcacacggaagttatagtaaagagcatactccaaggtaacaccatgttgttgagagtgttacctgctgtgtatgaaaagcagcctcagccaattaatagacacctgacagaactcctggccttgatgtctcagctggaacagccagaacagtaccatctactacggcttttgcatgtagcagcaaagaaaaaacaactcgaggtagttcagaagtgtattcctttcctaattgggcatttgaaggattcaacccataatgacatcatcctaaacatcctcatagagatagcagtctatgagccagtggctttgaacagttttcttccaatgctgaaagagattggtgagagattcccctacctcactggacagatggcaaggatttatggagctgttgggcatgtggatgaagagagagccaggagctgcctgacatacctggtgagccaactggccaacatggagcattcgtttcaccatattctcctgctggagattaaaagcatcaccgacaccttctcctcaatcttgggccctcagagcagagacatcttccgcatgagcaacagcttcaccgccattgctaaactccttacccgacaactggaaaataccaaggctggaagtggcaggagaaaaatcagcactgaaattgaattccctgagaaactggaagaaaccaagctcatagtaactgaaaatgaagaccatgaaaaactccaagttaaaatccaggcttttgaagacaagataaatgcagggagcaatacccctggctctatcagaagatatagtctgggccaagtttctaaagaagaaagaaaaaacattagatttaacaggtcaaaaagtttggctttccacactatgctcacaaagggtgtgggttcagatgacggcgaagatgaaaacaggggagacataccagccagcatctctctttcagaaatagacccacttggccaaggaaatgacaagctgccgtttaagacagacactgagagatcacagctgggggagtcttcagtttcatacccaaatattatacatatagactcagagaatttgtcagaaactgttaaagaaaactcccaggaagaaactccagagacaactgcaagtcctatagaataccaagataagctctacttgcacttaaaaaaaaacctcagcaaagtgaaagcatatgccatggaaattggaaagaagattccagtccctgatcagtgtaccattgaagacactgtgagaagttgtgtagcaaagttgttcttcacctgctccctgaagggtcattactgcctatacagtaagtccagttttattctcatcagccaagaacctcagccatggatccagatcatgtttctatttcagcaggatctggaccaggtacagctccatctggaagaagtgaggttctttgacgtgtttggcttcagtgaaacagcaggagcatggcaatgcttcatgtgcaacaatcctgagaaagcaactgttgtaaatcaagatggccagcctctcatagaaggaaaacttaaagagaagcaagtcagatggaagttcatcaaaaggtggaaaacacgctattttacactggctggaaatcaacttctgtttcaaaaaggaaagtctaaagatgaccctgacgactgcccaatagaactcagcaaagtacagagtgtgaaggctgtggccaagaaacgcagggaccgctctctcccccgggctttcgaaatcttcacagacaataaaacctatgtctttaaggccaaggatgagaagaatgcagaagaatggctccagtgcatcaacgtggcagttgcccaagccaaagaaagggaaagtagagaagtaaccacatatctgtagggatttataagtcagccatgacaattatacaccacaggcattgtattatcattgccaatgtcaagaaaaagagctaaatttaccaagccatgttgttttttactaaataccaatggaattgttgtcctttaagaagaagggcctaaaatggcaggattcttagtaaatgtcatactctaacagctttagtattgacttcagaatatatctgatgcccacaaaaataaaataaaataaaaggagctacagagtatgccctcagatagtgtggggccaggaagggaaaagtcactgataaaagaacttctgtagatatgtcatttaaaactgtgagaaaacaacatgaaaagatgcctgaactctccatcctgaggaaagattagcacttctgatgaaaatcacagtctgtcaaaggtattaaaagaaaactttaaaaaaaaaaacctttagaaacgttgaactaatgtacactgagaaaaaccatataacttacttatagacatataattacatgatcctctcttactacaactgaggctaacacatggtaaaatggttcccaaatcaagccagttatgtcattaaatacttgtctttcagaattacttatttaattattccatttaagttcatataatataatctacagtttagatacttggacatatatcctgcccaaggcactaagtgtaatataggaaaaggatagaaagccattttctctatcttcaaaataatgtgccatctccgttaaaattaagactttaaagttctataattttttctttgtattcaactttttaatacctccaaattacaaacatctatttttttcactacatagatatataattacactatgatagacagaattctagagtgattctcaataatccatgccttggtataatcctctcccccattgagtgtgggtgggacatgtaacctgcttctaaccaacagaatatggcaaaagtgatgggatcatctctcccatattatgttatgttatataacaaaagtgaagagaagttgcagatatacataaggtttctaatcagctgactttgagttaatcaaagagatcccctgggtgggcctgacctaatcagactagtcctttaaaagagagtgaaccagtcagagactctctctcctattagccttaaataagcaagctgccatgagctctacggctgcaaggaaataagttttgtgaacaaccatgtgatcttggaagaagcatctgaacctcagataaaagcccagccccagccaacgccttgcttgcagctttgtgaaactctgagcagaggacccagctaaatcacgtttggactcctgacccacagaaactttcagataataaatgtatgctgttttaaatctaaa

SEQ ID NO: 198994 - DNA, 730 bp, Homo sapiens
  Payload ID: 19259
  Gene Name: ventricular zone expressed PH domain-containing 1
  ENST ID: ENST00000461299
  CDS Start-End: 543-730
tggatgcaattgtttaggagaagagtgaaggagaagagaagagagcccgaaactaaacagggaggaatccaccatttagaagtctggcaggcaaagaggacaaggctttgtgtttcacctcaggaaacagagcgttgcactgggaggtaactccgctgggtgaggtgcagcctgtcacctgaccggtctctggggctgccggtggcatcaggctgcattccttgaattcttccacccggcaccggctccgcaatgaacaacttcaggttcactgagctgagcggattccactcgctgtgccctcggagcctgcctgaatctcccgcccagtctcaaaccatgcagctgagtaactgcaagggcgcctttgaggagtagcacgcagagagtgtcaatgaagacctcaaagtctggagaaaaatgacctttcatggaataagaagtatacctccttctacatgtttttgtcttactgacctctgataactggaacacatgactctgggtctgtagaaagtcaactgatcaaactcatcctcaccatgcatcaactgttcagactggttttgggacaaaaagatctttcacgagctggggacctcttctccttagatgactctgagattgaagacagccttacagaagctttggagcaaattaagataattagctcatcttcagattaccaaaccaataacaatgaccaggcagtagttgaaatctgtatcac

SEQ ID NO: 198995 - DNA, 1401 bp, Homo sapiens
  Payload ID: 19259
  Gene Name: ventricular zone expressed PH domain-containing 1
  Uniprot ID: Q14D04
  ENST ID: ENST00000468233
  CDS Start-End: 314-955
ggttgttaggcaaatctaattctttcaaactacagatctgctcagagaaatctgtaaatctagtgtagaaataagtgaagctttgcgtcaattgttaggtctaagcagaagtttgggagagagaagaaaagttactcatttgcctgattccgcacgagagtgtcaatgaagacctcaaagtctggagaaaaatgacctttcatggaataagaagtatacctccttctacatgtttttgtcttactgacctctgataactggaacacatgactctgggtctgtagaaagtcaactgatcaaactcatcctcaccatgcatcaactgttcagactggttttgggacaaaaagatctttcacgagctggggacctcttctccttagatgactctgagattgaagacagccttacagaagctttggagcaaattaagataattagctcatcttcagattaccaaaccaataacaatgaccaggcagtagttgaaatctgtatcacaagaatcacaacagccatcagagagaccgagtccattgaaaagcatgcaaaggcccttgtggggctctgggactcctgcttggaacataacctgagaccctttgggaaagacgaagacactcctcatgcaaaaatcgcatctgatatcatgagttgcattttacagaattacaaccgacccccagtgatggcattagccatccccattgcagtgaaattcctccacagaggcaacaaggaactgtgcaggaatatgtctaactacctgtctctggctgcaattaccaaggcagatctcctggctgatcacacggaagttatagtaaagagcatactccaaggtatggtgcgaaagttgagcttggggacatgttttgggagatatttaaaagtattttcatcaagcatttatggtttgtgggaagcaagacctagagtattagaagcaaattaatttctctgttttgctgccagttgacctgtgaacatgcaaaaggttacttaatctggctgtctgtgtcccttcccaaggcagatgaattacttagactcattaaaagaattgtaagcattcttccaaatctgtgtttctcagtttgaagaactgcatttccgtgcttctggtcacctgttcaactaccaactgtggagatcttatctctgtgtactgagtggaacacgtcactcagtggggtatgaaaaacctgtcttcatttgcttccaaaagcaagaaatgtcttttgttagataaaatacatcagaaaatgtgtaatgacttcttaaatgtgaacatgatttggataacaagcataaatactagcataaaaagccaaatagtacacctctgttaattgttacaacatttgaatgaataagaagctcaaattagttcatgcaaaa

SEQ ID NO: 198996 - DNA, 557 bp, Homo sapiens
  Payload ID: 19259
  Gene Name: ventricular zone expressed PH domain-containing 1
  ENST ID: ENST00000489602
  CDS Start-End: 392-557
gatgcaattgtttaggagaagagtgaaggagaagagaagagagcccgaaactaaacagggaggaatccaccatttagaagtctggcaggcaaagaggacaaggtgtaatatctggttgctgttgccattctgccaccaagaaacctgatgacttcatttgggcctcttcaaccagctgcccctaaagctagcaagctccacccttcagtgtccactgataaattccttaatagcagagtgtcaatgaagacctcaaagtctggagaaaaatgacctttcatggaataagaagtatacctccttctacatgtttttgtcttactgacctctgataactggaacacatgactctgggtctgtagaaagtcaactgatcaaactcatcctcaccatgcatcaactgttcagactggttttgggacaaaaagatctttcacgagctggggacctcttctccttagatgactctgagattgaagacagccttacagaagctttggagcaaattaagataattagctcatcttcagattaccaaaccaataacaatgaccagg

SEQ ID NO: 198997 - DNA, 582 bp, Homo sapiens
  Payload ID: 19259
  Gene Name: ventricular zone expressed PH domain-containing 1
  ENST ID: ENST00000475050
  CDS Start-End: 261-419
ggatgcaattgtttaggagaagagtgaaggagaagagaagagagcccgaaactaaacagggaggaatccaccatttagaagtctggcaggcaaagaggacaagagagtgtcaatgaagacctcaaagtctggagaaaaatgacctttcatggaataagaagtatacctccttctacatgtttttgtcttactgacctctgataactggaacacatgactctgggtctgtagaaagtcaactgatcaaactcatcctcaccatgcatcaactgttcagactggttttgggacaaaaagatctttcacgagctggggacctcttctccttagatgactctgagattgaagacagccttacagaagctttggagcaaattaagataattagctcatcttcatctgtggaaaggcaagagtgaaatcagaaaggccagttgagtggctactgaaataattcagataagaagaagcagaggttctgaccatcatggagcagtggtggtggattaccaaaccaataacaatgaccaggcagtagttgaaatctgtatcacaagaatcacaacagccatcagagagacc

SEQ ID NO: 198998 - DNA, 715 bp, Homo sapiens
  Payload ID: 19259
  Gene Name: ventricular zone expressed PH domain-containing 1
  ENST ID: ENST00000473907
  CDS Start-End: 254-463
attgtttaggagaagagtgaaggagaagagaagagagcccgaaactaaacagggaggaatccaccatttagaagtctggcaggcaaagaggacaagagagtgtcaatgaagacctcaaagtctggagaaaaatgacctttcatggaataagaagtatacctccttctacatgtttttgtcttactgacctctgataactggaacacatgactctgggtctgtagaaagtcaactgatcaaactcatcctcaccatgcatcaactgttcagactggttttgggacaaaaagatctttcacgagctggggacctcttctccttagatgactctgagattgaagacagccttacagaagctttggagcaaattaagataattagctcatcttcaaaacgtagaacaggaagggatcgtctaaattgccccttccaacttccagcacagaagattgctgaaaaataggtggcttctcctgcacttgcaatgatgcgaatatgtctgtggaaaggcaagagtgaaatcagaaaggccagttgagtggctactgaaataattcagataagaagaagcagaggttctgaccatcatggagcagtggtggtggattaccaaaccaataacaatgaccaggcagtagttgaaatctgtatcacaagaatcacaacagccatcagagagaccgagtccattgaaaagcatgcaaaggcccttgtg

SEQ ID NO: 198999 - DNA, 665 bp, Homo sapiens
  Payload ID: 19259
  Gene Name: ventricular zone expressed PH domain-containing 1
  ENST ID: ENST00000479987
  CDS Start-End: 306-665
aagtggatgcaattgtttaggagaagagtgaaggagaagagaagagagcccgaaactaaacagggaggaatccaccatttagaagtctggcaggcaaagaggacaaggattaccaaaccaataacaatgaccaggcagtagttgaaatctgtatcacaagaatcacaacagccatcagagagaccgagtccattgaaaagcatgcaaaggcccttgtggggctctgggactcctgcttggaacataacctgagaccctttgggaaagacgaagacactcctcatgcaaaaatcgcatctgatatcatgagttgcattttacagaattacaaccgacccccagtgatggcattagccatccccattgcagtgaaattcctccacagaggcaacaaggaactgtgcaggaatatgtctaactacctgtctctggctgcaattaccaaggcagatctcctggctgatcacacggaagttatagtaaagagcatactccaaggtaacaccatgttgttgagagtgttacctgctgtgtatgaaaagcagcctcagccaattaatagacacctgacagaactcctggccttgatgtctcagctggaacagccagaacagtaccatctactacggcttttgcatgtagcagcaaagaaaaaacaactcgag

SEQ ID NO: 199000 - DNA, 1714 bp, Homo sapiens
  Payload ID: 19259
  Gene Name: ventricular zone expressed PH domain-containing 1
  Uniprot ID: Q14D04
  ENST ID: ENST00000494677
  CDS Start-End: 524-1165
tgtaaatctagtgtagaaataagtgaagctttgcgtcaattgttaggtctaagcagaagtttgggagagagaagaaaagttactcatttgcctgattccgcacggaaacagagcgttgcactgggaggtaactccgctgggtgaggtgcagcctgtcacctgaccggtctctggggctgccggtggcatcaggctgcattccttgaattcttccacccggcaccggctccgcaatgaacaacttcaggttcactgagctgagcggattccactcgctgtgccctcggagcctgcctgaatctcccgcccagtctcaaaccatgcagctgagtaactgcaagggcgcctttgaggagtagcacgcagagagtgtcaatgaagacctcaaagtctggagaaaaatgacctttcatggaataagaagtatacctccttctacatgtttttgtcttactgacctctgataactggaacacatgactctgggtctgtagaaagtcaactgatcaaactcatcctcaccatgcatcaactgttcagactggttttgggacaaaaagatctttcacgagctggggacctcttctccttagatgactctgagattgaagacagccttacagaagctttggagcaaattaagataattagctcatcttcagattaccaaaccaataacaatgaccaggcagtagttgaaatctgtatcacaagaatcacaacagccatcagagagaccgagtccattgaaaagcatgcaaaggcccttgtggggctctgggactcctgcttggaacataacctgagaccctttgggaaagacgaagacactcctcatgcaaaaatcgcatctgatatcatgagttgcattttacagaattacaaccgacccccagtgatggcattagccatccccattgcagtgaaattcctccacagaggcaacaaggaactgtgcaggaatatgtctaactacctgtctctggctgcaattaccaaggcagatctcctggctgatcacacggaagttatagtaaagagcatactccaaggtatggtgcgaaagttgagcttggggacatgttttgggagatatttaaaagtattttcatcaagcatttatggtttgtgggaagcaagacctagagtattagaagcaaattaatttctctgttttgctgccagttgacctgtgaacatgcaaaaggttacttaatctggctgtctgtgtcccttcccaaggcagatgaattacttagactcattaaaagaattgtaagcattcttccaaatctgtgtttctcagtttgaagaactgcatttccgtgcttctggtcacctgttcaactaccaactgtggagatcttatctctgtgtactgagtggaacacgtcactcagtggggtatgaaaaacctgtcttcatttgcttccaaaagcaagaaatgtcttttgttagataaaatacatcagaaaatgtgtaatgacttcttaaatgtgaacatgatttggataacaagcataaatactagcataaaaagccaaatagtacacctctgttaattgttacaacatttgaatgaataagaagctcaaattagttcatgcaaaatattctccttgtcttcttttattttctttggtttcagatcaatcaaaaaacatgtttttgaacttgaagtcagagaacaatacatgatattaattgatgtgca

SEQ ID NO: 199001 - DNA, 746 bp, Homo sapiens
  Payload ID: 19259
  Gene Name: ventricular zone expressed PH domain-containing 1
  ENST ID: ENST00000487753
  CDS Start-End: 252-746
tgtttaggagaagagtgaaggagaagagaagagagcccgaaactaaacagggaggaatccaccatttagaagtctggcaggcaaagaggacaagagagtgtcaatgaagacctcaaagtctggagaaaaatgacctttcatggaataagaagtatacctccttctacatgtttttgtcttactgacctctgataactggaacacatgactctgggtctgtagaaagtcaactgatcaaactcatcctcaccatgcatcaactgttcagactggttttgggacaaaaagatctttcacgagctggggacctcttctccttagatgactctgagattgaagacagccttacagaagctttggagcaaattaagataattagctcatcttcagattaccaaaccaataacaatgaccaggcagtagttgaaatctgtatcacaagaatcacaacagccatcagagagaccgagtccattgaaaagcatgcaaaggcccttgtggggctctgggactcctgcttggaacataacctgagaccctttgggaaagacgaagacactcctcatgcaaaaatcgcatctgatatcatgagttgcattttacagaattacaaccgacccccagtgatggcattagccatccccattgcagtgaaattcctccacagaggcaacaaggaactgtgcaggaatatgtctaactacctgtctctggctgcaattaccaaggcagatctcctggctgat

SEQ ID NO: 199002 - DNA, 992 bp, Homo sapiens
  Payload ID: 19259
  Gene Name: ventricular zone expressed PH domain-containing 1
  Uniprot ID: Q14D04
  ENST ID: ENST00000537559
  CDS Start-End: 158-691
agagtgtcaatgaagacctcaaagtctggagaaaaatgacctttcatggaataagaagtatacctccttctacatgtttttgtcttactgacctctgataactggaacacatgactctgggtctgtagaaagtcaactgatcaaactcatcctcaccatgcatcaactgttcagactggttttgggacaaaaagatctttcacgagctggggacctcttctccttagatgactctgagattgaagacagccttacagaagctttggagcaaattaagataattagctcatcttcagattaccaaaccaataacaatgaccaggcagtagttgaaatctgtatcacaagaatcacaacagccatcagagagaccgagtccattgaaaagcatgcaaaggcccttgtggggctctgggactcctgcttggaacataacctgagaccctttgggaaagacgaagacactcctcatgcaaaaatcgcatctgatatcatgagttgcattttacagaattacaaccgacccccagtgatggcattagccatccccattgcagtgaaattcctccacagaggcaacaaggaactgtgcaggaatatgtctaactacctgtctctggctgcaattaccaaggcagatctcctggctgatcacacggaagttatagtaaagagcatactccaagtttgaagaactgcatttccgtgcttctggtcacctgttcaactaccaactgtggagatcttatctctgtgtactgagtggaacacgtcactcagtggggtatgaaaaacctgtcttcatttgcttccaaaagcaagaaatgtcttttgttagataaaatacatcagaaaatgtgtaatgacttcttaaatgtgaacatgatttggataacaagcataaatactagcataaaaagccaaatagtacacctctgttaattgttacaacatttgaatgaataagaagctcaaattagttcatgcaaaat

SEQ ID NO: 199003 - DNA, 12625 bp, Homo sapiens
  Payload ID: 19260
  Gene Name: versican
  Uniprot ID: P13611
  ENST ID: ENST00000265077
  CDS Start-End: 566-10756
gctgtccccaagccgattggtacttcttgtcaggaagaaacgccaagaggtgggagtgcctggggagggaggcaggcggtccctaccgcaggcgcggggagctgcctttccgcccctccgcctgctttccaagcctggactcttaggagtggctgaagctgcggagcgcttttggagcctgtgaatgaaccctcctcctctccctcctccttcttctcgctgagtctcctcctcggctctgacggtacagtgatataatgatgatgggtgtcacaacccgcatttgaacttgcaggcgagctgccccgagcctttctggggaagaactccaggcgtgcggacgcaacagccgagaacattaggtgttgtggacaggagctgggaccaagatcttcggccagccccgcatcctcccgcatcttccagcaccgtcccgcaccctccgcatccttccccgggccaccacgcttcctatgtgacccgcctgggcaacgccgaacccagtcgcgcagcgctgcagtgaattttccccccaaactgcaataagccgccttccaaggccaagatgttcataaatataaagagcatcttatggatgtgttcaaccttaatagtaacccatgcgctacataaagtcaaagtgggaaaaagcccaccggtgaggggctccctctctggaaaagtcagcctaccttgtcatttttcaacgatgcctactttgccacccagttacaacaccagtgaatttctccgcatcaaatggtctaagattgaagtggacaaaaatggaaaagatttgaaagagactactgtccttgtggcccaaaatggaaatatcaagattggtcaggactacaaagggagagtgtctgtgcccacacatcccgaggctgtgggcgatgcctccctcactgtggtcaagctgctggcaagtgatgcgggtctttaccgctgtgacgtcatgtacgggattgaagacacacaagacacggtgtcactgactgtggatggggttgtgtttcactacagggcggcaaccagcaggtacacactgaattttgaggctgctcagaaggcttgtttggacgttggggcagtcatagcaactccagagcagctctttgctgcctatgaagatggatttgagcagtgtgacgcaggctggctggctgatcagactgtcagatatcccatccgggctcccagagtaggctgttatggagataagatgggaaaggcaggagtcaggacttatggattccgttctccccaggaaacttacgatgtgtattgttatgtggatcatctggatggtgatgtgttccacctcactgtccccagtaaattcaccttcgaggaggctgcaaaagagtgtgaaaaccaggatgccaggctggcaacagtgggggaactccaggcggcatggaggaacggctttgaccagtgcgattacgggtggctgtcggatgccagcgtgcgccaccctgtgactgtggccagggcccagtgtggaggtggtctacttggggtgagaaccctgtatcgttttgagaaccagacaggcttccctccccctgatagcagatttgatgcctactgctttaaacctaaagaggctacaaccatcgatttgagtatcctcgcagaaactgcatcacccagtttatccaaagaaccacaaatggtttctgatagaactacaccaatcatccctttagttgatgaattacctgtcattccaacagagttccctcccgtgggaaatattgtcagttttgaacagaaagccacagtccaacctcaggctatcacagatagtttagccaccaaattacccacacctactggcagtaccaagaagccctgggatatggatgactactcaccttctgcttcaggacctcttggaaagctagacatatcagaaattaaggaagaagtgctccagagtacaactggcgtctctcattatgctacggattcatgggatggtgtcgtggaagataaacaaacacaagaatcggttacacagattgaacaaatagaagtgggtcctttggtaacatctatggaaatcttaaagcacattccttccaaggaattccctgtaactgaaacaccattggtaactgcaagaatgatcctggaatccaaaactgaaaagaaaatggtaagcactgtttctgaattggtaaccacaggtcactatggattcaccttgggagaagaggatgatgaagacagaacacttacagttggatctgatgagagcaccttgatctttgaccaaattcctgaagtcattacggtgtcaaagacttcagaagacaccatccacactcatttagaagacttggagtcagtctcagcatccacaactgtttcccctttaattatgcctgataataatggatcatccatggatgactgggaagagagacaaactagtggtaggataacggaagagtttcttggcaaatatctgtctactacaccttttccatcacagcatcgtacagaaatagaattgtttccttattctggtgataaaatattagtagagggaatttccacagttatttatccttctctacaaacagaaatgacacatagaagagaaagaacagaaacactaataccagagatgagaacagatacttatacagatgaaatacaagaagagatcactaaaagtccatttatgggaaaaacagaagaagaagtcttctctgggatgaaactctctacatctctctcagagccaattcatgttacagagtcttctgtggaaatgaccaagtcttttgatttcccaacattgataacaaagttaagtgcagagccaacagaagtaagagatatggaggaagactttacagcaactccaggtactacaaaatatgatgaaaatattacaacagtgcttttggcccatggtactttaagtgttgaagcagccactgtatcaaaatggtcatgggatgaagataatacaacatccaagcctttagagtctacagaaccttcagcctcttcaaaattgccccctgccttactcacaactgtggggatgaatggaaaggataaagacatcccaagtttcactgaagatggagcagatgaatttactcttattccagatagtactcaaaagcagttagaggaggttactgatgaagacatagcagcccatggaaaattcacaattagatttcagccaactacatcaactggtattgcagaaaagtcaactttgagagattctacaactgaagaaaaagttccacctatcacaagcactgaaggccaagtttatgcaaccatggaaggaagtgctttgggtgaagtagaagatgtggacctctctaagccagtatctactgttccccaatttgcacacacttcagaggtggaaggattagcatttgttagttatagtagcacccaagagcctactacttatgtagactcttcccataccattcctctttctgtaattcccaagacagactggggagtgttagtaccttctgttccatcagaagatgaagttctaggtgaaccctctcaagacatacttgtcattgatcagactcgccttgaagcgactatttctccagaaactatgagaacaacaaaaatcacagagggaacaactcaggaagaattcccttggaaagaacagactgcagagaaaccagttcctgctctcagttctacagcttggactcccaaggaggcagtaacaccactggatgaacaagagggcgatggatcagcatatacagtctctgaagatgaattgttgacaggttctgagagggtcccagttttagaaacaactccagttggaaaaattgatcacagtgtgtcttatccaccaggtgctgtaactgagcacaaagtgaaaacagatgaagtggtaacactaacaccacgcattgggccaaaagtatctttaagtccagggcctgaacaaaaatatgaaacagaaggtagtagtacaacaggatttacatcatctttgagtccttttagtacccacattacccagcttatggaagaaaccactactgagaaaacatccctagaggatattgatttaggctcaggattatttgaaaagcccaaagccacagaactcatagaattttcaacaatcaaagtcacagttccaagtgatattaccactgccttcagttcagtagacagacttcacacaacttcagcattcaagccatcttccgcgatcactaagaaaccacctctcatcgacagggaacctggtgaagaaacaaccagtgacatggtaatcattggagaatcaacatctcatgttcctcccactacccttgaagatattgtagccaaggaaacagaaaccgatattgatagagagtatttcacgacttcaagtcctcctgctacacagccaacaagaccacccactgtggaagacaaagaggcctttggacctcaggcgctttctacgccacagcccccagcaagcacaaaatttcaccctgacattaatgtttatattattgaggtcagagaaaataagacaggtcgaatgagtgatttgagtgtaattggtcatccaatagattcagaatctaaagaagatgaaccttgtagtgaagaaacagatccagtgcatgatctaatggctgaaattttacctgaattccctgacataattgaaatagacctataccacagtgaagaaaatgaagaagaagaagaagagtgtgcaaatgctactgatgtgacaaccaccccatctgtgcagtacataaatgggaagcatctcgttaccactgtgcccaaggacccagaagctgcagaagctaggcgtggccagtttgaaagtgttgcaccttctcagaatttctcggacagctctgaaagtgatactcatccatttgtaatagccaaaacggaattgtctactgctgtgcaacctaatgaatctacagaaacaactgagtctcttgaagttacatggaagcctgagacttaccctgaaacatcagaacatttttcaggtggtgagcctgatgttttccccacagtcccattccatgaggaatttgaaagtggaacagccaaaaaaggggcagaatcagtcacagagagagatactgaagttggtcatcaggcacatgaacatactgaacctgtatctctgtttcctgaagagtcttcaggagagattgccattgaccaagaatctcagaaaatagcctttgcaagggctacagaagtaacatttggtgaagaggtagaaaaaagtacttctgtcacatacactcccactatagttccaagttctgcatcagcatatgtttcagaggaagaagcagttaccctaataggaaatccttggccagatgacctgttgtctaccaaagaaagctgggtagaagcaactcctagacaagttgtagagctctcagggagttcttcgattccaattacagaaggctctggagaagcagaagaagatgaagatacaatgttcaccatggtaactgatttatcacagagaaatactactgatacactcattactttagacactagcaggataatcacagaaagcttttttgaggttcctgcaaccaccatttatccagtttctgaacaaccttctgcaaaagtggtgcctaccaagtttgtaagtgaaacagacacttctgagtggatttccagtaccactgttgaggaaaagaaaaggaaggaggaggagggaactacaggtacggcttctacatttgaggtatattcatctacacagagatcggatcaattaattttaccctttgaattagaaagtccaaatgtagctacatctagtgattcaggtaccaggaaaagttttatgtccttgacaacaccaacacagtctgaaagggaaatgacagattctactcctgtctttacagaaacaaatacattagaaaatttgggggcacagaccactgagcacagcagtatccatcaacctggggttcaggaagggctgaccactctcccacgtagtcctgcctctgtctttatggagcagggctctggagaagctgctgccgacccagaaaccaccactgtttcttcattttcattaaacgtagagtatgcaattcaagccgaaaaggaagtagctggcactttgtctccgcatgtggaaactacattctccactgagccaacaggactggttttgagtacagtaatggacagagtagttgctgaaaatataacccaaacatccagggaaatagtgatttcagagcgattaggagaaccaaattatggggcagaaataaggggcttttccacaggttttcctttggaggaagatttcagtggtgactttagagaatactcaacagtgtctcatcccatagcaaaagaagaaacggtaatgatggaaggctctggagatgcagcatttagggacacccagacttcaccatctacagtacctacttcagttcacatcagtcacatatctgactcagaaggacccagtagcaccatggtcagcacttcagccttcccctgggaagagtttacatcctcagctgagggctcaggtgagcaactggtcacagtcagcagctctgttgttccagtgcttcccagtgctgtgcaaaagttttctggtacagcttcctccattatcgacgaaggattgggagaagtgggtactgtcaatgaaattgatagaagatccaccattttaccaacagcagaagtggaaggtacgaaagctccagtagagaaggaggaagtaaaggtcagtggcacagtttcaacaaactttccccaaactatagagccagccaaattatggtctaggcaagaagtcaaccctgtaagacaagaaattgaaagtgaaacaacatcagaggaacaaattcaagaagaaaagtcatttgaatcccctcaaaactctcctgcaacagaacaaacaatctttgattcacagacatttactgaaactgaactcaaaaccacagattattctgtactaacaacaaagaaaacttacagtgatgataaagaaatgaaggaggaagacacttctttagttaacatgtctactccagatccagatgcaaatggcttggaatcttacacaactctccctgaagctactgaaaagtcacattttttcttagctactgcattagtaactgaatctataccagctgaacatgtagtcacagattcaccaatcaaaaaggaagaaagtacaaaacattttccgaaaggcatgagaccaacaattcaagagtcagatactgagctcttattctctggactgggatcaggagaagaagttttacctactctaccaacagagtcagtgaattttactgaagtggaacaaatcaataacacattatatccccacacttctcaagtggaaagtacctcaagtgacaaaattgaagactttaacagaatggaaaatgtggcaaaagaagttggaccactcgtatctcaaacagacatctttgaaggtagtgggtcagtaaccagcacaacattaatagaaattttaagtgacactggagcagaaggacccacggtggcacctctccctttctccacggacatcggacatcctcaaaatcagactgtcaggtgggcagaagaaatccagactagtagaccacaaaccataactgaacaagactctaacaagaattcttcaacagcagaaattaacgaaacaacaacctcatctactgattttctggctagagcttatggttttgaaatggccaaagaatttgttacatcagcaccaaaaccatctgacttgtattatgaaccttctggagaaggatctggagaagtggatattgttgattcatttcacacttctgcaactactcaggcaaccagacaagaaagcagcaccacatttgtttctgatgggtccctggaaaaacatcctgaggtgccaagcgctaaagctgttactgctgatggattcccaacagtttcagtgatgctgcctcttcattcagagcagaacaaaagctcccctgatccaactagcacactgtcaaatacagtgtcatatgagaggtccacagacggtagtttccaagaccgtttcagggaattcgaggattccaccttaaaacctaacagaaaaaaacccactgaaaatattatcatagacctggacaaagaggacaaggatttaatattgacaattacagagagtaccatccttgaaattctacctgagctgacatcggataaaaatactatcatagatattgatcatactaaacctgtgtatgaagacattcttggaatgcaaacagatatagatacagaggtaccatcagaaccacatgacagtaatgatgaaagtaatgatgacagcactcaagttcaagagatctatgaggcagctgtcaacctttctttaactgaggaaacatttgagggctctgctgatgttctggctagctacactcaggcaacacatgatgaatcaatgacttatgaagatagaagccaactagatcacatgggctttcacttcacaactgggatccctgctcctagcacagaaacagaattagacgttttacttcccacggcaacatccctgccaattcctcgtaagtctgccacagttattccagagattgaaggaataaaagctgaagcaaaagccctggatgacatgtttgaatcaagcactttgtctgatggtcaagctattgcagaccaaagtgaaataataccaacattgggccaatttgaaaggactcaggaggagtatgaagacaaaaaacatgctggtccttcttttcagccagaattctcttcaggagctgaggaggcattagtagaccatactccctatctaagtattgctactacccaccttatggatcagagtgtaacagaggtgcctgatgtgatggaaggatccaatcccccatattacactgatacaacattagcagtttcaacatttgcgaagttgtcttctcagacaccatcatctcccctcactatctactcaggcagtgaagcctctggacacacagagatcccccagcccagtgctctgccaggaatagacgtcggctcatctgtaatgtccccacaggattcttttaaggaaattcatgtaaatattgaagcgactttcaaaccatcaagtgaggaataccttcacataactgagcctccctctttatctcctgacacaaaattagaaccttcagaagatgatggtaaacctgagttattagaagaaatggaagcttctcccacagaacttattgctgtggaaggaactgagattctccaagatttccaaaacaaaaccgatggtcaagtttctggagaagcaatcaagatgtttcccaccattaaaacacctgaggctggaactgttattacaactgccgatgaaattgaattagaaggtgctacacagtggccacactctacttctgcttctgccacctatggggtcgaggcaggtgtggtgccttggctaagtccacagacttctgagaggcccacgctttcttcttctccagaaataaaccctgaaactcaagcagctttaatcagagggcaggattccacgatagcagcatcagaacagcaagtggcagcgagaattcttgattccaatgatcaggcaacagtaaaccctgtggaatttaatactgaggttgcaacaccaccattttcccttctggagacttctaatgaaacagatttcctgattggcattaatgaagagtcagtggaaggcacggcaatctatttaccaggacctgatcgctgcaaaatgaacccgtgccttaacggaggcacctgttatcctactgaaacttcctacgtatgcacctgtgtgccaggatacagcggagaccagtgtgaacttgattttgatgaatgtcactctaatccctgtcgtaatggagccacttgtgttgatggttttaacacattcaggtgcctctgccttccaagttatgttggtgcactttgtgagcaagataccgagacatgtgactatggctggcacaaattccaagggcagtgctacaaatactttgcccatcgacgcacatgggatgcagctgaacgggaatgccgtctgcagggtgcccatctcacaagcatcctgtctcacgaagaacaaatgtttgttaatcgtgtgggccatgattatcagtggataggcctcaatgacaagatgtttgagcatgacttccgttggactgatggcagcacactgcaatacgagaattggagacccaaccagccagacagcttcttttctgctggagaagactgtgttgtaatcatttggcatgagaatggccagtggaatgatgttccctgcaattaccatctcacctatacgtgcaagaaaggaacagtcgcttgcggccagccccctgttgtagaaaatgccaagacctttggaaagatgaaacctcgttatgaaatcaactccctgattagataccactgcaaagatggtttcattcaacgtcaccttccaactatccggtgcttaggaaatggaagatgggctatacctaaaattacctgcatgaacccatctgcataccaaaggacttattctatgaaatactttaaaaattcctcatcagcaaaggacaattcaataaatacatccaaacatgatcatcgttggagccggaggtggcaggagtcgaggcgctgatccctaaaatggcgaacatgtgttttcatcatttcagccaaagtcctaacttcctgtgcctttcctatcacctcgagaagtaattatcagttggtttggatttttggaccaccgttcagtcattttgggttgccgtgctcccaaaacattttaaatgaaagtattggcattcaaaaagacagcagacaaaatgaaagaaaatgagagcagaaagtaagcatttccagcctatctaatttctttagttttctatttgcctccagtgcagtccatttcctaatgtataccagcctactgtactatttaaaatgctcaatttcagcaccgatggccatgtaaataagatgatttaatgttgattttaatcctgtatataaaataaaaagtcacaatgagtttgggcatatttaatgatgattatggagccttagaggtctttaatcattggttcggctgcttttatgtagtttaggctggaaatggtttcacttgctctttgactgtcagcaagactgaagatggcttttcctggacagctagaaaacacaaaatcttgtaggtcattgcacctatctcagccataggtgcagtttgcttctacatgatgctaaaggctgcgaatgggatcctgatggaactaaggactccaatgtcgaactcttctttgctgcattcctttttcttcacttacaagaaaggcctgaatggaggacttttctgtaaccaggaacattttttaggggtcaaagtgctaataattaactcaaccaggtctactttttaatggctttcataacactaactcataaggttaccgatcaatgcatttcatacggatatagacctagggctctggagggtgggggattgttaaaacacatgcaaaaaaaaaaaaaaaaaaaaaaaaagaaattttgtatatataaccattttaatcttttataaagttttgaatgttcatgtatgaatgctgcagctgtgaagcatacataaataaatgaagtaagccatactgatttaatttattggatgttattttccctaagacctgaaaatgaacatagtatgctagttatttttcagtgttagccttttactttcctcacacaatttggaatcatataatataggtactttgtccctgattaaataatgtgacggatagaatgcatcaagtgtttattatgaaaagagtggaaaagtatatagcttttagcaaaaggtgtttgcccattctaagaaatgagcgaatatatagaaatagtgtgggcatttcttcctgttaggtggagtgtatgtgttgacatttctccccatctcttcccactctgttttctccccattatttgaataaagtgactgctgaagatgactttgaatccttatccacttaatttaatgtttaaagaaaaacctgtaatggaaagtaagactccttccctaatttcagtttagagcaacttgaagaagagtagacaaaaaataaaatgcacatagaaaaagagaaaaagggcacaaagggattggcccaatattgattctttttttataaaacctcctttggcttagaaggaatgactctagctacaataatacacagtatgtttaagcaggttcccttggttgttgcattaaatgtaatccacctttaggtattttagagcacagaacaacactgtgttgatctagtaggtttctatttttcctttctctttacaatgcacataatactttcctgtatttatatcataacgtgtatagtgtaaaatgtgaatgactttttttgtgaatgaaaatctaaaatctttgtaactttttatatctgcttttgtttcaccaaagaaacctaaaatccttcttttactacac

SEQ ID NO: 199004 - DNA, 9455 bp, Homo sapiens
  Payload ID: 19260
  Gene Name: versican
  Uniprot ID: P13611
  ENST ID: ENST00000343200
  CDS Start-End: 357-7586
cttcttctcgctgagtctcctcctcggctctgacggtacagtgatataatgatgatgggtgtcacaacccgcatttgaacttgcaggcgagctgccccgagcctttctggggaagaactccaggcgtgcggacgcaacagccgagaacattaggtgttgtggacaggagctgggaccaagatcttcggccagccccgcatcctcccgcatcttccagcaccgtcccgcaccctccgcatccttccccgggccaccacgcttcctatgtgacccgcctgggcaacgccgaacccagtcgcgcagcgctgcagtgaattttccccccaaactgcaataagccgccttccaaggccaagatgttcataaatataaagagcatcttatggatgtgttcaaccttaatagtaacccatgcgctacataaagtcaaagtgggaaaaagcccaccggtgaggggctccctctctggaaaagtcagcctaccttgtcatttttcaacgatgcctactttgccacccagttacaacaccagtgaatttctccgcatcaaatggtctaagattgaagtggacaaaaatggaaaagatttgaaagagactactgtccttgtggcccaaaatggaaatatcaagattggtcaggactacaaagggagagtgtctgtgcccacacatcccgaggctgtgggcgatgcctccctcactgtggtcaagctgctggcaagtgatgcgggtctttaccgctgtgacgtcatgtacgggattgaagacacacaagacacggtgtcactgactgtggatggggttgtgtttcactacagggcggcaaccagcaggtacacactgaattttgaggctgctcagaaggcttgtttggacgttggggcagtcatagcaactccagagcagctctttgctgcctatgaagatggatttgagcagtgtgacgcaggctggctggctgatcagactgtcagatatcccatccgggctcccagagtaggctgttatggagataagatgggaaaggcaggagtcaggacttatggattccgttctccccaggaaacttacgatgtgtattgttatgtggatcatctggatggtgatgtgttccacctcactgtccccagtaaattcaccttcgaggaggctgcaaaagagtgtgaaaaccaggatgccaggctggcaacagtgggggaactccaggcggcatggaggaacggctttgaccagtgcgattacgggtggctgtcggatgccagcgtgcgccaccctgtgactgtggccagggcccagtgtggaggtggtctacttggggtgagaaccctgtatcgttttgagaaccagacaggcttccctccccctgatagcagatttgatgcctactgctttaaacgtcgaatgagtgatttgagtgtaattggtcatccaatagattcagaatctaaagaagatgaaccttgtagtgaagaaacagatccagtgcatgatctaatggctgaaattttacctgaattccctgacataattgaaatagacctataccacagtgaagaaaatgaagaagaagaagaagagtgtgcaaatgctactgatgtgacaaccaccccatctgtgcagtacataaatgggaagcatctcgttaccactgtgcccaaggacccagaagctgcagaagctaggcgtggccagtttgaaagtgttgcaccttctcagaatttctcggacagctctgaaagtgatactcatccatttgtaatagccaaaacggaattgtctactgctgtgcaacctaatgaatctacagaaacaactgagtctcttgaagttacatggaagcctgagacttaccctgaaacatcagaacatttttcaggtggtgagcctgatgttttccccacagtcccattccatgaggaatttgaaagtggaacagccaaaaaaggggcagaatcagtcacagagagagatactgaagttggtcatcaggcacatgaacatactgaacctgtatctctgtttcctgaagagtcttcaggagagattgccattgaccaagaatctcagaaaatagcctttgcaagggctacagaagtaacatttggtgaagaggtagaaaaaagtacttctgtcacatacactcccactatagttccaagttctgcatcagcatatgtttcagaggaagaagcagttaccctaataggaaatccttggccagatgacctgttgtctaccaaagaaagctgggtagaagcaactcctagacaagttgtagagctctcagggagttcttcgattccaattacagaaggctctggagaagcagaagaagatgaagatacaatgttcaccatggtaactgatttatcacagagaaatactactgatacactcattactttagacactagcaggataatcacagaaagcttttttgaggttcctgcaaccaccatttatccagtttctgaacaaccttctgcaaaagtggtgcctaccaagtttgtaagtgaaacagacacttctgagtggatttccagtaccactgttgaggaaaagaaaaggaaggaggaggagggaactacaggtacggcttctacatttgaggtatattcatctacacagagatcggatcaattaattttaccctttgaattagaaagtccaaatgtagctacatctagtgattcaggtaccaggaaaagttttatgtccttgacaacaccaacacagtctgaaagggaaatgacagattctactcctgtctttacagaaacaaatacattagaaaatttgggggcacagaccactgagcacagcagtatccatcaacctggggttcaggaagggctgaccactctcccacgtagtcctgcctctgtctttatggagcagggctctggagaagctgctgccgacccagaaaccaccactgtttcttcattttcattaaacgtagagtatgcaattcaagccgaaaaggaagtagctggcactttgtctccgcatgtggaaactacattctccactgagccaacaggactggttttgagtacagtaatggacagagtagttgctgaaaatataacccaaacatccagggaaatagtgatttcagagcgattaggagaaccaaattatggggcagaaataaggggcttttccacaggttttcctttggaggaagatttcagtggtgactttagagaatactcaacagtgtctcatcccatagcaaaagaagaaacggtaatgatggaaggctctggagatgcagcatttagggacacccagacttcaccatctacagtacctacttcagttcacatcagtcacatatctgactcagaaggacccagtagcaccatggtcagcacttcagccttcccctgggaagagtttacatcctcagctgagggctcaggtgagcaactggtcacagtcagcagctctgttgttccagtgcttcccagtgctgtgcaaaagttttctggtacagcttcctccattatcgacgaaggattgggagaagtgggtactgtcaatgaaattgatagaagatccaccattttaccaacagcagaagtggaaggtacgaaagctccagtagagaaggaggaagtaaaggtcagtggcacagtttcaacaaactttccccaaactatagagccagccaaattatggtctaggcaagaagtcaaccctgtaagacaagaaattgaaagtgaaacaacatcagaggaacaaattcaagaagaaaagtcatttgaatcccctcaaaactctcctgcaacagaacaaacaatctttgattcacagacatttactgaaactgaactcaaaaccacagattattctgtactaacaacaaagaaaacttacagtgatgataaagaaatgaaggaggaagacacttctttagttaacatgtctactccagatccagatgcaaatggcttggaatcttacacaactctccctgaagctactgaaaagtcacattttttcttagctactgcattagtaactgaatctataccagctgaacatgtagtcacagattcaccaatcaaaaaggaagaaagtacaaaacattttccgaaaggcatgagaccaacaattcaagagtcagatactgagctcttattctctggactgggatcaggagaagaagttttacctactctaccaacagagtcagtgaattttactgaagtggaacaaatcaataacacattatatccccacacttctcaagtggaaagtacctcaagtgacaaaattgaagactttaacagaatggaaaatgtggcaaaagaagttggaccactcgtatctcaaacagacatctttgaaggtagtgggtcagtaaccagcacaacattaatagaaattttaagtgacactggagcagaaggacccacggtggcacctctccctttctccacggacatcggacatcctcaaaatcagactgtcaggtgggcagaagaaatccagactagtagaccacaaaccataactgaacaagactctaacaagaattcttcaacagcagaaattaacgaaacaacaacctcatctactgattttctggctagagcttatggttttgaaatggccaaagaatttgttacatcagcaccaaaaccatctgacttgtattatgaaccttctggagaaggatctggagaagtggatattgttgattcatttcacacttctgcaactactcaggcaaccagacaagaaagcagcaccacatttgtttctgatgggtccctggaaaaacatcctgaggtgccaagcgctaaagctgttactgctgatggattcccaacagtttcagtgatgctgcctcttcattcagagcagaacaaaagctcccctgatccaactagcacactgtcaaatacagtgtcatatgagaggtccacagacggtagtttccaagaccgtttcagggaattcgaggattccaccttaaaacctaacagaaaaaaacccactgaaaatattatcatagacctggacaaagaggacaaggatttaatattgacaattacagagagtaccatccttgaaattctacctgagctgacatcggataaaaatactatcatagatattgatcatactaaacctgtgtatgaagacattcttggaatgcaaacagatatagatacagaggtaccatcagaaccacatgacagtaatgatgaaagtaatgatgacagcactcaagttcaagagatctatgaggcagctgtcaacctttctttaactgaggaaacatttgagggctctgctgatgttctggctagctacactcaggcaacacatgatgaatcaatgacttatgaagatagaagccaactagatcacatgggctttcacttcacaactgggatccctgctcctagcacagaaacagaattagacgttttacttcccacggcaacatccctgccaattcctcgtaagtctgccacagttattccagagattgaaggaataaaagctgaagcaaaagccctggatgacatgtttgaatcaagcactttgtctgatggtcaagctattgcagaccaaagtgaaataataccaacattgggccaatttgaaaggactcaggaggagtatgaagacaaaaaacatgctggtccttcttttcagccagaattctcttcaggagctgaggaggcattagtagaccatactccctatctaagtattgctactacccaccttatggatcagagtgtaacagaggtgcctgatgtgatggaaggatccaatcccccatattacactgatacaacattagcagtttcaacatttgcgaagttgtcttctcagacaccatcatctcccctcactatctactcaggcagtgaagcctctggacacacagagatcccccagcccagtgctctgccaggaatagacgtcggctcatctgtaatgtccccacaggattcttttaaggaaattcatgtaaatattgaagcgactttcaaaccatcaagtgaggaataccttcacataactgagcctccctctttatctcctgacacaaaattagaaccttcagaagatgatggtaaacctgagttattagaagaaatggaagcttctcccacagaacttattgctgtggaaggaactgagattctccaagatttccaaaacaaaaccgatggtcaagtttctggagaagcaatcaagatgtttcccaccattaaaacacctgaggctggaactgttattacaactgccgatgaaattgaattagaaggtgctacacagtggccacactctacttctgcttctgccacctatggggtcgaggcaggtgtggtgccttggctaagtccacagacttctgagaggcccacgctttcttcttctccagaaataaaccctgaaactcaagcagctttaatcagagggcaggattccacgatagcagcatcagaacagcaagtggcagcgagaattcttgattccaatgatcaggcaacagtaaaccctgtggaatttaatactgaggttgcaacaccaccattttcccttctggagacttctaatgaaacagatttcctgattggcattaatgaagagtcagtggaaggcacggcaatctatttaccaggacctgatcgctgcaaaatgaacccgtgccttaacggaggcacctgttatcctactgaaacttcctacgtatgcacctgtgtgccaggatacagcggagaccagtgtgaacttgattttgatgaatgtcactctaatccctgtcgtaatggagccacttgtgttgatggttttaacacattcaggtgcctctgccttccaagttatgttggtgcactttgtgagcaagataccgagacatgtgactatggctggcacaaattccaagggcagtgctacaaatactttgcccatcgacgcacatgggatgcagctgaacgggaatgccgtctgcagggtgcccatctcacaagcatcctgtctcacgaagaacaaatgtttgttaatcgtgtgggccatgattatcagtggataggcctcaatgacaagatgtttgagcatgacttccgttggactgatggcagcacactgcaatacgagaattggagacccaaccagccagacagcttcttttctgctggagaagactgtgttgtaatcatttggcatgagaatggccagtggaatgatgttccctgcaattaccatctcacctatacgtgcaagaaaggaacagtcgcttgcggccagccccctgttgtagaaaatgccaagacctttggaaagatgaaacctcgttatgaaatcaactccctgattagataccactgcaaagatggtttcattcaacgtcaccttccaactatccggtgcttaggaaatggaagatgggctatacctaaaattacctgcatgaacccatctgcataccaaaggacttattctatgaaatactttaaaaattcctcatcagcaaaggacaattcaataaatacatccaaacatgatcatcgttggagccggaggtggcaggagtcgaggcgctgatccctaaaatggcgaacatgtgttttcatcatttcagccaaagtcctaacttcctgtgcctttcctatcacctcgagaagtaattatcagttggtttggatttttggaccaccgttcagtcattttgggttgccgtgctcccaaaacattttaaatgaaagtattggcattcaaaaagacagcagacaaaatgaaagaaaatgagagcagaaagtaagcatttccagcctatctaatttctttagttttctatttgcctccagtgcagtccatttcctaatgtataccagcctactgtactatttaaaatgctcaatttcagcaccgatggccatgtaaataagatgatttaatgttgattttaatcctgtatataaaataaaaagtcacaatgagtttgggcatatttaatgatgattatggagccttagaggtctttaatcattggttcggctgcttttatgtagtttaggctggaaatggtttcacttgctctttgactgtcagcaagactgaagatggcttttcctggacagctagaaaacacaaaatcttgtaggtcattgcacctatctcagccataggtgcagtttgcttctacatgatgctaaaggctgcgaatgggatcctgatggaactaaggactccaatgtcgaactcttctttgctgcattcctttttcttcacttacaagaaaggcctgaatggaggacttttctgtaaccaggaacattttttaggggtcaaagtgctaataattaactcaaccaggtctactttttaatggctttcataacactaactcataaggttaccgatcaatgcatttcatacggatatagacctagggctctggagggtgggggattgttaaaacacatgcaaaaaaaaaaaaaaaaaaaaaaaaagaaattttgtatatataaccattttaatcttttataaagttttgaatgttcatgtatgaatgctgcagctgtgaagcatacataaataaatgaagtaagccatactgatttaatttattggatgttattttccctaagacctgaaaatgaacatagtatgctagttatttttcagtgttagccttttactttcctcacacaatttggaatcatataatataggtactttgtccctgattaaataatgtgacggatagaatgcatcaagtgtttattatgaaaagagtggaaaagtatatagcttttagcaaaaggtgtttgcccattctaagaaatgagcgaatatatagaaatagtgtgggcatttcttcctgttaggtggagtgtatgtgttgacatttctccccatctcttcccactctgttttctccccattatttgaataaagtgactgctgaagatgactttgaatccttatccacttaatttaatgtttaaagaaaaacctgtaatggaaagtaagactccttccctaatttcagtttagagcaacttgaagaagagtagacaaaaaataaaatgcacatagaaaaagagaaaaagggcacaaagggattggcccaatattgattctttttttataaaacctcctttggcttagaaggaatgactctagctacaataatacacagtatgtttaagcaggttcccttggttgttgcattaaatgtaatccacctttaggtattttagagcacagaacaacactgtgttgatctagtaggtttctatttttcctttctctttacaatgcacataatactttcctgtatttatatcataacgtgtatagtgtaaaatgtgaatgactttttttgtgaatgaaaatctaaaatctttgtaactttttatatctgcttttgtttcaccaaagaaacctaaaatccttcttttactacac

SEQ ID NO: 199005 - DNA, 7154 bp, Homo sapiens
  Payload ID: 19260
  Gene Name: versican
  Uniprot ID: P13611
  ENST ID: ENST00000342785
  CDS Start-End: 357-5285
cttcttctcgctgagtctcctcctcggctctgacggtacagtgatataatgatgatgggtgtcacaacccgcatttgaacttgcaggcgagctgccccgagcctttctggggaagaactccaggcgtgcggacgcaacagccgagaacattaggtgttgtggacaggagctgggaccaagatcttcggccagccccgcatcctcccgcatcttccagcaccgtcccgcaccctccgcatccttccccgggccaccacgcttcctatgtgacccgcctgggcaacgccgaacccagtcgcgcagcgctgcagtgaattttccccccaaactgcaataagccgccttccaaggccaagatgttcataaatataaagagcatcttatggatgtgttcaaccttaatagtaacccatgcgctacataaagtcaaagtgggaaaaagcccaccggtgaggggctccctctctggaaaagtcagcctaccttgtcatttttcaacgatgcctactttgccacccagttacaacaccagtgaatttctccgcatcaaatggtctaagattgaagtggacaaaaatggaaaagatttgaaagagactactgtccttgtggcccaaaatggaaatatcaagattggtcaggactacaaagggagagtgtctgtgcccacacatcccgaggctgtgggcgatgcctccctcactgtggtcaagctgctggcaagtgatgcgggtctttaccgctgtgacgtcatgtacgggattgaagacacacaagacacggtgtcactgactgtggatggggttgtgtttcactacagggcggcaaccagcaggtacacactgaattttgaggctgctcagaaggcttgtttggacgttggggcagtcatagcaactccagagcagctctttgctgcctatgaagatggatttgagcagtgtgacgcaggctggctggctgatcagactgtcagatatcccatccgggctcccagagtaggctgttatggagataagatgggaaaggcaggagtcaggacttatggattccgttctccccaggaaacttacgatgtgtattgttatgtggatcatctggatggtgatgtgttccacctcactgtccccagtaaattcaccttcgaggaggctgcaaaagagtgtgaaaaccaggatgccaggctggcaacagtgggggaactccaggcggcatggaggaacggctttgaccagtgcgattacgggtggctgtcggatgccagcgtgcgccaccctgtgactgtggccagggcccagtgtggaggtggtctacttggggtgagaaccctgtatcgttttgagaaccagacaggcttccctccccctgatagcagatttgatgcctactgctttaaacctaaagaggctacaaccatcgatttgagtatcctcgcagaaactgcatcacccagtttatccaaagaaccacaaatggtttctgatagaactacaccaatcatccctttagttgatgaattacctgtcattccaacagagttccctcccgtgggaaatattgtcagttttgaacagaaagccacagtccaacctcaggctatcacagatagtttagccaccaaattacccacacctactggcagtaccaagaagccctgggatatggatgactactcaccttctgcttcaggacctcttggaaagctagacatatcagaaattaaggaagaagtgctccagagtacaactggcgtctctcattatgctacggattcatgggatggtgtcgtggaagataaacaaacacaagaatcggttacacagattgaacaaatagaagtgggtcctttggtaacatctatggaaatcttaaagcacattccttccaaggaattccctgtaactgaaacaccattggtaactgcaagaatgatcctggaatccaaaactgaaaagaaaatggtaagcactgtttctgaattggtaaccacaggtcactatggattcaccttgggagaagaggatgatgaagacagaacacttacagttggatctgatgagagcaccttgatctttgaccaaattcctgaagtcattacggtgtcaaagacttcagaagacaccatccacactcatttagaagacttggagtcagtctcagcatccacaactgtttcccctttaattatgcctgataataatggatcatccatggatgactgggaagagagacaaactagtggtaggataacggaagagtttcttggcaaatatctgtctactacaccttttccatcacagcatcgtacagaaatagaattgtttccttattctggtgataaaatattagtagagggaatttccacagttatttatccttctctacaaacagaaatgacacatagaagagaaagaacagaaacactaataccagagatgagaacagatacttatacagatgaaatacaagaagagatcactaaaagtccatttatgggaaaaacagaagaagaagtcttctctgggatgaaactctctacatctctctcagagccaattcatgttacagagtcttctgtggaaatgaccaagtcttttgatttcccaacattgataacaaagttaagtgcagagccaacagaagtaagagatatggaggaagactttacagcaactccaggtactacaaaatatgatgaaaatattacaacagtgcttttggcccatggtactttaagtgttgaagcagccactgtatcaaaatggtcatgggatgaagataatacaacatccaagcctttagagtctacagaaccttcagcctcttcaaaattgccccctgccttactcacaactgtggggatgaatggaaaggataaagacatcccaagtttcactgaagatggagcagatgaatttactcttattccagatagtactcaaaagcagttagaggaggttactgatgaagacatagcagcccatggaaaattcacaattagatttcagccaactacatcaactggtattgcagaaaagtcaactttgagagattctacaactgaagaaaaagttccacctatcacaagcactgaaggccaagtttatgcaaccatggaaggaagtgctttgggtgaagtagaagatgtggacctctctaagccagtatctactgttccccaatttgcacacacttcagaggtggaaggattagcatttgttagttatagtagcacccaagagcctactacttatgtagactcttcccataccattcctctttctgtaattcccaagacagactggggagtgttagtaccttctgttccatcagaagatgaagttctaggtgaaccctctcaagacatacttgtcattgatcagactcgccttgaagcgactatttctccagaaactatgagaacaacaaaaatcacagagggaacaactcaggaagaattcccttggaaagaacagactgcagagaaaccagttcctgctctcagttctacagcttggactcccaaggaggcagtaacaccactggatgaacaagagggcgatggatcagcatatacagtctctgaagatgaattgttgacaggttctgagagggtcccagttttagaaacaactccagttggaaaaattgatcacagtgtgtcttatccaccaggtgctgtaactgagcacaaagtgaaaacagatgaagtggtaacactaacaccacgcattgggccaaaagtatctttaagtccagggcctgaacaaaaatatgaaacagaaggtagtagtacaacaggatttacatcatctttgagtccttttagtacccacattacccagcttatggaagaaaccactactgagaaaacatccctagaggatattgatttaggctcaggattatttgaaaagcccaaagccacagaactcatagaattttcaacaatcaaagtcacagttccaagtgatattaccactgccttcagttcagtagacagacttcacacaacttcagcattcaagccatcttccgcgatcactaagaaaccacctctcatcgacagggaacctggtgaagaaacaaccagtgacatggtaatcattggagaatcaacatctcatgttcctcccactacccttgaagatattgtagccaaggaaacagaaaccgatattgatagagagtatttcacgacttcaagtcctcctgctacacagccaacaagaccacccactgtggaagacaaagaggcctttggacctcaggcgctttctacgccacagcccccagcaagcacaaaatttcaccctgacattaatgtttatattattgaggtcagagaaaataagacaggacctgatcgctgcaaaatgaacccgtgccttaacggaggcacctgttatcctactgaaacttcctacgtatgcacctgtgtgccaggatacagcggagaccagtgtgaacttgattttgatgaatgtcactctaatccctgtcgtaatggagccacttgtgttgatggttttaacacattcaggtgcctctgccttccaagttatgttggtgcactttgtgagcaagataccgagacatgtgactatggctggcacaaattccaagggcagtgctacaaatactttgcccatcgacgcacatgggatgcagctgaacgggaatgccgtctgcagggtgcccatctcacaagcatcctgtctcacgaagaacaaatgtttgttaatcgtgtgggccatgattatcagtggataggcctcaatgacaagatgtttgagcatgacttccgttggactgatggcagcacactgcaatacgagaattggagacccaaccagccagacagcttcttttctgctggagaagactgtgttgtaatcatttggcatgagaatggccagtggaatgatgttccctgcaattaccatctcacctatacgtgcaagaaaggaacagtcgcttgcggccagccccctgttgtagaaaatgccaagacctttggaaagatgaaacctcgttatgaaatcaactccctgattagataccactgcaaagatggtttcattcaacgtcaccttccaactatccggtgcttaggaaatggaagatgggctatacctaaaattacctgcatgaacccatctgcataccaaaggacttattctatgaaatactttaaaaattcctcatcagcaaaggacaattcaataaatacatccaaacatgatcatcgttggagccggaggtggcaggagtcgaggcgctgatccctaaaatggcgaacatgtgttttcatcatttcagccaaagtcctaacttcctgtgcctttcctatcacctcgagaagtaattatcagttggtttggatttttggaccaccgttcagtcattttgggttgccgtgctcccaaaacattttaaatgaaagtattggcattcaaaaagacagcagacaaaatgaaagaaaatgagagcagaaagtaagcatttccagcctatctaatttctttagttttctatttgcctccagtgcagtccatttcctaatgtataccagcctactgtactatttaaaatgctcaatttcagcaccgatggccatgtaaataagatgatttaatgttgattttaatcctgtatataaaataaaaagtcacaatgagtttgggcatatttaatgatgattatggagccttagaggtctttaatcattggttcggctgcttttatgtagtttaggctggaaatggtttcacttgctctttgactgtcagcaagactgaagatggcttttcctggacagctagaaaacacaaaatcttgtaggtcattgcacctatctcagccataggtgcagtttgcttctacatgatgctaaaggctgcgaatgggatcctgatggaactaaggactccaatgtcgaactcttctttgctgcattcctttttcttcacttacaagaaaggcctgaatggaggacttttctgtaaccaggaacattttttaggggtcaaagtgctaataattaactcaaccaggtctactttttaatggctttcataacactaactcataaggttaccgatcaatgcatttcatacggatatagacctagggctctggagggtgggggattgttaaaacacatgcaaaaaaaaaaaaaaaaaaaaaaaaagaaattttgtatatataaccattttaatcttttataaagttttgaatgttcatgtatgaatgctgcagctgtgaagcatacataaataaatgaagtaagccatactgatttaatttattggatgttattttccctaagacctgaaaatgaacatagtatgctagttatttttcagtgttagccttttactttcctcacacaatttggaatcatataatataggtactttgtccctgattaaataatgtgacggatagaatgcatcaagtgtttattatgaaaagagtggaaaagtatatagcttttagcaaaaggtgtttgcccattctaagaaatgagcgaatatatagaaatagtgtgggcatttcttcctgttaggtggagtgtatgtgttgacatttctccccatctcttcccactctgttttctccccattatttgaataaagtgactgctgaagatgactttgaatccttatccacttaatttaatgtttaaagaaaaacctgtaatggaaagtaagactccttccctaatttcagtttagagcaacttgaagaagagtagacaaaaaataaaatgcacatagaaaaagagaaaaagggcacaaagggattggcccaatattgattctttttttataaaacctcctttggcttagaaggaatgactctagctacaataatacacagtatgtttaagcaggttcccttggttgttgcattaaatgtaatccacctttaggtattttagagcacagaacaacactgtgttgatctagtaggtttctatttttcctttctctttacaatgcacataatactttcctgtatttatatcataacgtgtatagtgtaaaatgtgaatgactttttttgtgaatgaaaatctaaaatctttgtaactttttatatctgcttttgtttcaccaaagaaacctaaaatccttcttttactacac

SEQ ID NO: 199006 - DNA, 2087 bp, Homo sapiens
  Payload ID: 19260
  Gene Name: versican
  Uniprot ID: P13611
  ENST ID: ENST00000502527
  CDS Start-End: 106-2073
caccacgcttcctatgtgacccgcctgggcaacgccgaacccagtcgcgcagcgctgcagtgaattttccccccaaactgcaataagccgccttccaaggccaagatgttcataaatataaagagcatcttatggatgtgttcaaccttaatagtaacccatgcgctacataaagtcaaagtgggaaaaagcccaccggtgaggggctccctctctggaaaagtcagcctaccttgtcatttttcaacgatgcctactttgccacccagttacaacaccagtgaatttctccgcatcaaatggtctaagattgaagtggacaaaaatggaaaagatttgaaagagactactgtccttgtggcccaaaatggaaatatcaagattggtcaggactacaaagggagagtgtctgtgcccacacatcccgaggctgtgggcgatgcctccctcactgtggtcaagctgctggcaagtgatgcgggtctttaccgctgtgacgtcatgtacgggattgaagacacacaagacacggtgtcactgactgtggatggggttgtgtttcactacagggcggcaaccagcaggtacacactgaattttgaggctgctcagaaggcttgtttggacgttggggcagtcatagcaactccagagcagctctttgctgcctatgaagatggatttgagcagtgtgacgcaggctggctggctgatcagactgtcagatatcccatccgggctcccagagtaggctgttatggagataagatgggaaaggcaggagtcaggacttatggattccgttctccccaggaaacttacgatgtgtattgttatgtggatcatctggatggtgatgtgttccacctcactgtccccagtaaattcaccttcgaggaggctgcaaaagagtgtgaaaaccaggatgccaggctggcaacagtgggggaactccaggcggcatggaggaacggctttgaccagtgcgattacgggtggctgtcggatgccagcgtgcgccaccctgtgactgtggccagggcccagtgtggaggtggtctacttggggtgagaaccctgtatcgttttgagaaccagacaggcttccctccccctgatagcagatttgatgcctactgctttaaacgacctgatcgctgcaaaatgaacccgtgccttaacggaggcacctgttatcctactgaaacttcctacgtatgcacctgtgtgccaggatacagcggagaccagtgtgaacttgattttgatgaatgtcactctaatccctgtcgtaatggagccacttgtgttgatggttttaacacattcaggtgcctctgccttccaagttatgttggtgcactttgtgagcaagataccgagacatgtgactatggctggcacaaattccaagggcagtgctacaaatactttgcccatcgacgcacatgggatgcagctgaacgggaatgccgtctgcagggtgcccatctcacaagcatcctgtctcacgaagaacaaatgtttgttaatcgtgtgggccatgattatcagtggataggcctcaatgacaagatgtttgagcatgacttccgttggactgatggcagcacactgcaatacgagaattggagacccaaccagccagacagcttcttttctgctggagaagactgtgttgtaatcatttggcatgagaatggccagtggaatgatgttccctgcaattaccatctcacctatacgtgcaagaaaggaacagtcgcttgcggccagccccctgttgtagaaaatgccaagacctttggaaagatgaaacctcgttatgaaatcaactccctgattagataccactgcaaagatggtttcattcaacgtcaccttccaactatccggtgcttaggaaatggaagatgggctatacctaaaattacctgcatgaacccatctgcataccaaaggacttattctatgaaatactttaaaaattcctcatcagcaaaggacaattcaataaatacatccaaacatgatcatcgttggagccggaggtggcaggagtcgaggcgctgatccctaaaatggcg

SEQ ID NO: 199007 - DNA, 5923 bp, Homo sapiens
  Payload ID: 19260
  Gene Name: versican
  ENST ID: ENST00000512590
  CDS Start-End: 411-5195
gctgccccgagcctttctggggaagaactccaggcgtgcggacgcaacagccgagaacattaggtgttgtggacaggagctgggaccaagatcttcggccagccccgcatcctcccgcatcttccagcaccgtcccgcaccctccgcatccttccccgggccaccacgcttcctatgtgacccgcctgggcaacgccgaacccagtcgcgcagcgctgcagtgaattttccccccaaactgcaataagccgccttccaaggccaagatgttcataaatataaagagcatcttatggatgtgttcaaccttaatagtaacccatgcgctacataaagtcaaagtgggaaaaagcccaccggtgaggggctccctctctggaaaagtcagcctaccttgtcatttttcaacgatgcctactttgccacccagttacaacaccagtgaatttctccgcatcaaatggtctaagattgaagtggacaaaaatggaaaagatttgaaagagactactgtccttgtggcccaaaatggaaatatcaagattggtcaggactacaaagggagagtgtctgtgcccacacatcccgaggctgtgggcgatgcctccctcactgtggtcaagctgctggcaagtgatgcgggtctttaccgctgtgacgtcatgtacgggattgaagacacacaagacacggtgtcactgactgtggatggggttgtgtttcactacagggcggcaaccagcaggtacacactgaattttgaggctgctcagaaggcttgtttggacgttggggcagtcatagcaactccagagcagctctttgctgcctatgaagatggatttgagcagtgtgacgcaggctggctggctgatcagactgtcagatatcccatccgggctcccagagtaggctgttatggagataagatgggaaaggcaggagtcaggacttatggattccgttctccccaggaaacttacgatgtgtattgttatgtggatcatctggatggtgatgtgttccacctcactgtccccagtaaattcaccttcgaggaggctgcaaaagagtgtgaaaaccaggatgccaggctggcaacagtgggggaactccaggcggcatggaggaacggctttgaccagtgcgattacgggtggctgtcggatgccagcgtgcgccaccctgtgactgtggccagggcccagtgtggaggtggtctacttggggtgagaaccctgtatcgttttgagaaccagacaggcttccctccccctgatagcagatttgatgcctactgctttaaacctaaagaggctacaaccatcgatttgagtatcctcgcagaaactgcatcacccagtttatccaaagaaccacaaatggtttctgatagaactacaccaatcatccctttagttgatgaattacctgtcattccaacagagttccctcccgtgggaaatattgtcagttttgaacagaaagccacagtccaacctcaggctatcacagatagtttagccaccaaattacccacacctactggcagtaccaagaagccctgggatatggatgactactcaccttctgcttcaggacctcttggaaagctagacatatcagaaattaaggaagaagtgctccagagtacaactggcgtctctcattatgctacggattcatgggatggtgtcgtggaagataaacaaacacaagaatcggttacacagattgaacaaatagaagtgggtcctttggtaacatctatggaaatcttaaagcacattccttccaaggaattccctgtaactgaaacaccattggtaactgcaagaatgatcctggaatccaaaactgaaaagaaaatggtaagcactgtttctgaattggtaaccacaggtcactatggattcaccttgggagaagaggatgatgaagacagaacacttacagttggatctgatgagagcaccttgatctttgaccaaattcctgaagtcattacggtgtcaaagacttcagaagacaccatccacactcatttagaagacttggagtcagtctcagcatccacaactgtttcccctttaattatgcctgataataatggatcatccatggatgactgggaagagagacaaactagtggtaggataacggaagagtttcttggcaaatatctgtctactacaccttttccatcacagcatcgtacagaaatagaattgtttccttattctggtgataaaatattagtagagggaatttccacagttatttatccttctctacaaacagaaatgacacatagaagagaaagaacagaaacactaataccagagatgagaacagatacttatacagatgaaatacaagaagagatcactaaaagtccatttatgggaaaaacagaagaagaagtcttctctgggatgaaactctctacatctctctcagagccaattcatgttacagagtcttctgtggaaatgaccaagtcttttgatttcccaacattgataacaaagttaagtgcagagccaacagaagtaagagatatggaggaagactttacagcaactccaggtactacaaaatatgatgaaaatattacaacagtgcttttggcccatggtactttaagtgttgaagcagccactgtatcaaaatggtcatgggatgaagataatacaacatccaagcctttagagtctacagaaccttcagcctcttcaaaattgccccctgccttactcacaactgtggggatgaatggaaaggataaagacatcccaagtttcactgaagatggagcagatgaatttactcttattccagatagtactcaaaagcagttagaggaggttactgatgaagacatagcagcccatggaaaattcacaattagatttcagccaactacatcaactggtattgcagaaaagtcaactttgagagattctacaactgaagaaaaagttccacctatcacaagcactgaaggccaagtttatgcaaccatggaaggaagtgctttgggtgaagtagaagatgtggacctctctaagccagtatctactgttccccaatttgcacacacttcagaggtggaaggattagcatttgttagttatagtagcacccaagagcctactacttatgtagactcttcccataccattcctctttctgtaattcccaagacagactggggagtgttagtaccttctgttccatcagaagatgaagttctaggtgaaccctctcaagacatacttgtcattgatcagactcgccttgaagcgactatttctccagaaactatgagaacaacaaaaatcacagagggaacaactcaggaagaattcccttggaaagaacagactgcagagaaaccagttcctgctctcagttctacagcttggactcccaaggaggcagtaacaccactggatgaacaagagggcgatggatcagcatatacagtctctgaagatgaattgttgacaggttctgagagggtcccagttttagaaacaactccagttggaaaaattgatcacagtgtgtcttatccaccaggtgctgtaactgagcacaaagtgaaaacagatgaagtggtaacactaacaccacgcattgggccaaaagtatctttaagtccagggcctgaacaaaaatatgaaacagaaggtagtagtacaacaggatttacatcatctttgagtccttttagtacccacattacccagcttatggaagaaaccactactgagaaaacatccctagaggatattgatttaggctcaggattatttgaaaagcccaaagccacagaactcatagaattttcaacaatcaaagtcacagttccaagtgatattaccactgccttcagttcagtagacagacttcacacaacttcagcattcaagccatcttccgcgatcactaagaaaccacctctcatcgacagggaacctggtgaagaaacaaccagtgacatggtaatcattggagaatcaacatctcatgttcctcccactacccttgaagatattgtagccaaggaaacagaaaccgatattgatagagagtatttcacgacttcaagtcctcctgctacacagccaacaagaccacccactgtggaagacaaagaggcctttggacctcaggcgctttctacgccacagcccccagcaagcacaaaatttcaccctgacattaatgtttatattattgaggtcagagaaaataagacaggacctgatcgctgcaaaatgaacccgtgccttaacggaggcacctgttatcctactgaaacttcctacgtatgcacctgtgtgccaggatacagcggagaccagtgtgaacttgattttgatgaatgtcactctaatccctgtcgtaatggagccacttgtgttgatggttttaacacattcaggtgcctctgccttccaagttatgttggtgcactttgtgagcaagataccgagacatgtgactatggctggcacaaattccaagggcagtgctacaaatactttgcccatcgacgcacatgggatgcagctgaacgggaatgccgtctgcagggtgcccatctcacaagcatcctgtctcacgaagaacaaatgtttgttaatcgtgtgggccatgattatcagtggataggcctcaatgacaagatgtttgagcatgacttccgttggactgatggcagcacactgcaatacgagaattggagacccaaccagccagacagcttcttttctgctggagaagactgtgttgtaatcatttggcatgagaatggccagtggaatgatgttccctgcaattaccatctcacctatacgtgcaagaaaggaacagtcgcttgcggccagccccctgttgtagaaaatgccaagacctttggaaagatgaaacctcgttatgaaatcaactccctgattagataccactgcaaagatggtttcattcaacgtcaccttccaactatccggtgcttaggaaatggaagatgggctatacctaaaattacctgcatgaacccatctgcataccaaaggacttattctatgaaatactttaaaaattcctcatcagcaaaggacaattcaataaatacatccaaacatgatcatcgttggagccggaggtggcaggagtcgaggcgctgatccctaaaatggcgaacatgtgttttcatcatttcagccaaagtcctaacttcctgtgcctttcctatcacctcgagaagtaattatcagttggtttggatttttggaccaccgttcagtcattttgggttgccgtgctcccaaaacattttaaatgaaagtattggcattcaaaaagacagcagacaaaatgaaagaaaatgagagcagaaagtaagcatttccagcctatctaatttctttagttttctatttgcctccagtgcagtccatttcctaatgtataccagcctactgtactatttaaaatgctcaatttcagcaccgatggccatgtaaataagatgatttaatgttgattttaatcctgtatataaaataaaaagtcacaatgagtttgggcatatttaatgatgattatggagccttagaggtctttaatcattggttcggctgcttttatgtagtttaggctggaaatggtttcacttgctctttgactgtcagcaagactgaagatggcttttcctggacagctagaaaacacaaaatcttgtaggtcattgcacctatctcagccataggtgcagtttgcttctacatgatgctaaaggctgcgaatgggatcctgatggaactaaggactccaatgtcgaactcttctttgctgcattcctttttcttcacttacaagaaaggcctgaatggaggacttttctgtaaccagg

SEQ ID NO: 199008 - DNA, 3973 bp, Homo sapiens
  Payload ID: 19260
  Gene Name: versican
  ENST ID: ENST00000513960
  CDS Start-End: 254-3973
tttctggggaagaactccaggcgtgcggacgcaacagccgagaacattaggtgttgtggacaggagctgggaccaagatcttcggccagccccgcatcctcccgcatcttccagcaccgtcccgcaccctccgcatccttccccgggccaccacgcttcctatgtgacccgcctgggcaacgccgaacccagtcgcgcagcgctgcagtgaattttccccccaaactgcaataagccgccttccaaggccaagatgttcataaatataaagagcatcttatggatgtgttcaaccttaatagtaacccatgcgctacataaagtcaaagtgggaaaaagcccaccggtgaggggctccctctctggaaaagtcagcctaccttgtcatttttcaacgatgcctactttgccacccagttacaacaccagtgaatttctccgcatcaaatggtctaagattgaagtggacaaaaatggaaaagatttgaaagagactactgtccttgtggcccaaaatggaaatatcaagattggtcaggactacaaagggagagtgtctgtgcccacacatcccgaggctgtgggcgatgcctccctcactgtggtcaagctgctggcaagtgatgcgggtctttaccgctgtgacgtcatgtacgggattgaagacacacaagacacggtgtcactgactgtggatggggttgtgtttcactacagggcggcaaccagcaggtacacactgaattttgaggctgctcagaaggcttgtttggacgttggggcagtcatagcaactccagagcagctctttgctgcctatgaagatggatttgagcagtgtgacgcaggctggctggctgatcagactgtcagatatcccatccgggctcccagagtaggctgttatggagataagatgggaaaggcaggagtcaggacttatggattccgttctccccaggaaacttacgatgtgtattgttatgtggatcatctggatggtgatgtgttccacctcactgtccccagtaaattcaccttcgaggaggctgcaaaagagtgtgaaaaccaggatgccaggctggcaacagtgggggaactccaggcggcatggaggaacggctttgaccagtgcgattacgggtggctgtcggatgccagcgtgcgccaccctgtgactgtggccagggcccagtgtggaggtggtctacttggggtgagaaccctgtatcgttttgagaaccagacaggcttccctccccctgatagcagatttgatgcctactgctttaaacgtcgaatgagtgatttgagtgtaattggtcatccaatagattcagaatctaaagaagatgaaccttgtagtgaagaaacagatccagtgcatgatctaatggctgaaattttacctgaattccctgacataattgaaatagacctataccacagtgaagaaaatgaagaagaagaagaagagtgtgcaaatgctactgatgtgacaaccaccccatctgtgcagtacataaatgggaagcatctcgttaccactgtgcccaaggacccagaagctgcagaagctaggcgtggccagtttgaaagtgttgcaccttctcagaatttctcggacagctctgaaagtgatactcatccatttgtaatagccaaaacggaattgtctactgctgtgcaacctaatgaatctacagaaacaactgagtctcttgaagttacatggaagcctgagacttaccctgaaacatcagaacatttttcaggtggtgagcctgatgttttccccacagtcccattccatgaggaatttgaaagtggaacagccaaaaaaggggcagaatcagtcacagagagagatactgaagttggtcatcaggcacatgaacatactgaacctgtatctctgtttcctgaagagtcttcaggagagattgccattgaccaagaatctcagaaaatagcctttgcaagggctacagaagtaacatttggtgaagaggtagaaaaaagtacttctgtcacatacactcccactatagttccaagttctgcatcagcatatgtttcagaggaagaagcagttaccctaataggaaatccttggccagatgacctgttgtctaccaaagaaagctgggtagaagcaactcctagacaagttgtagagctctcagggagttcttcgattccaattacagaaggctctggagaagcagaagaagatgaagatacaatgttcaccatggtaactgatttatcacagagaaatactactgatacactcattactttagacactagcaggataatcacagaaagcttttttgaggttcctgcaaccaccatttatccagtttctgaacaaccttctgcaaaagtggtgcctaccaagtttgtaagtgaaacagacacttctgagtggatttccagtaccactgttgaggaaaagaaaaggaaggaggaggagggaactacaggtacggcttctacatttgaggtatattcatctacacagagatcggatcaattaattttaccctttgaattagaaagtccaaatgtagctacatctagtgattcaggtaccaggaaaagttttatgtccttgacaacaccaacacagtctgaaagggaaatgacagattctactcctgtctttacagaaacaaatacattagaaaatttgggggcacagaccactgagcacagcagtatccatcaacctggggttcaggaagggctgaccactctcccacgtagtcctgcctctgtctttatggagcagggctctggagaagctgctgccgacccagaaaccaccactgtttcttcattttcattaaacgtagagtatgcaattcaagccgaaaaggaagtagctggcactttgtctccgcatgtggaaactacattctccactgagccaacaggactggttttgagtacagtaatggacagagtagttgctgaaaatataacccaaacatccagggaaatagtgatttcagagcgattaggagaaccaaattatggggcagaaataaggggcttttccacaggttttcctttggaggaagatttcagtggtgactttagagaatactcaacagtgtctcatcccatagcaaaagaagaaacggtaatgatggaaggctctggagatgcagcatttagggacacccagacttcaccatctacagtacctacttcagttcacatcagtcacatatctgactcagaaggacccagtagcaccatggtcagcacttcagccttcccctgggaagagtttacatcctcagctgagggctcaggtgagcaactggtcacagtcagcagctctgttgttccagtgcttcccagtgctgtgcaaaagttttctggtacagcttcctccattatcgacgaaggattgggagaagtgggtactgtcaatgaaattgatagaagatccaccattttaccaacagcagaagtggaaggtacgaaagctccagtagagaaggaggaagtaaaggtcagtggcacagtttcaacaaactttccccaaactatagagccagccaaattatggtctaggcaagaagtcaaccctgtaagacaagaaattgaaagtgaaacaacatcagaggaacaaattcaagaagaaaagtcatttgaatcccctcaaaactctcctgcaacagaacaaacaatctttgattcacagacatttactgaaactgaactcaaaaccacagattattctgtactaacaacaaagaaaacttacagtgatgataaagaaatgaaggaggaagacacttctttagttaacatgtctactccagatccagatgcaaatggcttggaatcttacacaactctccctgaagctactgaaaagtcacattttttcttagctactgcattagtaactgaatctataccagctgaacatgtagtcacagattcaccaatc

SEQ ID NO: 199009 - DNA, 1825 bp, Homo sapiens
  Payload ID: 19260
  Gene Name: versican
  ENST ID: ENST00000513984
  CDS Start-End: 240-1304
ctccaggcgtgcggacgcaacagccgagaacattaggtgttgtggacaggagctgggaccaagatcttcggccagccccgcatcctcccgcatcttccagcaccgtcccgcaccctccgcatccttccccgggccaccacgcttcctatgtgacccgcctgggcaacgccgaacccagtcgcgcagcgctgcagtgaattttccccccaaactgcaataagccgccttccaaggccaagatgttcataaatataaagagcatcttatggatgtgttcaaccttaatagtaacccatgcgctacataaagtcaaagtgggaaaaagcccaccggtgaggggctccctctctggaaaagtcagcctaccttgtcatttttcaacgatgcctactttgccacccagttacaacaccagtgaatttctccgcatcaaatggtctaagattgaagtggacaaaaatggaaaagatttgaaagagactactgtccttgtggcccaaaatggaaatatcaagattggtcaggactacaaagggagagtgtctgtgcccacacatcccgaggctgtgggcgatgcctccctcactgtggtcaagctgctggcaagtgatgcgggtctttaccgctgtgacgtcatgtacgggattgaagacacacaagacacggtgtcactgactgtggatggggttgtgtttcactacagggcggcaaccagcaggtacacactgaattttgaggctgctcagaaggcttgtttggacgttggggcagtcatagcaactccagagcagctctttgctgcctatgaagatggatttgagcagtgtgacgcaggctggctggctgatcagactgtcagatatcccatccgggctcccagagtaggctgttatggagataagatgggaaaggcaggagtcaggacttatggattccgttctccccaggaaacttacgatgtgtattgttatgtggatcatctggatggtgatgtgttccacctcactgtccccagtaaattcaccttcgaggaggctgcaaaagagtgtgaaaaccaggatgccaggctggcaacagtgggggaactccaggcggcatggaggaacggctttgaccagtgcgattacgggtggctgtcggatgccagcgtgcgccaccctgtgactgtggccagggcccagtgtggaggtggtctacttggggtgagaaccctgtatcgttttgagaaccagacaggcttccctccccctgatagcagatttgatgcctactgctttaaacgtaagtgtttgatacctttttaaaaattacagttttaaaaaaaatgcttcgaagcatgcattgatgttcaactagccgttggagtggattccatgtcttgcagtgtgtgcacggaatggaaacagttcagtgattttcaaaagcaagcaaactgaacagcagtgatatggttaaaaccacaggaattttggcaaatggatttttagaggggtgaggaaatatcaggttaagctgtaactgtgctctgttgtgtccagagccacagagcatttttctaagtattttatattaattgcagtccttaagttttgcaatttgtttattggtgttacaatgccaaggccaactgaggctgagttaaatccttaagattgttgattttgtcttcggtatcactctgtttctttgagatggcaaagaatttaaatttcagtaattacaggtgagtatttgaagctgacatggatactcaaaatgttcaagtcataactaaaaatgaaccatactatcaataaaaatctccatttatgtcaagtaatggaaa

SEQ ID NO: 199010 - DNA, 3466 bp, Homo sapiens
  Payload ID: 19261
  Gene Name: vertebrae development associated
  Uniprot ID: Q9H8Y1
  ENST ID: ENST00000256362
  CDS Start-End: 242-2350
gcacttgagggtgggcgatttcctggggggagtggcttaagccgcttccccaccggccagttggctgtagacggtccatgctcaatggtcctctacagatatgaaactggttctggagtgagacgagctcggctggggacgctacttgagaaggcctttccccacagggtgacttaaatgtcccaggctggaaggtggagcgagaagtggatgcccccagggctctgggtcacactccaggatgacttctcggaaccagctggtgcagaaggtgctgcaggagctgcaggaagcagtggagtgcgaaggcctggagggtctcataggtgcttccttggaggccaagcaggtcctgtcttccttcactctccccacctgccgggagggaggccctggcctccaggtgctggaagtggactcggtggccctgagcctgtatccagaagatgctccacggaacatgctgccgctggtgtgcaagggggagggcagcctgctgttcgaggcggccagcatgctgctgtggggtgacgcaggcctcagcctggagctgcgggcccgcaccgtggtagagatgctgctgcacagacactactacctccagggcatgatcgactccaaagtgatgctgcaggccgtgcgctactccctatgctctgaggagtcccctgagatgaccagcttgccccccgccacgctggaggccatcttcgatgccgacgtcaaggcctcctgtttccccagcagcttctccaacgtgtggcacttgtatgctctcgcctctgtcctccagcggaacatctactccatctaccccatgcgcaacctcaagatccggccctacttcaaccgtgtcatccggccccgccgctgcgaccacgtgccctccacgctgcacatcatgtgggctggccagcccctcaccagccacttcttccgccaccagtactttgcccctgtggtggggctggaagaggtggaggctgaaggtgcccctggcgtggccccagctcttccagccctggccccactctcatcgccggccaagaccctggagctgctcaaccgtgaacctggcctcagctactctcacctctgtgagcgctacagcgtcaccaaaagcaccttctaccgctggcggcggcagtcccaggagcaccggcagaaggttgctgcccgcttctccgccaagcacttcctgcaggacagcttccaccgggggggcgtcgtgccacttcagcagttcctccagcggttcccggagatctcccgctcaacctactatgcctggaagcatgagctgctgggctctggcacctgcccggccttgccccccagggaggtgctgggcatggaggagctagagaagctgccggaggagcaggtggctgaggaggagctggagtgctccgcactggcggtgtcaagccctggaatggtcttaatgcagcgggccaagttgtacctggagcattgcatctccctgaacacactggtaccctatcgctgcttcaaacgcaggttccctggcatctcacggtccacttattataattggcggcgaaaggccctccggaggaaccccagcttcaagccggcaccagccctctctgctgctgggactccccagctagcatctgttggggaaggggctgtaattccttggaagagtgaggcggaagagggggcagggaatgccacaggtgaggaccctcccgcccccggggagctcctgccactaaggatgcccctgtcccgttggcagaggcgtctgcgcagggctgcccgcaggcaggtgctgagtgggcatctccctttctgccgcttccgcctccgctaccccagcctgtcaccttctgccttttgggtctggaagagtcttgctcggggttggcccagaggcctgtccaaacttcaggtgccggtccccaccttgggcaaaggggggcaggaggctgaggagaagcaggagaaggaggctggcagggatgtgacagctgtgatggccccacctgtgggggcttcttcagaagatgtagagggagggccttccagagagggggccctgcaggagggggccacagcccagggccagccccacagtgggcccttgctgagccaacctgtggtggcagcagcgggtggcagggatggccggatgctggtgatggacatgatcgctaccacgaagttcaaggcccaggccaagctgttcttgcagaagcgcttccagtccaagagctttccctcctacaaggagttcagtgccctctttcccctcactgcccgctccacatactacatgtggaagcgagccctctatgacggcctgaccctggtagatggctgacagggaggtacaaaaggggctgggaagaagggggaccagtttggagagggtcagggacctgagctgaccccaggcttggccaggatgtcctttgctctgggtcccacagtgtctaccctaagtccaagggtatatttgtgttattttctggctccaggacagagaatgccagaaatcagccatctggtctcccgtaggaaactgtgggaccagagatatcctctttcgttgtttgctggtcatatttttactgttatgatttagtttttggttttgatttgagtgggttggttggcccccttgctggagttggaagccgtatgtatgtcagggggtttagaggggggttggttagctagagctgctttcagcttttcctggagacaaaaggagtgttatagcatgatcatcggtcccactgggcagaacgttatcttcagtttcttttgggggttggcatcctctttactcagttgtttcccaaaggaacattaggctcgaatatgggggccaggtgtggtggcttatgcctgtaatcctagcgctttgggaggccaaggcaggaggatcacttgaggctaggagttagagaccaccctgggcaatgtagtgagacctcatctcttagaaaaaaaaaaagaaagaaaatcaaatgtagagctgatcagcagcttgtgcctggcatccccaagggagaaggtgccaggtcagcaggagcagcagcagggatgtatagaaagaaccacagctggcctctaaaggatggcactgaggcaccggagatcttgaggcactggagatcactgaggggctggcctgtcccctgcaaggagtgtgggaccaggtggggcaaggctgggagatgcaggctctgtttgcagattatggcccagagtctctgcttgtgggtgcttgatccacctgctgggaccctgcagtcctcggccagcctggctgtcagttggggattccacctttctgctgagcgtcttctcggagctggaggcccatcttcagtgagagatcacaaagcggccaggcaggtgggagactgaatttgccttgttcgagagtaacgtttgaaaaccaaagaaataaagtgatgcagtgcccaca

SEQ ID NO: 199011 - DNA, 521 bp, Homo sapiens
  Payload ID: 19261
  Gene Name: vertebrae development associated
  ENST ID: ENST00000557177
  CDS Start-End: 272-521
aaaagtaccagagagtggactcggctgacccggcggctacagcgcccccatattttctgggagacttcccttttgacaataggtatccgagagtgtaactactttatggtacgtttcctgaggacagctgctctgtgaagcccactgccccaaaggcacctatcaaagaccctgcaaacaagcagatggcaatccaggttgccaatgacattgcccatcccaggtacctgggctgcctgcttttccctgaagtgggagcctggcttgcaggatgacttctcggaaccagctggtgcagaaggtgctgcaggagctgcaggaagcagtggagtgcgaaggcctggagggtctcataggtgcttccttggaggccaagcaggtcctgtcttccttcactctccccacctgccgggagggaggccctggcctccaggtgctggaagtggactcggtggccctgagcctgtatccagaagatgctccacggaacatgctgccgctggtgtgcaagggggagggca

SEQ ID NO: 199012 - DNA, 736 bp, Homo sapiens
  Payload ID: 19262
  Gene Name: very low density lipoprotein receptor
  ENST ID: ENST00000382096
  CDS Start-End: 216-736
ggtggctgggtgggtggggaggagactgtgcaagttgtaggggagggggtgccctcttcttccccgctcccttcccccgccaactccttcccctccttctccccctttcccctccccgcccccaccttcttcctcctttcggaaggactggtaacttgtcgtgcggagcgaacggcggcggcggcggcggcggcggcaccatccaggcgggcaccatgggcacgtccgcgctctgggcgctctggctgctgctcgcgctgtgctgggcgccccgggagagcggcgccaccggaaccgggagaaaagccaaatgtgaaccctcccaattccagtgcacaaatggtcgctgtattacgctgttgtggaaatgtgatggggatgaagactgtgttgacggcagtgatgaaaagaactgtgtaaagaagacgtgtgctgaatctgacttcgtgtgcaacaatggccagtgtgttcccagccgatggaagtgtgatggagatcctgactgcgaagatggttcagatgaaagcccagaacagtgccgcaatataacatgtagtcccgacgagttcacctgctccagtggccgctgcatctccaggaactttgtatgcaatggccaggatgactgcagcgatggcagtgatgagctggactgtgccccgccaacctgtggcgcccatgagttccagtgcagcacctcctcctgcatccccatcagctgggtatgcgacgatga

SEQ ID NO: 199013 - DNA, 3240 bp, Homo sapiens
  Payload ID: 19262
  Gene Name: very low density lipoprotein receptor
  Uniprot ID: P98155
  ENST ID: ENST00000382099
  CDS Start-End: 91-2628
cttcttcctcctttcggaaggactggtaacttgtcgtgcggagcgaacggcggcggcggcggcggcggcggcaccatccaggcgggcaccatgggcacgtccgcgctctgggcgctctggctgctgctcgcgctgtgctgggcgccccgggagagcggcgccaccggaaccgggagaaaagccaaatgtgaaccctcccaattccagtgcacaaatggtcgctgtattacgctgttgtggaaatgtgatggggatgaagactgtgttgacggcagtgatgaaaagaactgtgtaaagaagacgtgtgctgaatctgacttcgtgtgcaacaatggccagtgtgttcccagccgatggaagtgtgatggagatcctgactgcgaagatggttcagatgaaagcccagaacagtgccatatgagaacatgccgcatacatgaaatcagctgtggcgcccattctactcagtgtatcccagtgtcctggagatgtgatggtgaaaatgattgtgacagtggagaagatgaagaaaactgtggcaatataacatgtagtcccgacgagttcacctgctccagtggccgctgcatctccaggaactttgtatgcaatggccaggatgactgcagcgatggcagtgatgagctggactgtgccccgccaacctgtggcgcccatgagttccagtgcagcacctcctcctgcatccccatcagctgggtatgcgacgatgatgcagactgctccgaccaatctgatgagtccctggagcagtgtggccgtcagccagtcatacacaccaagtgtccagccagcgaaatccagtgcggctctggcgagtgcatccataagaagtggcgatgtgatggggaccctgactgcaaggatggcagtgatgaggtcaactgtccctctcgaacttgccgacctgaccaatttgaatgtgaggatggcagctgcatccatggcagcaggcagtgtaatggtatccgagactgtgtcgatggttccgatgaagtcaactgcaaaaatgtcaatcagtgcttgggccctggaaaattcaagtgcagaagtggagaatgcatagatatcagcaaagtatgtaaccaggagcaggactgcagggactggagtgatgagcccctgaaagagtgtcatataaacgaatgcttggtaaataatggtggatgttctcatatctgcaaagacctagttataggctacgagtgtgactgtgcagctgggtttgaactgatagataggaaaacctgtggagatattgatgaatgccaaaatccaggaatctgcagtcaaatttgtatcaacttaaaaggcggttacaagtgtgaatgtagtcgtggctatcaaatggatcttgctactggcgtgtgcaaggcagtaggcaaagagccaagtctgatcttcactaatcgaagagacatcaggaagattggcttagagaggaaagaatatatccaactagttgaacagctaagaaacactgtggctctcgatgctgacattgctgcccagaaactattctgggccgatctaagccaaaaggctatcttcagtgcctcaattgatgacaaggttggtagacatgttaaaatgatcgacaatgtctataatcctgcagccattgctgttgattgggtgtacaagaccatctactggactgatgcggcttctaagactatttcagtagctaccctagatggaaccaagaggaagttcctgtttaactctgacttgcgagagcctgcctccatagctgtggacccactgtctggctttgtttactggtcagactggggtgaaccagctaaaatagaaaaagcaggaatgaatggattcgatagacgtccactggtgacagcggatatccagtggcctaacggaattacacttgaccttataaaaagtcgcctctattggcttgattctaagttgcacatgttatccagcgtggacttgaatggccaagatcgtaggatagtactaaagtctctggagttcctagctcatcctcttgcactaacaatatttgaggatcgtgtctactggatagatggggaaaatgaagcagtctatggtgccaataaattcactggatcagagctagccactctagtcaacaacctgaatgatgcccaagacatcattgtctatcatgaacttgtacagccatcaggtaaaaattggtgtgaagaagacatggagaatggaggatgtgaatacctatgcctgccagcaccacagattaatgatcactctccaaaatatacctgttcctgtcccagtgggtacaatgtagaggaaaatggccgagactgtcaaaggatcaatgtgaccacagcagtatcagaggtcagtgttcccccaaaagggacttctgccgcatgggccattcttcctctcttgctcttagtgatggcagcagtaggtggctacttgatgtggcggaattggcaacacaagaacatgaaaagcatgaactttgacaatcctgtgtacttgaaaaccactgaagaggacctctccatagacattggtagacacagtgcttctgttggacacacgtacccagcaatatcagttgtaagcacagatgatgatctagcttgacttctgtgacaaatgttgacctttgaggtctaaacaaataatacccccgtcggaatggtaaccgagccagcagctgaagtctctttttcttcctctcggctggaagaacatcaagatacctttgcgtggatcaagcttgtgtacttgaccgtttttatattacttttgtaaatattcttgtccacattctacttcagctttggatgtggttaccgagtatctgtaacccttgaatttctagacagtattgccacctctggccaaatatgcactttccctagaaagccatattccagcagtgaaacttgtgctatagtgtataccacctgtacatacattgtataggccatctgtaaatatcccagagaacaatcactattcttaagcactttgaaaatatttctatgtaaattattgtaaactttttcaatggttgggacaatggcaataggacaaaacgggttactaagatgaaattgccaaaaaaatttataaactaattttgtacgtatgaatgatatctttgacctcaatggaggtttgcaaagactgagtgttcaaactactgtacattttttttcaagtgctaaaaaattaaaccaagcagcttaa

SEQ ID NO: 199014 - DNA, 9163 bp, Homo sapiens
  Payload ID: 19262
  Gene Name: very low density lipoprotein receptor
  Uniprot ID: P98155
  ENST ID: ENST00000382100
  CDS Start-End: 357-2978
ctctccgttctgtgctctcttctgctctcggctccccaccccctctcccttccctcctctccccttgcctcccctcctctgcagcgcctgcattattttctgcccgcaggctcggcttgcactgctgctgcagcccggggaggtggctgggtgggtggggaggagactgtgcaagttgtaggggagggggtgccctcttcttccccgctcccttcccccgccaactccttcccctccttctccccctttcccctccccgcccccaccttcttcctcctttcggaaggactggtaacttgtcgtgcggagcgaacggcggcggcggcggcggcggcggcaccatccaggcgggcaccatgggcacgtccgcgctctgggcgctctggctgctgctcgcgctgtgctgggcgccccgggagagcggcgccaccggaaccgggagaaaagccaaatgtgaaccctcccaattccagtgcacaaatggtcgctgtattacgctgttgtggaaatgtgatggggatgaagactgtgttgacggcagtgatgaaaagaactgtgtaaagaagacgtgtgctgaatctgacttcgtgtgcaacaatggccagtgtgttcccagccgatggaagtgtgatggagatcctgactgcgaagatggttcagatgaaagcccagaacagtgccatatgagaacatgccgcatacatgaaatcagctgtggcgcccattctactcagtgtatcccagtgtcctggagatgtgatggtgaaaatgattgtgacagtggagaagatgaagaaaactgtggcaatataacatgtagtcccgacgagttcacctgctccagtggccgctgcatctccaggaactttgtatgcaatggccaggatgactgcagcgatggcagtgatgagctggactgtgccccgccaacctgtggcgcccatgagttccagtgcagcacctcctcctgcatccccatcagctgggtatgcgacgatgatgcagactgctccgaccaatctgatgagtccctggagcagtgtggccgtcagccagtcatacacaccaagtgtccagccagcgaaatccagtgcggctctggcgagtgcatccataagaagtggcgatgtgatggggaccctgactgcaaggatggcagtgatgaggtcaactgtccctctcgaacttgccgacctgaccaatttgaatgtgaggatggcagctgcatccatggcagcaggcagtgtaatggtatccgagactgtgtcgatggttccgatgaagtcaactgcaaaaatgtcaatcagtgcttgggccctggaaaattcaagtgcagaagtggagaatgcatagatatcagcaaagtatgtaaccaggagcaggactgcagggactggagtgatgagcccctgaaagagtgtcatataaacgaatgcttggtaaataatggtggatgttctcatatctgcaaagacctagttataggctacgagtgtgactgtgcagctgggtttgaactgatagataggaaaacctgtggagatattgatgaatgccaaaatccaggaatctgcagtcaaatttgtatcaacttaaaaggcggttacaagtgtgaatgtagtcgtggctatcaaatggatcttgctactggcgtgtgcaaggcagtaggcaaagagccaagtctgatcttcactaatcgaagagacatcaggaagattggcttagagaggaaagaatatatccaactagttgaacagctaagaaacactgtggctctcgatgctgacattgctgcccagaaactattctgggccgatctaagccaaaaggctatcttcagtgcctcaattgatgacaaggttggtagacatgttaaaatgatcgacaatgtctataatcctgcagccattgctgttgattgggtgtacaagaccatctactggactgatgcggcttctaagactatttcagtagctaccctagatggaaccaagaggaagttcctgtttaactctgacttgcgagagcctgcctccatagctgtggacccactgtctggctttgtttactggtcagactggggtgaaccagctaaaatagaaaaagcaggaatgaatggattcgatagacgtccactggtgacagcggatatccagtggcctaacggaattacacttgaccttataaaaagtcgcctctattggcttgattctaagttgcacatgttatccagcgtggacttgaatggccaagatcgtaggatagtactaaagtctctggagttcctagctcatcctcttgcactaacaatatttgaggatcgtgtctactggatagatggggaaaatgaagcagtctatggtgccaataaattcactggatcagagctagccactctagtcaacaacctgaatgatgcccaagacatcattgtctatcatgaacttgtacagccatcaggtaaaaattggtgtgaagaagacatggagaatggaggatgtgaatacctatgcctgccagcaccacagattaatgatcactctccaaaatatacctgttcctgtcccagtgggtacaatgtagaggaaaatggccgagactgtcaaagtactgcaactactgtgacttacagtgagacaaaagatacgaacacaacagaaatttcagcaactagtggactagttcctggagggatcaatgtgaccacagcagtatcagaggtcagtgttcccccaaaagggacttctgccgcatgggccattcttcctctcttgctcttagtgatggcagcagtaggtggctacttgatgtggcggaattggcaacacaagaacatgaaaagcatgaactttgacaatcctgtgtacttgaaaaccactgaagaggacctctccatagacattggtagacacagtgcttctgttggacacacgtacccagcaatatcagttgtaagcacagatgatgatctagcttgacttctgtgacaaatgttgacctttgaggtctaaacaaataatacccccgtcggaatggtaaccgagccagcagctgaagtctctttttcttcctctcggctggaagaacatcaagatacctttgcgtggatcaagcttgtgtacttgaccgtttttatattacttttgtaaatattcttgtccacattctacttcagctttggatgtggttaccgagtatctgtaacccttgaatttctagacagtattgccacctctggccaaatatgcactttccctagaaagccatattccagcagtgaaacttgtgctatagtgtataccacctgtacatacattgtataggccatctgtaaatatcccagagaacaatcactattcttaagcactttgaaaatatttctatgtaaattattgtaaactttttcaatggttgggacaatggcaataggacaaaacgggttactaagatgaaattgccaaaaaaatttataaactaattttgtacgtatgaatgatatctttgacctcaatggaggtttgcaaagactgagtgttcaaactactgtacattttttttcaagtgctaaaaaattaaaccaagcagcttaaccatggtttgtgcctgttcctctaggatgaactcctatcctgagtagtaccaagtgttctaactaaatgtgtgagctgtagttcttgatgttgtataactaagcctgtaattgggctggtttctcttacaccctagcacagttaaaaaatgaagtactgtttaacatttgctcccgaaatatttcttactgtgtaaaagaagctagcttagtctgtacctagaattcctcttggttagaggagtgagtttcttttttttccattaacttgtttcctgatcgagaaacacgtgctaagatttctatgaattctgcttctttatagttaagtctctgttttccatgttctgtcatttatataggtcaaggacaagtgccttctaaggcatggataagggctttcttcttatgaaagtctagactgtcttactgtgaagatggccagggaggatagcaagcaatggcattcttgaacagtctaaggcaggtttctcagtgtggtcctgagaacagaagcatctgcatcacctgggaatgtattagaaatgcaagttcccagccccatcccagacctactgaatcagaaactctgggggcgagggctgaaacctgctttcataagcccttcaggcgatactgatgtaaactaaagcttaaaaaccaccgttttactgtgacttcatgaagaatataattgcaatatcacctaaatttttatcctggctgggatggggcagattcttactatggacaatttctggaacttacagtatgaagagcagatgaggagtttgagacaaagaaaaaattgtacagggagtttagtgaattttccatcaggttggccattactttctttctctaaagtctcaggatgtctggaagcaaggaaagacaaaagacttgaagcaccgggtgcatgctgtgtgtcacaagtgaggtggagagttggctgtggaaggtacagcaattcctctggaattaaatgaccgaccaacacagtaccaagaggatgaagagaagatgttttgcgttgctacgtgaatcagtggatgactcatatttcacttgcatatgaaatataaggcagttaacatcttgtttgtggcttaagcaaggacattaatcctactagatgaaggggaagttggttctgttgtcttaagggatgcccccttgtgattttggtcaactgaatgaaaaagaaaagatagccttggacttttttttcatgggaggtttggaggtcaagcatgtagaaggaaaaggctgtagtcatgaatatagaactgtctgctctccaccttttcctcactctacatttagtcatcacactgaacaggatgtggcctgctgacagtgagtagctgaagtgcctgtttggtaagtaggttagcattcatcatgaactctgaaagccatttcagagtttggctgctgctctgaccctgctgtggtacaaaaaacatggatttttttttttttaactggagtaataccaaattccctttagaagcttgaagtttgatactattgctttccccattataaggattatacagtattaattaattataaggcccaaagtttgttttggcaaataaagtattattctctatcatcatcttttgaattcctgtccctagtatgttctttcatgttctgggtaaaatttccaaccctcaaagagtctaaaacgtctcatttttttttaccacgtcctccccagtaagaagccaaggtacaactcattgtacctacgaggtacaaactcatttgtagaaacaaagtaactagatattcctattgaaataagaatagatatattggtgggccaggcatggtggctcacgcctataatcccagcactttggaaggccaaggcaggaggatcacttgaggccaggagttcgagaccagcctgagcaacatggtgagaccctgtctctacaaaaaaaaaatttataaaaataaaagaaaaaaatagttatatgactaaactactagtcaatacagcttgcaataatagtgcatgaatgataacaggcctcggctttatcacccaaaaaataacttgaattctatgtgaaatgtgttaggataagtttgctctgtctctagagttcaatgtagaagataattaagaggtaaaatatgaagcttatcatacactaaaggagaatatttggagttagatgagcctgtcacacaaagtgaaagtggaccctccagaaattttaggaattgccacaaagattgatgatagatgaataaacagatttgtggcctctggtaaagaaatccagccaagttcctctgtccaaatttttaagtgccctttgcaagctaatctatttggcaaaaaaatagtcccagttgttcaactagctcccttaaaacattctagtaggtgttttaaagcctaggtatcgctgcctctttagttcttgatgaatacaaggcaaaaaaaaaaaaaaaaaaaaaaaaaaaattgaggctttcactttggcatttgcttctgttccttgtatctgtggaagtcaagtagcccttctcaaaaatgagaagccaagctttaaatagcaaactacagggtattaaaagactaactcttcagttaagaacactgtagaaatggtagaccaacttaaagtctaccttttaacaatctttaccccaaacctaaagattctaggggtcacttatctctattacgtaatctaactggaataatttcctagaattcttactagtgaaatcttacccaagtaaaacaatttattattttgaatccaaatgaaagctatactgtttgctttcaatggtggcaaaaacttgcaaaaagcagatatacttttgctaatttaagttgaagtactatgaatacaacctgctaatcttgatccccaaatctgagcccttcagtttcataattgttttatcctgaacgtagttgtgacatagacatttctcaaaagggtctgatacatcaaactcctaacaagtaggagcagcaactagctaaagagtagaaagaagcttcccttattgtgggtgatgaggcggtgcctaaaaaccacatatatataatcccctgggtattacatattctgcaagccctgttagtggggagatggtagtggcaatagcagcgatagttgcgtcagtgctaactgctgctgctgcccgttctgttggcggctgctggccaagtgtgcacacttagccctggttgaggtgcattgtctgctgtcgtctgttaagcatctaaccggagtgggagggcacatcaagcgatttcactctcttaaagaaaaggtttttaggtatttttggtattatatagtctctaaggccagaaggggcttataatgacttctcttctagaattgtaatactaaaaaactactcgagtaaatatcctaacaagtatgatttttcttgggaaaactaaaaattgtacatccatgcttcagccatatcatgggcctaaactatgagagttcagaaatatataaaagtacaaaaatcttcaaaggtacttatttccaaatatggagggaatgaatctgaagagggaacaatggcgtttttcgaacttatttctctctaatccagcctggaggatttttagccgaaacagttgcatgtgaaggattatcagccatctttgcatatccctttcacatctaccttcacacaggaaagctgaatgcattttaccagtgaggctctagatatgaaacttagggatccatagataaataagctactaacaaactgataacagtggtgttccatctctctatcatgtctcctgagtccgtttcacgtttttgagcctggctaatgagaaaaagaacaaagtaggaccatgacccagtgttctcctgtaaatctcactgtaaaaatctcaatgcaaaaacactgagacaggagtgagaccagctgcgggtggggagtttgtgctccgcaggttacctcatggcatatcaaaaatggcttttttcttcactgcgctcaaggaaaaagtcagatgggtgacaaggtggttctgtttagaagcagcaggcaatgtagttaacagcatagacttccgtgtcttgtgtgtggtaccttgggcaagttactaactccctctgtaaagtagagacgatggggactgtctcactgtgacaaggtaagatttaagtgagatgcacacaaaaagctcagcacagtgtctggcatctaatatgtgcagggcagatgtcactactgaatatcacatcaatgctagggctgtatttactgtcacacacaggcaccggtaagtgactttaccggtgaaagtcacaggtacctttatctatgatgaatgtaatgtgttagatggtgaccgaagtgttctccactacacctgtctgaagagatctaagtctgatatttaaggagtgatagcatcttgcatacttaagaaggcttaaaagactgcatggtttaaaccctagaaacataaatggaatgtttctgcctcagttcttttgactacctcctaggacatggaaacaaatatttgggagcctgcatagtctttagatggctgccaaagcacttaaaatctcctttaaattcttaccatatgcttacttttgtactaagtaagtgctcccaagtcttttacttgctcttcacagcaaccctaataggtatctccattttacataggtaaaaactgaggctacaaacaatctatggttccaaatcctatgtgcttactgccgtcttctcttagaaggggatgcagtactgtacaaagattgagctggatgtcgcattgcatgtttgctgagtcctcctcattgctgatgttaggatccttcaacagtttctcagatgccagctatggctggcatccagtatggtggtgtaatggaagtgtactactagcactactacatcaggtcagcacagattaactcagttacgtgttataccttcaagacgctagacattccagaattattttccttggccatccaagtgaagtagaagtagattgttggattgcaaagaaaatgataaagattccctaaaggaatttataagcaggcaacttcattcctatgtataagatattgggagaaaacaaactgtaccacaacaaatcttaagtttcaaggctctcctatagggagaaacatggccaaaaagacaggaagaactgtggcttgtaactcaatgatgctataactccagcactggatcttaagtattctggaatataccagattggtagaactaccagacttgggtatttctcagttaacacacatgcaaggaggaagagagtttttttgaacaaaatgactggctttgacaaaactatcttgctctttttaaatgtcacttgatactagaatgcgatttaaaagcatgtaatgcctcaggagtccggcatatacaaccaaattatcatgctcaggatcttcagaattctaaaggcacatgttagaatgcagagtcctgatgacctgtcaataaacttttttttactaatgaactgtacatttaaataaaagtttatttttggga

SEQ ID NO: 199015 - DNA, 1284 bp, Homo sapiens
  Payload ID: 19263
  Gene Name: vesicle (multivesicular body) trafficking 1
  ENST ID: ENST00000367621
  CDS Start-End: 111-860
gcgagtaggaagtggtgagttcggagtagagatggccgcgcttgcaccgctgcccccgctccccgcacagttcaagagcatacagcatcatctgaggacggctcaggagcatgacaagcgagaccctgtggtggcttattactctaaagaagcagttgggtgataatgaagctattactcaagaaatagtgggctgtgcccatttggagaattatgctttgaaaatgtttttgtatgcagacaatgaagatcgtgctggacgatttcacaaaaacatgatcaagtccttctatactgcaagtcttttgatagatgtcataacagtatttggagaactcactgatgaaaatgtgaaacacaggaagtatgccagatggaaggcaacatacatccataattgtttaaagaatggggagactcctcaagcaggccctgttggaattgaagaagataatgatattgaagaaaatgaagatgctggagcagcctctctgcccactcagccaactcagccatcatcatcttcaacttatgacccaagcaacatgccatcaggcaactatactggaatacagattcctccgggtgcacacgctccagctaatacaccagcagaagtgcctcacagcacaggtgtagcaagtaatactatccaacctactccacagactatacctgccattgatcccgcacttttcaatacaatttcccagggggatgttcgtctaaccccagaagactttgctagagctcagaagtactgcaaatatgctggcagtgctttgcagtatgaagatgtaagcactgctgtccagaatctacaaaaggctctcaagttactgacgacaggcagagaatgaagcctttgtatgacagacccatgtatttttggcatgaggaactaacagtccattactctatcttcagcctatcaggatcacagttttaaggaagacttggttttgttgaatatgacaatgaaatctgtgtgtatcagatttttattgaagcattcatcagcagcctcaaccagttttcattgtccatttactagattcaatcgtctctgagtatatagggctgatgttagcaagaccctaaaaatgtccattgaaccctgcttcaaaaaatgaaaacacacctctataaaatgtgtactgggaataagctttgtatttacatacattaggggaattttttaaaatctgtaatgtttggacaaacagatgatattactttgctataaaattataaatgtaacttttaataaagatagccagaata

SEQ ID NO: 199016 - DNA, 7028 bp, Homo sapiens
  Payload ID: 19263
  Gene Name: vesicle (multivesicular body) trafficking 1
  Uniprot ID: Q9NP79
  ENST ID: ENST00000367630
  CDS Start-End: 59-982
agacggaagcggaagtgccggtggagcgcgagtaggaagtggtgagttcggagtagagatggccgcgcttgcaccgctgcccccgctccccgcacagttcaagagcatacagcatcatctgaggacggctcaggagcatgacaagcgagaccctgtggtggcttattactgtcgtttatacgcaatgcagactggaatgaagatcgatagtaaaactcctgaatgtcgcaaatttttatcaaagttaatggatcagttagaagctctaaagaagcagttgggtgataatgaagctattactcaagaaatagtgggctgtgcccatttggagaattatgctttgaaaatgtttttgtatgcagacaatgaagatcgtgctggacgatttcacaaaaacatgatcaagtccttctatactgcaagtcttttgatagatgtcataacagtatttggagaactcactgatgaaaatgtgaaacacaggaagtatgccagatggaaggcaacatacatccataattgtttaaagaatggggagactcctcaagcaggccctgttggaattgaagaagataatgatattgaagaaaatgaagatgctggagcagcctctctgcccactcagccaactcagccatcatcatcttcaacttatgacccaagcaacatgccatcaggcaactatactggaatacagattcctccgggtgcacacgctccagctaatacaccagcagaagtgcctcacagcacaggtgtagcaagtaatactatccaacctactccacagactatacctgccattgatcccgcacttttcaatacaatttcccagggggatgttcgtctaaccccagaagactttgctagagctcagaagtactgcaaatatgctggcagtgctttgcagtatgaagatgtaagcactgctgtccagaatctacaaaaggctctcaagttactgacgacaggcagagaatgaagcctttgtatgacagacccatgtatttttggcatgaggaactaacagtccattactctatcttcagcctatcaggatcacagttttaaggaagacttggttttgttgaatatgacaatgaaatctgtgtgtatcagatttttattgaagcattcatcagcagcctcaaccagttttcattgtccatttactagattcaatcgtctctgagtatatagggctgatgttagcaagaccctaaaaatgtccattgaaccctgcttcaaaaaatgaaaacacacctctataaaatgtgtactgggaataagctttgtatttacatacattaggggaattttttaaaatctgtaatgtttggacaaacagatgatattactttgctataaaattataaatgtaacttttaataaagatagccagaatattctaaattagaaattacgtttttgtttccctcaagacataaaacaaatataaacattctaaactgctggatgaatctgaaaagacattaagttcaaattttaatttattctcatattaaatataactccattaaaagtttaaaatttcatgggagaaaatataataaggtaaagaggtagaatcactttcagacttaagaataatgttgatttcccaagtgctttaccttatctgttaaagcgtaagatgaattggtatttgcttcataggcagtttgactgcatgtattagagaatgaaaagaagatatttgtagtaatgcctggaaacttggtgctttaaattaaggtactcctctgctgctgtagaatggattccacacagtggatagctatgggtgattcagaatattatgtttagattcccatttgttaagtttataagttttgtggggaattatgaacttactgtgtactacctgcatttgtgctgtgtgaaaaataaatacaaggattcgtttagctaattcaacttactacaaagacaaatgtctgtttttatttgcctgctaggattgtcttttttaaaagtcatttttatttataggaatatgggtgtttctataggaagaaacaggttttttgttttttgttttttaagataaatttgacaaagttaactgaaatttatctggtccattttattcatgctactaagatgggaatctttaaacacaagggtcagcaagctttggcccatggattggccacctgttacgtaaataaagtttctttgaaacaagcctacactcattcatttatgttttgtctgtggttgctttccacaactgcagagttgtatggcttgcaagtctaaaaacatttactatttggccctctaagaaaaagttaagacacctagtctaatggccttttgggaaaaaacaaatcactaactcataatcatttatatccattattttctgcataaatgtaatgctattgtacagggtttggtagaataaatattcagactgactaaactgttctaaatcctcacaaaaaagtccccaaacaacatgcctcctaaaaaacattttcctatcttttacaagaggtatgaacatttgtagggttccacatttgcatctagaaatccaatgctctttagaatgttattacgaatagaaagatggccaggatgacctttagtgttacatgatgttcagcaaattttaattcaaaccttgatatgcctggacactgaaaagtaaacgcatcacctcctattttataccctaccttctggttcccaattgggagagcacatagagggaaggagacaatatagaaactacggagtccgctggtagtgggctgcatggtgtgacagagcccttctctgtaaaatggaaatgacaccactagccatctcaatagttacaagaattaaaagagatacagtacctgaagtgcttagcgcatggtagcatttcataaatgtttagtgtcaatactaatgctctaataatgtaaattgttaataatttatttccctaatatcaggaaatcccagttgtctatgtggcccagtgcttaaaaacgccttcttgcatgaggggattgaactatacaatgtttgttaactttgtatttgtattttttcctataaaatcttaaaataaaattaggagatgtgttctgatgtaacagtaggattagcaattttcatttattccttccatatatatttactgaatggctactatatgcctggtattgttctttgaaagcagaaacagcaggaaaaaaagtccctccctcatagagtttacattctaaaagggaggaaatagataataaaatatacattacatttaatcagtggctctccgagtgtgattagaaatacaaattttgggccccacctgtcctacccaatcagaaactctagggatgggtcccagccttctgagttttaagagacacttaaggtggtccctaaagttcgagtggtttagctctacccaaatcagaaatattgcaagtctgagaaaagagattctcctcaaaccggttctcaaaggtgtctctggacgaccggcatcagcatcacctgcgaacttgctagaaagttctggggaccacactatgggaacttctgtattaaatagtgataaatgctatggaggaaacattgaggacaggataggagatgcttaggtgtgtacagacatatgcatatttcaatagaatagccaggatagacctccctgaggtaacatttgagcaaagaaggaaaagagtaactagtatgcagatacatacatggaggaagagcattcccaacaggtagacagaaatcaggtcagagggtaaaagcaggagaaaggctggtgagggagctaaaagcttaggatcataaagcttttttgtaagacacttgactgggagctatatggaaaggttttcagaagaaacgtagcctgatgtgacttaacttttgaaataatcatattggctcctatgttgagaatagaccgtaaggtgggtggtaagtaagggaggaagctgggagaccagttaaaaagagtattaacaataggccgggggcggtggttcgcacctgcaatcccagcactttgggagccaaggcaggcggatcatctgaggtcaggagtatatatttattaatatataaatatgtatttatatataaatcataaatatattaataaatatataatatatatattagcctggcatggtggcacatacctctaatctcagctactgaagaggctgaggcaggagaatcgcttgaacccaggaggcggaggttgcagtgagccgagatcgtgccactgcactccagcctgggcgacagagcgagactccttctcaaaaaaaaaaaaagtattacaataatcaaggtgagatattatgatgtcttagtccaggagtagccttggaggtaataaaacgggattggtttctggcggcttttttttaggtagagccacaggatttctgtaaactggatgtgaggtacgaacataagagaaggagtaaaggttgactccagatttttcacctgaatgcctgaaaggaatgagtaatcatgtactgcagtagggaaagttgccgaattcctctctcacttagactgaagtacaatgtttccaagtttttgtgaccagcccaagtgaaactgataacggtgttttgtcaatgcggcagagggagaagaagaaataaggttctgctgacaatgattgccacagatatctcaccaaatcactgctgaactggagctgcaagccaagaatagttcccatggttagcatggcctaggaagtttactgacatcaggactacaccaagaaaaagactccagttatgggtcttgaaaattaatatcctcagatgtttttagaatttatatatgacttgtaattctagaaatttgagaattctatgtatgcattgaaagattatatactgtcttttctaaagaaacaccctaatagcagcattgtacaaatattttcaactctaaaagaataatagctaatggagttgatgggttttggttttcatatgagaagtatccttccctggttggttgtaatctttgaagtctatgtggaattctaagactgcaggcttgttcattggagtacacttaagtaggacaaattctaagtaagcaacacttcaataataatcataatagctaacatttcaatgtttactaaatgtcagatactattctaagtattttgcatatattaattcatttaatcttcacagtggtcctgagaggtaggctttatttctgttttaagatgaggaaagggagccacagagtaacaaatttgcctaaggtaacacagctaatatttatttctaagctcagactgcctgtttcagatcataagaagtatcatccatgtcagtaagtcacctgttacattgtaagtacaatgagatgttatgagttccacattatcaaggtcattggacagttccttttattagtgaggtgttagcacctaaatttttctattatctgggccatatgttccaattgacagtgctaggcagtgaacacagggtatgaacttgaaaatctgattgcaccctcaatatctggaatatacactgatctatgacctgaaattgtatggactgcagcaatccaaggggacactaagcagggtttgagtaatgctacaatggatttataggtcattttggagaaggtgttccacatcattagggagtctgggtttcccagatgtgcctgttttatcctttttattttaaataacatcactgtctttcctaactaaaaattcttcatcttcaggaaataagattgagatacggactgaaaatataaaattagcaataatgtttattattagatacttcctcaattaaatttctccctgaaagtcttaggcaaaagcccctgtctcttacttcatatatcaagtttggagggaaagacataattgcatagcagtattccatgaatataacttaatggggaactggcttcagagttcagcaatattgggaagtcttgtcaaatattaagtcattcatatgttcaaaaatattaatatgtattgagcatctaccatcaaatatttaatatgataatgccatactggatattatatacgagttacaataattcttcctaaagtcagggaaagcttcacagataaggttgagctgaaggtttggcaggcagggaagcaaggagaagttagcagagagaaaagcacaagcaacaccatggaggaacaaatgtgggcaattcaggtaactcgagtaatttagtgttactatgcatatggcctatggaggccaggagtgtaaatgtattatggctggggcggggggctagggaatgtgttatgactaaattgtatcccttcagaattcatattttgaagcactgatctccagtgtgtctgtgttcagaggcaggtcccatagggaggcaattaaggttacatgagatcataaaggtgaggccctaatcctataggtctgctgtcattacaagaagaggaagagccaccggagctggctcattctgcacgtgtacagagaagaggccatgtgaggacacgcagaggctcgaatatgctctcaaccctatcagttgcctgctttaattcatcccatggaattgttttgtcttttcgacccctcggctatgttatttgtattgtgatataggggatattcggagtcctctgagacgggacaaggacactggacggtctattgtgccatgcttatatattttctgtatacaatgctttctgtataaaaccagtaatacctgagaaacaacagtaacttgacaaaattactattgatcacttaactttatgtatcacgtaagttaaactttatttatttacatgtgtctccctcattagatgctaagttccttgatattttatacatttgtgaattcctggtaattcacatgaagcttgatgcattgtaagtattctgacctggtgaaataaatatacgaatgggcaaaaaaatatatactaaaatgatcaaataaaggttgtgttcagaaacctc

SEQ ID NO: 199017 - DNA, 3177 bp, Homo sapiens
  Payload ID: 19263
  Gene Name: vesicle (multivesicular body) trafficking 1
  Uniprot ID: Q9NP79
  ENST ID: ENST00000452973
  CDS Start-End: 206-874
acttgacgtcgctgagcaacggaagagtgggcagcatttgctctgaacgctcgtgcgcgctaccgcccagacggaagcggaagtgccggtggagcgcgagtaggaagtggtgagttcggagtagagatggccgcgcttgcaccgctgcccccgctccccgcacagttcaagagcatacagcatcatctgaggacggctcaggagcatgacaagcgagaccctgtggtggcttattactctaaagaagcagttgggtgataatgaagctattactcaagaaatagtgggctgtgcccatttggagaattatgctttgaaaatgtttttgtatgcagacaatgaagatcgtgctggacgatttcacaaaaacatgatcaagtccttctatactgcaagtcttttgatagatgtcataacagtatttggagaactcactgatgaaaatgtgaaacacaggaagtatgccagatggaaggcaacatacatccataattgtttaaagaatggggagactcctcaagcaggccctgttggaattgaagaagataatgatattgaagaaaatgaagatgctggagcagcctctctgcccactcagccaactcagccatcatcatcttcaacttatgacccaagcaacatgccatcaggcaactatactggaatacagattcctccgggtgcacacgctccagctaatacaccagcagaagtgcctcacagcacaggggatgttcgtctaaccccagaagactttgctagagctcagaagtactgcaaatatgctggcagtgctttgcagtatgaagatgtaagcactgctgtccagaatctacaaaaggctctcaagttactgacgacaggcagagaatgaagcctttgtatgacagacccatgtatttttggcatgaggaactaacagtccattactctatcttcagcctatcaggatcacagttttaaggaagacttggttttgttgaatatgacaatgaaatctgtgtgtatcagatttttattgaagcattcatcagcagcctcaaccagttttcattgtccatttactagattcaatcgtctctgagtatatagggctgatgttagcaagaccctaaaaatgtccattgaaccctgcttcaaaaaatgaaaacacacctctataaaatgtgtactgggaataagctttgtatttacatacattaggggaattttttaaaatctgtaatgtttggacaaacagatgatattactttgctataaaattataaatgtaacttttaataaagatagccagaatattctaaattagaaattacgtttttgtttccctcaagacataaaacaaatataaacattctaaactgctggatgaatctgaaaagacattaagttcaaattttaatttattctcatattaaatataactccattaaaagtttaaaatttcatgggagaaaatataataaggtaaagaggtagaatcactttcagacttaagaataatgttgatttcccaagtgctttaccttatctgttaaagcgtaagatgaattggtatttgcttcataggcagtttgactgcatgtattagagaatgaaaagaagatatttgtagtaatgcctggaaacttggtgctttaaattaaggtactcctctgctgctgtagaatggattccacacagtggatagctatgggtgattcagaatattatgtttagattcccatttgttaagtttataagttttgtggggaattatgaacttactgtgtactacctgcatttgtgctgtgtgaaaaataaatacaaggattcgtttagctaattcaacttactacaaagacaaatgtctgtttttatttgcctgctaggattgtcttttttaaaagtcatttttatttataggaatatgggtgtttctataggaagaaacaggttttttgttttttgttttttaagataaatttgacaaagttaactgaaatttatctggtccattttattcatgctactaagatgggaatctttaaacacaagggtcagcaagctttggcccatggattggccacctgttacgtaaataaagtttctttgaaacaagcctacactcattcatttatgttttgtctgtggttgctttccacaactgcagagttgtatggcttgcaagtctaaaaacatttactatttggccctctaagaaaaagttaagacacctagtctaatggccttttgggaaaaaacaaatcactaactcataatcatttatatccattattttctgcataaatgtaatgctattgtacagggtttggtagaataaatattcagactgactaaactgttctaaatcctcacaaaaaagtccccaaacaacatgcctcctaaaaaacattttcctatcttttacaagaggtatgaacatttgtagggttccacatttgcatctagaaatccaatgctctttagaatgttattacgaatagaaagatggccaggatgacctttagtgttacatgatgttcagcaaattttaattcaaaccttgatatgcctggacactgaaaagtaaacgcatcacctcctattttataccctaccttctggttcccaattgggagagcacatagagggaaggagacaatatagaaactacggagtccgctggtagtgggctgcatggtgtgacagagcccttctctgtaaaatggaaatgacaccactagccatctcaatagttacaagaattaaaagagatacagtacctgaagtgcttagcgcatggtagcatttcataaatgtttagtgtcaatactaatgctctaataatgtaaattgttaataatttatttccctaatatcaggaaatcccagttgtctatgtggcccagtgcttaaaaacgccttcttgcatgaggggattgaactatacaatgtttgttaactttgtatttgtattttttcctataaaatcttaaaataaaattaggagatgtgttctgatgtaacagtaggattagcaattttcatttattccttccatatatatttactgaatggctactatatgcctggtattgttctttgaaagcagaaacagcaggaaaaaaagtccctccctcatagagtttacattctaaaagggaggaaatagataataaaatatacattacattt

SEQ ID NO: 199018 - DNA, 3272 bp, Homo sapiens
  Payload ID: 19263
  Gene Name: vesicle (multivesicular body) trafficking 1
  ENST ID: ENST00000620996
  CDS Start-End: 127-969
acttgacgtcgctgagcaacggaagagtgggcagcatttgctctgaacgctcgtgcgcgctaccgcccagacggaagcggaagtgccggtggagcgcgagtaggaagtggtgagttcggagtagagatggccgcgcttgcaccgctgcccccgctccccgcacagttcaagagcatacagcatcatctgaggacggctcaggagcatgacaagcgagaccctgtggtggcttattactgtcgtttatacgcaatgcagactggaatgaagatcgatagtaaaactcctgaatgtcgcaaatttttatcaaagttaatggatcagttagaagctctaaagaagcagttgggtgataatgaagctattactcaagaaatagtgggctgtgcccatttggagaattatgctttgaaaatgtttttgtatgcagacaatgaagatcgtgctggacgatttcacaaaaacatgatcaagtccttctatactgcaagtcttttgatagatgtcataacagtatttggagaactcactgatgaaaatgtgaaacacaggaagtatgccagatggaaggcaacatacatccataattgtttaaagaatggggagactcctcaagcaggccctgttggaattgaagaagataatgatattgaagaaaatgaagatgctggagcagcctctctgcccactcagccaactcagccatcatcatcttcaacttatgacccaagcaacatgccatcaggcaactatactggaatacagattcctccgggtgcacacgctccagctaatacaccagcagaagtgcctcacagcacaggggatgttcgtctaaccccagaagactttgctagagctcagaagtactgcaaatatgctggcagtgctttgcagtatgaagatgtaagcactgctgtccagaatctacaaaaggctctcaagttactgacgacaggcagagaatgaagcctttgtatgacagacccatgtatttttggcatgaggaactaacagtccattactctatcttcagcctatcaggatcacagttttaaggaagacttggttttgttgaatatgacaatgaaatctgtgtgtatcagatttttattgaagcattcatcagcagcctcaaccagttttcattgtccatttactagattcaatcgtctctgagtatatagggctgatgttagcaagaccctaaaaatgtccattgaaccctgcttcaaaaaatgaaaacacacctctataaaatgtgtactgggaataagctttgtatttacatacattaggggaattttttaaaatctgtaatgtttggacaaacagatgatattactttgctataaaattataaatgtaacttttaataaagatagccagaatattctaaattagaaattacgtttttgtttccctcaagacataaaacaaatataaacattctaaactgctggatgaatctgaaaagacattaagttcaaattttaatttattctcatattaaatataactccattaaaagtttaaaatttcatgggagaaaatataataaggtaaagaggtagaatcactttcagacttaagaataatgttgatttcccaagtgctttaccttatctgttaaagcgtaagatgaattggtatttgcttcataggcagtttgactgcatgtattagagaatgaaaagaagatatttgtagtaatgcctggaaacttggtgctttaaattaaggtactcctctgctgctgtagaatggattccacacagtggatagctatgggtgattcagaatattatgtttagattcccatttgttaagtttataagttttgtggggaattatgaacttactgtgtactacctgcatttgtgctgtgtgaaaaataaatacaaggattcgtttagctaattcaacttactacaaagacaaatgtctgtttttatttgcctgctaggattgtcttttttaaaagtcatttttatttataggaatatgggtgtttctataggaagaaacaggttttttgttttttgttttttaagataaatttgacaaagttaactgaaatttatctggtccattttattcatgctactaagatgggaatctttaaacacaagggtcagcaagctttggcccatggattggccacctgttacgtaaataaagtttctttgaaacaagcctacactcattcatttatgttttgtctgtggttgctttccacaactgcagagttgtatggcttgcaagtctaaaaacatttactatttggccctctaagaaaaagttaagacacctagtctaatggccttttgggaaaaaacaaatcactaactcataatcatttatatccattattttctgcataaatgtaatgctattgtacagggtttggtagaataaatattcagactgactaaactgttctaaatcctcacaaaaaagtccccaaacaacatgcctcctaaaaaacattttcctatcttttacaagaggtatgaacatttgtagggttccacatttgcatctagaaatccaatgctctttagaatgttattacgaatagaaagatggccaggatgacctttagtgttacatgatgttcagcaaattttaattcaaaccttgatatgcctggacactgaaaagtaaacgcatcacctcctattttataccctaccttctggttcccaattgggagagcacatagagggaaggagacaatatagaaactacggagtccgctggtagtgggctgcatggtgtgacagagcccttctctgtaaaatggaaatgacaccactagccatctcaatagttacaagaattaaaagagatacagtacctgaagtgcttagcgcatggtagcatttcataaatgtttagtgtcaatactaatgctctaataatgtaaattgttaataatttatttccctaatatcaggaaatcccagttgtctatgtggcccagtgcttaaaaacgccttcttgcatgaggggattgaactatacaatgtttgttaactttgtatttgtattttttcctataaaatcttaaaataaaattaggagatgtgttctgatgtaacagtaggattagcaattttcatttattccttccatatatatttactgaatggctactatatgcctggtattgttctttgaaagcagaaacagcaggaaaaaaagtccctccctcatagagtttacattctaaaagggaggaaatagataataaaatatacattacattt

SEQ ID NO: 199019 - DNA, 2734 bp, Homo sapiens
  Payload ID: 19264
  Gene Name: vesicle amine transport 1
  Uniprot ID: Q99536
  ENST ID: ENST00000355653
  CDS Start-End: 97-1278
gctggatcccgcagccgcggctcttcccgacgcgttccgccttccccagctgtgcactctccatccagctgtgcgctctcgtcgggagtcccagccatgtccgacgagagagaggtagccgaggcagcgaccggggaagacgcctcttcgccgcctccgaaaaccgaggcagcgagcgacccccagcatcccgcggcctccgaaggggccgccgccgccgccgcctcgccgccactgctgcgctgcctagtgctcaccggctttggaggctacgacaaggtgaagctgcagagccggccggcagcgcccccggcccctgggcccggccagctgacgctgcgtctgcgggcctgcgggctcaacttcgcagacctcatggctaggcaggggctgtacgaccgtctcccgcctctgcctgtcactccgggcatggagggcgcgggtgttgtgatcgcagtgggcgagggagtcagcgaccgcaaggcaggagaccgggtgatggtgttgaaccggtcagggatgtggcaggaagaggtgactgtgccctcggtccagaccttcctgattcctgaggccatgacctttgaggaagctgctgccttgctcgtcaattacattacagcctacatggtcctctttgacttcggcaacctacagcctggccacagcgtcttggtacacatggctgcagggggtgtgggtatggctgccgtgcagctgtgccgtacagtggagaatgtgacagtgttcggaacggcctcggccagcaagcacgaggcactgaaggagaatggggtcacacatcccatcgactatcacacgactgactacgtggatgagatcaagaagatttcccctaaaggagtggacattgtcatggaccctctgggtgggtcagatactgccaagggctacaacctcctgaaacccatgggcaaagtcgtcacctatggaatggccaacctgctgacgggccccaaacggaacctgatggccctggcccggacatggtggaatcagttcagcgtgacagctctgcagctgctgcaggccaaccgggctgtgtgtggcttccacctgggctacctggatggtgaggtggagctggtcagtggtgtggtggcccgcctcctggctctgtacaaccagggccacatcaagccccacattgactcagtctggcccttcgagaaggtggctgatgccatgaaacagatgcaggagaagaagaatgtgggcaaggtcctcctggttccagggccagagaaggagaactagggcaagtggctgtgagaccctagagaccagcgaagggagaagttgggaagctacgttctgttggccaccagacttgcatttcagcctctgtcataatgctctgccctccctcccccgaaggtctctgtggtgatgaccgctctcccctgcccctccccgcttcctgacctctgaagaggttgggaagtgaccatttggatgtctgggccctgccaaggcgacagggagggtcagagggaggccggctgcttcctgcccccaccctttccccgggcctgctgtgctgcttttgtgccaaggttagccagtcccccctgttgtgttccatgtgctttcacctctgcctcatctttcctcccgtccctgccccgccacctccccaaagaattgaaacgtcagctcaggatatggggccaatctctgtgagtccagcatgtacctgtctctccctagtgtcccttcagcctgggctgaccagtgcccgcctctgggcttgaccagttcccaatctcgtcctctgtccccaacttcttaagcacaattgggcttcttccatctccaggttttctgccattcttaaccaaggctgcctcttccaacagggcgggaatcagacctactcccctaggtcacaactctgggaaggatacagagcccccacccttcactgagttctctggatttgttctcagtgccttagcaacgaaaacctgtgcttgtgtgtgtgtggcggcggggagggaggatcctgtttcccacctccttctcctcccctgtactccccagtgccttccttgttctggtggagctggggtttctctcctccccagtcccacaacactgccaaaaatctgtgtatgtgccattgggtggggcagccccaagcctcctggggaggcagggcaaaaacaggtgccctcatcgtggtctgtgccatgtcccgtctctatggtggttgaggagaaaggcggggaagcttcctcagccttgcagatatgtgtggcatttactagccagagctctgaaaggcagtgctgtctgtttcttgtactgggaccaaagtaaaaatccaagcacattccccttgcagttaggggaggccctactgccttctcaaagcagagaggcagcttatcaaactcagcccaaaactctgtttacatgggtggggagatggagcagggaagtacagagtgggatggtcaggacctgggccattgcaaccaaaatggggacttcctgggtagggaggtcactccctctactcactgagctaggattagggagggttattgccccaaccattgcaatgggaggtggagggacaggctcagcctcctcattgtctaaatgaggcctaaatgtgtgaagtgcgatttctgcttttgtgtaccccaccaccccattaccacagctgcctttgtgtgtttgtgtcaataaaaagccaaaccctggg

SEQ ID NO: 199020 - DNA, 1069 bp, Homo sapiens
  Payload ID: 19264
  Gene Name: vesicle amine transport 1
  Uniprot ID: Q99536
  ENST ID: ENST00000420567
  CDS Start-End: 147-926
atctgatgtaagagcctggattctgcggggagggcccttccctctctctccctcctcctccttcctggtgtctgggttggggaggggtcatggccctgatttggatggcctgagggttagcatgagccagggcaggagaccgggtgatggtgttgaaccggtcagggatgtggcaggaagaggtgactgtgccctcggtccagaccttcctgattcctgaggccatgacctttgaggaagctgctgccttgctcgtcaattacattacagcctacatggtcctctttgacttcggcaacctacagcctggccacagcgtcttggtacacatggctgcagggggtgtgggtatggctgccgtgcagctgtgccgtacagtggagaatgtgacagtgttcggaacggcctcggccagcaagcacgaggcactgaaggagaatggggtcacacatcccatcgactatcacacgactgactacgtggatgagatcaagaagatttcccctaaaggagtggacattgtcatggaccctctgggtgggtcagatactgccaagggctacaacctcctgaaacccatgggcaaagtcgtcacctatggaatggccaacctgctgacgggccccaaacggaacctgatggccctggcccggacatggtggaatcagttcagcgtgacagctctgcagctgctgcaggccaaccgggctgtgtgtggcttccacctgggctacctggatggtgaggtggagctggtcagtggtgtggtggcccgcctcctggctctgtacaaccagggccacatcaagccccacattgactcagtctggcccttcgagaaggtggctgatgccatgaaacagatgcaggagaagaagaatgtgggcaaggtcctcctggttccagggccagagaaggagaactagggcaagtggctgtgagaccctagagaccagcgaagggagaagttgggaagctacgttctgttggccaccagacttgcatttcagcctctgtcataatgctctgccctccctcccccgaaggtctctgtggtgatgaccgctct

SEQ ID NO: 199021 - DNA, 478 bp, Homo sapiens
  Payload ID: 19264
  Gene Name: vesicle amine transport 1
  ENST ID: ENST00000592388
  CDS Start-End: 1-91
cgagaaggtggctgatgccatgaaacagatgcaggagaagaagaatgtgggcaaggtcctcctggttccagggccagagaaggagaactagggcaagtggctgtgagaccctagagaccagcgaagggagaagttgggaagctacgttctgttggccaccagacttgcatttcagcctctgtcataatgctctgccctccctcccccgaagtacagagtgggatggtcaggacctgggccattgcaaccaaaatggggacttcctgggtagggaggtcactccctctactcactgagctaggattagggagggttattgccccaaccattgcaatgggaggtggagggacaggctcagcctcctcattgtctaaatgaggcctaaatgtgtgaagtgcgatttctgcttttgtgtaccccaccaccccattaccacagctgcctttgtgtgtttgtgtcaataaaaagccaaaccctg

SEQ ID NO: 199022 - DNA, 1174 bp, Homo sapiens
  Payload ID: 19264
  Gene Name: vesicle amine transport 1
  Uniprot ID: Q99536
  ENST ID: ENST00000587173
  CDS Start-End: 35-1012
atccagctgtgcgctctcgtcgggagtcccagccatgtccgacgagagagaggtagccgaggcagcgaccggggaagacgcctcttcgccgcctccgaaaaccgaggcagcgagcgacccccagcatcccgcggcctccgaaggggccgccgccgccgccgcctcgccgccactgctgcgctgcctagtgctcaccggctttggaggctacgacaaggcaggagaccgggtgatggtgttgaaccggtcagggatgtggcaggaagaggtgactgtgccctcggtccagaccttcctgattcctgaggccatgacctttgaggaagctgctgccttgctcgtcaattacattacagcctacatggtcctctttgacttcggcaacctacagcctggccacagcgtcttggtacacatggctgcagggggtgtgggtatggctgccgtgcagctgtgccgtacagtggagaatgtgacagtgttcggaacggcctcggccagcaagcacgaggcactgaaggagaatggggtcacacatcccatcgactatcacacgactgactacgtggatgagatcaagaagatttcccctaaaggagtggacattgtcatggaccctctgggtgggtcagatactgccaagggctacaacctcctgaaacccatgggcaaagtcgtcacctatggaatggccaacctgctgacgggccccaaacggaacctgatggccctggcccggacatggtggaatcagttcagcgtgacagctctgcagctgctgcaggccaaccgggctgtgtgtggcttccacctgggctacctggatggtgaggtggagctggtcagtggtgtggtggcccgcctcctggctctgtacaaccagggccacatcaagccccacattgactcagtctggcccttcgagaaggtggctgatgccatgaaacagatgcaggagaagaagaatgtgggcaaggtcctcctggttccagggccagagaaggagaactagggcaagtggctgtgagaccctagagaccagcgaagggagaagttgggaagctacgttctgttggccaccagacttgcatttcagcctctgtcataatgctctgccctccctcccccgaaggtctctgtggtgatgaccgctctcccctgcccctccccgctt

SEQ ID NO: 199023 - DNA, 613 bp, Homo sapiens
  Payload ID: 19264
  Gene Name: vesicle amine transport 1
  ENST ID: ENST00000590924
  CDS Start-End: 151-613
cagaagatctgggcggagccctgggaacagaggcctcagagccggggtccagcccgccggtgtggtctgaggggcccctgccggtttgggacaggccgaactgggcttatttgactttctcggatataagggcaggcaggagaccgggtgatggtgttgaaccggtcagggatgtggcaggaagaggtgactgtgccctcggtccagaccttcctgattcctgaggccatgacctttgaggaagctgctgccttgctcgtcaattacattacagcctacatggtcctctttgacttcggcaacctacagcctggccacagcgtcttggtacacatggctgcagggggtgtgggtatggctgccgtgcagctgtgccgtacagtggagaatgtgacagtgttcggaacggcctcggccagcaagcacgaggcactgaaggagaatggggtcacacatcccatcgactatcacacgactgactacgtggatgagatcaagaagatttcccctaaaggagtggacattgtcatggaccctctgggtgggtcagatactgccaagggctacaacctcctgaaacccatgggcaaagtcgtcacctatggtgagttag

SEQ ID NO: 199024 - DNA, 570 bp, Homo sapiens
  Payload ID: 19264
  Gene Name: vesicle amine transport 1
  ENST ID: ENST00000589709
  CDS Start-End: 118-570
gagtgaagatgttttctgggctcccagtgctggctcaaacacacttctcccgaggtgaccacaccctgctgtaagcgctcagagaactttgcctgcactttggcaggagaccgggtgatggtgttgaaccggtcagggatgtggcaggaagaggtgactgtgccctcggtccagaccttcctgattcctgaggccatgacctttgaggaagctgctgccttgctcgtcaattacattacagcctacatggtcctctttgacttcggcaacctacagcctggccacagcgtcttggtacacatggctgcagggggtgtgggtatggctgccgtgcagctgtgccgtacagtggagaatgtgacagtgttcggaacggcctcggccagcaagcacgaggcactgaaggagaatggggtcacacatcccatcgactatcacacgactgactacgtggatgagatcaagaagatttcccctaaaggagtggacattgtcatggaccctctgggtgggtcagatactgccaagggctacaacctcctgaaacccatgggcaaagtcgtcacctat

SEQ ID NO: 199025 - DNA, 521 bp, Homo sapiens
  Payload ID: 19264
  Gene Name: vesicle amine transport 1
  ENST ID: ENST00000589828
  CDS Start-End: 244-521
ttatatataaagcacttgaaatcgggctcggccctcagtcagcactcagtaaaggtgagttgttattgttgttgatgatgatgttattattattattattaccatgactattgctgcttctcctgctacttcatttggaagaaggtagccttgtacctagggggaaatcagtaaatagcctgtgggtgaatgaatgagtgactgaatgatactcttctgttcttcaaggcaggagaccgggtgatggtgttgaaccggtcagggatgtggcaggaagaggtgactgtgccctcggtccagaccttcctgattcctgaggccatgacctttgaggaagctgctgccttgctcgtcaattacattacagcctacatggtcctctttgacttcggcaacctacagcctggccacagcgtcttggtacacatggctgcagggggtgtgggtatggctgccgtgcagctgtgccgtacagtggagaatgtgacagtgttcggaacggcctcggccagcaagcacga

SEQ ID NO: 199026 - DNA, 600 bp, Homo sapiens
  Payload ID: 19264
  Gene Name: vesicle amine transport 1
  ENST ID: ENST00000587062
  CDS Start-End: 163-600
agaagatctgggcggagccctgggaacagaggcctcagagccggggtccagcccgccggtgtggtctgaggggcccctgccggtttgggacaggccgaactgggcttatttgactttctcggatataagggcagctgtgcgctctcgtcgggagtcccagccatgtccgacgagagagaggtagccgaggcagcgaccggggaagacgcctcttcgccgcctccgaaaaccgaggcagcgagcgacccccagcatcccgcggcctccgaaggggccgccgccgccgccgcctcgccgccactgctgcgctgcctagtgctcaccggctttggaggctacgacaaggtgaagctgcagagccggccggcagcgcccccggcccctgggcccggccagctgacgctgcgtctgcgggcctgcgggctcaacttcgcagacctcatggctaggcaggggctgtacgaccgtctcccgcctctgcctgtcactccgggcatggagggcgcgggtgttgtgatcgcagtgggcgagggagtcagcgaccgcaaggcaggagaccgggtgatggtgttgaaccggtcagggatgtggcaggaagag

SEQ ID NO: 199027 - DNA, 582 bp, Homo sapiens
  Payload ID: 19264
  Gene Name: vesicle amine transport 1
  ENST ID: ENST00000587147
  CDS Start-End: 1-378
tcccctaaaggagtggacattgtcatggaccctctgggtgggtcagatactgccaagggctacaacctcctgaaacccatgggcaaagtcgtcacctatggaatggccaacctgctgacgggccccaaacggaacctgatggccctggcccggacatggtggaatcagttcagcgtgacagctctgcagctgctgcaggccaaccgggctgtgtgtggcttccacctgggctacctggatggtgaggtggagctggtcagtggtgtggtggcccgcctcctggctctgtacaaccagggccacatcaagccccacattgactcagtctggcccttcgagaaggtgaatgtgaggactttgcagggagggcttgggtaggactcatgaaggctggggtcccaaggggcagattcctggggaagaggagggctgcctgcatcacactggctcttgttggatgagggttggatagcactgggagccgcatctttccttcctccccaggtggctgatgccatgaaacagatgcaggagaagaagaatgtgggcaaggtcctcctggttccagggccagagaaggag

SEQ ID NO: 199028 - DNA, 3825 bp, Homo sapiens
  Payload ID: 19265
  Gene Name: vesicle amine transport 1-like
  Uniprot ID: Q9HCJ6
  ENST ID: ENST00000302536
  CDS Start-End: 154-1413
gtggaccgcggcggcgctcgcagaggctgcagccattgcacagccgagcatcccacattcaacaggaggaacccgcgggagaggagccccactcccccagcgccgcagccaccgcagccaccgcagcccgtgcgccccgcgccctcgagcgccatggccaaggaaggcgtggagaaggcggaggagacggagcaaatgatcgagaaggaggcaggcaaggagccggcggagggcggcggcggcgacggctcgcaccgcctcggggacgcccaggagatgcgcgcggtggtgctggctggcttcggggggctcaacaagctgcggctcttcaggaaggccatgcccgagcctcaggacggcgagctcaagatccgcgtcaaagcctgtggattaaacttcattgacttgatggtgcgacaagggaatattgacaaccctcccaagactcccctggtgccaggatttgagtgttctgggattgttgaagctctgggggacagcgtgaaaggatatgagattggagaccgtgtcatggcatttgtcaattacaatgcctgggcagaggtggtctgcacaccagtggagtttgtctacaagatcccggatgacatgagcttctccgaggctgctgcattccccatgaacttcgtcacagcctatgtgatgctgtttgaagttgccaacctccgggaagggatgtctgtgctcgtgcactcagctggtgggggcgtgggtcaagctgtggctcagctgtgttccactgtccccaacgtgactgtctttggaacagcctctactttcaagcatgaagcaatcaaagactctgtgacccacctctttgacagaaatgcagactacgtgcaagaagttaaaagaatctctgctgaaggtgtggacatcgttttggattgcctctgtggggacaacactggaaaaggtctcagtcttctcaaacccctgggaacctacattttatatggctcatccaacatggtaactggagagaccaagagcttcttcagctttgcaaaatcatggtggcaggtggagaaggtgaaccccatcaagctgtatgaggagaacaaagtcatcgcggggttttcccttttaaatctgctcttcaaacaaggccgggcgggcctcattcggggagtggtggaaaaactcatagggctctacaaccagaagaagatcaagcctgtggtggactccttgtgggctctggaggaggtgaaggaggccatgcagcggattcacgaccgagggaacattggcaagttaattctggatgtagaaaagaccccaactccactgatggccaatgacagcacagagaccagtgaagcaggggaagaggaggaggaccacgagggagacagcgagaacaaggagcggatgccctttatccagtaactgaggacccaggtgggagaatgtgaaggatggtttggaagatgaggacccggctgagaaaactcttctgtgccccagtgaacaaatgctgtagtccagtgcgtgtcgtgtttgtctgcagtcagctgagctaaaaagctgttgatcactgttgttttttgaagtgccaatcccatgccatgcagtattatgtccctctcctatctgtgtattacacattcccctctcccctgtatcaaaaccatccatctgtgggttcttcttgacagttctagaacagccttgcaaattaatacaagtcccaggcccaatgcctaagagaccagacgtgggcaaagacaagtttggatggaaaggtgttatcacagagccctgtccagctcctagaattcctcaggccagtgacacttttttgctgctggccacccatgcctctgatgagaacacttgccaatttggccagcagaaagagagtaggccggatgttttcatgagcccacaaatttagaaactctcctagtagtactttttctctctccatttaagagacaactacggtcaaaagtttgagccattctcttctaccccttcagtgtctgaccctttcactggctcttatctgtaaacacagggaggcaggtatggatttttcacagtagacaatgggtcaacagcatgagtttgaggacctgctgtgaagatttctcctccaaaatacatctcatgggcaggattcttcctgctccatatctgtttcaattttaagaaagcaccacatacaagacacattcagaagtcattcctgagcattgctggtgtttgcacacttgccacctgcattaccaattctgtaaatttcaattcctggtggaaagtgaccactttgaccatggatttcccaaagaagagttcctttgcagaccataggtggaaaagtcaatgagcatctccttccttgccaaagcatgtcccaacatgtaacaaactctagggatacaaaaggtttatattcagcatctgatgtcagatgtacagttcctcccctcccatatataaaccccggtgtagaatctgcagcgccctgctcttcggaaaccaaggaacaagccacctgctcacacaccttgttcaacttttcagctcctaaggaaccccacccccatgcaatttgactgtgcttgagaggtgaatacagttaccttcgagaaacagagggagctcctcaccccgtccttccagtccttttggctaaaatgcttaactatcactcacaaacaaatgtggagataccaggagctcatttgattcataccccaactttgtgttctgaaaaacatcagagggattttacattgcccagtttctccaccaacaagccttagggtggacccaaccctttccgcaagtggtaggaacgaatgcatcttagcaattacctgatttccaaagtccttttgtagcaaatgtcacctcattcgtggtctttttacctatcctaagcttatgatgatgagttatgtatgccaaatacttatctgaagagtttctcctcattgtgaatgtgtatgtaaaatatgaagacaagaaagggtgctttcatctgaggaaccaaggggtgagagtatcccaaaggaggacaccagcatcatcttttcttcgtactccaggacccaccaatattccagttctgggtcatttagagagataatggggcgtttattcccctattacctttgctaagtgctatattattggctgtttctcccgtaaccatgctgaaaagggggtcttagggagaactgtcatccaagtggcattcctagtaagttgggtagaaatgacattttccagagctgaaggagtgaagagcccttggccatactagggctctccttcccccggggagtgggaactcagccacattcagaattcacatcgcctttgttatgtccagaggagaggcataaaaaggcactctcccccaccacccctaccaaatctgggtttggtttggttttatttaactagcaaagttaatccagtaatcgcaaattactccagatggttaaagaaaaccctttcagaatacagaacgagaaaactagagtttgaccaataagaccaatttctgccatgaagaaccgggggacgcaagttaattgtttaacgtactctcattttaagcaccttctttcctgtctcttgattgttttttctgaaggaagtgtaaagaatgtctcagtctgccttaaaggaactgtgaaggcttctctgtaatttaagcttgatagaagtgaactgaaacattgtctaatgtctttgtggctttagagcttttgttatattgtgcctataaagcaaattatgtttacataaaaatataaataaagtattcagcatagcaaaacctca

SEQ ID NO: 199029 - DNA, 4131 bp, Homo sapiens
  Payload ID: 19266
  Gene Name: vesicle transport through interaction with t-SNAREs 1A
  Uniprot ID: Q96AJ9
  ENST ID: ENST00000393077
  CDS Start-End: 117-770
ccgttctgctctcgggggcaccttccggggttcctaagccgcggggcccctcgctgcccctcgaggccctttccctgacctaggctttggcctgggctactcgttccggagccgccatgtcgtccgacttcgaaggttacgagcaggacttcgcggtgctcactgcagagatcaccagcaagattgcgagggtcccacgactcccgcctgatgaaaagaaacagatggttgcaaatgtggagaaacagcttgaagaagcgaaagaactgcttgaacagatggatttggaagtccgagagataccaccccaaagtcgagggatgtacagcaacagaatgagaagctacaaacaagaaatgggaaaactcgaaacagattttaaaaggtcacggatcgcctacagtgacgaagtacggaatgagctcctgggggatgatgggaattcctcagagaaccagagggcacatctgctcgataacacagagaggctggaaaggtcatctcggagactagaggctggataccaaatagcagtggaaaccgagcaaattggtcaggagatgttggaaaaccttagtcatgacagagaaaagatacagcgagcacgtgaaagacttcgggaaacagatgctaatttgggaaaaagctccaggattctgacagggatgttgcgaagaatcatccagaaccgcatcctgctcgtcatcctagggatcatcgtggtcatcaccatcctgatggcgatcactttttctgtcagaagacactgatgtatctgctctcccttgataaacagcaacaacagcttgttctgagtaattaagacaaaatggtcacatgaatcattctgttgcgctgacaggccccaggtgaccctctctctccctcaccgccgttgggctgaagtgcaaagagtgtaaaaatattttctattcctgtttgcatgtgggttggtttccttttcgaggtttgtcttcacccagattcgttttttagaggggaaggtgaatgtttatttacctttttgctaatgtcatcaactagccaaaatagccccagtgacactcctagccctctggacgtgtcaagggccgtggtttgggagaggacatgatgagtcagtcacgagagcttctgtttgtcacccgcctcttgttgctgaaaagctcttctgtgatgtctgaggataaaaatgcagcaaaaagcaggggatggagtcagtgaccccgtccagcaagccagccctgttcctacacaggcctcatgaatatagtcatcaacctgcctgagtgctttcattgtaaaggtcggtatttaatgtcggttgtacaggaaattgacttagcactttccctgtttttctattgcataattttttttttaacccaaagatattttttttgctgagcctgcccagtattcactgttcacaactttgattactggctacaagaaatattttcttgccttccccaaatcccatactccccagaatctgctggcaaagtgagccctggtacaggatttaattgtgacctcgtcttccctgacctgtgtaagcatctctgtatcctttcggttttaatatctgcactgccaaaagcagtcctcatacttgcaaaaggtctgacaaggttctctccacatacattccagtatgtaaagagaccatgaatatttcagtaagagcaagaacatgactccatcagtgtgaaatttcaaatgtgattataaatatgggagagtcctataggagggtccaccagagataaacttcacggaaaacgttccctaacctcctttaaaagaatagaggatggcagattgttccaaaaggaatggcttgggtttttaactaacaaatgttagcaagcctttcttgaattcactatgtattcaaacttctaatatgctttgtgatttttttctttcatttctttctgtctgaggtaaccaggaattgcgttcaaaatgagctcatttgtgatcaggcttaaaagttgcccaagctgaggtcgtttccccccagtcacaaagcagaatgtttttctcaagacttcataggcacttactggtccgtactatctttggaatataattagaagctttgaatccttgaaaagcaaacctgttctcttcatcaaaaatgctaaccacctgtgcccgtggatcaatatcacctggatgtagtgcttgatatttttcccaactcagaagaaaaccattatggtttagagaggaaatgcagaatggcagaatccaccagagaaattgcacttatcgaaacaggccaaggcctgcatgtgttcggataaatcatttagtattgtgtaaataaagctgcagcctttacttcggagggatggtgtgggattttggccgagggaagcaggacagagaaggagcaggaagctatgctaattttcctgtcagcttaagggatccgtctcagcaagaatcttgtattctgataacggaatgctgtacgtgctgaccacatctaagaaccattaaaaagcaaggaaacaaacaaacaacccttttctcattccgacacacgaatagtcatcgagtattacaccagcccctctggtggcttccttcaaaactgttgatcttagctaaagtgtataaccagttaccagctgcacttcgcacggccatcccgtccacaatgcagcagactcttcccaaggccacctagcaagcaaggttgatcggatcatctaaactggccgcctcctgaatatttcactgaatcctggcgttcatgttgaagcagacaaaatgagaaaggaggagggcattgctcacctctcaatagcttttttcgttcaagttctatgtctttatcagctcttgcctgtgattttaccccaattcaaccttgggagtgggaagaatatgaacagataacccttggcctaacagctccatcaaacctccttgagagcaactacctaggccaggctagtgagtgctttgtgaggaagctggtcagaaggttccctcaactccttcctggtcctcctggacactgcagaaaagacttaggggatccccagcagaggccaattgctctccttccttccctgccccaccaggaaaggaataacgtccacagacttgaagcagatagtgaagtagatctgtgagaggttctaggtacttagtgtgtagactttgacgaatatttctcaagttgggagcccttgttaaaaatgatgtttaagggagtggttggggggaagatgaaggcatggaggaggaagaagagaaggaagcccttgccatataaaattcatgcagactaaacagtttccctgacagaataaataaagtggatgctaccccactccagaatcaaaagcaatttaattaaagtctcttaagttgtaaagagttttaaatgatccgtgttgaaggcgaatgcctgcaaatgcagtgggtctgacgtcagctgccgggcctgggctgggaggccatttgctattctgtttaaggcaggctggattgtcttattttggaaccagcttggtggggggtttgctttgctactgcttctgagccctgagcttcaaaggctgaaattaatggtgaacaaaattgtgcggctctggccatcccatgcggggcaagcccattgagggttatcattaagtaaagaaataaagagggggaaaaaagcctgcctgttccaaaaacctcatcagataatgacctcagtgattgggttttcattaccaaacagcatccagagattatcaacccatagaagaagggaggggaaaaaaaagaaagaaaggaaaagcaactgtctttctctccctctctttctcctttttttttgcacatcttttctttaaaactgtcagatcatttcagtatttcaaatccgaggaaaacagcctgcctgctgctgtatttgaagttgtaatggtgtcaaaaagtcacgactgactgacagccgtcagtcccagaggggctcattaaatcataaaaacttgacaaggaaataattgcgcattgccagcaacttggcgcctgtttagacgtttttattttctttcattattagtccccaccattacgttcattaacaaattgcattaaacaactgttaagggctaa

SEQ ID NO: 199030 - DNA, 1738 bp, Homo sapiens
  Payload ID: 19266
  Gene Name: vesicle transport through interaction with t-SNAREs 1A
  Uniprot ID: Q96AJ9
  ENST ID: ENST00000432306
  CDS Start-End: 117-728
ccgttctgctctcgggggcaccttccggggttcctaagccgcggggcccctcgctgcccctcgaggccctttccctgacctaggctttggcctgggctactcgttccggagccgccatgtcgtccgacttcgaaggttacgagcaggacttcgcggtgctcactgcagagatcaccagcaagattgcgagggtcccacgactcccgcctgatgaaaagaaacagatggttgcaaatgtggagaaacagcttgaagaagcgaaagaactgcttgaacagatggatttggaagtccgagagataccaccccaaagtcgagggatgtacagcaacagaatgagaagctacaaacaagaaatgggaaaactcgaaacagattttaaaaggtcacggatcgcctacagtgacgaagtacggaatgagctcctgggggatgatgggaattcctcagagaaccagagggcacatctgctcgataacacagagaggctggaaaggtcatctcggagactagaggctggataccaaatagcagtggaaaccgagcaaattggtcaggagatgttggaaaaccttagtcatgacagagaaaagatacagcgagcacgtgaaagacttcgggaaacagatgctaatttgggaaaaagctccaggattctgacagggatgttgcgaaggggttgttctgtgaaaaaacaatgtaacctgtctctggccccaaaggcttgaaccagaaccagccagtggaaattactcaaacacgtattgtgccttcaatgagaagccttctcactgaaagagctgccctggacggaaaatgagtagtgagatgatgctggtggaagtatttatagatgcgcagtgcatgagtacttggcaaggatgctatcaaaggggaaactgacatcaaatgtgctgtggttctgggtgatttatctggtcccttcccatcccagagctttatgattctgtaataatcaagggagaaacccattacatagtggacaattttttttctttttttttctttttctttttttttttgagacagagtcttgccctgtcgcctggctggagtggagtggcacaatcttggctcactgcaacctccacctcccaggtccaagcgattctcttgcctcagcctcccaagtagctgggactacaggcacacaccaccacgcccagctaatttttgtatttctttttttttttttttgtagagatggagtttcaccatgttggccaggatggtctcgatctcttaaccttgtgagccaccgtgcccaaccctaacaattatttttaaaaggaggaatttaaatgagctgtggattattcattttgtcccataagaagataattaaaaaatgacaaaaatgaactgaacaaaaaagttctaacaaaataataaggctgaatttttaaagtctcttccgcatcttctgttccctgggatgccttagacggggtgtgcagtattttaggtacatcgtgagcaaggagcctgcattcccagggggcggcagggacagcatgtaaggtcttagtccagctctgtgatctgaaggcaaagcctctatgtgtgaaacacaggggtacctcaaaaatagaacaagagcactccatccatgtgcggatgactgtcaaggtcactgagacctacagtgatctggaaaattaaagctctctggccgcctttcctctcaggacatacttctggagatcaaaaaaaaaaa

SEQ ID NO: 199031 - DNA, 1103 bp, Homo sapiens
  Payload ID: 19267
  Gene Name: vesicle transport through interaction with t-SNAREs 1B
  ENST ID: ENST00000216456
  CDS Start-End: 122-256
ctgggcggcggtggtgcggcggtcgccgttatggccactgggctgggcggctgaccgccgggctaggaaagggcccagggccccgaatctcggtggccgctgctccagcgcggcctgcgccatggcctcctccgccgcctcctcggagcatttcgagaagctgcacgagatcttccgcggcctccatgaagacctacaaggggtgcccgagcggctgctggggacggcggggaccggggagattagtaatttttaggtattaaagatacactcaaccaaagggacagaatgggaaaggctgaaaggggaatgaataacgttctcatcgttcaagtcattgccggtgccacacccagagaaaaacaagcaccacaccagacagcctctcagcaagccgaaagaaaagaagaaattgatcagggattttgatgaaaagcaacaggaagcaaatgaaacgctggcagagatggaggaggagctacgttatgcacccctgtctttccgaaaccccatgatgtctaagcttcgaaactaccggaaggaccttgctaaactccatcgggaggtgagaagcacacctttgacagccacacctggaggccgaggagacatgaaatatggcatatatgctgtagagaatgagcatatgaatcggctacagtctcaaagggcaatgcttctgcagggcactgaaagcctgaaccgggccacccaaagtattgaacgttctcatcggattgccacagagactgaccagattggctcagaaatcatagaagagctgggggaacaacgagaccagttagaacgtaccaagagtagactggtaaacacaagtgaaaacttgagcaaaagtcggaagattctccgttcaatgtccagaaaagtgacaaccaacaagctgctgctttccattatcatcttactggagctcgccatcctgggaggcctggtttactacaaattctttcgcagccattgaacttctatagggaagggtttgtggaccagaactttgaccttgtgaatgcatgatgttagggatgtggatagaataagcatattgctgctgtgggctgacagttcaaggatgcactgtatag

SEQ ID NO: 199032 - DNA, 5351 bp, Homo sapiens
  Payload ID: 19267
  Gene Name: vesicle transport through interaction with t-SNAREs 1B
  Uniprot ID: Q9UEU0
  ENST ID: ENST00000554659
  CDS Start-End: 343-1041
ccctttcgctgcggcctttccccaacccggacccggcacttctcgggttccgcgactgccgatcgccccggcgcggcaccgctccctcaggagtcgcctaggccgcgcagtctcccgacttctcgtcaggctttcgcgccggcgctccagcaatcactggctggagaaggtgggcgttccggctcgagaggaccctgccgcggctccggaagagcctcgtcctgggcggcggtggtgcggcggtcgccgttatggccactgggctgggcggctgaccgccgggctaggaaagggcccagggccccgaatctcggtggccgctgctccagcgcggcctgcgccatggcctcctccgccgcctcctcggagcatttcgagaagctgcacgagatcttccgcggcctccatgaagacctacaaggggtgcccgagcggctgctggggacggcggggaccgaagaaaagaagaaattgatcagggattttgatgaaaagcaacaggaagcaaatgaaacgctggcagagatggaggaggagctacgttatgcacccctgtctttccgaaaccccatgatgtctaagcttcgaaactaccggaaggaccttgctaaactccatcgggaggtgagaagcacacctttgacagccacacctggaggccgaggagacatgaaatatggcatatatgctgtagagaatgagcatatgaatcggctacagtctcaaagggcaatgcttctgcagggcactgaaagcctgaaccgggccacccaaagtattgaacgttctcatcggattgccacagagactgaccagattggctcagaaatcatagaagagctgggggaacaacgagaccagttagaacgtaccaagagtagactggtaaacacaagtgaaaacttgagcaaaagtcggaagattctccgttcaatgtccagaaaagtgacaaccaacaagctgctgctttccattatcatcttactggagctcgccatcctgggaggcctggtttactacaaattctttcgcagccattgaacttctatagggaagggtttgtggaccagaactttgaccttgtgaatgcatgatgttagggatgtggatagaataagcatattgctgctgtgggctgacagttcaaggatgcactgtatagccaggctgtgggaggagggaggaaagatgaaaaaccacttaaatgtgaaggaacaacagcaacaagaccagtatgatataccaaggtaataaatgctgtttatgacttctttaaatttacatagtactgtagcatattaataccctgtgaactgcaaaaaaccaaatacatttacagtagtattggtcaccaaaatagaggggaaactttacaattgtgagaatgtgtaaatgttctcattaaggcagtattgacccagacaaccatttagtattcatctatcccctcaatgcctcataattctggaatgcctgttgtgaaacatgtcagtgcacagtgtctcctaaattctcacacgtgcttgattttctgattcatctggtgaactgggagtaggaagttggtcatagacaatatgccctccttctcttgtctgaccaaagcttgaagcaatcacatctactgccaggttagctgtagtcttcgcctcttcctctgaggtggccaactgaggattgacttcaacaagatccagtgctgatagcaaccctggaagaacaaagtgtgacaaaacctcaggttcccttgctgctactctcagtgagggtcatcccactgggacagggagaacaagccaaagtaaaaacaagagtccattttatagtagaaaatacctatttttaggaagccccttgcacctcatcctcttggccatgaatttaagttaaaacactgttgtgctatagtagattaaaagaaaccttttaagataatgaaataaaccatccctgttcaactaacataacaggcataattgtcaggcgttctggaaaaggaaaaggcttggtgttgggtgggggaggttttcatcctgcttgttggcaaaatgtatgccacctccagtatgactaggaaccttccagatgcctgcctggaaatgaatcaagtatgaaggcagaggaaatctgccacttgcactagccaaactgcattcccacttttgaactctaatgtgttatctgtatctgttagagcaccacaccatatgccctgaaatgtagttattactgcaaacttcattctcacccctgcaggcctgagctctggaggcaggttccacatctaacaacatctttttgtctcccagcagactgacccagtgtcttgtacttgatcaagagaaaattcagccatatgttaattattttatctggacttcagttaccttctgttaaggtttgagaacttgtgtcaaagttctcggtagtgttcctttggcctggagcaagtggaagggaagcttaaaccagaagaacctatccagacctgctactatgctcacccctctaaatgcctcacttctctatagaatttaactttttagttggttattctggatgaagggtgatctgaacaagctagtattcaggaatacaagtatctaagaatatttagggtggccataaagtctggaaacacaggcaaatgtacctaatggtttattgatattacactatagtacatgatgtgctgaatgccatcatgtccgttcagcatcttcccttattagcaatgcatagttgagtgtacagtgccaaactgcaaccaacaggtgtattactgtagcatttccatcatttcctgcacatggacctgtgttcctgatttgtctctgatttccactgactaaacctgcacctttagcatatcccagaagtggtcatcaaagtttgcactattagaaatatatacatgacttatgtttccagactattgccaccctataaattaagcaaactgctttatgtatctagttgacagcattataacagtgcagtggcacaatcatggctcactgcagcctcaacctcccaagtagttgggacacctggctaattattttttgtagaaacggggtcacactatgttgcccacgctggtcttgaacccctggggtcaagtaatcctcttgccttggcctcccagagtactgggattataggtatgaaccactgtgcctagccccatgagtgtcttttggagtaaaatattgtagcataggaacaaagagacaagccatgccatatataagtgctagaggttattaacccctgctctaagtggtgtttttaggaagcaaagcagagaattgaacccccaagttctctggccaataacctaaggaccactggcaacatctaagattgcagatctgagaattagaccagtactgcctgcctttttgtactgcctaaggttctggcaggctgtggcgctaaggagaccatttctcaatgtgagtttctatcccagctagtcaagggttctctatagccctgaacctttcaatctggggtctctatctataccctagttccatcagatggttactgaagcagtatgatttggtagttctttaaattttggaatgaaaggtcatttgaagtagctttaaaaccagaagctttctgacagaaatggaaactgtttgcaaacaagtatgagttttggaaaagtagccagtcttgataacgtagaattcatcttagtactctttccatcagccattctcatctaactgtatcccccttattagaaatcctttcaggctctagtacaagacctaccctacataaaggacccaagatattgtccagtttgcagatttcttcaagagatcagctttagctccaaattcacaactcccaatgaaccaatctcttagagtgcaaattacagccttgcactcttatcttatcttgccttcttatcttaatctgcctttagataactcaaagaactgcatcagtttgacaatttattcttgtatttaattgtttaaatatacaattttttactcattattaccttagtgtaatttggtaagagccatgtccaagcatgactctaaaggactatatcctttttattagcatggccatataatttttagctacaaaagtttaagcaaaaacaaactctgcaatgatgtggaatagcagaaaagatcctttgcaggcaagagactctagcatatttacctatgtagttaacaggctgcagacctggttgctacatacctgtattgtgtatttcctcagcaatatacatgccttctcgataggttagtcccccgacaacaggagttcctgtggctggagccagtgtagggtcaaatgcatcaatatcaaaactcaaatggattggtctttgtctcctaaaaaggaagaggataaaataatacttaaaataatacttaactggttgtccttggacactcatccttcttatggttgcaactccttgattttgttgctattagtcctagtactttgttaataaagctgttaatacatttccaggcttcctattcttggaagttactgagattggcaatattaacttcctacataccacttcatgatactgccatttgttctgcatacctcagacagactaactccaatgtatatttctgccttacactgggtattagaacctcttatactaataactgtcaatagagagatttcttcacttctagatgagattgggctctcatctagagacaatttaattagacaatttaaattagtctaatttaaattggcttgatgtaagttatggttgctcttattctctgaacgtaacagcagctgaagtgaactctaattttaggtctgcagttttaacatcttccatttctaacttcattatagccccagtgtccaaaggctgaagctaacaactaagtttcttaacagcttatgaaatgacatactaccagataacaattctgacattaatcacccagaagtaaagacttggtattgggaaaatgctcttaaaattaccatttgattagtattcatctgccatctttctacactgccaagatttgcttaatataaaactcagatgaaacaatcgtgaggctgggaagaatgggacagttgaaacaataaatgcttgtcatctcagaagataagcattaaagatggagataaagaaaaattcatgagacagaagatctaggcaatgatttagaggaaacctcctcccaaaaaccccagaggaagaatatgacctgtgtttcaaattttgcctttctgaactatttaaaattatgtgtatgtttttgctttgtattttaaaagtaaagctgctgtcctcaagaaacaggctaaaa

SEQ ID NO: 199033 - DNA, 565 bp, Homo sapiens
  Payload ID: 19267
  Gene Name: vesicle transport through interaction with t-SNAREs 1B
  ENST ID: ENST00000554636
  CDS Start-End: 1-385
cacacctggaggccgaggagacatgaaatatggcatatatgctgtagagaatgagcatatgaatcggctacagtctcaaagggcaatgcttctgcagggcactgaaagcctgaaccgggccacccaaagtattgaacgttctcatcggattgccacagagactgaccagattggctcagaaatcatagaagagctgggggaacaacgagaccagttagaacgtaccaagagtagaagtgacaaccaacaagctgctgctttccattatcatcttactggagctcgccatcctgggaggcctggtttactacaaattctttcgcagccattgaacttctatagggaagggtttgtggaccagaactttgaccttgtgaatgcatgatgttagggatgtggatagaataagcatattgctgctgtgggctgacagttcaaggatgcactgtatagccaggctgtgggaggagggaggaaagatgaaaaaccacttaaatgtgaaggaacaacagcaacaagaccagtatgatataccaaggtaataaatgctgtttatgacttcttt

SEQ ID NO: 199034 - DNA, 576 bp, Homo sapiens
  Payload ID: 19267
  Gene Name: vesicle transport through interaction with t-SNAREs 1B
  ENST ID: ENST00000556461
  CDS Start-End: 1-310
ccggaaggaccttgctaaactccatcgggaggtgagaagcacacctttgacagccacacctggaggccgaggagacatgaaatatggcatatatgctgtagagaatgagcatatgaatcggctacagtctcaaagggcaatgcttctgcagggcactgaaagcctgaaccgggccacccaaagtattgaacgttctcatcggattgccacagagactgaccagattggctcagaaatcatagaagagctgggggaacaacgagaccagttagaacgtaccaagagtagagtaactggtaaacacaagtgaaaacttgagcaaaagtcggaagattctccgttcaatgtccagaaaagtgacaaccaacaagctgctgctttccattatcatcttactggagctcgccatcctgggaggcctggtttactacaaattctttcgcagccattgaacttctatagggaagggtttgtggaccagaactttgaccttgtgaatgcatgatgttagggatgtggatagaataagcatattgctgctgtgggctgacagttcaaggatgcactgtatagcca

SEQ ID NO: 199035 - DNA, 718 bp, Homo sapiens
  Payload ID: 19267
  Gene Name: vesicle transport through interaction with t-SNAREs 1B
  ENST ID: ENST00000555543
  CDS Start-End: 332-511
cggcctttccccaacccggacccggcacttctcgggttccgcgactgccgatcgccccggcgcggcaccgctccctcaggagtcgcctaggccgcgcagtctcccgacttctcgtcaggctttcgcgccggcgctccagcaatcactggctggagaaggtgggcgttccggctcgagaggaccctgccgcggctccggaagagcctcgtcctgggcggcggtggtgcggcggtcgccgttatggccactgggctgggcggctgaccgccgggctaggaaagggcccagggccccgaatctcggtggccgctgctccagcgcggcctgcgccatggcctcctccgccgcctcctcggagcatttcgagaagctgcacgagatcttccgcggcctccatgaagacctacaaggggtgcccgagcggctgctggggacggcggggaccgctggcagagatggaggaggagctacgttatgcacccctgtctttccgaaaccccatgatgtctaagcttcgaaactaccggaaggaccttgctaaactccatcgggaggtgagaagcacacctttgacagccacacctggaggccgaggagacatgaaatatggcatatatgctgtagagaatgagcatatgaatcggctacagtctcaaagggcaatgcttctgcagggcactgaaagcctgaaccgggccacccaaagtattgaacgttc

SEQ ID NO: 199036 - DNA, 3449 bp, Homo sapiens
  Payload ID: 19268
  Gene Name: vesicle-associated membrane protein 1 (synaptobrevin 1)
  Uniprot ID: P23763
  ENST ID: ENST00000361716
  CDS Start-End: 457-810
accacaaatgcctaacaaactgctgaagcgccctccgaagggacagacctcatctccaccccgccccgtccctccgccagactggagcgcaaactatggtcgcattgatcactgaaggatcctcacagcaaccgctcctttccggagtcggatgagaggagagttgtgactggcaattggcaggggcggggcgggctaggcctgtagcgctgggcgaccgtcctgggcatggattgggccgcggggttgtcaccgttatccgggaggcgtggtcagcactaataaaggcggaggccggcgcggcagctgcagtaagttccagcgcagctagaccgcggggtagtcggcgcgaggcggagcttggcagttccgtccacttcagccgcagcgtccctcaccgggtgtctcgccgcagcctccggagaggaacagaccctcactctctctgtcagaaaaatgtctgctccagctcagccacctgctgaagggacagaagggactgccccaggtgggggtccccctggccctcctcctaacatgaccagtaacagacgactacagcaaacccaggcacaagtggaggaggtggtggacatcatacgtgtgaacgtggacaaggtcctggagagggaccagaagctgtcagagctggatgaccgagctgatgccttgcaggcaggagcatcacaatttgagagcagtgctgccaagctaaagaggaagtattggtggaaaaactgcaagatgatgatcatgctgggagccatctgtgccatcatcgtggtagttattgtaagtaagtatcgctgaagttgctggtggggtgaagaggtgggaaggtcctggagtcttctccctgcctgcctgcctgcctggggagtggggctgctctgactgaggtatggagaccgctgctatgggatcgtcacctggttcgggacgggggaagggcagagacaagggatttctttgatggacaagccttccccctgcaacgcattgcagggagatggcgcctcctgttctgaggaagtggggctatgctgtgtgtcactggcttgggttggagggagaccatggggatggggcacttaacaatggagagacctgaatgtctggtaacttggtgtaattcaccctcttgttttctcctgtctctttctcttttccgtctgggacttcctgattcctgtgtccagtctacttttttacttgagaatgtaccaccccttccctgttgtccattgccatccacattcatgtcctctgccctctgtttgctctctcaacacacttccccacccaccgtcctccattccagcccaggcttctccatcacccattcctcctttttcgttgcgttcatttgcactctgtccctcaacactagaaatgctgctcgtggcacaatctaagtcattacccgaagagcaacagctggcgcctcctccctgcctgctttttctgtactctcaagttcccccaaagccccaaagagttggaggccaagggaaggggcagggaggggagtggctgaggcgaagtacccatgaagctgcccagacttgggaggagaagagtatcggtgcccatggtgacttctagaaaacctggccactggtaggagctagggaggggctgggaagatggcagctcactcagtactgcctggtcatgtggagctttccttcctggaccaggcctgaagagggtcctgggggtggaccaaagtccaacttggtttcagtgcagtacccttttcgaaagtaaaaacttgttttttgtagttatttctaatctgttcgtccaggattttccgtgtctttggggatcttacaactttactttgttctccagaggcctggagaacacttagggattgtgaaaatagcaggacttgtttccatcctagaagcagtcccatgtgcttctagctggaaggagctttctcttctttacattttctacagcattctgtatgagggcaccaaataaatccatctagctggtagttttatctagccaaataatttaacctagctcccagttaattgttggcataaagagagagattgcctgttagttatagagaaacagtgagtcaagtgcttaatttgaaagtaacaagctcagaggaagccactccttgccctcgttaaagagggtcctgttcctctcttcctgttgatgaaggagcgtgagggtgttagcagtgtgagatctttggacacccatggaatcctttcctccacaccacccgtgcacttgccaaagacagggatgaggcaagtggttcttcctggggcccggccgatcctcaggatgcagagaagtcatgtagacccaccagccccaccttggggggaggcgtgccagcctgtgtcaggtgtgcttgtgtattgctgtgctgtcatggggccctctccttgagagccgcctctctgttcttcctgtagtatattcccctttgaaccaccctttcctgtctgaattctactttgcctcctttctcttcctcctctttgcatggtttgtgtgtatagacagtggaacctgaggatgggatctgctcagcctatcttcggggcaattgctgagcttcaggatgggctattaatgtgggataagcccaggtgcaaggggaggagggcaggctgggaacagagcggagaatgcccatggccctttattccttcttccctcggtccacgaacaggaagaggctgaggccatgctgggcagggtctggatgcccactttccatgcagcagcatttcattgctcaaaaccatccttcctttcctttcgcccttgtttcccacattcccttcgtcctgcccaagggcgggactgaagagctggaagaaagcagtcagtaccctcccaacggcccccctcgaaggtctccactctcctctgggctcctccttgcctaatgcagggggtcaccgctggagaagaaccaccactgtcctcgatgtgtcccaagcctggagcgaatccgtcctcttggctctcccagccctatcacaggaatcattcctgggtttctgtccctctgaggctcaccaggtgtagttggccttgttctttgggggtattagcccttctactttctttctcacccaccctgtaccctcttctgtgtgtctctgctatccccctttcctcccaccacccatgtgcatgagcaaatgtgcaacaaaaccctgggactttgcagtcaaatgaagctgagcttcccacatcccgttcttcggtttgccatgagacgatgtggggtttccactgtgtgtctgtcatcacctctttgtctttttttcctaaccctgatctcatacttgtatagagtaataacaacagttgtacttccaccaaaggcatgtggcatatttaccaatgtcatgtattctgaacaaaggcaaaaaatacaaattcctaccattaaa

SEQ ID NO: 199037 - DNA, 1113 bp, Homo sapiens
  Payload ID: 19268
  Gene Name: vesicle-associated membrane protein 1 (synaptobrevin 1)
  Uniprot ID: P23763
  ENST ID: ENST00000396308
  CDS Start-End: 147-503
agtaagttccagcgcagctagaccgcggggtagtcggcgcgaggcggagcttggcagttccgtccacttcagccgcagcgtccctcaccgggtgtctcgccgcagcctccggagaggaacagaccctcactctctctgtcagaaaaatgtctgctccagctcagccacctgctgaagggacagaagggactgccccaggtgggggtccccctggccctcctcctaacatgaccagtaacagacgactacagcaaacccaggcacaagtggaggaggtggtggacatcatacgtgtgaacgtggacaaggtcctggagagggaccagaagctgtcagagctggatgaccgagctgatgccttgcaggcaggagcatcacaatttgagagcagtgctgccaagctaaagaggaagtattggtggaaaaactgcaagatgatgatcatgctgggagccatctgtgccatcatcgtggtagttattgtaatctacttttttacttgagaatgtaccaccccttccctgttgtccattgccatccacattcatgtcctctgccctctgtttgctctctcaacacacttccccacccaccgtcctccattccagcccaggcttctccatcacccattcctcctttttcgttgcgttcatttgcactctgtccctcaacactagaaatgctgctcgtggcacaatctaagtcattacccgaagagcaacagctggcgcctcctccctgcctgctttttctgtactctcaagttcccccaaagccccaaagagttggaggccaagggaaggggcagggaggggagtggctgaggcgaagtacccatgaagctgcccagacttgggaggagaagagtatcggtgcccatggtgacttctagaaaacctggccactggtaggagctagggaggggctgggaagatggcagctcactcagtactgcctggtcatgtggagctttccttcctggaccaggcctgaagagggtcctgggggtggaccaaagtccaacttggtttcagtgcagtacccttttcgaaagtaaaaacttgttttttgtagttatttctaatctgttcgtccaggattttccgtgtcttt

SEQ ID NO: 199038 - DNA, 1068 bp, Homo sapiens
  Payload ID: 19268
  Gene Name: vesicle-associated membrane protein 1 (synaptobrevin 1)
  Uniprot ID: P23763
  ENST ID: ENST00000400911
  CDS Start-End: 123-473
gcggggtagtcggcgcgaggcggagcttggcagttccgtccacttcagccgcagcgtccctcaccgggtgtctcgccgcagcctccggagaggaacagaccctcactctctctgtcagaaaaatgtctgctccagctcagccacctgctgaagggacagaagggactgccccaggtgggggtccccctggccctcctcctaacatgaccagtaacagacgactacagcaaacccaggcacaagtggaggaggtggtggacatcatacgtgtgaacgtggacaaggtcctggagagggaccagaagctgtcagagctggatgaccgagctgatgccttgcaggcaggagcatcacaatttgagagcagtgctgccaagctaaagaggaagtattggtggaaaaactgcaagatgatgatcatgctgggagccatctgtgccatcatcgtggtagttattgtaaggcgggactgaagagctggaagaaagcagtcagtaccctcccaacggcccccctcgaaggtctccactctcctctgggctcctccttgcctaatgcagggggtcaccgctggagaagaaccaccactgtcctcgatgtgtcccaagcctggagcgaatccgtcctcttggctctcccagccctatcacaggaatcattcctgggtttctgtccctctgaggctcaccaggtgtagttggccttgttctttgggggtattagcccttctactttctttctcacccaccctgtaccctcttctgtgtgtctctgctatccccctttcctcccaccacccatgtgcatgagcaaatgtgcaacaaaaccctgggactttgcagtcaaatgaagctgagcttcccacatcccgttcttcggtttgccatgagacgatgtggggtttccactgtgtgtctgtcatcacctctttgtctttttttcctaaccctgatctcatacttgtatagagtaataacaacagttgtacttccaccaaaggcatgtggcatatttaccaatgtcatgtattctgaacaaaggcaaaaaatacaaattcctaccattaaa

SEQ ID NO: 199039 - DNA, 747 bp, Homo sapiens
  Payload ID: 19268
  Gene Name: vesicle-associated membrane protein 1 (synaptobrevin 1)
  ENST ID: ENST00000535180
  CDS Start-End: 115-465
gtcggcgcgaggcggagcttggcagttccgtccacttcagccgcagcgtccctcaccgggtgtctcgccgcagcctccggagaggaacagaccctcactctctctgtcagaaaaatgtctgctccagctcagccacctgctgaagggacagaagggactgccccaggtgggggtccccctggccctcctcctaacatgaccagtaacagacgactacagcaaacccaggcacaagtggaggaggtggtggacatcatacgtgtgaacgtggacaaggtcctggagagggaccagaagctgtcagagctggatgaccgagctgatgccttgcaggcaggagcatcacaatttgagagcagtgctgccaagctaaagaggaagtattggtggaaaaactgcaagatgatgatcatgctgggagccatctgtgccatcatcgtggtagttattgtaagaagaggctgaggccatgctgggcagggtctggatgcccactttccatgcagcagcatttcattgctcaaaaccatccttcctttcctttcgcccttgtttcccacattcccttcgtcctgcccaagggcgggactgaagagctggaagaaagcagtcagtaccctcccaacggcccccctcgaaggtctccactctcctctgggctcctccttgcctaatgcagggggtcaccgctggagaagaaccaccactgtcctcgatgtgtcccaagcctggagcgaatccgtcctc

SEQ ID NO: 199040 - DNA, 2153 bp, Homo sapiens
  Payload ID: 19269
  Gene Name: vesicle-associated membrane protein 2 (synaptobrevin 2)
  Uniprot ID: P63027
  ENST ID: ENST00000316509
  CDS Start-End: 97-447
atctttccgtcccgggcagccagcgccagtcggagccagcgcgagccgccgccgccatcactgccgctgccaagtcctccacccgctgcccccgccatgtctgctaccgctgccacggccccccctgctgccccggctggggagggtggtccccctgcaccccctccaaacctcaccagtaacaggagactgcagcagacccaggcccaggtggatgaggtggtggacatcatgagggtgaacgtggacaaggtcctggagcgagaccagaagctgtcggagctggacgaccgtgcagatgcactccaggcgggggcctcccagtttgaaacaagcgcagccaagctcaagcgcaaatactggtggaaaaacctcaagatgatgatcatcttgggagtgatttgcgccatcatcctcatcatcatcatagtttacttcagcacttaaatccccgaggagtctgccctgcctagagaagggcctctcccccaaccctcagccgttcctccacctctcagccatatctttcagcccccactcccctggatccgtgtgtgtgtgtgtccgtgtgtgtgtccccctgtaaatagccagctgttatttatacatatataatattatatatatttggtctgtttgtagttttattactagatgatttttccggttgtccttaacaccccttcctgaggttcccttcacccctctctcttgccttccttccctttccctttcttcctgactagccccaagtcccttcatttgcatctgctatgcaatagtccctctcctttccttcttcttccctcagatttagctgatccttcctcccaccctggccttcctttcctctttcctcctcactctccccgtcatgctccctctgccccgccctcaaaaaaaaaaaaaaaaaaaaaaaaacaacagcacctgtccaggcttccttaggtacatcttctttgtatccattgggaggctctgagactggccccacttggtcctaagaatcccaaggtctttgggagcgtccagcatgttaattagcgtatcattacatactgctatccctttccatttctttttgttccatcactcttctctcaacctgtgtttctttttttactgaggagttagtccccattagttcttgtatcacattttcatttgcacgacattactcgcaggtggtggggagcctgggcttttggggaaccaggctgctctggtccccagcattgcctcctcctagcccctctagtccagtttgcctcccttaccctcattttccaaacctcttgtaccctcctctccctcccccagctggtatgtaagtgtcttgaagttcagtatgttatgatggaccaataattctgccacttcgggtttctccctacattcctgctccccagttttcatgtggggtactcaactgacattcccatggggtttccctcccatctgcctgatccacctcctcctcccaccaggagagttgggggttggccacaattgatctcttgtgagaggggtggctaccagtgtgtgtgtgggggtcatcactgccttggggaggagtggggcagggcagagaatccccccaattcctgcctgaaatctctggcctcacccctgctgggggttggactgaaaaccctcctccccaatttggggggtgttgccccatcactgcccagctcctctgactgccccccctgaatttagggtgggggtactagtcactgccaatgtgtgtatgggacttgctggaaaacggggatgcttgcccctctccaggactattgagcccagagagagctgtcctctcattgggtgaactgattgaggaagggtctattgtctttttaaatggcacaattttaagggtttgagggtacagtcccttaacctgccacgggagggggcccccaaactttcttccccccacacttctggttttctgtgtggagggggagcagggatatctaagctgtggtgtgaaagggtaggagagatgctggaggtgggggtgctgtgttttagaccccccatattatcccagtgtcccctgcccccctcttcccccaccccatgcccccaattctgtggcgcatccagattgtgaaaatgtacaataaatgtgtaatgagtaacca

SEQ ID NO: 199041 - DNA, 874 bp, Homo sapiens
  Payload ID: 19269
  Gene Name: vesicle-associated membrane protein 2 (synaptobrevin 2)
  ENST ID: ENST00000488857
  CDS Start-End: 482-838
agccgccgccgccatcactgccgctgccaagtcctccacccgctgcccccgccatgtgagtcggccgcccgccaccctcaccgcgcttccctgcgccggccgccgcccttggcaaccggccgtcgggagtgcccggggtctctcctgcgttccccgcgccccggggccaggcccaagccggtgactgcgcgcgggcggccgaggagccccgcgtcccgggctggccggctcgggcgatggccgcgggaaggagcggacccagtgtcctcctgcccctccccgcccctgtcaccgcggccgcctgtcttttcgggtcgacccggatcgcatctgtgaggtcgccctcagttgacaggcggggaaactgaggccgggggggcctcgctcaaggtcacgcagctcatcggcggcagggctggaccgagaccagggcttacatcgggtggccttcctcccgaaaaggaggactggagggacgaggatggacaggtctgctaccgctgccacggccccccctgctgccccggctggggagggtggtccccctgcaccccctccaaacctcaccagtaacaggagactgcagcagacccaggcccaggtggatgaggtggtggacatcatgagggtgaacgtggacaaggtcctggagcgagaccagaagctgtcggagctggacgaccgtgcagatgcactccaggcgggggcctcccagtttgaaacaagcgcagccaagctcaagcgcaaatactggtggaaaaacctcaagatgatgatcatcttgggagtgatttgcgccatcatcctcatcatcatcatagtttacttcagcacttaaatccccgaggagtctgccctgcctagagaagggcct

SEQ ID NO: 199042 - DNA, 1479 bp, Homo sapiens
  Payload ID: 19269
  Gene Name: vesicle-associated membrane protein 2 (synaptobrevin 2)
  ENST ID: ENST00000404970
  CDS Start-End: 214-420
gggaccccaggcttcctctgagacatccaccagcggtgatgggttgggaccaatctcccccactcctctccaccctagcagtctgctaccgctgccacggccccccctgctgccccggctggggagggtggtccccctgcaccccctccaaacctcaccagtaacaggagactgcagcagacccaggcccaggtggatgaggtggtggacatcatgagggtgaacgtggacaaggtcctggagcgagaccagaagctgtcggagctggacgaccgtgcagatgcactccaggcgggggcctcccagtttgaaacaagcgcagccaagctcaagcgcaaatactggtggaaaaacctcaagatgatgatcatcttgggagtgatttgcgccatcatcctcatcatcatcataggtgagtagggtgagaatggccggggccctttccctggagaggtttccccagtggattctaggttttgaaggtcattaatctagtttttactcttcagccaaaaacacatatagctgctaatggcaattctgattcatctagagccaaaaactttgatgttatttagcctgcattttgcctagttcttggcagtcttgttaacatttggaaataggaaagctggtgtatccattgaggaccctttaggcctaagagcccagtctgagaaccctggaattgaggagtgggagaaaggaaaggaccaggggcttgagacatgaccaggaagccaaccaccccattatttgagagcttgcggtctcagaggctcagaggattagggtctgtggcttcaaggccataccatggagcggaagggacctcagaacctacctgtctagccccttgctttgtagatggaaaaactgagtccaagagagggtgtcagccagctggggagtggggaggattggagcagggccaggcctgacacactgctttcttgttctctctctttctctcccctctccctcttcctcatcttcttcccctctctccacagtttacttcagcacttaaatccccgaggagtctgccctgcctagagaagggcctctcccccaaccctcagccgttcctccacctctcagccatatctttcagcccccactcccctggatccgtgtgtgtgtgtgtccgtgtgtgtgtccccctgtaaatagccagctgttatttatacatatataatattatatatatttggtctgtttgtagttttattactagatgatttttccggttgtccttaacaccccttcctgaggttcccttcacccctctctcttgccttccttccctttccctttcttcctgactagccccaagtcccttcatttgcatctgctatgcaatagtccctctcctttccttcttcttccctcagatttagctgatccttcctcccaccctggccttcctttcctctttcctcctcactctccccgtcatgctccctctgccccgccctc

SEQ ID NO: 199043 - DNA, 557 bp, Homo sapiens
  Payload ID: 19269
  Gene Name: vesicle-associated membrane protein 2 (synaptobrevin 2)
  ENST ID: ENST00000481878
  CDS Start-End: 70-411
agtcggagccagcgcgagccgccgccgccatcactgccgctgccaagtcctccacccgctgcccccgccatgtctgctaccgctgccacggccccccctgctgccccggctggggagggtggtccccctgcaccccctccaaacctcaccagtaacaggagactgcagcagacccaggcccaggtggatgaggtggtggacatcatgagggtgaacgtggacaaggtcctggagcgagaccagaagctgtcggagctggacgaccgtgcagatgcactccaggcgggggcctcccagtttgaaacaagcgcagccaagctcaagcgcaaatactggtggaaaaacctcaagatgatgatcatcttgggagtgatttgcgccatcatcctcatcatcatcataggtgagtagggtgagaatggccggggccctttccctggagaggtttccccagtggattctaggttttgaaggtcattaatctagtttttactcttcagccaaaaacacatatagctgctaatggcaattctgattcatctagagccaaaaacttt

SEQ ID NO: 199044 - DNA, 2205 bp, Homo sapiens
  Payload ID: 19270
  Gene Name: vesicle-associated membrane protein 3
  Uniprot ID: Q15836
  ENST ID: ENST00000054666
  CDS Start-End: 116-418
agtgacgtctttgccccgcgccgcgccgtcccacccatctccctggcctccggtcccaacttcgcttctctgctgaccctctctcgtcgccgctgccgccgccgcagctgccaaaatgtctacaggtccaactgctgccactggcagtaatcgaagacttcagcagacacaaaatcaagtagatgaggtggtggacataatgcgagttaacgtggacaaggttctggaaagagaccagaagctctctgagttagacgaccgtgcagacgcactgcaggcaggcgcttctcaatttgaaacgagcgcagccaagttgaagaggaaatattggtggaagaattgcaagatgtgggcaatcgggattactgttctggttatcttcatcatcatcatcatcgtgtgggttgtctcttcatgaagaaccagcggaactcaaaactgctgttcaagaaacctcttcaagacttttgacttagaacctgctatattatcaagcttacctactgttatctctaaaattttttttgtgttaatgtaaagttgaatttctaggaaacgtgcctttgttttttaatatgcactccaaattagaaggccggccccgtccacattttgcacagtgcctttacagatttacgtatgggctgatgaagaggccttcttaagttccagagtgctataatctagatgtaatgttgtcactaattaattgccattactcccagttagttacccttgtcatttggcattattttcagaaccacattttaaacctttgggtaatcagatttccaacttatgccttccagaaaaaaacactactgcctaacacaaatctgtgataacaacaggctgtgccttattttgataattttctgattccctagaagagaaccctctactttttgtaagcactactgactctcgctgtatttaagatgctggtgaagagcttttgctcttgcattagatttgaagatgtttacattgttgttattgttatgtatcacttgctaaaaatattgttttaatcagagataacctctttaaaaaaatttttaaagaactatggctatgaccaaagcttctattttgccaaaaagttaaataccgataaaatggccttaagtgtattcctgacagttaaattcagaaacgtgccaaatggaactcaaggtgccccttcagaattaaaatcattaccttgtgtgtgaaccttctacatcttcataggcctttcttccttttgaaaggctgtagacagtgtggctccccttctgattcagtattttgcatgggggttagagaaggtttgaggtagactctgaccgtctcataaaagagttctacccagcagttggcagattatcagctgtggactccagcatgtttctgataattatgcaagcaacaattctgtagcctcaagtaagaccacctgtgaacttgatcattatctggcccaaatatgaagataaactataactttggagtttgtttcctatttgtattcacattctgcttcctaaatcagttttctaaattatgcctgcaattaggcattggtcaggggtgaatggctcttttcacagagagtagccaaccagagacctttgctttgatatcatcaactgcagagaatgctgttgatgggaatgctggaagcagaaactttgtcatcggaaaaacttttcttgtatgcatgagactcaacatcaggatccacagcttaaagatgggaattcaggtatgaaagaaaacaggcaaggaggcactgagggagaaagacacagactttatcgctctgtggctcattgttactggaatattctaaaactcttgttcacatgctattatgacttataaagcagcaacagctgaggcgcaccaggacacagcttccatttctttaacgtctgttcccttaacatcgctgaaatgatttactgttgaagagatgccttgcggtgtggccagctgtgaggagaaagcagctggcagtgttaggacattagtccaccttcagcgcagggtctctggccgggtctgactcagaaaccttggtactcgccccttggccacagtgcccagacccatgtaacccactggctcctgcattaacccagaaatacctcgcttctatctgtgcacttagctgggaacttacccactgtaatcacctaaataaagtgtttataaacatga

SEQ ID NO: 199045 - DNA, 954 bp, Homo sapiens
  Payload ID: 19270
  Gene Name: vesicle-associated membrane protein 3
  ENST ID: ENST00000470357
  CDS Start-End: 575-793
ggtgaaaccccgtctctactaaaaaatacaaaattagccgggcgtggtggcacatgcctgtaatcccagctgcttgggagactgaggcaagagaattgcttggacccaggaagcggaggttacagtgagccgagatcgcgccattgcactccagcccgggcaacaggagcgaaactccgtctctcaaaagagggggaaaaagaaagagtaccttcctaaaagaggaggcatttcttcaacacacctttccactcacaccacccactccctgcatcccagtgttcctgactctgtttctgtaaattaatctatttttccatattggaaaaagggcattctgtaactgtttgtaactatgaaaacagttccttccacaatgaaaagatcaggaaagtactgagtacattcaagcagatgtgtgccttagaacaagtttcaaaaaaggacagtagagcttacctatcgtgggatcagatacttcagggatacaaagtctacaggtccaactgctgccactggcagtaatcgaagacttcagcagacacaaaatcaagtagatgaggtggtggacataatgcgagttaacgtggacaaggttctggaaagagaccagaagctctctgagttagacgaccgtgcagacgcactgcaggcaggcgcttctcaatttgaaacgagcgcagccaagttgaagaggaaatattggtggaagaattgcaagatgtgggcaatcgggattactgttctggttatcttcatcatcatcatcatcgtgtgggttgtctcttcatgaagaaccagcggaactcaaaactgctgttcaagaaacctcttcaagacttttgacttagaacctgctatattatcaagcttacctactgttatctctaaaattttttttgtgttaatgtaaagttgaatttctaggaaacgtgcctttgttttttaatatgc

SEQ ID NO: 199046 - DNA, 5159 bp, Homo sapiens
  Payload ID: 19271
  Gene Name: vesicle-associated membrane protein 4
  Uniprot ID: O75379
  ENST ID: ENST00000236192
  CDS Start-End: 388-813
gacaaccagtggttgttcctcccctaaagcacagcataaatttggagagatgcatctaaactgcgtgtgggttcgggctcttttaggtgaatagggctcggcggatcgacttcctcgattatctccgtgccctggacccgccccctccgcctggcgccaggccgccgagcgccgatcggctcgatgagcggaggcgctgctgcggcgctgcggccgacgccgggtccgcaccaactgtctccccctcccagcttcttacctcggcttcctactccttcccccgcccgcccagcaccgccagcccgggagagctgccgggagttccccgggagcctcaggtggtgactatcctgttgagaagcaaaagatactttgcaagtaaaaaatatgcctcccaagtttaagcgccacctcaatgatgatgatgtcacaggttctgtgaaaagtgaaaggagaaatcttttggaagatgattcagatgaagaagaggacttttttctaaggggaccatctggaccaagatttggacctagaaatgataaaattaagcatgttcagaatcaagtggatgaagttattgatgtcatgcaagaaaatattacaaaggtaattgagagaggggagagactagatgaactacaggacaaatcagaaagcttatcggataatgcaacagcttttagcaacagatccaaacaacttcgaaggcaaatgtggtggcgtggatgcaaaataaaagccatcatggctttggttgctgctatccttttgctagtgattatcattcttatagtcatgaaataccgtacttgatttgatgacagagatcttcattaaacaagatctgggacagtaataaaagattgctgcataatttaaatgaaacctatgtgtatataactttcaaaacttctttttcaagaaactaagaggcaagtatcacttcaaattggaacgttgagaatgtccaattatcttctccctttctaacaaaatgttcttttaataattatgtttaaggcaaagagaactagcctctatttttccatatttcaaggatctaatttgaaactagatacttgccagttcattatttgtgtatataaacactgattataatatttcatattaatattttaatggcataaggacttgcattattgcattagggagcgggtcatgctgggggtcaggaagcctgtgtagagtaccaaattatatgctgaaagagatgcataaccattctgtcaatatttgcagaaatatagttcctttcatattacagttgttttgcaagcaatttccacatttataggtgtaacaaaagctaaatgttgtaaatgttgttgccctcaggtataactaaaaacattccagtaaatatatttttgactgtgtaagagaatgtgtagtaatttttttggcattggattatggaaatggaaatttttaaacagtgtgaaaaaacatggtatggcatcataaaactggagataataaagttattgaagagtgtcattggagtatttgaaaatgaccaatatatagctgccagtcatggtccagtctgttttctgttaaactccaataaagagagaccagtcagtcctaatgtgagtaaatgaaatttacaggtaacttacttactccttaattttattttagttaatagcctctaacttccaactatctcatttaccaaaagtacaaaaagtagcaaaaccatctattaatactttgaattttatatctttgcatttcctgttcatccttgaggagatgtatgttgcacaatcaaattttgcatcagccaacagtaatgagtagtagaaagtcaggaacctatgtgtatatatatatatatatatatatatatatatatatatatatatacacacaaacacacacacacacacacacacacacgcacacatatgataatcagtcagtcggtaaccaaatgctagagagtgaccattaacctaagcctgtttttataatgaaaaaatgtgttaactttaaaatatgccaacctccttgtgtcttttaaacaagtcagagtgaaaatacattgtcccctaaggtgtggggagaggaagctttataataaaattagtgattctgcagaaacttgtgcactggatatcttgacaatatgaatataaaactccctaaattaaaaatagggttaatagaaattatcagtatttaaatagggaaaaatgattttatgtttattttatttaggttttatttctttggtcatcttaatgcaaaatgaataaagcatagaatctgggtttggtgtttttttgtctgtttttaaaattctacaggattattactaggaggcaaaaaatgctgtttagaatggaaaaaatttgaagagagaaagcagactgagacactcaagacacctgcaagttatctaagaagatctaaatagaattactaaattttatagtttgcttagagcatttagaaggagataaaggtcttacatactatagtgtatattgtctttggtctctatgctctttgtaaatgtcaattaatataaacagcatctgaacagctaataaatcttttaagttaagatacccagaaaaatgagcatttttagaatttcagtagctaataattcaggaatggaaatattttaactgaatggacagaatcagtcctaacatttgtatgtatgtcctttatttgaattggaactaggctcataagtggttaattttccattagttgatgtagaaatctggtttctccataatatctacaagtgaagatgaagattacttctcaaaaagtatccatatttccagtgttccttttaataaaatatgccacttttaaataaataattacaaaatgtaaaattataaaatttttaaatttaaataataagtaacagtaaaattttttgacaatatatatgtcactgtctttgtaatttaaacatattgctgcctgggatatgggtaacagaattatcactcatggaactttgtagtagtgatggcttggtttgtaattcatcatttcatctttcttggtcttgattaatcctgaaatccttaaaatggctggcatggttatgactttattgtggtaaccttggagatataagccctcttacgatcaaaaacagaagaaaaaaatatattgttcaaactgatgccaggcctacctttattccctcccttaattactttttttctcattcagctcagatcatcctgcacttgaaaaatgaagttttaccaccatcaaaactatcattatttaacaacaagtgaagatcaacagaaaaattcaagtagctttgcaaatactagttgatactcagtgaaatcacgtcactattttgatgcctgaatccatacctttgtgatttatgtttaattacagaagcctattgccttgcagcaattttgttgttataatactgattaattggttactccttcttattataactcagtaatacctgtggtcatttggttcctctatcctgacaaagttcactggaaattgccctcagattttataaactgggggatttcttaattagataaaagttcattactgaagatggaatattatataagatggaggaagggtaattaatagacatgagatatagaaatactttgttagccctgctatagattgcctattgtagtctttctgtgcatttcaatagtctgtattaggaaattataacttcagcacttttgatagcaaaaattggcatctttcaattctgtatagtatgtgactatcctgtaaatgataatatgtgtacagactgagaaggcaggaatataaagtaattgaaatctctcattgccggtatactctaaaacatgcttgatgccttgtcagcatcattgcacacattgactctgtatttacatctgtatatacactatgattagaaaatatgcaagaaattgtttttccatgttaagaacaaatgccattagaagatgtccccttaattgtattgtcagagtattactatgtcaaggatgactgttctgttaacctaattttgtgttttcacatggaaatgtgattggactccatttttctgtgagttgagagtaagagcataagtcagtttgaaagcatttacaagtttgttttagaatgtagtaagggctgaaaggtgctctacttcttaacttgttttttccatgttgtagacaaatgaaatttgtctaaatgcttttgtctaaaaatgcatttgtctaaatgctttagattgatgtagggtttagatcctctttaatactttgagatagtcttattctgattttttttttcttctggaaaccaagtagaattagggatgggaatacaaatgcatttattctggcttctgttttattccaagaagcttcttggaacaaatcagtaggaattgaaaagaaagcatgaccaacccaattacaggggataaatgtaagcttgttaaagtaagcaccacaccatgtttctgtctccccagcacccagcacagtgctgtgaaccttggcagatgctagataaatgtgtgttgaatgaatgtgcctatgaagccacaaagatgccacatgttagtatatcagtgagaggtgactccacagtgctctctggagaagcaatatgagtgactgaagagtggggccttttgcttttgcctggatataggggtgctcttctactgtaattgggtgtggaaaaactctggctttatggtattccattaggttcttttcatttaaagtagtcttaaaatcaaagtatccaatattttaaagccacaaagtagattacataattagcagagattttagtcagtaaaatgttagaaatcaaactataagaaaattcaagtcctttattttgtgtcttgggtatatgtcattattttaaattccacactcccttatttaatcactttggtaagtgcctttgatgttttgaaatgtatagtgggagatgagcaaatgtaaatgtcatgtgccctgttccctagcttctcaattcctcataaccatttttaccagtgttgcaaagtttagacctttgtgttaatatcagaagtgtatttgtagcccctccatagtgaacaatgaaataaactatttcatagaaaacaaaaa

SEQ ID NO: 199047 - DNA, 1193 bp, Homo sapiens
  Payload ID: 19271
  Gene Name: vesicle-associated membrane protein 4
  Uniprot ID: O75379
  ENST ID: ENST00000367740
  CDS Start-End: 215-637
gatcggctcgatgagcggaggcgctgctgcggcgctgcggccgacgccgggtccgcaccaactgtctccccctcccagcttcttacctcggcttcctactccttcccccgcccgcccagcaccgccagcccgggagagctgccgggagttccccgggagcctcaggtggtgactatcctgttgagaagcaaaagatactttgcaagtaaaaaatatgcctcccaagtttaagcgccacctcaatgatgatgatgtcacaggttctgtgaaaagtgaaaggagaaatcttttggaagatgattcagatgaagaagaggacttttttctgggaccatctggaccaagatttggacctagaaatgataaaattaagcatgttcagaatcaagtggatgaagttattgatgtcatgcaagaaaatattacaaaggtaattgagagaggggagagactagatgaactacaggacaaatcagaaagcttatcggataatgcaacagcttttagcaacagatccaaacaacttcgaaggcaaatgtggtggcgtggatgcaaaataaaagccatcatggctttggttgctgctatccttttgctagtgattatcattcttatagtcatgaaataccgtacttgatttgatgacagagatcttcattaaacaagatctgggacagtaataaaagattgctgcataatttaaatgaaacctatgtgtatataactttcaaaacttctttttcaagaaactaagaggcaagtatcacttcaaattggaacgttgagaatgtccaattatcttctccctttctaacaaaatgttcttttaataattatgtttaaggcaaagagaactagcctctatttttccatatttcaaggatctaatttgaaactagatacttgccagttcattatttgtgtatataaacactgattataatatttcatattaatattttaatggcataaggacttgcattattgcattagggagcgggtcatgctgggggtcaggaagcctgtgtagagtaccaaattatatgctgaaagagatgcataaccattctgtcaatatttgcagaaatatagttcctttcatattacagttgttttgcaagcaatttccacatttataggtgtaacaaaagctaaatgttgtaaatgttgttgccctcaggtataactaaaaa

SEQ ID NO: 199048 - DNA, 1738 bp, Homo sapiens
  Payload ID: 19271
  Gene Name: vesicle-associated membrane protein 4
  Uniprot ID: O75379
  ENST ID: ENST00000474047
  CDS Start-End: 201-626
gcggaggcgctgctgcggcgctgcggccgacgccgggtccgcaccaactgtctccccctcccagcttcttacctcggcttcctactccttcccccgcccgcccagcaccgccagcccgggagagctgccgggagttccccgggagcctcaggtggtgactatcctgttgagaagcaaaagatactttgcaagtaaaaaatatgcctcccaagtttaagcgccacctcaatgatgatgatgtcacaggttctgtgaaaagtgaaaggagaaatcttttggaagatgattcagatgaagaagaggacttttttctaaggggaccatctggaccaagatttggacctagaaatgataaaattaagcatgttcagaatcaagtggatgaagttattgatgtcatgcaagaaaatattacaaaggtaattgagagaggggagagactagatgaactacaggacaaatcagaaagcttatcggataatgcaacagcttttagcaacagatccaaacaacttcgaaggcaaatgtggtggcgtggatgcaaaataaaagccatcatggctttggttgctgctatccttttgctagtgattatcattcttatagtcatgaaataccgtacttgatttgatgacagagatcttcattaaacaagatctgggacagtaataaaagattgctgcataatttaaatgaaacctatgtgtatataactttcaaaacttctttttcaagaaactaagagctcagatcatcctgcacttgaaaaatgaagttttaccaccatcaaaactatcattatttaacaacaagtgaagatcaacagaaaaattcaagtagctttgcaaatactagttgatactcagtgaaatcacgtcactattttgatgcctgaatccatacctttgtgatttatgtttaattacagaagcctattgccttgcagcaattttgttgttataatactgattaattggttactccttcttattataactcagtaatacctgtggtcatttggttcctctatcctgacaaagttcactggaaattgccctcagattttataaactgggggatttcttaattagataaaagttcattactgaagatggaatattatataagatggaggaagggtaattaatagacatgagatatagaaatactttgttagccctgctatagattgcctattgtagtctttctgtgcatttcaatagtctgtattaggaaattataacttcagcacttttgatagcaaaaattggcatctttcaattctgtatagtatgtgactatcctgtaaatgataatatgtgtacagactgagaaggcaggaatataaagtaattgaaatctctcattgccggtatactctaaaacatgcttgatgccttgtcagcatcattgcacacattgactctgtatttacatctgtatatacactatgattagaaaatatgcaagaaattgtttttccatgttaagaacaaatgccattagaagatgtccccttaattgtattgtcagagtattactatgtcaaggatgactgttctgttaacctaattttgtgttttcacatggaaatgtgattggactccatttttctgtgagttgagagtaagagcataagtcagtttgaaagcatttacaagtttgttttagaatgtagtaagggctgaaaggtgctctacttcttaacttgttttttccatgttgtagacaaatgaaa

SEQ ID NO: 199049 - DNA, 689 bp, Homo sapiens
  Payload ID: 19272
  Gene Name: vesicle-associated membrane protein 5
  Uniprot ID: O95183
  ENST ID: ENST00000306384
  CDS Start-End: 84-434
gctcttcctccggggccgctggcactgcggccgctccgcaggcagagaagccgggagcgggcgaggcggcggcggcagcagcgatggcaggaatagagttggagcggtgccagcagcaggcgaacgaggtgacggaaattatgcgtaacaacttcggcaaggtcctggagcgtggtgtgaagctggccgaactgcagcagcgttcagaccaactcctggatatgagctcaaccttcaacaagactacacagaacctggcccagaagaagtgctgggagaacatccgttaccggatctgcgtggggctggtggtggttggtgtcctgctcatcatcctgattgtgctgctggtcgtctttctccctcagagcagtgacagcagtagtgccccacggacccaggatgcaggcattgcctcagggcctgggaactgacccagctggtcctgaaggagaagccaaatggctgcactggccgattctggtctccagaggaccttggtgtttgctctcccttgacccaccccagtgagtgccaaagggcagccccaacatgtgcacccctgcatttcctgtcatgccacagactggcccttgagggcagcctgctgtactggccatgctgggccagccccacctggagctcagtaaaaactgctgtttgattaaaagctggtatctgtgtgtgaa

SEQ ID NO: 199050 - DNA, 2496 bp, Homo sapiens
  Payload ID: 19273
  Gene Name: vesicle-associated membrane protein 7
  Uniprot ID: P51809
  ENST ID: ENST00000262640
  CDS Start-End: 84-866
ggcagttggcgaccctgcactgacccgcgtccctccgtcccgagcccgcgcgccctcagagggtgcccggacagactgaagccatggcgattctttttgctgttgttgccagggggaccactatccttgccaaacatgcttggtgtggaggaaacttcctggaggtgacagagcagattctggctaagataccttctgaaaataacaaactaacgtactcacatggcaattatttgtttcattacatctgccaagacaggattgtatatctttgtatcactgatgatgattttgaacgttcccgagcctttaattttctgaatgagataaagaagaggttccagactacttacggttcaagagcacagacagcacttccatatgccatgaatagcgagttctcaagtgtcttagctgcacagctgaagcatcactctgagaataagggcctagacaaagtgatggagactcaagcccaagtggatgaactgaaaggaatcatggtcagaaacatagtctgtcaccttcaaaactaccagcagaaatcttgctcgagccatgtgtatgaagaacctcaagctcactattatcatcatcatcgtatcaattgtgttcatctatatcattgtttcacctctctgtggtggatttacatggccaagctgtgtgaagaaataggaaagaagaagttaccattaaccaaggatatgagagaacaaggagttaaaagcaatccatgtgactcaagcctttcacatactgacagatggtatctgccagtctcttcaaccctcttctcactttttaaaatcttgttccatgcctccaggtttatctttgtcttatctaccagtttattcctgtgaacttcagattgaaccattcattgcagcagtagccttaaaaaggcttttgtttatttctttggtttgttaactagtgtcatctatttagagaaacatttttgtttttaattgctcaaagctgtcgccgctagtcttatgagctatctactaaaactatggagaaactttgtatgtgcacacaaaagtattcaagagacagtattgctaacatctcatcttaatgtcttttgttattgagaagttttaggtgcttcaaaacaatataaatggataatagttgttatttggggaattgtaatgatgttggtgctgcttccttctaagagctcagacaagtaaagtatgaaacattcttatttcagttagatggggaacattttgctagcccattagaagcacacagaattatccttgtcctcctaatattgactttcaggaataaagttcagtgtgctgatcattcacaatacagtggatagcttgatatcttctgttttcccattgcagttgatttgagaagatgaaggtttaaatattgttgaaagttgcagttttttaaatgtgttcctttttcttctgtgaatatttagggcaatcgtgtcgctaatagaatatgtagtagagggggtggggaggtaaattcctctgacttgccaaagaaaaagaagggaaccacagtggatatgctagcattttagctgtgcaaagggaggtagtgtgggaaaagtgtttccattctgggaaaagcccaaaccgaatacggtcagcagtcaactccagggtttgggcttgattcctgttgaataatagttttgagcattctttgtggttaaataaattcttaaatctgcctagttttgatgaattcttttgtgaaacttgaaagagaatagacagtatgacatatagaattaatacaaaacagtttaacaaccatttaactgcagtgtaagaaaattggactgtaatcatatcgctactggcatctgttatctagtatgcatttctggtgtgtatctgaaaggaagacattttctaccctagatccaattgcatttatttatcaataagtgccattaaattgaaattatattacattttacactttctcaatgaatgaacaaattagtctgtagaatctagccacctgtttagcctagtcatgtgccttgaacatatatgtgtcccataatctggctcatggtacctgttcttctatccaaacctttcaattcatgctacctgattcatttatttgacatagatcttaggcccacttgaactcttttcttgtttatctagcatagcacaaacgtttttccagtcttctttatcaacactaatgcctcttaattgcatcagtatttcctattggaaaatacatctgttccagaaaaacatttggcattcctgaataatttccaaatgtttttaatccaaagaaaaaggtttaaagcttatttccctttcttatacacacctgaataaaattgatgtgcatgttttagggatcaattacctaactgttccttggtctatttatgtataagaatgctttttaaagcacatgtctcattttaaatgacgcacaaactgaagatgttaataaaatttaagagtaatacaatga

SEQ ID NO: 199051 - DNA, 2646 bp, Homo sapiens
  Payload ID: 19273
  Gene Name: vesicle-associated membrane protein 7
  Uniprot ID: P51809
  ENST ID: ENST00000286448
  CDS Start-End: 166-828
tcccactcccaagaggccacgcgtagacggggcgcttcatgcggaagtcagcggcgtccggtcccagcctcctctgggagcgggcagttggcgaccctgcactgacccgcgtccctccgtcccgagcccgcgcgccctcagagggtgcccggacagactgaagccatggcgattctttttgctgttgttgccagggggaccactatccttgccaaacatgcttggtgtggaggaaacttcctggaggtgacagagcagattctggctaagataccttctgaaaataacaaactaacgtactcacatggcaattatttgtttcattacatctgccaagacaggattgtatatctttgtatcactgatgatgattttgaacgttcccgagcctttaattttctgaatgagataaagaagaggttccagactacttacggttcaagagcacagacagcacttccatatgccatgaatagcgagttctcaagtgtcttagctgcacagctgaagcatcactctgagaataagggcctagacaaagtgatggagactcaagcccaagtggatgaactgaaaggaatcatggtcagaaacatagatctggtagctcagcgaggagaaagattggaattattgattgacaaaacagaaaatcttgtggattcttctgtcaccttcaaaactaccagcagaaatcttgctcgagccatgtgtatgaagaacctcaagctcactattatcatcatcatcgtatcaattgtgttcatctatatcattgtttcacctctctgtggtggatttacatggccaagctgtgtgaagaaataggaaagaagaagttaccattaaccaaggatatgagagaacaaggagttaaaagcaatccatgtgactcaagcctttcacatactgacagatggtatctgccagtctcttcaaccctcttctcactttttaaaatcttgttccatgcctccaggtttatctttgtcttatctaccagtttattcctgtgaacttcagattgaaccattcattgcagcagtagccttaaaaaggcttttgtttatttctttggtttgttaactagtgtcatctatttagagaaacatttttgtttttaattgctcaaagctgtcgccgctagtcttatgagctatctactaaaactatggagaaactttgtatgtgcacacaaaagtattcaagagacagtattgctaacatctcatcttaatgtcttttgttattgagaagttttaggtgcttcaaaacaatataaatggataatagttgttatttggggaattgtaatgatgttggtgctgcttccttctaagagctcagacaagtaaagtatgaaacattcttatttcagttagatggggaacattttgctagcccattagaagcacacagaattatccttgtcctcctaatattgactttcaggaataaagttcagtgtgctgatcattcacaatacagtggatagcttgatatcttctgttttcccattgcagttgatttgagaagatgaaggtttaaatattgttgaaagttgcagttttttaaatgtgttcctttttcttctgtgaatatttagggcaatcgtgtcgctaatagaatatgtagtagagggggtggggaggtaaattcctctgacttgccaaagaaaaagaagggaaccacagtggatatgctagcattttagctgtgcaaagggaggtagtgtgggaaaagtgtttccattctgggaaaagcccaaaccgaatacggtcagcagtcaactccagggtttgggcttgattcctgttgaataatagttttgagcattctttgtggttaaataaattcttaaatctgcctagttttgatgaattcttttgtgaaacttgaaagagaatagacagtatgacatatagaattaatacaaaacagtttaacaaccatttaactgcagtgtaagaaaattggactgtaatcatatcgctactggcatctgttatctagtatgcatttctggtgtgtatctgaaaggaagacattttctaccctagatccaattgcatttatttatcaataagtgccattaaattgaaattatattacattttacactttctcaatgaatgaacaaattagtctgtagaatctagccacctgtttagcctagtcatgtgccttgaacatatatgtgtcccataatctggctcatggtacctgttcttctatccaaacctttcaattcatgctacctgattcatttatttgacatagatcttaggcccacttgaactcttttcttgtttatctagcatagcacaaacgtttttccagtcttctttatcaacactaatgcctcttaattgcatcagtatttcctattggaaaatacatctgttccagaaaaacatttggcattcctgaataatttccaaatgtttttaatccaaagaaaaaggtttaaagcttatttccctttcttatacacacctgaataaaattgatgtgcatgttttagggatcaattacctaactgttccttggtctatttatgtataagaatgctttttaaagcacatgtctcattttaaatgacgcacaaactgaagatgttaataaaatttaagagtaatacaatga

SEQ ID NO: 199052 - DNA, 658 bp, Homo sapiens
  Payload ID: 19273
  Gene Name: vesicle-associated membrane protein 7
  Uniprot ID: P51809
  ENST ID: ENST00000460621
  CDS Start-End: 81-620
agttggcgaccctgcactgacccgcgtccctccgtcccgagcccgcgcgccctcagagggtgcccggacagactgaagccatggcgattctttttgctgttgttgccagggggaccactatccttgccaaacatgcttggtgtggaggaaacttcctggaggattttgaacgttcccgagcctttaattttctgaatgagataaagaagaggttccagactacttacggttcaagagcacagacagcacttccatatgccatgaatagcgagttctcaagtgtcttagctgcacagctgaagcatcactctgagaataagggcctagacaaagtgatggagactcaagcccaagtggatgaactgaaaggaatcatggtcagaaacatagatctggtagctcagcgaggagaaagattggaattattgattgacaaaacagaaaatcttgtggattcttctgtcaccttcaaaactaccagcagaaatcttgctcgagccatgtgtatgaagaacctcaagctcactattatcatcatcatcgtatcaattgtgttcatctatatcattgtttcacctctctgtggtggatttacatggccaagctgtgtgaagaaataggaaagaagaagttaccattaaccaaggatatgagagaa

SEQ ID NO: 199053 - DNA, 696 bp, Homo sapiens
  Payload ID: 19273
  Gene Name: vesicle-associated membrane protein 7
  ENST ID: ENST00000488344
  CDS Start-End: 99-278
cctcctctgggagcgggcagttggcgaccctgcactgacccgcgtccctccgtcccgagcccgcgcgccctcagagggtgcccggacagactgaagccatggcgattctttttgctgttgttgccagggggaccactatccttgccaaacatgcttggtgtggaggaaacttcctggaggtgacagagcagattctggctaagataccttctgaaaataacaaactaacgtactcacatggcaagattttgaacgttcccgagcctttaattttctgaatgagataaagaagaggttccagactacttacggttcaagagcacagacagcacttccatatgccatgaatagcgagttctcaagtgtcttagctgcacagctgaagcatcactctgagaataagggcctagacaaagtgatggagactcaagcccaagtggatgaactgaaaggaatcatggtcagaaacatagatctggtagctcagcgaggagaaagattggaattattgattgacaaaacagaaaatcttgtggattcttctgtcaccttcaaaactaccagcagaaatcttgctcgagccatgtgtatgaagaacctcaagctcactattatcatcatcatcgtatcaattgtgttcatctatatcattgtttcacctctctgtggtggatttacatggccaagctgtgtgaa

SEQ ID NO: 199054 - DNA, 774 bp, Homo sapiens
  Payload ID: 19274
  Gene Name: vesicle-associated membrane protein 8
  Uniprot ID: Q9BV40
  ENST ID: ENST00000263864
  CDS Start-End: 157-459
ggaaacctgagttaggtgtggctggagcgactcgagatgcgaggtgggcgggggcaggctgaaagttggagcaagcaggaagtgaactgagggccaccctgggaggaagccgactaggcgaattcacttactgaccggcctgggctgctctgagacatggaggaagccagtgaaggtggaggaaatgatcgtgtgcggaacctgcaaagtgaggtggagggagttaagaatattatgacccagaatgtggagcggatcctggcccggggggaaaacttggaacatctccgcaacaagacagaggatctggaagccacatctgagcacttcaagacgacatcgcagaaggtggctcgaaaattctggtggaagaacgtgaagatgattgtccttatctgcgtgattgtttttatcatcatcctcttcattgtgctctttgccactggtgccttctcttaagtaacagggaacctctcccacctgcccttctcttcagggacaaccctccataaatgtgtgccaagagggtctcctttcctgtcttcctctacagagaatgctgctcggtcctcctacccctcttcccgaggccctgctgccatgttgtatgccccagaaggtaccttggtcccccggaaggagagaaaaaagagagatggactgtggctgcatttcttgggtccttagagtgggctggagagacctagagggcccagcatgtggctgggaaactgttggtggccagtgggtaataaagacctttcagtatcccta

SEQ ID NO: 199055 - DNA, 805 bp, Homo sapiens
  Payload ID: 19274
  Gene Name: vesicle-associated membrane protein 8
  ENST ID: ENST00000409760
  CDS Start-End: 55-354
gaggaagccgactaggcgaattcacttactgaccggcctgggctgctctgagacatggaggaagccagtgaaggtggaggaaatgatcgtgtgcggaacctgcaaagtgaggtggagggagttaagaatattatgacccagaatgtggagcggatcctggcccggggggaaaacttggaacatctccgcaacaagacagaggatctggaagccacaccaggggctgaggccagctgtttcagggaggaagtaactccaaagttgagcaaagtctggagcctcaagttctgtgttcagcggggaggctggctctggctttctgagtcctgtgtgaactcttggctcttggtctgagcacttcaagacgacatcgcagaaggtggctcgaaaattctggtggaagaacgtgaagatgattgtccttatctgcgtgattgtttttatcatcatcctcttcattgtgctctttgccactggtgccttctcttaagtaacagggaacctctcccacctgcccttctcttcagggacaaccctccataaatgtgtgccaagagggtctcctttcctgtcttcctctacagagaatgctgctcggtcctcctacccctcttcccgaggccctgctgccatgttgtatgccccagaaggtaccttggtcccccggaaggagagaaaaaagagagatggactgtggctgcatttcttgggtccttagagtgggctggagagacctagagggcccagcatgtggctgggaaactgttggtggccagtgggtaataaagacctttcagtatcccta

SEQ ID NO: 199056 - DNA, 664 bp, Homo sapiens
  Payload ID: 19274
  Gene Name: vesicle-associated membrane protein 8
  ENST ID: ENST00000432071
  CDS Start-End: 159-383
gtaaatactacccacgaccggcggcgccggattccttgcttggcggcagggggcggaacaaggagccttggagcggggcaaaggaggaagccagtgaaggtggaggaaatgatcgtgtgcggaacctgcaaagtgaggtggagggagttaagaatattatgacccagaatgtggagcggatcctggcccggggggaaaacttggaacatctccgcaacaagacagaggatctggaagccacatctgagcacttcaagacgacatcgcagaaggtggctcgaaaattctggtggaagaacgtgaagatgattgtccttatctgcgtgattgtttttatcatcatcctcttcattgtgctctttgccactggtgccttctcttaagtaacagggaacctctcccacctgcccttctcttcagggacaaccctccataaatgtgtgccaagagggtctcctttcctgtcttcctctacagagaatgctgctcggtcctcctacccctcttcccgaggccctgctgccatgttgtatgccccagaaggtaccttggtcccccggaaggagagaaaaaagagagatggactgtggctgcatttcttgggtccttagagtgggctggagagacctagagggcccagcatgtggctgggaaactgttggtg

SEQ ID NO: 199057 - DNA, 2962 bp, Homo sapiens
  Payload ID: 19275
  Gene Name: vesicular, overexpressed in cancer, prosurvival protein 1
  Uniprot ID: Q96AW1
  ENST ID: ENST00000285279
  CDS Start-End: 202-720
gggagcgcgcggcggccgggggcggagcgcagccagggctgcgcggcgcgccccggctcccgcccgctcccagccgggccccccagcggtcggcgggacggctcccggctgcagtctgcccgcccgccccgcgcgggggccgagtcgcgaagcgcgcctgcgacccggcgtccgggcgcgctggagaggacgcgaggagccatgaggcgccagcctgcgaaggtggcggcgctgctgctcgggctgctcttggagtgcacagaagccaaaaagcattgctggtatttcgaaggactctatccaacctattatatatgccgctcctacgaggactgctgtggctccaggtgctgtgtgcgggccctctccatacagaggctgtggtacttctggttccttctgatgatgggcgtgcttttctgctgcggagccggcttcttcatccggaggcgcatgtaccccccgccgctgatcgaggagccagccttcaatgtgtcctacaccaggcagcccccaaatcccggcccaggagcccagcagccggggccgccctattacaccgacccaggaggaccggggatgaaccctgtcgggaattccatggcaatggctttccaggtcccacccaactcaccccaggggagtgtggcctgcccgccccctccagcctactgcaacacgcctccgcccccgtacgaacaggtagtgaaggccaagtagtggggtgcccacgtgcaagaggagagacaggagagggcctttccctggcctttctgtcttcgttgatgttcacttccaggaacggtctcgtgggctgctaagggcagttcctctgatatcctcacagcaagcacagctctctttcaggctttccatggagtacaatatatgaactcacactttgtctcctctgttgcttctgtttctgacgcagtctgtgctctcacatggtagtgtggtgacagtccccgagggctgacgtccttacggtggcgtgaccagatctacaggagagagactgagaggaagaaggcagtgctggaggtgcaggtggcatgtagaggggccaggccgagcatcccaggcaagcatccttctgcccgggtattaataggaagccccatgccgggcggctcagccgatgaagcagcagccgactgagctgagcccagcaggtcatctgctccagcctgtcctctcgtcagccttcctcttccagaagctgttggagagacattcaggagagagcaagccccttgtcatgtttctgtctctgttcatatcctaaagatagacttctcctgcaccgccagggaagggtagcacgtgcagctctcaccgcaggatggggcctagaatcaggcttgccttggaggcctgacagtgatctgacatccactaagcaaatttatttaaattcatgggaaatcacttcctgccccaaactgagacattgcattttgtgagctcttggtctgatttggagaaaggactgttacccatttttttggtgtgtttatggaagtgcatgtagagcgtcctgccctttgaaatcagactgggtgtgtgtcttccctggacatcactgcctctccagggcattctcaggcccgggggtctccttccctcaggcagctccagtggtgggttctgaagggtgctttcaaaacggggcacatctggctgggaagtcacatggactcttccagggagagagaccagctgaggcgtctctctctgaggttgtgttgggtctaagcgggtgtgtgctgggctccaaggaggaggagcttgctgggaaaagacaggagaagtactgactcaactgcactgaccatgttgtcataattagaataaagaagaagtggtcggaaatgcacattcctggataggaatcacagctcaccccaggatctcacaggtagtctcctgagtagttgacggctagcggggagctagttccgccgcatagttatagtgttgatgtgtgaacgctgacctgtcctgtgtgctaagagctatgcagcttagctgaggcgcctagattactagatgtgctgtatcacggggaatgaggtgggggtgcttattttttaatgaactaatcagagcctcttgagaaattgttactcattgaactggagcatcaagacatctcatggaagtggatacggagtgatttggtgtccatgcttttcactctgaggacatttaatcggagaacctcctggggaattttgtgggagacacttgggaacaaaacagacaccctgggaatgcagttgcaagcacagatgctgccaccagtgtctctgaccaccctggtgtgactgctgactgccagcgtggtacctcccatgctgcaggcctccatctaaatgagacaacaaagcacaatgttcactgtttacaaccaagacaactgcgtgggtccaaacactcctcttcctccaggtcatttgttttgcatttttaatgtctttattttttgtaatgaaaaagcacactaagctgcccctggaatcgggtgcagctgaataggcacccaaaagtccgtgactaaatttcgtttgtctttttgatagcaaattatgttaagagacagtgatggctagggctcaacaattttgtattcccatgtttgtgtgagacagagtttgttttcccttgaacttggttagaattgtgctactgtgaacgctgatcctgcatatggaagtcccacttcggtgacatttcctggccattcttgtttccattgtgtggatggtgggttgtgcccacttcctggagtgagacagctcctggtgtgtagaattcccggagcgtccgtggttcagagtaaacttgaagcagatctgtgcatgcttttcctctgcaacaattggctcgtttctcttttttgttctcttttgataggatcctgtttcctatgtgtgcaaaataaaaataaatttgggca

SEQ ID NO: 199058 - DNA, 1671 bp, Homo sapiens
  Payload ID: 19275
  Gene Name: vesicular, overexpressed in cancer, prosurvival protein 1
  ENST ID: ENST00000428097
  CDS Start-End: 436-753
tttgttctcagcctgtgcggagtgtaacgagcccactctaattgggctcaagctgaaagcagctgggatctcattgcctgtgtgtcaagttctgcttttgatgaatgcagaagcagtgtgaggcacagcagggggcccctcccttttgaaaaagatggagtccttgggctgatcttctttggggccgtcccaccatcctgaagcaaaccctggacttctggcccgggacagactgttggccaaagccgttgccgtgataagtaacataaggatccttactttccagagtgcacagaagccaaaaagcattgctggtatttcgaaggactctatccaacctattatatatgccgctcctacgaggactgctgtggctccaggtgctgtgtgcgggccctctccatacagaggctgtggtacttctggttccttctgatgatgggcgtgcttttctgctgcggagccggcttcttcatccggaggcgcatgtaccccccgccgctgatcgaggagccagccttcaatgtgtcctacaccaggcagcccccaaatcccggcccaggagcccagcagccggggccgccctattacaccgacccaggaggaccggggatgaaccctgtcgggaattccatggcaatggctttccaggtcccacccaactcaccccaggggagtgtggcctgcccgccccctccagcctactgcaacacgcctccgcccccgtacgaacaggtagtgaaggccaagtagtggggtgcccacgtgcaagaggagagacaggagagggcctttccctggcctttctgtcttcgttgatgttcacttccaggaacggtctcgtgggctgctaagggcagttcctctgatatcctcacagcaagcacagctctctttcaggctttccatggagtacaatatatgaactcacactttgtctcctctgttgcttctgtttctgacgcagtctgtgctctcacatggtagtgtggtgacagtccccgagggctgacgtccttacggtggcgtgaccagatctacaggagagagactgagaggaagaaggcagtgctggaggtgcaggtggcatgtagaggggccaggccgagcatcccaggcaagcatccttctgcccgggtattaataggaagccccatgccgggcggctcagccgatgaagcagcagccgactgagctgagcccagcaggtcatctgctccagcctgtcctctcgtcagccttcctcttccagaagctgttggagagacattcaggagagagcaagccccttgtcatgtttctgtctctgttcatatcctaaagatagacttctcctgcaccgccagggaagggtagcacgtgcagctctcaccgcaggatggggcctagaatcaggcttgccttggaggcctgacagtgatctgacatccactaagcaaatttatttaaattcatgggaaatcacttcctgccccaaactgagacattgcattttgtgagctcttggtctgatttggagaaaggactgttacccatttttttggtgtgtttatggaagtgcatgtagagcgtcctgccctttgaaatcagactgggtgtgtgtcttccctggacatcactgcctctccagggcattctcaggcccgggggtctccttccctcaggcagctc

SEQ ID NO: 199059 - DNA, 1317 bp, Homo sapiens
  Payload ID: 19275
  Gene Name: vesicular, overexpressed in cancer, prosurvival protein 1
  Uniprot ID: Q96AW1
  ENST ID: ENST00000418904
  CDS Start-End: 198-665
atagtgctccgtcacctttctgggttgagcatggctgagtgactcagcccatgggaggtttcctaggagaacaggctccacttgctgcctctctgcgtgaactccgtgtgccggcaacctggcgaccagactcctgccttcggaggggctggggctccaggacctgagtgccccccattgttggaaggcggtgtcatatgtgcacagaagccaaaaagcattgctggtatttcgaaggactctatccaacctattatatatgccgctcctacgaggactgctgtggctccaggtgctgtgtgcgggccctctccatacagaggctgtggtacttctggttccttctgatgatgggcgtgcttttctgctgcggagccggcttcttcatccggaggcgcatgtaccccccgccgctgatcgaggagccagccttcaatgtgtcctacaccaggcagcccccaaatcccggcccaggagcccagcagccggggccgccctattacaccgacccaggaggaccggggatgaaccctgtcgggaattccatggcaatggctttccaggtcccacccaactcaccccaggggagtgtggcctgcccgccccctccagcctactgcaacacgcctccgcccccgtacgaacaggtagtgaaggccaagtagtggggtgcccacgtgcaagaggagagacaggagagggcctttccctggcctttctgtcttcgttgatgttcacttccaggaacggtctcgtgggctgctaagggcagttcctctgatatcctcacagcaagcacagctctctttcaggctttccatggagtacaatatatgaactcacactttgtctcctctgttgcttctgtttctgacgcagtctgtgctctcacatggtagtgtggtgacagtccccgagggctgacgtccttacggtggcgtgaccagatctacaggagagagactgagaggaagaaggcagtgctggaggtgcaggtggcatgtagaggggccaggccgagcatcccaggcaagcatccttctgcccgggtattaataggaagccccatgccgggcggctcagccgatgaagcagcagccgactgagctgagcccagcaggtcatctgctccagcctgtcctctcgtcagccttcctcttccagaagctgttggagagacattcaggagagagcaagccccttgtcatgtttctgtctctgttcatatcctaaagatagacttctcctgcaccgccagggaagggtagcacgtgcagctctcaccgcaggatggggcctagaatcaggcttgccttg

SEQ ID NO: 199060 - DNA, 649 bp, Homo sapiens
  Payload ID: 19275
  Gene Name: vesicular, overexpressed in cancer, prosurvival protein 1
  ENST ID: ENST00000453256
  CDS Start-End: 231-548
agcagctcccgccccttggcttgcattctctcctcgagttgagcttctgcttgggcctcgcttcctcagctcctttgccagcacggcctgaaacaggggccaccgtgtgagcttcctggagcccagagatgagaagataaagatgccgctcctacgaggactgctgtggctccaggtgctgtgtgcgggccctctccatacagaggctgtggtacttctggttccttctgatgatgggcgtgcttttctgctgcggagccggcttcttcatccggaggcgcatgtaccccccgccgctgatcgaggagccagccttcaatgtgtcctacaccaggcagcccccaaatcccggcccaggagcccagcagccggggccgccctattacaccgacccaggaggaccggggatgaaccctgtcgggaattccatggcaatggctttccaggtcccacccaactcaccccaggggagtgtggcctgcccgccccctccagcctactgcaacacgcctccgcccccgtacgaacaggtagtgaaggccaagtagtggggtgcccacgtgcaagaggagagacaggagagggcctttccctggcctttctgtcttcgttgatgttcacttccaggaacggtctcgtgggctgctaa

SEQ ID NO: 199061 - DNA, 632 bp, Homo sapiens
  Payload ID: 19275
  Gene Name: vesicular, overexpressed in cancer, prosurvival protein 1
  ENST ID: ENST00000427700
  CDS Start-End: 42-554
tcgggctgctcttggagatgcacattgcttctgatgcatagatgaggatcagaagtcttcatccagtacagcagactgaaccgactacttgcacagaagccaaaaagcattgctggtatttcgaaggactctatccaacctattatatatgccgctcctacgaggactgctgtggctccaggtgctgtgtgcgggccctctccatacagaggctgtggtacttctggttccttctgatgatgggcgtgcttttctgctgcggagccggcttcttcatccggaggcgcatgtaccccccgccgctgatcgaggagccagccttcaatgtgtcctacaccaggcagcccccaaatcccggcccaggagcccagcagccggggccgccctattacaccgacccaggaggaccggggatgaaccctgtcgggaattccatggcaatggctttccaggtcccacccaactcaccccaggggagtgtggcctgcccgccccctccagcctactgcaacacgcctccgcccccgtacgaacaggtagtgaaggccaagtagtggggtgcccacgtgcaagaggagagacaggagagggcctttccctggcctttctgtcttcgttgatgttcacttcca

SEQ ID NO: 199062 - DNA, 574 bp, Homo sapiens
  Payload ID: 19275
  Gene Name: vesicular, overexpressed in cancer, prosurvival protein 1
  ENST ID: ENST00000455023
  CDS Start-End: 287-574
attcacatgctttgtttccttccctttcagcctcacatgtggccctttaacagctcattagttttgttttaaggacaggcagggagagagcaatggggagaagctgaattcagtttggttgaatctttgggatgaagggtgcacagaagccaaaaagcattgctggtatttcgaaggactctatccaacctattatatatgccgctcctacgaggactgctgtggctccaggtgctgtgtgcgggccctctccatacagaggctgtggtacttctggttccttctgatgatgggcgtgcttttctgctgcggagccggcttcttcatccggaggcgcatgtaccccccgccgctgatcgaggagccagccttcaatgtgtcctacaccaggcagcccccaaatcccggcccaggagcccagcagccggggccgccctattacaccgacccaggaggaccggggatgaaccctgtcgggaattccatggcaatggctttccaggtcccacccaactcaccccaggggagtgtggcctgcccgccccctccagcctactgcaacacgcctccgccc

SEQ ID NO: 199063 - DNA, 485 bp, Homo sapiens
  Payload ID: 19275
  Gene Name: vesicular, overexpressed in cancer, prosurvival protein 1
  ENST ID: ENST00000452832
  CDS Start-End: 421-485
gctcccagccgggccccccagcggtcggcgggacggctcccggctgcagtctgcccgcccgccccgcgcgggggccgagtcgcgaagcgcgcctgcgacccggcgtccgggcgcgctggagaggacgcgaggagccatgaggcgccagcctgcgaaggtggcggcgctgctgctcgggctgctcttggagagacagtttccttagcaaagctgctggacacacttgtgtttgatttctgctcctggagatgcagtaattgacagtgttgagagtgcacagaagccaaaaagcattgctggtatttcgaaggactctatccaacctattatatatgccgctcctacgaggactgctgtggctccaggtgctgtgtgcgggccctctccatacagaggctgtggtacttctggttccttctgatgatgggcgtgcttttctgctgcggagccggcttcttcatccggaggcgcatgtaccccccgcc

SEQ ID NO: 199064 - DNA, 610 bp, Homo sapiens
  Payload ID: 19275
  Gene Name: vesicular, overexpressed in cancer, prosurvival protein 1
  ENST ID: ENST00000454227
  CDS Start-End: 135-464
agagacttgggagcagccctgctgtgcggctgcaatctgaaaggaaatgatgcctcgttgctaggcctaggaagaggtgcacagaagccaaaaagcattgctggtatttcgaaggactctatccaacctattatatgttccttctgatgatgggcgtgcttttctgctgcggagccggcttcttcatccggaggcgcatgtaccccccgccgctgatcgaggagccagccttcaatgtgtcctacaccaggcagcccccaaatcccggcccaggagcccagcagccggggccgccctattacaccgacccaggaggaccggggatgaaccctgtcgggaattccatggcaatggctttccaggtcccacccaactcaccccaggggagtgtggcctgcccgccccctccagcctactgcaacacgcctccgcccccgtacgaacaggtagtgaaggccaagtagtggggtgcccacgtgcaagaggagagacaggagagggcctttccctggcctttctgtcttcgttgatgttcacttccaggaacggtctcgtgggctgctaagggcagttcctctgatatcctcacagcaagcacagctctctttca

SEQ ID NO: 199065 - DNA, 591 bp, Homo sapiens
  Payload ID: 19275
  Gene Name: vesicular, overexpressed in cancer, prosurvival protein 1
  ENST ID: ENST00000417399
  CDS Start-End: 434-591
agagctccctgagcagtggggatgctggcctgcctcacttgctggaggtttgtgagagcctccaggtggcatctggcccctgctccgatgcctgtgtgcactcacccaccctgccctgccctgccctgccctgccctgtggggctgggccctgcctccgggatgttaggagctggacttacctggaaagcccaggagaggctcccattgtctttccttgttccttctttctcttcctgcacgtgagagggcaacgagtgaaccgtgactcgcagcatcttgcagactgcacagaagccaaaaagcattgctggtatttcgaaggactctatccaacctattatatatgccgctcctacgaggactgctgtggctccaggtgctgtgtgcgggccctctccatacagaggctgtggtacttctggttccttctgatgatgggcgtgcttttctgctgcggagccggcttcttcatccggaggcgcatgtaccccccgccgctgatcgaggagccagccttcaatgtgtcctacaccaggcagcccccaaatcccggcccaggagcccagcagccggggccgccctattacac

SEQ ID NO: 199066 - DNA, 2866 bp, Homo sapiens
  Payload ID: 19275
  Gene Name: vesicular, overexpressed in cancer, prosurvival protein 1
  ENST ID: ENST00000428648
  CDS Start-End: 308-625
gcgccgggcagtttggggttaggaaaggatgggtgccgagccggggtgaggggagcgggcggaggggactgtggggaagtgtcgcgggagtgccgggagttgtggaggtgagcagcgggaggaggcgttcccgcgtgtgaaaatgaagtgcagcctttagtgcacagaagccaaaaagcattgctggtatttcgaaggactctatccaacctattatatatgccgctcctacgaggactgctgtggctccaggtgctgtgtgcgggccctctccatacagaggctgtggtacttctggttccttctgatgatgggcgtgcttttctgctgcggagccggcttcttcatccggaggcgcatgtaccccccgccgctgatcgaggagccagccttcaatgtgtcctacaccaggcagcccccaaatcccggcccaggagcccagcagccggggccgccctattacaccgacccaggaggaccggggatgaaccctgtcgggaattccatggcaatggctttccaggtcccacccaactcaccccaggggagtgtggcctgcccgccccctccagcctactgcaacacgcctccgcccccgtacgaacaggtagtgaaggccaagtagtggggtgcccacgtgcaagaggagagacaggagagggcctttccctggcctttctgtcttcgttgatgttcacttccaggaacggtctcgtgggctgctaagggcagttcctctgatatcctcacagcaagcacagctctctttcaggctttccatggagtacaatatatgaactcacactttgtctcctctgttgcttctgtttctgacgcagtctgtgctctcacatggtagtgtggtgacagtccccgagggctgacgtccttacggtggcgtgaccagatctacaggagagagactgagaggaagaaggcagtgctggaggtgcaggtggcatgtagaggggccaggccgagcatcccaggcaagcatccttctgcccgggtattaataggaagccccatgccgggcggctcagccgatgaagcagcagccgactgagctgagcccagcaggtcatctgctccagcctgtcctctcgtcagccttcctcttccagaagctgttggagagacattcaggagagagcaagccccttgtcatgtttctgtctctgttcatatcctaaagatagacttctcctgcaccgccagggaagggtagcacgtgcagctctcaccgcaggatggggcctagaatcaggcttgccttggaggcctgacagtgatctgacatccactaagcaaatttatttaaattcatgggaaatcacttcctgccccaaactgagacattgcattttgtgagctcttggtctgatttggagaaaggactgttacccatttttttggtgtgtttatggaagtgcatgtagagcgtcctgccctttgaaatcagactgggtgtgtgtcttccctggacatcactgcctctccagggcattctcaggcccgggggtctccttccctcaggcagctccagtggtgggttctgaagggtgctttcaaaacggggcacatctggctgggaagtcacatggactcttccagggagagagaccagctgaggcgtctctctctgaggttgtgttgggtctaagcgggtgtgtgctgggctccaaggaggaggagcttgctgggaaaagacaggagaagtactgactcaactgcactgaccatgttgtcataattagaataaagaagaagtggtcggaaatgcacattcctggataggaatcacagctcaccccaggatctcacaggtagtctcctgagtagttgacggctagcggggagctagttccgccgcatagttatagtgttgatgtgtgaacgctgacctgtcctgtgtgctaagagctatgcagcttagctgaggcgcctagattactagatgtgctgtatcacggggaatgaggtgggggtgcttattttttaatgaactaatcagagcctcttgagaaattgttactcattgaactggagcatcaagacatctcatggaagtggatacggagtgatttggtgtccatgcttttcactctgaggacatttaatcggagaacctcctggggaattttgtgggagacacttgggaacaaaacagacaccctgggaatgcagttgcaagcacagatgctgccaccagtgtctctgaccaccctggtgtgactgctgactgccagcgtggtacctcccatgctgcaggcctccatctaaatgagacaacaaagcacaatgttcactgtttacaaccaagacaactgcgtgggtccaaacactcctcttcctccaggtcatttgttttgcatttttaatgtctttattttttgtaatgaaaaagcacactaagctgcccctggaatcgggtgcagctgaataggcacccaaaagtccgtgactaaatttcgtttgtctttttgatagcaaattatgttaagagacagtgatggctagggctcaacaattttgtattcccatgtttgtgtgagacagagtttgttttcccttgaacttggttagaattgtgctactgtgaacgctgatcctgcatatggaagtcccacttcggtgacatttcctggccattcttgtttccattgtgtggatggtgggttgtgcccacttcctggagtgagacagctcctggtgtgtagaattcccggagcgtccgtggttcagagtaaacttgaagcagatctgtgcatgcttttcctctgcaacaattggctcgtttctcttttttgttctcttttgataggatcctgtttcctatgtgtgcaaaataaaaataaatttgggc

SEQ ID NO: 199067 - DNA, 2900 bp, Homo sapiens
  Payload ID: 19275
  Gene Name: vesicular, overexpressed in cancer, prosurvival protein 1
  Uniprot ID: Q96AW1
  ENST ID: ENST00000433959
  CDS Start-End: 168-659
agatgttctcaccactcaacagaggaggatactgcagggtctgcgggcgccagagctttatttatgtgtgctccgtattggagggctgcgtgtgacccagcagtgacaggaccgtgggcgactggctggcgaggaggtgcgctgcctgcatccttgcgcctaacagaatgcgaaggacgggctcacatgctcagtgcacagaagccaaaaagcattgctggtatttcgaaggactctatccaacctattatatatgccgctcctacgaggactgctgtggctccaggtgctgtgtgcgggccctctccatacagaggctgtggtacttctggttccttctgatgatgggcgtgcttttctgctgcggagccggcttcttcatccggaggcgcatgtaccccccgccgctgatcgaggagccagccttcaatgtgtcctacaccaggcagcccccaaatcccggcccaggagcccagcagccggggccgccctattacaccgacccaggaggaccggggatgaaccctgtcgggaattccatggcaatggctttccaggtcccacccaactcaccccaggggagtgtggcctgcccgccccctccagcctactgcaacacgcctccgcccccgtacgaacaggtagtgaaggccaagtagtggggtgcccacgtgcaagaggagagacaggagagggcctttccctggcctttctgtcttcgttgatgttcacttccaggaacggtctcgtgggctgctaagggcagttcctctgatatcctcacagcaagcacagctctctttcaggctttccatggagtacaatatatgaactcacactttgtctcctctgttgcttctgtttctgacgcagtctgtgctctcacatggtagtgtggtgacagtccccgagggctgacgtccttacggtggcgtgaccagatctacaggagagagactgagaggaagaaggcagtgctggaggtgcaggtggcatgtagaggggccaggccgagcatcccaggcaagcatccttctgcccgggtattaataggaagccccatgccgggcggctcagccgatgaagcagcagccgactgagctgagcccagcaggtcatctgctccagcctgtcctctcgtcagccttcctcttccagaagctgttggagagacattcaggagagagcaagccccttgtcatgtttctgtctctgttcatatcctaaagatagacttctcctgcaccgccagggaagggtagcacgtgcagctctcaccgcaggatggggcctagaatcaggcttgccttggaggcctgacagtgatctgacatccactaagcaaatttatttaaattcatgggaaatcacttcctgccccaaactgagacattgcattttgtgagctcttggtctgatttggagaaaggactgttacccatttttttggtgtgtttatggaagtgcatgtagagcgtcctgccctttgaaatcagactgggtgtgtgtcttccctggacatcactgcctctccagggcattctcaggcccgggggtctccttccctcaggcagctccagtggtgggttctgaagggtgctttcaaaacggggcacatctggctgggaagtcacatggactcttccagggagagagaccagctgaggcgtctctctctgaggttgtgttgggtctaagcgggtgtgtgctgggctccaaggaggaggagcttgctgggaaaagacaggagaagtactgactcaactgcactgaccatgttgtcataattagaataaagaagaagtggtcggaaatgcacattcctggataggaatcacagctcaccccaggatctcacaggtagtctcctgagtagttgacggctagcggggagctagttccgccgcatagttatagtgttgatgtgtgaacgctgacctgtcctgtgtgctaagagctatgcagcttagctgaggcgcctagattactagatgtgctgtatcacggggaatgaggtgggggtgcttattttttaatgaactaatcagagcctcttgagaaattgttactcattgaactggagcatcaagacatctcatggaagtggatacggagtgatttggtgtccatgcttttcactctgaggacatttaatcggagaacctcctggggaattttgtgggagacacttgggaacaaaacagacaccctgggaatgcagttgcaagcacagatgctgccaccagtgtctctgaccaccctggtgtgactgctgactgccagcgtggtacctcccatgctgcaggcctccatctaaatgagacaacaaagcacaatgttcactgtttacaaccaagacaactgcgtgggtccaaacactcctcttcctccaggtcatttgttttgcatttttaatgtctttattttttgtaatgaaaaagcacactaagctgcccctggaatcgggtgcagctgaataggcacccaaaagtccgtgactaaatttcgtttgtctttttgatagcaaattatgttaagagacagtgatggctagggctcaacaattttgtattcccatgtttgtgtgagacagagtttgttttcccttgaacttggttagaattgtgctactgtgaacgctgatcctgcatatggaagtcccacttcggtgacatttcctggccattcttgtttccattgtgtggatggtgggttgtgcccacttcctggagtgagacagctcctggtgtgtagaattcccggagcgtccgtggttcagagtaaacttgaagcagatctgtgcatgcttttcctctgcaacaattggctcgtttctcttttttgttctcttttgataggatcctgtttcctatgtgtgcaaaataaaaataaatttgggc

SEQ ID NO: 199068 - DNA, 539 bp, Homo sapiens
  Payload ID: 19275
  Gene Name: vesicular, overexpressed in cancer, prosurvival protein 1
  ENST ID: ENST00000414113
  CDS Start-End: 284-539
agatgttctcaccactcaacagaggaggatactgcagggtctgcgggcgccagagctttatttatgtgtgctccgtattggagggctgcgtgtgacccagcagtgacaggaccgtgggcgactggctggcgaggagtgcacagaagccaaaaagcattgctggtatttcgaaggactctatccaacctattatatatgccgctcctacgaggactgctgtggctccaggtgctgtgtgcgggccctctccatacagaggctgtggtacttctggttccttctgatgatgggcgtgcttttctgctgcggagccggcttcttcatccggaggcgcatgtaccccccgccgctgatcgaggagccagccttcaatgtgtcctacaccaggcagcccccaaatcccggcccaggagcccagcagccggggccgccctattacaccgacccaggaggaccggggatgaaccctgtcgggaattccatggcaatggctttccaggtcccacccaactcaccccaggggagtgtggcctgcccgc

SEQ ID NO: 199069 - DNA, 1400 bp, Homo sapiens
  Payload ID: 19275
  Gene Name: vesicular, overexpressed in cancer, prosurvival protein 1
  Uniprot ID: Q96AW1
  ENST ID: ENST00000625836
  CDS Start-End: 4-513
acaatgctcagcgaaactcttgggtatctgtcttctgtgctcttgcagtgcacagaagccaaaaagcattgctggtatttcgaaggactctatccaacctattatatatgccgctcctacgaggactgctgtggctccaggtgctgtgtgcgggccctctccatacagaggctgtggtacttctggttccttctgatgatgggcgtgcttttctgctgcggagccggcttcttcatccggaggcgcatgtaccccccgccgctgatcgaggagccagccttcaatgtgtcctacaccaggcagcccccaaatcccggcccaggagcccagcagccggggccgccctattacaccgacccaggaggaccggggatgaaccctgtcgggaattccatggcaatggctttccaggtcccacccaactcaccccaggggagtgtggcctgcccgccccctccagcctactgcaacacgcctccgcccccgtacgaacaggtagtgaaggccaagtagtggggtgcccacgtgcaagaggagagacaggagagggcctttccctggcctttctgtcttcgttgatgttcacttccaggaacggtctcgtgggctgctaagggcagttcctctgatatcctcacagcaagcacagctctctttcaggctttccatggagtacaatatatgaactcacactttgtctcctctgttgcttctgtttctgacgcagtctgtgctctcacatggtagtgtggtgacagtccccgagggctgacgtccttacggtggcgtgaccagatctacaggagagagactgagaggaagaaggcagtgctggaggtgcaggtggcatgtagaggggccaggccgagcatcccaggcaagcatccttctgcccgggtattaataggaagccccatgccgggcggctcagccgatgaagcagcagccgactgagctgagcccagcaggtcatctgctccagcctgtcctctcgtcagccttcctcttccagaagctgttggagagacattcaggagagagcaagccccttgtcatgtttctgtctctgttcatatcctaaagatagacttctcctgcaccgccagggaagggtagcacgtgcagctctcaccgcaggatggggcctagaatcaggcttgccttggaggcctgacagtgatctgacatccactaagcaaatttatttaaattcatgggaaatcacttcctgccccaaactgagacattgcattttgtgagctcttggtctgatttggagaaaggactgttacccatttttttggtgtgtttatggaagtgcatgtagagcgtcctgccctttgaaatcagactgggtgtgtgtcttccctggacatcactgcctctccagggcattctca

SEQ ID NO: 199070 - DNA, 1215 bp, Homo sapiens
  Payload ID: 19276
  Gene Name: vestigial-like family member 1
  Uniprot ID: Q99990
  ENST ID: ENST00000370634
  CDS Start-End: 171-947
ctagaggggcggaaagtaacaaggaggtgggggtacaaatcctcagctcctgcttccgcaagcactaacctgctctgaagtgagccaggcagctctggccatcttttcccagccacagaatcaggtgatggtccagaattaagagctgtcacctgtgtcattcactcacaatggaagaaatgaagaagactgccatccggctgcccaaaggcaaacagaagcctataaagacggaatggaattcccggtgtgtccttttcacctacttccaaggggacatcagcagcgtagtggatgaacacttctccagagctctgagcaatatcaagagcccccaggaattgaccccctcgagtcagagtgaaggtgtgatgctgaaaaacgatgatagcatgtctccaaatcagtggcgttactcgtctccatggacaaagccacaaccagaagtacctgtcacaaaccgtgccgccaactgcaacttgcatgtgcctggtcccatggctgtgaatcagttctcaccgtccctggctaggagggcctctgttcggcctggggagctgtggcatttctcctccctggcgggcaccagctccttagagcctggctactctcatcccttccccgctcggcacctggttccagagccccagcctgatgggaaacgtgagcctctcctaagtctcctccagcaagacagatgcctagcccgtcctcaggaatctgccgccagggagaatggcaaccctggccagatagctggaagcacagggttgctcttcaacctgcctcccggctcagttcactataagaaactatatgtatctcgtggatctgccagtaccagccttccaaatgaaactctttcagagttagagacacctgggaaatactcacttacaccaccaaaccactggggccacccacatcgatacctgcagcatctttagtcaagttggaggagaaagacaacacttggtctaagacacggcagcaagacatccctgcatattgttccagataaaaatgaaagctgctcacacccacttgcctccccaatctgttaaacagcttcgtgtctagtatgagctcagtacttgccctgtgaaaatcccagaagcccccgctgtcaatgttccccatccacaccctgcttgctcctgtgtaacagctcagatgatgaataataataaaactgtacttttttggatggtgcta

SEQ ID NO: 199071 - DNA, 451 bp, Homo sapiens
  Payload ID: 19276
  Gene Name: vestigial-like family member 1
  ENST ID: ENST00000456412
  CDS Start-End: 1-183
accccctcgagtcagagtgaaggtgtgatgctgaaaaacgataagaaactatatgtatctcgtggatctgccagtaccagccttccaaatgaaactctttcagagttagagacacctgggaaatactcacttacaccaccaaaccactggggccacccacatcgatacctgcagcatctttagtcaagttggaggagaaagacaacacttggtctaagacacggcagcaagacatccctgcatattgttccagataaaaatgaaagctgctcacacccacttgcctccccaatctgttaaacagcttcgtgtctagtatgagctcagtacttgccctgtgaaaatcccagaagcccccgctgtcaatgttccccatccacaccctgcttgctcctgtgtaacagctcagatgatgaataataataaaactgtacttttttggatggtgcta

SEQ ID NO: 199072 - DNA, 486 bp, Homo sapiens
  Payload ID: 19276
  Gene Name: vestigial-like family member 1
  ENST ID: ENST00000440515
  CDS Start-End: 1-486
catcagcagcgtagtggatgaacacttctccagagctctgagcaatatcaagagcccccaggaattgaccccctcgagtcagagtgaaggtgtgatgctgaaaaacgatgatagcatgtctccaaatcagtggcgttactcgtctccatggacaaagccacaaccagaagtacctgtcacaaaccgtgccgccaactgcaacttgcatgtgcctggtcccatggctgtgaatcagttctcaccgtccctggctaggagggcctctgttcggcctggggagctgtggcatttctcctccctggcgggcaccagctccttagagcctggctactctcatcccttccccgctcggcacctggttccagagccccagcctgatgggaaacataagaaactatatgtatctcgtggatctgccagtaccagccttccaaatgaaactctttcagagttagagacacctgggaaatactcacttacaccacc

SEQ ID NO: 199073 - DNA, 1709 bp, Homo sapiens
  Payload ID: 19277
  Gene Name: vestigial-like family member 2
  Uniprot ID: Q8N8G2
  ENST ID: ENST00000352536
  CDS Start-End: 207-638
gcttctgccctggagcgcggtcgggagtaaaatcgcaggagtgggagggtagcgagccagctggattccgagccgcggagcgcgctggctttgctccgcctgatgactccagagcgcgggtccaagcgccgcccatgcagcacccctgagctccggggaaggagagttaatgaaaaaacacttaaccgtctccgctgcggagagtcatgagctgtctggatgttatgtaccaagtctatggtcctccgcagccctacttcgcagccgcctacaccccctaccaccagaaactagcctattattccaaaatgcaggaagcgcaggagtgcaatgccagccccagcagcagtggcagcggcagctcctcattttccagccaaaccccagccagtataaaagaggaagaaggcagcccagagaaagagcgcccaccagaggcagagtacatcaactcccgctgcgtcctcttcacttatttccagggggacatcagctccgtggtggatgaacatttcagcagggccctgagccaacccagcagctactctcctagctgtaccagcagcaaagcaccaaggagctctgggccctggcgagctcgtcgttattccctctgtggtgcatccctcctgagctgatctgctgacccagggtttccccttccccttcccttctgaccagccttggaggctcagcatctgtgcctctcactccgtggatgaggacatgggggaaggcagagacttcagacttctcagtgtgttgggaaaaccaaaaaccacaactacagaaattcatctaaaaataagtcctgctgctgaaagagcaaatccaaagactgagttatgtttaatgacttttggccgaatcactggaaatatctgtggtgagattgctgagtcaggtgatgtgatatcataagctttcttggaacgggggaaagaaaatgaaactttttggtgtgaatattttttatgctgatgtgaattattttgttaggtagtgtgattatagcactactactgtcagattttaaattgtatgtgtacttgcatctaagactgtggtagagaagtaaagagaagtcaattccttcttcctcacctctcagcctccagatcccttcctgcccatcccttccctacaatgcccactccagacgcaaagatacacttttttcctttggactgtgaacatggaagcctcagcctgaatgtgagtggcaagtggcttatctggagccacctgcccaagtcttactaaaatgcagctgttgttagacaactgttgaaaactccagaaatacatcacccaaggtggcagttctcagtatttggcagaacaattgcaattgcactgggtatattatatatatatatgtatgcatatatatcatattttttacaaggaacattttatgatgaaagaagaaacccttctctgccttctctcccacgaattctgtccctgtatcctctggatgtaaaaagcaaggagagaccccaactgtctccatggagaagaactaggaatcaccacaaggggaagaaatgtacatgaagtctccattacctcgaatttttttctcagtctcactggttgtgatttggtcactttagtgttgggacaggggaaagggtctgtgcgtgggcaaagctgaaggtgatgaggaagaagagacgaacattaaagatgtctatttactatga

SEQ ID NO: 199074 - DNA, 2212 bp, Homo sapiens
  Payload ID: 19277
  Gene Name: vestigial-like family member 2
  Uniprot ID: Q8N8G2
  ENST ID: ENST00000326274
  CDS Start-End: 191-1144
gcggtcgggagtaaaatcgcaggagtgggagggtagcgagccagctggattccgagccgcggagcgcgctggctttgctccgcctgatgactccagagcgcgggtccaagcgccgcccatgcagcacccctgagctccggggaaggagagttaatgaaaaaacacttaaccgtctccgctgcggagagtcatgagctgtctggatgttatgtaccaagtctatggtcctccgcagccctacttcgcagccgcctacaccccctaccaccagaaactagcctattattccaaaatgcaggaagcgcaggagtgcaatgccagccccagcagcagtggcagcggcagctcctcattttccagccaaaccccagccagtataaaagaggaagaaggcagcccagagaaagagcgcccaccagaggcagagtacatcaactcccgctgcgtcctcttcacttatttccagggggacatcagctccgtggtggatgaacatttcagcagggccctgagccaacccagcagctactctcctagctgtaccagcagcaaagcaccaaggagctctgggccctggcgagactgctccttcccgatgagccagcgcagcttccccgcctccttctggaatagcgcgtaccaggcgccagtgcccccgccgctgggcagccctctggccaccgcgcactcggagctgcccttcgccgccgccgacccctactcgcccgccgcgctgcatggccacctgcaccagggcgccacggagccctggcaccacgcgcacccgcaccacgcgcacccgcatcacccctacgccctgggcggcgccctcggcgcccaggccgccccctacccgcgccccgccgccgtgcacgaagtctacgcgccgcacttcgacccgcgctatgggccgctgctgatgccagccgcctcggggcgcccggcccgcctcgcaaccgccccggcgcccgcgcccggcagtcctccctgcgagctctccggcaaaggcgagccggcgggcgccgcgtgggccgggcccgggggacccttcgcgagcccctcgggggacgtggcccagggtctgggcctcagcgtggactcagctcgtcgttattccctctgtggtgcatccctcctgagctgatctgctgacccagggtttccccttccccttcccttctgaccagccttggaggctcagcatctgtgcctctcactccgtggatgaggacatgggggaaggcagagacttcagacttctcagtgtgttgggaaaaccaaaaaccacaactacagaaattcatctaaaaataagtcctgctgctgaaagagcaaatccaaagactgagttatgtttaatgacttttggccgaatcactggaaatatctgtggtgagattgctgagtcaggtgatgtgatatcataagctttcttggaacgggggaaagaaaatgaaactttttggtgtgaatattttttatgctgatgtgaattattttgttaggtagtgtgattatagcactactactgtcagattttaaattgtatgtgtacttgcatctaagactgtggtagagaagtaaagagaagtcaattccttcttcctcacctctcagcctccagatcccttcctgcccatcccttccctacaatgcccactccagacgcaaagatacacttttttcctttggactgtgaacatggaagcctcagcctgaatgtgagtggcaagtggcttatctggagccacctgcccaagtcttactaaaatgcagctgttgttagacaactgttgaaaactccagaaatacatcacccaaggtggcagttctcagtatttggcagaacaattgcaattgcactgggtatattatatatatatatgtatgcatatatatcatattttttacaaggaacattttatgatgaaagaagaaacccttctctgccttctctcccacgaattctgtccctgtatcctctggatgtaaaaagcaaggagagaccccaactgtctccatggagaagaactaggaatcaccacaaggggaagaaatgtacatgaagtctccattacctcgaatttttttctcagtctcactggttgtgatttggtcactttagtgttgggacaggggaaagggtctgtgcgtgggcaaagctgaaggtgatgaggaagaagagacgaacattaaagatgtctatttacta

SEQ ID NO: 199075 - DNA, 2475 bp, Homo sapiens
  Payload ID: 19278
  Gene Name: vestigial-like family member 3
  Uniprot ID: A8MV65
  ENST ID: ENST00000383698
  CDS Start-End: 377-1339
ggctgcccgacccgggcctgggctgtggctgtgactggcgctgccgtgggcgccgcagccctcgcgggagccggacgcggtaatgccccagcggcgcagcgggcggctgcgtccctgagccgctatataagcgcggcagggaacatccggaggggctgaagatgaaggtgcccgcgcatgggcccccgctgattgccagtccctcccgaccccgcgccccgcgcggagcccgaggccgccgaggacccgccttcgccgcagtagcagctggagcagcgacagaggcggcagctgcggcggcggcggcgcccgcgcccctcgcgccagcgcgtagagcggcggcggcagctcgggggccgccactgccccggctgccatgagttgtgcggaggtgatgtatcacccccagccttatggagcgtcccagtatctgcccaaccccatggcagcgacaacctgccccacagcctactatcagccggcgccccaacctggccagcagaagaagttagcggtattcagcaagatgcaggactctctggaagtcacccttcccagcaaacaagaggaggaggatgaggaggaggaggaggaggagaaagaccagcctgccgagatggagtaccttaactctcgctgtgtccttttcacttatttccagggagacattgggtcagtagtggatgaacacttctcaagagctttgggccaagccatcaccctccatccagaatctgccatttcaaaaagcaagatggggctaacccccctatggcgagacagctcagctctctcaagccagcggaatagtttcccaacttccttttggaccagctcttaccagcccccacctgcaccttgtttggggggagttcatcctgacttccaggtcactggaccccctggcaccttttctgcagctgatcccagtccttggccgggacacaacctgcatcagactggcccagcccctccccctgctgtgtctgagtcctggccttatcctttgacatctcaggtgagcccatcctacagccatatgcatgacgtgtacatgcggcaccaccaccctcatgcccacatgcaccaccgccaccgccaccatcatcaccatcaccaccctcctgctggctctgccctggatccatcctatgggcctctgctgatgccttcagtgcatgcggccaggattcctgctccccagtgtgacatcacaaagacagaaccaactacagtcacctctgctacctcagcatgggctggagcctttcatggaacagtagacatagtgcccagcgtgggattcgatacaggctggagtgcaatggcgagatcttgactcactgcaacctctgcctcccgagttcaaccaattgtcctgcctcagccacctgagtagctggaattacaggcatctgccaccacgcccggctaattttttgtatttttagtagatagtcactattttgaatagtgaaggctggcttccctattttgaatagtgaaggctggcttccctattttgaatagtgaaggctggcttccctattttggccaggctggtctcaaactcctgacctcgtgatccacctgcctcggactcccaaggtgctgggattacaggtgtgagccactgtgtccagccctcatgtacaaatttttaagtaaatgtgtgtttaattctcttggaaatatatctaggagtagaactgtggggttaagagaacctcactttttattttatgtatttctatattttttgaatttttttcaaagagcatatatatgcaatttttaaaatatttaaatttaaatttttgttttttaaatttttttttagtatttaaattgttaagattcattacaacatattatagtagagtttgaggtttggtaggcaaaactgccataggaatgaagtaaggtggtccattttttccgaagggctgagtggtggtgaggacagtgaggtgcctctggcacaaaatttaaaaggatccatactgtgagggctgtgcaagtgtatgccaccccatattttgcacccagggctccttattcctctaacctctgtcttggtgttgctttgctgtcatgcgagctcactcttactttttgctccctctgttgaacaggtattacatacaggtaccttgaaatgatcagtatggtatgatcataagtcatttgtatttgccctccacgtgaaaaatgctcatctttaccaagaggctgttatcacaaatctcacattaggctttttccctttcctttatcagtctttaaactgagtttcatgggttccataggaaaaatactcagaatgtgataataagggcttaattgaaaaaagaaaagatctattatcaaatgaatttatttacattgcctaccatatacctcttagagatcacagttccctatagcatataaaatgttttatatattcttcagtaaaaaagcattttaaattgt

SEQ ID NO: 199076 - DNA, 10400 bp, Homo sapiens
  Payload ID: 19278
  Gene Name: vestigial-like family member 3
  Uniprot ID: A8MV65
  ENST ID: ENST00000398399
  CDS Start-End: 365-1345
cgggcctgggctgtggctgtgactggcgctgccgtgggcgccgcagccctcgcgggagccggacgcggtaatgccccagcggcgcagcgggcggctgcgtccctgagccgctatataagcgcggcagggaacatccggaggggctgaagatgaaggtgcccgcgcatgggcccccgctgattgccagtccctcccgaccccgcgccccgcgcggagcccgaggccgccgaggacccgccttcgccgcagtagcagctggagcagcgacagaggcggcagctgcggcggcggcggcgcccgcgcccctcgcgccagcgcgtagagcggcggcggcagctcgggggccgccactgccccggctgccatgagttgtgcggaggtgatgtatcacccccagccttatggagcgtcccagtatctgcccaaccccatggcagcgacaacctgccccacagcctactatcagccggcgccccaacctggccagcagaagaagttagcggtattcagcaagatgcaggactctctggaagtcacccttcccagcaaacaagaggaggaggatgaggaggaggaggaggaggagaaagaccagcctgccgagatggagtaccttaactctcgctgtgtccttttcacttatttccagggagacattgggtcagtagtggatgaacacttctcaagagctttgggccaagccatcaccctccatccagaatctgccatttcaaaaagcaagatggggctaacccccctatggcgagacagctcagctctctcaagccagcggaatagtttcccaacttccttttggaccagctcttaccagcccccacctgcaccttgtttggggggagttcatcctgacttccaggtcactggaccccctggcaccttttctgcagctgatcccagtccttggccgggacacaacctgcatcagactggcccagcccctccccctgctgtgtctgagtcctggccttatcctttgacatctcaggtgagcccatcctacagccatatgcatgacgtgtacatgcggcaccaccaccctcatgcccacatgcaccaccgccaccgccaccatcatcaccatcaccaccctcctgctggctctgccctggatccatcctatgggcctctgctgatgccttcagtgcatgcggccaggattcctgctccccagtgtgacatcacaaagacagaaccaactacagtcacctctgctacctcagcatgggctggagcctttcatggaacagtagacatagtgcccagcgtgggattcgatacaggtctacagcatcaagacaagagtaaggaatcaccgtggtactgaaacacacaatcttagtgagttaagttgcagcataaatccaagggcccactgggaaaagatactgtcgggtttttccattcagcaataggacacgaaaggcatagaaggagaagacaaagtgtcacgcagttgactggttttcggcctttcttgagaaagcaaagtgggtcccagacattgaagaaaagcatttttatttgtttatttcctcatctgagcctttgccaactgtgcaactctctccttttgttatcttgcttttatcaatatatagctaagtttttgtttcattttgatttttttttttagccaaccaccttgtcaggaaaggatgaaccacacattaaaatgttcattctttcaggaatacaagtttgtagctctatgtgcatctatttttgtagaaatacaaaaagtttggtttagcattgatgggctatttttgagggatgtattttttttaaaattgtaaaaattgttgagttctgtttaaagaacttgctctcagagaagcactggcaaaaatgtttaaaatgcttatctctaagatgtctattatatgctctgtctgtgctttctaggttacctcaaatgttttgtttttttccttcttacaaaagtagctataccgtagtcaaaccaatgcagtattgtttttacattgaatctcagtaaagatttaattccatgctagctcaattagttttgaattatatgtatagcttgaaaagtttttttttaatgactgtgctaaagaaatgatattttattgctttgatttctcccaaagaataacttggaggttgactaataagaaagttggcataaactttcaatcaaatgaagagtttgcctagaggagactaattctctttctagcccatccaaatttgataaatggaaccagaggttatatacaactacaaggaaaaaaatgcatttaaccatgccacctatgagtgccagtgacttattttacttgtttttaattattcattcatggcaatttaaaaagtcatattttaagtgggatttgtttttcctgaagggcatttgaaggaacaatatctgggaaggtactagagaaattacaaagcccgagctctttcttataatgccacctatccctgtaagctaaacaaacaaacaaacaaacaaacaaacagttctatatataatagtttcaacacagaacttaacaagtctctttttttgtttgtttaaatctggctttacttgatttaattcctttttagaaagaaatttagggcaaaataaagtgtatattaggatttaaatttatgccacaatttaaaaataaaaccagaggttatatacaatttaaattgggctaaaaattaaaaatttgaggatttaacttgatatagctctcaggatctaaataaagtttaaattatcattaagacactgctaggagaagattaagattatgaaagtaacagttattgatactgctggacttcaaaggcaaagttcatttcttccattaactgcttccagagatgtcatgtaaaaaagttagtgtattagagaagttttttagctttataaagaggttttttcaaatttctcccatttttctctccacccacataaaatagtatgttcagtgaaatgccactttctatctttaattgttcgtatcatatatgcgaactttttagacatgaacatgacatgttcagctaggcagagttctcatagataattttcaaatattttccttggctgtaatttatgtattcatttatatcctatccgtcttttgagcttcagatctatatactcttttgtactctcatcactccgcactttgctgtttcttacctagactctcttttacacaatatgcacatttttaccattgtggggtccaaatttaagataccttccactcactaataatatgaacttatatttcctgggagtagccaggttaaattttctatactttggtccataatttgatttgatatgattgtttcatttataatttgcccaaatacatggagcacaaaatttagtgaatttataaatctggatttgccttgtgtccttctgagttttcaaaggcaagtattcaacagtccctgtgtgatgactgacagggttatttgcctcatccacatccaccttcggaatacattaacttcctttgtaatttatttgaaagtagtgttaaactcattcagatcattcagttggattttcccaatgaagaggaaaaggaaagtagttattcctagctccatttcttattttccaccaaatttaattgaagggcattaattagatgtcttcaccctgaatttagactttgctctgtgttctcccggtaactgtcagacaaaaagtttattggctctgaggaactgagaaatgttgggaacctggtttctgctgtacacaggaaagatttgtaagtgagctctctctttgaaaacaggacccaggctgggcacagcagctcatgcctgtaatcctagtattataggaggcagaggctcgggaggattgcttgagcccaggagttcaagatcagcctaggcaacatagggagaccctatccctacaaaaaatttctgaaaaattacctgggcattgtggggcacacctgttgtcccagctactctggaggctgagtccggaggaacgtttgagcctgggagtttgagtttgcagcttgcagtgagctgtgattgcaccactgtactccagcttgggcaacagagcaagatcctgtctcaaaaggaaaaagaaaacaggacctaggtgtttggggtacactgccacccagggagtggatcaaaaatatacatagaaagagaatgagcatgtctctataattgtcttctaggaccatattgctgttagaagtcctaaaagaggatgggttgtaatttagcataatattctgaattcattccaagtttaaaatcctgtcattctctggctcttcttttttcacatcaaaatgatgctgttggacttagaggcttccgaactgttttattgagggctactatctgcctccacaattttattaaaaccactccacctttagacaaaggtgacttttgtctgattttacaaatcagattttattcaagctttctaaatatctgtgaagtagaccctagaaaattgtctcgtttattttaaatagaatctatgcttccaccaataaaccatcgggagctaagaaacaacataatgttgacaaatcaggaacctaacagattattttgtctctcattattaatttgaaagagcctctaaacttttgagaaatcaatgtgtcttcttaagaaagttaagcaccctctcttaactttcccctctatttgctctcctttttctttcttcttaagagtatttatattattttgttaagcaaaaatggctaagattgctctaaaatttgcaaaatgaggagtggattgcaaataattgagggatttatttctttaactttataagactttaaaaaaaaaacccaaattctaagcactgacatgaaagttgcctttgagaagcttgttattcattatacaaaaagtatttgcccattcctattctaagatttgcagaatatgtcaccctatctagcttttgagtttgctatctggtttaatgttgtatttataatttaaagtggaaatcagaaactgtttcaagaacctgtattctattccttactgagtgtcccttctttaaatagtgtttgctgaattaagccgatgggggcagtggcgttaagtggtggaaaaaggaaagtatatatgttagagttttgaatgagggataaatagaaagcagaatgaattaatggaaaagaactcggctgttaggccattctctaaattctagtttagccaaaagtttatgtgtggtttggggcttcatttatttatctcatgagtaaaatggaataatacctaacaggcaggctctggaagttggaaatcacatacacacacacacacacacagacacacacacacacgatcaatcatgtagctcatattagatgttcaataaataacagctactacagatgcctatcagttgagtaagtagttcattaaattgagctcccaaaggtctcttctcttcacatccatatccgtttctgcagcaatcaaatagatacatgattgtttttctgtaagaaattactgcaaagagaatctttttctcctactaactgttccttctacctggtataggagataaatgtacgtttcttaattagctgactttttagtatgtcatttctgaaggaaaaataaattaaccttaaagtggcatgtaggtccaattcagttttcctacatgttccaaaattttatttaaattactgtgtccaaaattatgaggacagtgtcattcattcaccatagtttatatttttagttatatatcaaacttccttggcacctaggataagaacatttcttttgaagttatccaatttttttttatttttacttgacttgaaggaaagttggaaaatatggtggaaaaaatcttccgcattaaaagggggaaaaacacaaccatttacgatctcagtcagcagatttactctactcaaggaaaaaaagaaacaatcttattggaagcagatgttgacactgtgtcagttattgaagacggaaggagttcacttgagccattgcagttacaaaggggtattgatggcagtttggattcctgattgatcacctttgcagccaagggaaagacagcagaaactgtatgggatcagaaatgaaatcagcctgccagtttaatggagaggctcctagaaactcattttttttctttcctgtaagataaaagacatctttcagaataagaaaggcttgtttgagagagaaattacagtttattctctgaaaatatttaaaggccaaagtgccctttaaatctattattaaagcattgaaactgttattaaaatcattatagaaaaattaggtaaaaattttagcctaactttcaacatccattcaaaaacgaatgttgaaaacaaacatataacctataaaaaagtgaatggctctggcaagtgggggcatgggtggagtccataaggaaacctcagtctcaataacttcaaaatgttacttttcatggtaacttggtcatggagattggtcacagcacagacatttagaattttttagcaggttttttttttcttttgaatcttgtagtgctctctgggaattgcaccatgtacacttttacaacctacagaaatcgtcattattgttaaagtatctcaacttttctatttcttttattgtctattgtgcttttttgtttaaaaatacttttatagttttaaagtattggtcaaagtagtattctcttgaagttctagtcaatttaatttgatccaataagtttttctgaatctcctttttaagttccaagaaattctattataaataagtgtacttttaccaattccattgtataagcaaacagacaccttttagaaaaggataagtaatcatcaatttgtttttttaaaaaaaaaaacaatttctagactactaaatttggcataagaataattcttttaaaatgcaacatactttaattagtttttttggtatatgcataagatgtgaactttcctattgatatcactttatattaatagagatgtacatttctttctatgccgtggctagagcaaaagttaataatgattatttacacaattgatttaatttcttaggatatgtataatattggatattatatctgatttaaaaatactattccatacattttttttttcaggagataaaacatagggaaaggttttcatgtgaattctttgtatcactttgaagtacatatatttaaagggaagatggatacaatttgtttttattatataaatctaggtaaggtgaaatgcttttgtcaacaaaaatacagtgtagtgaattttatatttgtcacttgattaggtaaactgaaaactaacaatagaaatattattttactgcattgaaataccatgaactttcagacttgttagttctacaagaagttgtgctaccttaattttgtgtttccagaaataaaaattaaccttagttatgctgtcatttttaactaataaaaaaagtataattcataaaacttttggctttataagataattataaaattatatatttttttctgtttttgtggggttgggaaaacattttcttatttctattcactcttcaaatgcaggtctcataatatgtgtcaatgatataagatgatggaagactttgtaataaaaacatatgtcattatcttcaatttgttcaataaataatttaatgtgaattgaatgtttgtattttaacatagcatttggatttggtctgcatttcttgagaatttaaagctctttttgtttcctccttattcaattaagcatcttataaatattttggaaattacaacatcttaggtgttattaattaagaagttaatttctagggccaagaagtctatatgttacagcaaggaatagattataaaatacatgtttataatggaaaagaaaatgaaatggggtatattaattacataacagcaagagtcttgagaattttataatacaatgcttctaaggatattggttgaccaaggtgtattttattgtttttacatttgttgacagggactctgccataagtagtatgaaaaaacaaacaaaaacttttctacgattcattaacattgaaaagagaattccaagaccttgtattctgaagaaagctagagtttctctaagtgggccttcaattttcttattacacgtatctttaatgtgaaagtactaaagtctgaaaatcagcatttaaataatagactttccagcattacagatgaaataatttggcgcaggctttttaactgtctaccatatttagaatgtggtgtcaaaatgagatttttagaactgctgtaaaatattactacattactacaacgataacggcctaaaacaacacaaatttattatcttacagctctgtcagtcagacattcagcaaagatcttagtcttggtgggctacagaatgtaggaggcatttcctggatgcttccaagagagaatcttgctgttccctgcttctagagtcctttgcttagtttccttccatcttcaaatccagcaacctggtcaagaccttctcacatgacatcactgacttcctcttcttcctctcccttacatatttaaggactcatgtgattacaatagctgcatctgtgtaatccagaataatctcttcatctcaaggtttttgttctgttttgtttttttgttttgttttgttttgttttgttttgatggagtcttgctctgtcgtcaggctggagtgcagtggcgcgatctcggctcactccaacctccacctcccgggttcaaaggattcccctgcctcagcctctcgagtagctgggactacagatgcgtgctaccacacaaggctaatattttgtattttagtagagacgggatttcaccatgttggccaggatggtctccgtctcctgacctcgtgatctgcctgccttggcctcccaaagtgttgggattacaggcataagccattgcgccatgctcaaggttcttaattacatctttaaaggccctttttccatgtacagtaacatattcaatggttctggggattaggacttggagccattattctacctacaacaattagtattggacttccatcattttctatcactcttgtaatcgagaaggactatttcactgggagtagcaagtcataatgtttgcgttggcatttgtgtgggggtttatcttcattcattaaataattgcatgtaaagaaaattcctgtcactatttcaaatgtttcatgtagttattatagtgcttcagaatccaaagggttatgtgttacttatgtaagatgagcagtctagggggtggagaacaggtcatctagtgcagattcttcctagctgaagtgtgttttctctggggacaaccaagtaggatttaattgttttgcttccttttttgggaacttagacccatcttgcgatgtcctaagtctccaagcatcttatttgacctgcttatacacatttgactaaatagctaaatatgaccacattgacgtggtaaagctttaacacttttgtccagattgaatcactccatctgctatcagttaagcagtggaaaactgttatggaaaagcaaacatgttttgatagatttaatgtgtaaagaaggtatccatactctggaatgctgctgatcaataaatgagctgcaagactttgttcgaaacaacactcaagcacaactgttttactttccataccaagtttggctgtgactgaatgaagaacatcagcattgatctttgctttgcacttgtacaagagactatttgcagagagccaaatatagcaacagaggatttaatatcttgccaaaaaatacaaaatctgttcccctttaagcatgacactctatcctttcttgtggatcttgctaaaaggaaaatatagctttaaactcccctattccttctgttgaaagcttaagaatctttttcaaatgagctatgtatggttttgtggtattttatgtttccaaaagaaaatggctacatgaaaaatctgtccagtgttatcatttttcttacaaaaaatacttctagttatggttgtattaattaatttgattgtgataatgattacacaatgtttacctatatcaaatcatcatatcgtataccttaaatatatataacttttatgtgtcaattataactcagtaagtctgggaaaatatcgttaagtcaaagattagagtcaacagaaataaagaaaaatcatactttgataacttcaggactaatcaaggatcaatgggtgacatgatatcatgctatgtgccattttgtgttaaacaaattacaccaacaataaaaaaaattggcttcaatcaa

SEQ ID NO: 199077 - DNA, 624 bp, Homo sapiens
  Payload ID: 19278
  Gene Name: vestigial-like family member 3
  ENST ID: ENST00000494229
  CDS Start-End: 1-624
agcgtcccagtatctgcccaaccccatggcagcgacaacctgccccacagcctactatcagccggcgccccaacctggccagcagggagacattgggtcagtagtggatgaacacttctcaagagctttgggccaagccatcaccctccatccagaatctgccatttcaaaaagcaagatggggctaacccccctatggcgagacagctcagctctctcaagccagcggaatagtttcccaacttccttttggaccagctcttaccagcccccacctgcaccttgtttggggggagttcatcctgacttccaggtcactggaccccctggcaccttttctgcagctgatcccagtccttggccgggacacaacctgcatcagactggcccagcccctccccctgctgtgtctgagtcctggccttatcctttgacatctcaggtgagcccatcctacagccatatgcatgacgtgtacatgcggcaccaccaccctcatgcccacatgcaccaccgccaccgccaccatcatcaccatcaccaccctcctgctggctctgccctggatccatcctatgggcctctgctgatgccttcagtgcatgcggccaggattcctgctcc

SEQ ID NO: 199078 - DNA, 3725 bp, Homo sapiens
  Payload ID: 19279
  Gene Name: vestigial-like family member 4
  ENST ID: ENST00000273038
  CDS Start-End: 367-1239
acatttcagagcagtccgggttgtggacgccaggagtttgccaaacacagcaaacactggtgtgtgagcggctgaaggggactctttccactccgatctccctccctcccagcctgttttgatttactaggacttcctcctccgggcgaggcgggggaaggacgccgccgagcgcctggagttgtgcgcgtgtgcgtgtgcgcgtgtgcgagtgtgaagtgcagcgctggagtgcaacatgctgtaatgggaggaaacccagcggcgtcggagcgcccgggaccgccgcggccgttctgagcgcagtggcgccgagcagcccctcccgcagccggtgtgacctgtcccttcaggctccaaccaggaatggagacgccattggatgttttgtccagggcagcatctctggtgcatgctgatgacgaaaaacgcgaagctgctctcaggggagaacccagaatacagaccctgccggtggcctctgccctcagcagtcaccgcaccggccctcccccaatcagccccagcaagaggaagttcagcatggagccaggtgacgaggacctagactgtgacaacgaccacgtctccaaaatgagtcgcatcttcaacccccatctgaacaagactgccaatggagactgccgcagagacccccgggagcggagccgcagccccatcgagcgcgctgtggcccccaccatgagcctgcacggcagccacctgtacacctccctccccagccttggcctggagcagcccctcgcactgaccaagaacagcctggacgccagcaggccagccggcctctcgcccacactgaccccgggggagcggcagcagaaccggccctccgtgatcacctgtgcctcggctggcgcccgcaactgcaacctctcgcactgccccatcgcgcacagcggctgtgccgcgcccgggcctgccagctaccggaggccaccgagcgctgccaccacctgtgaccccgtggtggaggagcatttccgcaggagcctgggcaagaattacaaggagcccgagccggcacccaactccgtgtccatcacgggctccgtggacgaccactttgccaaagctctgggtgacacgtggctccagatcaaagcggccaaggacggagcatccagcagccctgagtccgcctctcgcaggggccagcccgccagcccctctgcccacatggtcagccacagtcactccccctctgtggtctcctgaagggagcgcctcctccaacaacacgtggatctgcatggtttgcctgagctttgaacagtcagtacttaaaaaaaaaaaaatcatgggggtggggtggggggaagggaagggatggtttatttgcaaaaaccatgttgttgggatttgtgttctgtttttgtacttgcttggtatccgtacaagggggccctcaaacatgatagcaggaactacgcgtggaacatctgtctaatgtagcatccttacttcctgcctcagttaccaaagaaacctctgatgcaggtctgctgccccgacggggccaggactccacagcgctttctcagtcacaagccatgatgaattggtgactcagacgctttgtgctttttcctttgcttcttgagaccggggtgtgtgtggctcagcttccacggcgtgtttggttcggtccatgtgtgtgcgtgtgtatacttgaagagaactgtcgtgtctgatttgcactattggaggaggactaaagttgcctgacaactttatgtgttatgccagaactctgagggcaaactgctgaaaaacaaagggtttaaggatgacatttctgaccatttgtgtgtttgttgttgttactgtttttgttttttttaatgtagacaatacagctttggaaggggaagtctcatacaggttataggtctttctctctctagatttcaggtgcttgcaactggactgcagactctaccaatcacgggcattttatcttctctgaacactgcagtttgttagactagagctgaggttggaggattccatagtgctttaaacgtgatgcatgttttaatggagaaaaaatagctggtttctattaattatatagacagtaaacaaaaaccttaatacttactatcttcttttcagaattagtttatttttgtcagttacagtcctagatatacttactgctggtacagttgtactctaagattggtatttgatattcactttactcacaagtagtgcgggaggccagctcctggcaggccctcgcgatgagcagtgggtcagctgcggtgtgggatgctggagtttggctgcaggctgacatcatttatttttgcatccctgtctgctttgttacaagctcccaggggaggtggggtttgtgtcttccaacttccctacatgcagaaactgctccctttgaactctcttggctgaacagcagattactgacagacaatctgtgatatggtgttttatacgcttcctcgtacgctggggccaaggcagtatacattcctctgactttatactgttattactgcatttattatttgctatattaatagctactaactagaaattagatgaagcaagcatgacagacacagctgtggaggtcacagctgctcctttttggtcaatgagcgtttctatcccctccccctggggtgtgctgtgtcccacctggcccaccagaggctcacgacgatggcacctgaccaggtgacgtgggcgtggtcacctcacctgcaaggctttgtggactctgcacaccgtatgacccccggttttacagtttttagctgttgaattttggaaattggcactgggtgaaaaggtcggaggactggctcttgtagtcacagagtggctgcaggcctttgaaaagtggaggaaagaaaagcccttctccttgccccgcacacatttcactcccactgtactgggcttccaagctttggcattcaggcccctatattttctgtaggaaaaatcgttgagaacacttttctatatgggtgattttgagaccatcgttacgctgtgcgtaaagaatgtacagagaaatttgtaggtattttttgaagaacattaatttgttaatgatatgtagctatttaatttttccctttcctattgtaatcattcattttttttgttgttcggaaaaaaaaagttgatctttttttttgtcgtagatttgtctgtaaaagtgcaggaacagttattctatgagaacactgcatctgcattcatagccacgagtttgttattgctacaggctactgagcgtcgtaacaggaaaaccacccacagctgaccggctcggtggaggacactcctgggacaggtctctttgtcagtgaacaagggcgtcactctgggaggggtcggcggtgctggcggccgggtccctggtgcactgacctatctgggataggcagtaccctggaggggggcctggggcagaggaggcagcagaaaaccaaacatttcactgagaaagccccctccctgctctaagaaggggctccgtgaagttcttcccagagccgcgctgcctgcagtgcgctctgaccttctcttcatgtgtgtaaatctgtaatataccattctctgtggcctgtttttcctggaagaagaaaaaaaaaggtttggcaggccatctttttttgtacttaaaagtagccttaagaacaataataaagtgctcttaaacc

SEQ ID NO: 199079 - DNA, 437 bp, Homo sapiens
  Payload ID: 19279
  Gene Name: vestigial-like family member 4
  ENST ID: ENST00000424709
  CDS Start-End: 193-437
gcactttcctagtttactcagaggcctctgaggctacctgagagccagagtctagggaatggaggaccaagaatagaaggcgaagctgctctcaggggagaacccagaatacagaccctgccggtggcctctgccctcagcagtcaccgcaccggccctcccccaatcagccccagcaagaggaagttcagcatggagccaggtgacgaggacctagactgtgacaacgaccacgtctccaaaatgagtcgcatcttcaacccccatctgaacaagactgccaatggagactgccgcagagacccccgggagcggagccgcagccccatcgagcgcgctgtggcccccaccatgagcctgcacggcagccacctgtacacctccctccccagccttggcctggagcagcccctcgcactgaccaagaacagcctgga

SEQ ID NO: 199080 - DNA, 581 bp, Homo sapiens
  Payload ID: 19279
  Gene Name: vestigial-like family member 4
  ENST ID: ENST00000417206
  CDS Start-End: 74-581
agggattcctcgcgctcccgcgctcccgtccgccggcccggtccgcgcgtgcgtgtgcgtgctccaaccaggaatggagacgccattggatgttttgtccagggcagcatctctggtgcatgctgatgacgaaaaacgcgaagctgctctcaggggagaacccagaatacagaccctgccggtggcctctgccctcagcagtcaccgcaccggccctcccccaatcagccccagcaagaggaagttcagcatggagccaggtgacgaggacctagactgtgacaacgaccacgtctccaaaatgagtcgcatcttcaacccccatctgaacaagactgccaatggagactgccgcagagacccccgggagcggagccgcagccccatcgagcgcgctgtggcccccaccatgagcctgcacggcagccacctgtacacctccctccccagccttggcctggagcagcccctcgcactgaccaagaacagcctggacgccagcaggccagccggcctctcgcccacactgaccccgggggagcggcagcaggtgggcctctgtctgggagggtggcgtgggg

SEQ ID NO: 199081 - DNA, 544 bp, Homo sapiens
  Payload ID: 19279
  Gene Name: vestigial-like family member 4
  ENST ID: ENST00000437722
  CDS Start-End: 363-544
atagtatgagaggtgctttgtgttgccacccaagggctgggggattgcaggcgatccttgcgcttgggcagacagcacgtcacggcttttatctgccggctcgcattgcaatgggcgtcctataaaaaaagaaaaaagtgagccagaatggggctagccacaagttgaacaatttgaaggagattgacttcacggtgtcttctccccagctgctcgaccgtgagacaaagaagtattatttgaaagaaagcgaagctgctctcaggggagaacccagaatacagaccctgccggtggcctctgccctcagcagtcaccgcaccggccctcccccaatcagccccagcaagaggaagttcagcatggagccaggtgacgaggacctagactgtgacaacgaccacgtctccaaaatgagtcgcatcttcaacccccatctgaacaagactgccaatggagactgccgcagagacccccgggagcggagccgcagccccatcgagcgcgctgtggcccccaccatgagcctgcacggcagccacct

SEQ ID NO: 199082 - DNA, 766 bp, Homo sapiens
  Payload ID: 19279
  Gene Name: vestigial-like family member 4
  ENST ID: ENST00000458499
  CDS Start-End: 197-766
ggggtttcaccatgttggccaggctggtctcgaactcctgaccttagatgatccaactgcctcggcctcccaaagtgctgggattacagatgtaatgaaatctccagctctgccagatcttttgtgtcatgagaaaaaaccaaaacaacttagttcctgcccatccagggcttatctttgaagtaataagaggagaatgaaagacttgaagaaaagagtggcacttggatacatttccacccacacaggcgaagctgctctcaggggagaacccagaatacagaccctgccggtggcctctgccctcagcagtcaccgcaccggccctcccccaatcagccccagcaagaggaagttcagcatggagccaggtgacgaggacctagactgtgacaacgaccacgtctccaaaatgagtcgcatcttcaacccccatctgaacaagactgccaatggagactgccgcagagacccccgggagcggagccgcagccccatcgagcgcgctgtggcccccaccatgagcctgcacggcagccacctgtacacctccctccccagccttggcctggagcagcccctcgcactgaccaagaacagcctggacgccagcaggccagccggcctctcgcccacactgaccccgggggagcggcagcagaaccggccctccgtgatcacctgtgcctcggctggcgcccgcaactgcaacctctcgcactgccccatcgcgcacagcggctgtgccgcgcccgggcctgccagc

SEQ ID NO: 199083 - DNA, 792 bp, Homo sapiens
  Payload ID: 19279
  Gene Name: vestigial-like family member 4
  ENST ID: ENST00000418000
  CDS Start-End: 192-792
gcgcgtgcgtgtgcgtgtgcgtgtttggcgggggcccgtgcgggggctcgggcgcgagcccgcctgtgcgtctgcgcgccctcggggtgcgccccgcgtgcccaggtcccgtccccgcccctgggtcccccgcagggccaggccggccccaggcgggcgcgcccagagccgccgggcggctccaaccaggaatggagacgccattggatgttttgtccagggcagcatctctggtgcatgctgatgacgaaaaacgcgaagctgctctcaggggagaacccagaatacagaccctgccggtggcctctgccctcagcagtcaccgcaccggccctcccccaatcagccccagcaagaggaagttcagcatggagccaggtgacgaggacctagactgtgacaacgaccacgtctccaaaatgagtcgcatcttcaacccccatctgaacaagactgccaatggagactgccgcagagacccccgggagcggagccgcagccccatcgagcgcgctgtggcccccaccatgagcctgcacggcagccacctgtacacctccctccccagccttggcctggagcagcccctcgcactgaccaagaacagcctggacgccagcaggccagccggcctctcgcccacactgaccccgggggagcggcagcagaaccggccctccgtgatcacctgtgcctcggctggcgcccgcaactgcaacctctcgcactgccccatcgcgcacagcggctgtgccgcgcccgggcctgccagctaccggaggccaccgagcg

SEQ ID NO: 199084 - DNA, 466 bp, Homo sapiens
  Payload ID: 19279
  Gene Name: vestigial-like family member 4
  ENST ID: ENST00000419541
  CDS Start-End: 85-466
ggcaggaacacctggcagtttgaatgtgattcctccgatgctcacccccctggcctccacatctagacaaggctccaaccaggaatggagacgccattggatgttttgtccagggcagcatctctggtgcatgctgatgacgaaaaacgcgaagctgctctcaggggagaacccagaatacagaccctgccggtggcctctgccctcagcagtcaccgcaccggccctcccccaatcagccccagcaagaggaagttcagcatggagccaggtgacgaggacctagactgtgacaacgaccacgtctccaaaatgagtcgcatcttcaacccccatctgaacaagactgccaatggagactgccgcagagacccccgggagcggagccgcagccccatcgagcgcgctgtggcccccaccatgagcctgcacggcagccacctgtacacctccctccccagccttg

SEQ ID NO: 199085 - DNA, 1025 bp, Homo sapiens
  Payload ID: 19279
  Gene Name: vestigial-like family member 4
  Uniprot ID: Q14135
  ENST ID: ENST00000424529
  CDS Start-End: 319-939
agtgcccgcctaggatggggatgaggcccggggcggggccgggtgccgtgcagcctcagcggctctgataggcctggcacggagccactcagagtcctttgggtgttcgcggggatgccgtgggctctctcgggcacagtcctgaccaggagcggaggcgacttccatctcccgggcaggatgcgtgcggttttctgccgtccccgggagcacatgacgcctgggaagcagtggccgggaggtgattcatccgggcgagcggggcctggaaaacaatgtctgtcttgaagctccgggaaccaggaaaatgagctggaaatgaacaagactgccaatggagactgccgcagagacccccgggagcggagccgcagccccatcgagcgcgctgtggcccccaccatgagcctgcacggcagccacctgtacacctccctccccagccttggcctggagcagcccctcgcactgaccaagaacagcctggacgccagcaggccagccggcctctcgcccacactgaccccgggggagcggcagcagaaccggccctccgtgatcacctgtgcctcggctggcgcccgcaactgcaacctctcgcactgccccatcgcgcacagcggctgtgccgcgcccgggcctgccagctaccggaggccaccgagcgctgccaccacctgtgaccccgtggtggaggagcatttccgcaggagcctgggcaagaattacaaggagcccgagccggcacccaactccgtgtccatcacgggctccgtggacgaccactttgccaaagctctgggtgacacgtggctccagatcaaagcggccaaggacggagcatccagcagccctgagtccgcctctcgcaggggccagcccgccagcccctctgcccacatggtcagccacagtcactccccctctgtggtctcctgaagggagcgcctcctccaacaacacgtggatctgcatggtttgcctgagctttgaacagtcagtacttaaaaaaaaaaaaatcatgg

SEQ ID NO: 199086 - DNA, 1377 bp, Homo sapiens
  Payload ID: 19279
  Gene Name: vestigial-like family member 4
  ENST ID: ENST00000430365
  CDS Start-End: 407-1297
atgccaagcatagccctcatgtcagcgctgccggcttgcagcgggctgtgagaggggccggcgccgctttgtcctaggaaacgggctgcgcgtttctctttttcactcttttccatttccaggaaggacttgtaaggacttctgaaacgctgttttcatactcgatcggggatacagtacatacaccgtctaccagtaagcccttgaagggtttcgtgtgagctcgatttttttgtgcctgatttttttttttttaacttttgcatactttgttttgatagtctgaggctgggcctctgcctttgtgaagttgaagagccaggagctactcagcaacaattgatttttgaaacttaactcttttggggcaaaagcaaagagctggttttctttgctagcccaataaatgctatttatgaagatggacctgttgaactatcagtacttggacaagatgaacaacaatatcggcattctgtgctacgaaggcgaagctgctctcaggggagaacccagaatacagaccctgccggtggcctctgccctcagcagtcaccgcaccggccctcccccaatcagccccagcaagaggaagttcagcatggagccaggtgacgaggacctagactgtgacaacgaccacgtctccaaaatgagtcgcatcttcaacccccatctgaacaagactgccaatggagactgccgcagagacccccgggagcggagccgcagccccatcgagcgcgctgtggcccccaccatgagcctgcacggcagccacctgtacacctccctccccagccttggcctggagcagcccctcgcactgaccaagaacagcctggacgccagcaggccagccggcctctcgcccacactgaccccgggggagcggcagcagaaccggccctccgtgatcacctgtgcctcggctggcgcccgcaactgcaacctctcgcactgccccatcgcgcacagcggctgtgccgcgcccgggcctgccagctaccggaggccaccgagcgctgccaccacctgtgaccccgtggtggaggagcatttccgcaggagcctgggcaagaattacaaggagcccgagccggcacccaactccgtgtccatcacgggctccgtggacgaccactttgccaaagctctgggtgacacgtggctccagatcaaagcggccaaggacggagcatccagcagccctgagtccgcctctcgcaggggccagcccgccagcccctctgcccacatggtcagccacagtcactccccctctgtggtctcctgaagggagcgcctcctccaacaacacgtggatctgcatggtttgcctgagctttgaacagtcagtacttaaaaaaaaaaaaa

SEQ ID NO: 199087 - DNA, 1554 bp, Homo sapiens
  Payload ID: 19279
  Gene Name: vestigial-like family member 4
  ENST ID: ENST00000413604
  CDS Start-End: 372-1067
aattttaaccccaccacacatacaacagttaccactcttgtctaacatacaagtgttgggttaaggccatctagggaggggccccaaagatgcataaaggcacataactgaacggacctgtccctgaccttatgtgcggattcttttcctttgctgtaagccttgtgtgaggctgcacagtcttaggatgaggcgttgtctgattgcagaggccatgggttcttgcctccagctaacctgttaactggaggatcttgggcgaagctgctctcaggggagaacccagaatacagaccctgccggtggcctctgccctcagcagtcaccgcaccggccctcccccaatcagccccagcaagaggaagttcagcatggagccaggtgacgaggacctagactgtgacaacgaccacgtctccaaaatgagtcgcatcttcaacccccatctgaacaagactgccaatggagactgccgcagagacccccgggagcggagccgcagccccatcgagcgcgctgtggcccccaccatgagcctgcacggcagccacctgtacacctccctccccagccttggcctggagcagcccctcgcactgaccaagaacagcctggacgccagcaggccagccggcctctcgcccacactgaccccgggggagcggcagcagaaccggccctccgtgatcacctgtgcctcggctggcgcccgcaactgcaacctctcgcactgccccatcgcgcacagcggctgtgccgcgcccgggcctgccagctaccggaggccaccgagcgctgccaccacctgtgaccccgtggtggaggagcatttccgcaggagcctgggcaagaattacaaggagcccgagccggcacccaactccgtgtccatcacgggctccgtggacgaccactttgccaaagctctgggtgacacgtggctccagatcaaagcggccaaggacggagcatccagcagccctgagtccgcctctcgcaggggccagcccgccagcccctctgcccacatggtcagccacagtcactccccctctgtggtctcctgaagggagcgcctcctccaacaacacgtggatctgcatggtttgcctgagctttgaacagtcagtacttaaaaaaaaaaaaatcatgggggtggggtggggggaagggaagggatggtttatttgcaaaaaccatgttgttgggatttgtgttctgtttttgtacttgcttggtatccgtacaagggggccctcaaacatgatagcaggaactacgcgtggaacatctgtctaatgtagcatccttacttcctgcctcagttaccaaagaaacctctgatgcaggtctgctgccccgacggggccaggactccacagcgctttctcagtcacaagccatgatgaattggtgactcagacgctttgtgctttttcctttgcttcttgagaccggggtgtgtgtggctcagcttccacggcgtgtttggttcggtccatgtgtgtgcgtgtgtatacttgaagagaactgtcgtgtctgatttgcactatt

SEQ ID NO: 199088 - DNA, 894 bp, Homo sapiens
  Payload ID: 19279
  Gene Name: vestigial-like family member 4
  ENST ID: ENST00000417466
  CDS Start-End: 454-894
gcgctcccgtccgccggcccggtccgcgcgtgcgtgtgcgtgtgcgtgtttggcgggggcccgtgcgggggctcgggcgcgagcccgcctgtgcgtctgcgcgccctcggggtgcgccccgcgtgcccaggtcccgtccccgcccctgggtcccccgcagggccaggccggccccaggcgggcgcgcccagagccgccgggcggctccaaccaggaatggagacgccattggatgttttgtccagggcagcatctctggtgcatgctgatgacgaaaaacggtcttgctctgttgcccagactggagtatagtggcacaatcttggctcactgcaagctccgccccctggggctcaagtgatcctcccacctcagcctctcgagtagctgggaccacagcgtcacctgggaacttgttagaaatgcagaatcgtagtcctcgctgcggaactgatgactgagaatacgcattttgacaaaatccctgagtcctgtgcactcaaaagttggagacatccaggtctgcaccatggcgaagctgctctcaggggagaacccagaatacagaccctgccggtggcctctgccctcagcagtcaccgcaccggccctcccccaatcagccccagcaagaggaagttcagcatggagccaggtgacgaggacctagactgtgacaacgaccacgtctccaaaatgagtcgcatcttcaacccccatctgaacaagactgccaatggagactgccgcagagacccccgggagcggagccgcagccccatcgagcgcgctgtggcccccaccatgagcctgcacggcagccacctgtacacctccctccccagccttggcctggagcagcccctcgcactgaccaagaacagcctggacgcc

SEQ ID NO: 199089 - DNA, 726 bp, Homo sapiens
  Payload ID: 19279
  Gene Name: vestigial-like family member 4
  ENST ID: ENST00000445411
  CDS Start-End: 56-726
gggttgtggacgccaggagtttgccaaacacagcaaacactggctccaaccaggaatggagacgccattggatgttttgtccagggcagcatctctggtgcatgctgatgacgaaaaacgcgaagctgctctcaggggagaacccagaatacagaccctgccggtggcctctgccctcagcagtcaccgcaccggccctcccccaatcagccccagcaagaggaagttcagcatggagccaggtgacgaggacctagactgtgacaacgaccacgtctccaaaatgagtcgcatcttcaacccccatctgaacaagactgccaatggagactgccgcagagacccccgggagcggagccgcagccccatcgagcgcgctgtggcccccaccatgagcctgcacggcagccacctgtacacctccctccccagccttggcctggagcagcccctcgcactgaccaagaacagcctggacgccagcaggccagccggcctctcgcccacactgaccccgggggagcggcagcagaaccggccctccgtgatcacctgtgcctcggctggcgcccgcaactgcaacctctcgcactgccccatcgcgcacagcggctgtgccgcgcccgggcctgccagctaccggaggccaccgagcgctgccaccacctgtgaccccgtggtggaggagcatttccgcaggagcctgggcaagaattacaaggagcc

SEQ ID NO: 199090 - DNA, 1428 bp, Homo sapiens
  Payload ID: 19279
  Gene Name: vestigial-like family member 4
  ENST ID: ENST00000426568
  CDS Start-End: 461-1348
ggacgccaggagtttgccaaacacagcaaacactggtgtgtgagcggctgaaggggactctttccactccgatctccctccctcccagcctgttttgatttactaggacttcctcctccgggcgaggcgggggaaggacgccgccgagcgcctggagttgtgcgcgtgtgcgtgtgcgcgtgtgcgagtgtgaagtgcagcgctggagtgcaacatgctgtaatgggaggaaacccagcggcgtcggagcgcccgggaccgccgcggccgttctgagcgcagtggcgccgagcagcccctcccgcagccggtgtgacctgtcccttcaggctccaaccaggaatggagacgccattggatgttttgtccagggcagcatctctggtgcatgctgatgacgaaaaaccgtcacctgggaacttgttagaaatgcagaatcgtagtcctcgctgcggaactgatgactgagaatacgcattttgacaaaatccctgagtcctgtgcactcaaaagttggagacatccaggtctgcaccatggcgaagctgctctcaggggagaacccagaatacagaccctgccggtggcctctgccctcagcagtcaccgcaccggccctcccccaatcagccccagcaagaggaagttcagcatggagccaggtgacgaggacctagactgtgacaacgaccacgtctccaaaatgagtcgcatcttcaacccccatctgaacaagactgccaatggagactgccgcagagacccccgggagcggagccgcagccccatcgagcgcgctgtggcccccaccatgagcctgcacggcagccacctgtacacctccctccccagccttggcctggagcagcccctcgcactgaccaagaacagcctggacgccagcaggccagccggcctctcgcccacactgaccccgggggagcggcagcagaaccggccctccgtgatcacctgtgcctcggctggcgcccgcaactgcaacctctcgcactgccccatcgcgcacagcggctgtgccgcgcccgggcctgccagctaccggaggccaccgagcgctgccaccacctgtgaccccgtggtggaggagcatttccgcaggagcctgggcaagaattacaaggagcccgagccggcacccaactccgtgtccatcacgggctccgtggacgaccactttgccaaagctctgggtgacacgtggctccagatcaaagcggccaaggacggagcatccagcagccctgagtccgcctctcgcaggggccagcccgccagcccctctgcccacatggtcagccacagtcactccccctctgtggtctcctgaagggagcgcctcctccaacaacacgtggatctgcatggtttgcctgagctttgaacagtcagtacttaaaaaaaaaaaaa

SEQ ID NO: 199091 - DNA, 938 bp, Homo sapiens
  Payload ID: 19279
  Gene Name: vestigial-like family member 4
  Uniprot ID: Q14135
  ENST ID: ENST00000451674
  CDS Start-End: 93-725
atccagttttgtgcctgagactgcttgccaagtttgtgaggcccaaggctttcttgtgggaggacgctgggctgtcttcatgctctttggcaatgattaaagtgaggaacaagactgccaatggagactgccgcagagacccccgggagcggagccgcagccccatcgagcgcgctgtggcccccaccatgagcctgcacggcagccacctgtacacctccctccccagccttggcctggagcagcccctcgcactgaccaagaacagcctggacgccagcaggccagccggcctctcgcccacactgaccccgggggagcggcagcagaaccggccctccgtgatcacctgtgcctcggctggcgcccgcaactgcaacctctcgcactgccccatcgcgcacagcggctgtgccgcgcccgggcctgccagctaccggaggccaccgagcgctgccaccacctgtgaccccgtggtggaggagcatttccgcaggagcctgggcaagaattacaaggagcccgagccggcacccaactccgtgtccatcacgggctccgtggacgaccactttgccaaagctctgggtgacacgtggctccagatcaaagcggccaaggacggagcatccagcagccctgagtccgcctctcgcaggggccagcccgccagcccctctgcccacatggtcagccacagtcactccccctctgtggtctcctgaagggagcgcctcctccaacaacacgtggatctgcatggtttgcctgagctttgaacagtcagtacttaaaaaaaaaaaaatcatgggggtggggtggggggaagggaagggatggtttatttgcaaaaaccatgttgttgggatttgtgttctgtttttgtacttgcttggtatccgtacaagggggccctcaaacatgatagcaggaactac

SEQ ID NO: 199092 - DNA, 728 bp, Homo sapiens
  Payload ID: 19279
  Gene Name: vestigial-like family member 4
  ENST ID: ENST00000623028
  CDS Start-End: 552-728
ggcctttctaaaacgcccagcccgtccctggaggccacaggttattgcctgtgttctcttctcttttgatagccagccaagaagagggaacgcagggtgactcaccaggtgcccacctggactggatttaagtcagaagagaaggaagatgtgagtattcattaaacgtctctgcgaagcctgtaaccccacaccggctcttcgaagggctaagatccagtgagacaccgtgctgttccttgatatgatcagatgaggcaacagatgggaaaacagtttgaaaactgcaaagcattttttttttccagcacgaatgacttcctcctccgggcgaggcgggggaaggacgccgccgagcgcctggagttgtgcgcgtgtgcgtgtgcgcgtgtgcgagtgtgaagtgcagcgctggagtgcaacatgctgtaatgggaggaaacccagcggcgtcggagcgcccgggaccgccgcggccgttctgagcgcagtggcgccgagcagcccctcccgcagccggtgtgacctgtcccttcaggctccaaccaggaatggagacgccattggatgttttgtccagggcagcatctctggtgcatgctgatgacgaaaaacgcgaagctgctctcaggggagaacccagaatacagaccctgccggtggcctctgccctcagcagtcaccgcaccggccctcccccaatcagccccagcaagaggaagttcagc

SEQ ID NO: 199093 - DNA, 4919 bp, Homo sapiens
  Payload ID: 19280
  Gene Name: v-ets avian erythroblastosis virus E26 oncogene homolog
  Uniprot ID: P11308
  ENST ID: ENST00000288319
  CDS Start-End: 104-1543
aatctcatccgctctaaacaacctcatcaaaactactttctggtcagagagaagcaataattattattaacatttattaacgatcaataaacttgatcgcattatggccagcactattaaggaagccttatcagttgtgagtgaggaccagtcgttgtttgagtgtgcctacggaacgccacacctggctaagacagagatgaccgcgtcctcctccagcgactatggacagacttccaagatgagcccacgcgtccctcagcaggattggctgtctcaacccccagccagggtcaccatcaaaatggaatgtaaccctagccaggtgaatggctcaaggaactctcctgatgaatgcagtgtggccaaaggcgggaagatggtgggcagcccagacaccgttgggatgaactacggcagctacatggaggagaagcacatgccacccccaaacatgaccacgaacgagcgcagagttatcgtgccagcagatcctacgctatggagtacagaccatgtgcggcagtggctggagtgggcggtgaaagaatatggccttccagacgtcaacatcttgttattccagaacatcgatgggaaggaactgtgcaagatgaccaaggacgacttccagaggctcacccccagctacaacgccgacatccttctctcacatctccactacctcagagagactcctcttccacatttgacttcagatgatgttgataaagccttacaaaactctccacggttaatgcatgctagaaacacagggggtgcagcttttattttcccaaatacttcagtatatcctgaagctacgcaaagaattacaactaggccagatttaccatatgagccccccaggagatcagcctggaccggtcacggccaccccacgccccagtcgaaagctgctcaaccatctccttccacagtgcccaaaactgaagaccagcgtcctcagttagatccttatcagattcttggaccaacaagtagccgccttgcaaatccaggcagtggccagatccagctttggcagttcctcctggagctcctgtcggacagctccaactccagctgcatcacctgggaaggcaccaacggggagttcaagatgacggatcccgacgaggtggcccggcgctggggagagcggaagagcaaacccaacatgaactacgataagctcagccgcgccctccgttactactatgacaagaacatcatgaccaaggtccatgggaagcgctacgcctacaagttcgacttccacgggatcgcccaggccctccagccccaccccccggagtcatctctgtacaagtacccctcagacctcccgtacatgggctcctatcacgcccacccacagaagatgaactttgtggcgccccaccctccagccctccccgtgacatcttccagtttttttgctgccccaaacccatactggaattcaccaactgggggtatataccccaacactaggctccccaccagccatatgccttctcatctgggcacttactactaaagacctggcggaggcttttcccatcagcgtgcattcaccagcccatcgccacaaactctatcggagaacatgaatcaaaagtgcctcaagaggaatgaaaaaagctttactggggctggggaaggaagccggggaagagatccaaagactcttgggagggagttactgaagtcttactacagaaatgaggaggatgctaaaaatgtcacgaatatggacatatcatctgtggactgaccttgtaaaagacagtgtatgtagaagcatgaagtcttaaggacaaagtgccaaagaaagtggtcttaagaaatgtataaactttagagtagagtttggaatcccactaatgcaaactgggatgaaactaaagcaatagaaacaacacagttttgacctaacataccgtttataatgccattttaaggaaaactacctgtatttaaaaatagaaacatatcaaaaacaagagaaaagacacgagagagactgtggcccatcaacagacgttgatatgcaactgcatggcatgtgctgttttggttgaaatcaaatacattccgtttgatggacagctgtcagctttctcaaactgtgaagatgacccaaagtttccaactcctttacagtattaccgggactatgaactaaaaggtgggactgaggatgtgtatagagtgagcgtgtgattgtagacagaggggtgaagaaggaggaggaagaggcagagaaggaggagaccagggctgggaaagaaacttctcaagcaatgaagactggactcaggacatttggggactgtgtacaatgagttatggagactcgagggttcatgcagtcagtgttataccaaacccagtgttaggagaaaggacacagcgtaatggagaaaggggaagtagtagaattcagaaacaaaaatgcgcatctctttctttgtttgtcaaatgaaaattttaactggaattgtctgatatttaagagaaacattcaggacctcatcattatgtgggggctttgttctccacagggtcaggtaagagatggccttcttggctgccacaatcagaaatcacgcaggcattttgggtaggcggcctccagttttcctttgagtcgcgaacgctgtgcgtttgtcagaatgaagtatacaagtcaatgtttttccccctttttatataataattatataacttatgcatttatacactacgagttgatctcggccagccaaagacacacgacaaaagagacaatcgatataatgtggccttgaattttaactctgtatgcttaatgtttacaatatgaagttattagttcttagaatgcagaatgtatgtaataaaataagcttggcctagcatggcaaatcagatttatacaggagtctgcatttgcactttttttagtgactaaagttgcttaatgaaaacatgtgctgaatgttgtggattttgtgttataatttactttgtccaggaacttgtgcaagggagagccaaggaaataggatgtttggcacccaaatggcgtcagcctctccaggtccttcttgcctcccctcctgtcttttatttctagccccttttggaacagaaggaccccgggtttcacattggagcctccatatttatgcctggaatggaaagaggcctatgaagctggggttgtcattgagaaattctagttcagcacctggtcacaaatcacccttaattcctgctatgattaaaatacatttgttgaacagtgaacaagctaccactcgtaaggcaaactgtattattactggcaaataaagcgtcatggatagctgcaatttctcactttacagaaacaagggataacgtctagatttgctgcggggtttctctttcaggagctctcactaggtagacagctttagtcctgctacatcagagttacctgggcactgtggcttgggattcactagccctgagcctgatgttgctggctatcccttgaagacaatgtttatttccataatctagagtcagtttccctgggcatcttttctttgaatcacaaatgctgccaaccttggtccaggtgaaggcaactcaaaaggtgaaaatacaaggtgaccgtgcgaaggcgctagccgaaacatcttagctgaataggtttctgaactggcccttttcatagctgtttcagggcctgtttttttcacgttgcagtccttttgctatgattatgtgaagttgccaaacctctgtgctgtggatgttttggcagtgggctttgaagtcggcaggacacgattaccaatgctcctgacaccccgtgtcatttggattagacggagcccaaccatccatcattttgcagcagcctgggaaggcccacaaagtgcccgtatctccttagggaaaataaataaatacaatcatgaaagctggcagttaggctgacccaaactgtgctaatggaaaagatcagtcatttttattttggaatgcaaagtcaagacacacctacattcttcatagaaatacacatttacttggataatcactcagttctctcttcaagactgtctcatgagcaagatcataaaaacaagacatgattatcatattcaattttaacagatgttttccattagatccctcaaccctccacccccagtccaggttattagcaagtcttatgagcaactgggataattttggataacatgataatactgagttccttcaaatacataattcttaaattgtttcaaaatggcattaactctctgttactgttgtaatctaattccaaagccccctccaggtcatattcataattgcatgaaccttttctctctgtttgtccctgtctcttggcttgccctgatgtatactcagactcctgtacaatcttactcctgctggcaagagatttgtcttcttttcttgtcttcaattggctttcgggccttgtatgtggtaaaatcaccaaatcacagtcaagactgtgtttttgttcctagtttgatgcccttatgtcccggaggggttcacaaagtgctttgtcaggactgctgcagttagaaggctcactgcttctcctaagccttctgcacagatgtggcacctgcaacccaggagcaggagccggaggagctgccctctgacagcaggtgcagcagagatggctacagctcaggagctgggaaggtgatggggcacagggaaagcacagatgttctgcagcgccccaaagtgacccattgcctggagaaagagaagaaaatattttttaaaaagctagtttatttagcttctcattaattcattcaaataaagtcgtgaggtgactaattagagaataaaaattactttggactactcaaaaatacaccaaa

SEQ ID NO: 199094 - DNA, 4651 bp, Homo sapiens
  Payload ID: 19280
  Gene Name: v-ets avian erythroblastosis virus E26 oncogene homolog
  Uniprot ID: P11308
  ENST ID: ENST00000398897
  CDS Start-End: 184-1275
aaagcaagacaaatgactcacagagaaaaaagatggcagaaccaagggcaactaaagccgtcaggttctgaacagctggtagatgggctggcttactgaaggacatgattcagactgtcccggacccagcagctcatatcaaggaactctcctgatgaatgcagtgtggccaaaggcgggaagatggtgggcagcccagacaccgttgggatgaactacggcagctacatggaggagaagcacatgccacccccaaacatgaccacgaacgagcgcagagttatcgtgccagcagatcctacgctatggagtacagaccatgtgcggcagtggctggagtgggcggtgaaagaatatggccttccagacgtcaacatcttgttattccagaacatcgatgggaaggaactgtgcaagatgaccaaggacgacttccagaggctcacccccagctacaacgccgacatccttctctcacatctccactacctcagagagactcctcttccacatttgacttcagatgatgttgataaagccttacaaaactctccacggttaatgcatgctagaaacacagatttaccatatgagccccccaggagatcagcctggaccggtcacggccaccccacgccccagtcgaaagctgctcaaccatctccttccacagtgcccaaaactgaagaccagcgtcctcagttagatccttatcagattcttggaccaacaagtagccgccttgcaaatccaggcagtggccagatccagctttggcagttcctcctggagctcctgtcggacagctccaactccagctgcatcacctgggaaggcaccaacggggagttcaagatgacggatcccgacgaggtggcccggcgctggggagagcggaagagcaaacccaacatgaactacgataagctcagccgcgccctccgttactactatgacaagaacatcatgaccaaggtccatgggaagcgctacgcctacaagttcgacttccacgggatcgcccaggccctccagccccaccccccggagtcatctctgtacaagtacccctcagacctcccgtacatgggctcctatcacgcccacccacagaagatgaactttgtggcgccccaccctccagccctccccgtgacatcttccagtttttttgctgccccaaacccatactggaattcaccaactgggggtatataccccaacactaggctccccaccagccatatgccttctcatctgggcacttactactaaagacctggcggaggcttttcccatcagcgtgcattcaccagcccatcgccacaaactctatcggagaacatgaatcaaaagtgcctcaagaggaatgaaaaaagctttactggggctggggaaggaagccggggaagagatccaaagactcttgggagggagttactgaagtcttactacagaaatgaggaggatgctaaaaatgtcacgaatatggacatatcatctgtggactgaccttgtaaaagacagtgtatgtagaagcatgaagtcttaaggacaaagtgccaaagaaagtggtcttaagaaatgtataaactttagagtagagtttggaatcccactaatgcaaactgggatgaaactaaagcaatagaaacaacacagttttgacctaacataccgtttataatgccattttaaggaaaactacctgtatttaaaaatagaaacatatcaaaaacaagagaaaagacacgagagagactgtggcccatcaacagacgttgatatgcaactgcatggcatgtgctgttttggttgaaatcaaatacattccgtttgatggacagctgtcagctttctcaaactgtgaagatgacccaaagtttccaactcctttacagtattaccgggactatgaactaaaaggtgggactgaggatgtgtatagagtgagcgtgtgattgtagacagaggggtgaagaaggaggaggaagaggcagagaaggaggagaccagggctgggaaagaaacttctcaagcaatgaagactggactcaggacatttggggactgtgtacaatgagttatggagactcgagggttcatgcagtcagtgttataccaaacccagtgttaggagaaaggacacagcgtaatggagaaaggggaagtagtagaattcagaaacaaaaatgcgcatctctttctttgtttgtcaaatgaaaattttaactggaattgtctgatatttaagagaaacattcaggacctcatcattatgtgggggctttgttctccacagggtcaggtaagagatggccttcttggctgccacaatcagaaatcacgcaggcattttgggtaggcggcctccagttttcctttgagtcgcgaacgctgtgcgtttgtcagaatgaagtatacaagtcaatgtttttccccctttttatataataattatataacttatgcatttatacactacgagttgatctcggccagccaaagacacacgacaaaagagacaatcgatataatgtggccttgaattttaactctgtatgcttaatgtttacaatatgaagttattagttcttagaatgcagaatgtatgtaataaaataagcttggcctagcatggcaaatcagatttatacaggagtctgcatttgcactttttttagtgactaaagttgcttaatgaaaacatgtgctgaatgttgtggattttgtgttataatttactttgtccaggaacttgtgcaagggagagccaaggaaataggatgtttggcacccaaatggcgtcagcctctccaggtccttcttgcctcccctcctgtcttttatttctagccccttttggaacagaaggaccccgggtttcacattggagcctccatatttatgcctggaatggaaagaggcctatgaagctggggttgtcattgagaaattctagttcagcacctggtcacaaatcacccttaattcctgctatgattaaaatacatttgttgaacagtgaacaagctaccactcgtaaggcaaactgtattattactggcaaataaagcgtcatggatagctgcaatttctcactttacagaaacaagggataacgtctagatttgctgcggggtttctctttcaggagctctcactaggtagacagctttagtcctgctacatcagagttacctgggcactgtggcttgggattcactagccctgagcctgatgttgctggctatcccttgaagacaatgtttatttccataatctagagtcagtttccctgggcatcttttctttgaatcacaaatgctgccaaccttggtccaggtgaaggcaactcaaaaggtgaaaatacaaggtgaccgtgcgaaggcgctagccgaaacatcttagctgaataggtttctgaactggcccttttcatagctgtttcagggcctgtttttttcacgttgcagtccttttgctatgattatgtgaagttgccaaacctctgtgctgtggatgttttggcagtgggctttgaagtcggcaggacacgattaccaatgctcctgacaccccgtgtcatttggattagacggagcccaaccatccatcattttgcagcagcctgggaaggcccacaaagtgcccgtatctccttagggaaaataaataaatacaatcatgaaagctggcagttaggctgacccaaactgtgctaatggaaaagatcagtcatttttattttggaatgcaaagtcaagacacacctacattcttcatagaaatacacatttacttggataatcactcagttctctcttcaagactgtctcatgagcaagatcataaaaacaagacatgattatcatattcaattttaacagatgttttccattagatccctcaaccctccacccccagtccaggttattagcaagtcttatgagcaactgggataattttggataacatgataatactgagttccttcaaatacataattcttaaattgtttcaaaatggcattaactctctgttactgttgtaatctaattccaaagccccctccaggtcatattcataattgcatgaaccttttctctctgtttgtccctgtctcttggcttgccctgatgtatactcagactcctgtacaatcttactcctgctggcaagagatttgtcttcttttcttgtcttcaattggctttcgggccttgtatgtggtaaaatcaccaaatcacagtcaagactgtgtttttgttcctagtttgatgcccttatgtcccggaggggttcacaaagtgctttgtcaggactgctgcagttagaaggctcactgcttctcctaagccttctgcacagatgtggcacctgcaacccaggagcaggagccggaggagctgccctctgacagcaggtgcagcagagatggctacagctcaggagctgggaaggtgatggggcacagggaaagcacagatgttctgcagcgccccaaagtgacccattgcctggagaaagagaagaaaatattttttaaaaagctagtttatttagcttctcattaattcattcaaataaagtcgtgaggtgactaattagagaataaaaattactttggactactcaaaaatacaccaaa

SEQ ID NO: 199095 - DNA, 4806 bp, Homo sapiens
  Payload ID: 19280
  Gene Name: v-ets avian erythroblastosis virus E26 oncogene homolog
  ENST ID: ENST00000398905
  CDS Start-End: 63-1430
ggtcagagagaagcaataattattattaacatttattaacgatcaataaacttgatcgcattatggccagcactattaaggaagccttatcagttgtgagtgaggaccagtcgttgtttgagtgtgcctacggaacgccacacctggctaagacagagatgaccgcgtcctcctccagcgactatggacagacttccaagatgagcccacgcgtccctcagcaggattggctgtctcaacccccagccagggtcaccatcaaaatggaatgtaaccctagccaggtgaatggctcaaggaactctcctgatgaatgcagtgtggccaaaggcgggaagatggtgggcagcccagacaccgttgggatgaactacggcagctacatggaggagaagcacatgccacccccaaacatgaccacgaacgagcgcagagttatcgtgccagcagatcctacgctatggagtacagaccatgtgcggcagtggctggagtgggcggtgaaagaatatggccttccagacgtcaacatcttgttattccagaacatcgatgggaaggaactgtgcaagatgaccaaggacgacttccagaggctcacccccagctacaacgccgacatccttctctcacatctccactacctcagagagactcctcttccacatttgacttcagatgatgttgataaagccttacaaaactctccacggttaatgcatgctagaaacacagatttaccatatgagccccccaggagatcagcctggaccggtcacggccaccccacgccccagtcgaaagctgctcaaccatctccttccacagtgcccaaaactgaagaccagcgtcctcagttagatccttatcagattcttggaccaacaagtagccgccttgcaaatccaggcagtggccagatccagctttggcagttcctcctggagctcctgtcggacagctccaactccagctgcatcacctgggaaggcaccaacggggagttcaagatgacggatcccgacgaggtggcccggcgctggggagagcggaagagcaaacccaacatgaactacgataagctcagccgcgccctccgttactactatgacaagaacatcatgaccaaggtccatgggaagcgctacgcctacaagttcgacttccacgggatcgcccaggccctccagccccaccccccggagtcatctctgtacaagtacccctcagacctcccgtacatgggctcctatcacgcccacccacagaagatgaactttgtggcgccccaccctccagccctccccgtgacatcttccagtttttttgctgccccaaacccatactggaattcaccaactgggggtatataccccaacactaggctccccaccagccatatgccttctcatctgggcacttactactaaagacctggcggaggcttttcccatcagcgtgcattcaccagcccatcgccacaaactctatcggagaacatgaatcaaaagtgcctcaagaggaatgaaaaaagctttactggggctggggaaggaagccggggaagagatccaaagactcttgggagggagttactgaagtcttactacagaaatgaggaggatgctaaaaatgtcacgaatatggacatatcatctgtggactgaccttgtaaaagacagtgtatgtagaagcatgaagtcttaaggacaaagtgccaaagaaagtggtcttaagaaatgtataaactttagagtagagtttggaatcccactaatgcaaactgggatgaaactaaagcaatagaaacaacacagttttgacctaacataccgtttataatgccattttaaggaaaactacctgtatttaaaaatagaaacatatcaaaaacaagagaaaagacacgagagagactgtggcccatcaacagacgttgatatgcaactgcatggcatgtgctgttttggttgaaatcaaatacattccgtttgatggacagctgtcagctttctcaaactgtgaagatgacccaaagtttccaactcctttacagtattaccgggactatgaactaaaaggtgggactgaggatgtgtatagagtgagcgtgtgattgtagacagaggggtgaagaaggaggaggaagaggcagagaaggaggagaccagggctgggaaagaaacttctcaagcaatgaagactggactcaggacatttggggactgtgtacaatgagttatggagactcgagggttcatgcagtcagtgttataccaaacccagtgttaggagaaaggacacagcgtaatggagaaaggggaagtagtagaattcagaaacaaaaatgcgcatctctttctttgtttgtcaaatgaaaattttaactggaattgtctgatatttaagagaaacattcaggacctcatcattatgtgggggctttgttctccacagggtcaggtaagagatggccttcttggctgccacaatcagaaatcacgcaggcattttgggtaggcggcctccagttttcctttgagtcgcgaacgctgtgcgtttgtcagaatgaagtatacaagtcaatgtttttccccctttttatataataattatataacttatgcatttatacactacgagttgatctcggccagccaaagacacacgacaaaagagacaatcgatataatgtggccttgaattttaactctgtatgcttaatgtttacaatatgaagttattagttcttagaatgcagaatgtatgtaataaaataagcttggcctagcatggcaaatcagatttatacaggagtctgcatttgcactttttttagtgactaaagttgcttaatgaaaacatgtgctgaatgttgtggattttgtgttataatttactttgtccaggaacttgtgcaagggagagccaaggaaataggatgtttggcacccaaatggcgtcagcctctccaggtccttcttgcctcccctcctgtcttttatttctagccccttttggaacagaaggaccccgggtttcacattggagcctccatatttatgcctggaatggaaagaggcctatgaagctggggttgtcattgagaaattctagttcagcacctggtcacaaatcacccttaattcctgctatgattaaaatacatttgttgaacagtgaacaagctaccactcgtaaggcaaactgtattattactggcaaataaagcgtcatggatagctgcaatttctcactttacagaaacaagggataacgtctagatttgctgcggggtttctctttcaggagctctcactaggtagacagctttagtcctgctacatcagagttacctgggcactgtggcttgggattcactagccctgagcctgatgttgctggctatcccttgaagacaatgtttatttccataatctagagtcagtttccctgggcatcttttctttgaatcacaaatgctgccaaccttggtccaggtgaaggcaactcaaaaggtgaaaatacaaggtgaccgtgcgaaggcgctagccgaaacatcttagctgaataggtttctgaactggcccttttcatagctgtttcagggcctgtttttttcacgttgcagtccttttgctatgattatgtgaagttgccaaacctctgtgctgtggatgttttggcagtgggctttgaagtcggcaggacacgattaccaatgctcctgacaccccgtgtcatttggattagacggagcccaaccatccatcattttgcagcagcctgggaaggcccacaaagtgcccgtatctccttagggaaaataaataaatacaatcatgaaagctggcagttaggctgacccaaactgtgctaatggaaaagatcagtcatttttattttggaatgcaaagtcaagacacacctacattcttcatagaaatacacatttacttggataatcactcagttctctcttcaagactgtctcatgagcaagatcataaaaacaagacatgattatcatattcaattttaacagatgttttccattagatccctcaaccctccacccccagtccaggttattagcaagtcttatgagcaactgggataattttggataacatgataatactgagttccttcaaatacataattcttaaattgtttcaaaatggcattaactctctgttactgttgtaatctaattccaaagccccctccaggtcatattcataattgcatgaaccttttctctctgtttgtccctgtctcttggcttgccctgatgtatactcagactcctgtacaatcttactcctgctggcaagagatttgtcttcttttcttgtcttcaattggctttcgggccttgtatgtggtaaaatcaccaaatcacagtcaagactgtgtttttgttcctagtttgatgcccttatgtcccggaggggttcacaaagtgctttgtcaggactgctgcagttagaaggctcactgcttctcctaagccttctgcacagatgtggcacctgcaacccaggagcaggagccggaggagctgccctctgacagcaggtgcagcagagatggctacagctcaggagctgggaaggtgatggggcacagggaaagcacagatgttctgcagcgccccaaagtgacccattgcctggagaaagagaagaaaatattttttaaaaagctagtttatttagcttctcattaattcattcaaataaagtcgtgaggtgactaattagagaataaaaattactttggactactcaaaaatacaccaaa

SEQ ID NO: 199096 - DNA, 4809 bp, Homo sapiens
  Payload ID: 19280
  Gene Name: v-ets avian erythroblastosis virus E26 oncogene homolog
  ENST ID: ENST00000398907
  CDS Start-End: 63-1433
ggtcagagagaagcaataattattattaacatttattaacgatcaataaacttgatcgcattatggccagcactattaaggaagccttatcagttgtgagtgaggaccagtcgttgtttgagtgtgcctacggaacgccacacctggctaagacagagatgaccgcgtcctcctccagcgactatggacagacttccaagatgagcccacgcgtccctcagcaggattggctgtctcaacccccagccagggtcaccatcaaaatggaatgtaaccctagccaggtgaatggctcaaggaactctcctgatgaatgcagtgtggccaaaggcgggaagatggtgggcagcccagacaccgttgggatgaactacggcagctacatggaggagaagcacatgccacccccaaacatgaccacgaacgagcgcagagttatcgtgccagcagatcctacgctatggagtacagaccatgtgcggcagtggctggagtgggcggtgaaagaatatggccttccagacgtcaacatcttgttattccagaacatcgatgggaaggaactgtgcaagatgaccaaggacgacttccagaggctcacccccagctacaacgccgacatccttctctcacatctccactacctcagagagactcctcttccacatttgacttcagatgatgttgataaagccttacaaaactctccacggttaatgcatgctagaaacacagggggtgcagcttttattttcccaaatacttcagtatatcctgaagctacgcaaagaattacaactaggccagctgctcaaccatctccttccacagtgcccaaaactgaagaccagcgtcctcagttagatccttatcagattcttggaccaacaagtagccgccttgcaaatccaggcagtggccagatccagctttggcagttcctcctggagctcctgtcggacagctccaactccagctgcatcacctgggaaggcaccaacggggagttcaagatgacggatcccgacgaggtggcccggcgctggggagagcggaagagcaaacccaacatgaactacgataagctcagccgcgccctccgttactactatgacaagaacatcatgaccaaggtccatgggaagcgctacgcctacaagttcgacttccacgggatcgcccaggccctccagccccaccccccggagtcatctctgtacaagtacccctcagacctcccgtacatgggctcctatcacgcccacccacagaagatgaactttgtggcgccccaccctccagccctccccgtgacatcttccagtttttttgctgccccaaacccatactggaattcaccaactgggggtatataccccaacactaggctccccaccagccatatgccttctcatctgggcacttactactaaagacctggcggaggcttttcccatcagcgtgcattcaccagcccatcgccacaaactctatcggagaacatgaatcaaaagtgcctcaagaggaatgaaaaaagctttactggggctggggaaggaagccggggaagagatccaaagactcttgggagggagttactgaagtcttactacagaaatgaggaggatgctaaaaatgtcacgaatatggacatatcatctgtggactgaccttgtaaaagacagtgtatgtagaagcatgaagtcttaaggacaaagtgccaaagaaagtggtcttaagaaatgtataaactttagagtagagtttggaatcccactaatgcaaactgggatgaaactaaagcaatagaaacaacacagttttgacctaacataccgtttataatgccattttaaggaaaactacctgtatttaaaaatagaaacatatcaaaaacaagagaaaagacacgagagagactgtggcccatcaacagacgttgatatgcaactgcatggcatgtgctgttttggttgaaatcaaatacattccgtttgatggacagctgtcagctttctcaaactgtgaagatgacccaaagtttccaactcctttacagtattaccgggactatgaactaaaaggtgggactgaggatgtgtatagagtgagcgtgtgattgtagacagaggggtgaagaaggaggaggaagaggcagagaaggaggagaccagggctgggaaagaaacttctcaagcaatgaagactggactcaggacatttggggactgtgtacaatgagttatggagactcgagggttcatgcagtcagtgttataccaaacccagtgttaggagaaaggacacagcgtaatggagaaaggggaagtagtagaattcagaaacaaaaatgcgcatctctttctttgtttgtcaaatgaaaattttaactggaattgtctgatatttaagagaaacattcaggacctcatcattatgtgggggctttgttctccacagggtcaggtaagagatggccttcttggctgccacaatcagaaatcacgcaggcattttgggtaggcggcctccagttttcctttgagtcgcgaacgctgtgcgtttgtcagaatgaagtatacaagtcaatgtttttccccctttttatataataattatataacttatgcatttatacactacgagttgatctcggccagccaaagacacacgacaaaagagacaatcgatataatgtggccttgaattttaactctgtatgcttaatgtttacaatatgaagttattagttcttagaatgcagaatgtatgtaataaaataagcttggcctagcatggcaaatcagatttatacaggagtctgcatttgcactttttttagtgactaaagttgcttaatgaaaacatgtgctgaatgttgtggattttgtgttataatttactttgtccaggaacttgtgcaagggagagccaaggaaataggatgtttggcacccaaatggcgtcagcctctccaggtccttcttgcctcccctcctgtcttttatttctagccccttttggaacagaaggaccccgggtttcacattggagcctccatatttatgcctggaatggaaagaggcctatgaagctggggttgtcattgagaaattctagttcagcacctggtcacaaatcacccttaattcctgctatgattaaaatacatttgttgaacagtgaacaagctaccactcgtaaggcaaactgtattattactggcaaataaagcgtcatggatagctgcaatttctcactttacagaaacaagggataacgtctagatttgctgcggggtttctctttcaggagctctcactaggtagacagctttagtcctgctacatcagagttacctgggcactgtggcttgggattcactagccctgagcctgatgttgctggctatcccttgaagacaatgtttatttccataatctagagtcagtttccctgggcatcttttctttgaatcacaaatgctgccaaccttggtccaggtgaaggcaactcaaaaggtgaaaatacaaggtgaccgtgcgaaggcgctagccgaaacatcttagctgaataggtttctgaactggcccttttcatagctgtttcagggcctgtttttttcacgttgcagtccttttgctatgattatgtgaagttgccaaacctctgtgctgtggatgttttggcagtgggctttgaagtcggcaggacacgattaccaatgctcctgacaccccgtgtcatttggattagacggagcccaaccatccatcattttgcagcagcctgggaaggcccacaaagtgcccgtatctccttagggaaaataaataaatacaatcatgaaagctggcagttaggctgacccaaactgtgctaatggaaaagatcagtcatttttattttggaatgcaaagtcaagacacacctacattcttcatagaaatacacatttacttggataatcactcagttctctcttcaagactgtctcatgagcaagatcataaaaacaagacatgattatcatattcaattttaacagatgttttccattagatccctcaaccctccacccccagtccaggttattagcaagtcttatgagcaactgggataattttggataacatgataatactgagttccttcaaatacataattcttaaattgtttcaaaatggcattaactctctgttactgttgtaatctaattccaaagccccctccaggtcatattcataattgcatgaaccttttctctctgtttgtccctgtctcttggcttgccctgatgtatactcagactcctgtacaatcttactcctgctggcaagagatttgtcttcttttcttgtcttcaattggctttcgggccttgtatgtggtaaaatcaccaaatcacagtcaagactgtgtttttgttcctagtttgatgcccttatgtcccggaggggttcacaaagtgctttgtcaggactgctgcagttagaaggctcactgcttctcctaagccttctgcacagatgtggcacctgcaacccaggagcaggagccggaggagctgccctctgacagcaggtgcagcagagatggctacagctcaggagctgggaaggtgatggggcacagggaaagcacagatgttctgcagcgccccaaagtgacccattgcctggagaaagagaagaaaatattttttaaaaagctagtttatttagcttctcattaattcattcaaataaagtcgtgaggtgactaattagagaataaaaattactttggactactcaaaaatacaccaaa

SEQ ID NO: 199097 - DNA, 4954 bp, Homo sapiens
  Payload ID: 19280
  Gene Name: v-ets avian erythroblastosis virus E26 oncogene homolog
  ENST ID: ENST00000398910
  CDS Start-End: 187-1578
cccccgagggacatgagagaagaggagcggcgctcaggttattccaggatctttggagacccgaggaaagccgtgttgaccaaaagcaagacaaatgactcacagagaaaaaagatggcagaaccaagggcaactaaagccgtcaggttctgaacagctggtagatgggctggcttactgaaggacatgattcagactgtcccggacccagcagctcatatcaaggaagccttatcagttgtgagtgaggaccagtcgttgtttgagtgtgcctacggaacgccacacctggctaagacagagatgaccgcgtcctcctccagcgactatggacagacttccaagatgagcccacgcgtccctcagcaggattggctgtctcaacccccagccagggtcaccatcaaaatggaatgtaaccctagccaggtgaatggctcaaggaactctcctgatgaatgcagtgtggccaaaggcgggaagatggtgggcagcccagacaccgttgggatgaactacggcagctacatggaggagaagcacatgccacccccaaacatgaccacgaacgagcgcagagttatcgtgccagcagatcctacgctatggagtacagaccatgtgcggcagtggctggagtgggcggtgaaagaatatggccttccagacgtcaacatcttgttattccagaacatcgatgggaaggaactgtgcaagatgaccaaggacgacttccagaggctcacccccagctacaacgccgacatccttctctcacatctccactacctcagagagactcctcttccacatttgacttcagatgatgttgataaagccttacaaaactctccacggttaatgcatgctagaaacacagggggtgcagcttttattttcccaaatacttcagtatatcctgaagctacgcaaagaattacaactaggccagctgctcaaccatctccttccacagtgcccaaaactgaagaccagcgtcctcagttagatccttatcagattcttggaccaacaagtagccgccttgcaaatccaggcagtggccagatccagctttggcagttcctcctggagctcctgtcggacagctccaactccagctgcatcacctgggaaggcaccaacggggagttcaagatgacggatcccgacgaggtggcccggcgctggggagagcggaagagcaaacccaacatgaactacgataagctcagccgcgccctccgttactactatgacaagaacatcatgaccaaggtccatgggaagcgctacgcctacaagttcgacttccacgggatcgcccaggccctccagccccaccccccggagtcatctctgtacaagtacccctcagacctcccgtacatgggctcctatcacgcccacccacagaagatgaactttgtggcgccccaccctccagccctccccgtgacatcttccagtttttttgctgccccaaacccatactggaattcaccaactgggggtatataccccaacactaggctccccaccagccatatgccttctcatctgggcacttactactaaagacctggcggaggcttttcccatcagcgtgcattcaccagcccatcgccacaaactctatcggagaacatgaatcaaaagtgcctcaagaggaatgaaaaaagctttactggggctggggaaggaagccggggaagagatccaaagactcttgggagggagttactgaagtcttactacagaaatgaggaggatgctaaaaatgtcacgaatatggacatatcatctgtggactgaccttgtaaaagacagtgtatgtagaagcatgaagtcttaaggacaaagtgccaaagaaagtggtcttaagaaatgtataaactttagagtagagtttggaatcccactaatgcaaactgggatgaaactaaagcaatagaaacaacacagttttgacctaacataccgtttataatgccattttaaggaaaactacctgtatttaaaaatagaaacatatcaaaaacaagagaaaagacacgagagagactgtggcccatcaacagacgttgatatgcaactgcatggcatgtgctgttttggttgaaatcaaatacattccgtttgatggacagctgtcagctttctcaaactgtgaagatgacccaaagtttccaactcctttacagtattaccgggactatgaactaaaaggtgggactgaggatgtgtatagagtgagcgtgtgattgtagacagaggggtgaagaaggaggaggaagaggcagagaaggaggagaccagggctgggaaagaaacttctcaagcaatgaagactggactcaggacatttggggactgtgtacaatgagttatggagactcgagggttcatgcagtcagtgttataccaaacccagtgttaggagaaaggacacagcgtaatggagaaaggggaagtagtagaattcagaaacaaaaatgcgcatctctttctttgtttgtcaaatgaaaattttaactggaattgtctgatatttaagagaaacattcaggacctcatcattatgtgggggctttgttctccacagggtcaggtaagagatggccttcttggctgccacaatcagaaatcacgcaggcattttgggtaggcggcctccagttttcctttgagtcgcgaacgctgtgcgtttgtcagaatgaagtatacaagtcaatgtttttccccctttttatataataattatataacttatgcatttatacactacgagttgatctcggccagccaaagacacacgacaaaagagacaatcgatataatgtggccttgaattttaactctgtatgcttaatgtttacaatatgaagttattagttcttagaatgcagaatgtatgtaataaaataagcttggcctagcatggcaaatcagatttatacaggagtctgcatttgcactttttttagtgactaaagttgcttaatgaaaacatgtgctgaatgttgtggattttgtgttataatttactttgtccaggaacttgtgcaagggagagccaaggaaataggatgtttggcacccaaatggcgtcagcctctccaggtccttcttgcctcccctcctgtcttttatttctagccccttttggaacagaaggaccccgggtttcacattggagcctccatatttatgcctggaatggaaagaggcctatgaagctggggttgtcattgagaaattctagttcagcacctggtcacaaatcacccttaattcctgctatgattaaaatacatttgttgaacagtgaacaagctaccactcgtaaggcaaactgtattattactggcaaataaagcgtcatggatagctgcaatttctcactttacagaaacaagggataacgtctagatttgctgcggggtttctctttcaggagctctcactaggtagacagctttagtcctgctacatcagagttacctgggcactgtggcttgggattcactagccctgagcctgatgttgctggctatcccttgaagacaatgtttatttccataatctagagtcagtttccctgggcatcttttctttgaatcacaaatgctgccaaccttggtccaggtgaaggcaactcaaaaggtgaaaatacaaggtgaccgtgcgaaggcgctagccgaaacatcttagctgaataggtttctgaactggcccttttcatagctgtttcagggcctgtttttttcacgttgcagtccttttgctatgattatgtgaagttgccaaacctctgtgctgtggatgttttggcagtgggctttgaagtcggcaggacacgattaccaatgctcctgacaccccgtgtcatttggattagacggagcccaaccatccatcattttgcagcagcctgggaaggcccacaaagtgcccgtatctccttagggaaaataaataaatacaatcatgaaagctggcagttaggctgacccaaactgtgctaatggaaaagatcagtcatttttattttggaatgcaaagtcaagacacacctacattcttcatagaaatacacatttacttggataatcactcagttctctcttcaagactgtctcatgagcaagatcataaaaacaagacatgattatcatattcaattttaacagatgttttccattagatccctcaaccctccacccccagtccaggttattagcaagtcttatgagcaactgggataattttggataacatgataatactgagttccttcaaatacataattcttaaattgtttcaaaatggcattaactctctgttactgttgtaatctaattccaaagccccctccaggtcatattcataattgcatgaaccttttctctctgtttgtccctgtctcttggcttgccctgatgtatactcagactcctgtacaatcttactcctgctggcaagagatttgtcttcttttcttgtcttcaattggctttcgggccttgtatgtggtaaaatcaccaaatcacagtcaagactgtgtttttgttcctagtttgatgcccttatgtcccggaggggttcacaaagtgctttgtcaggactgctgcagttagaaggctcactgcttctcctaagccttctgcacagatgtggcacctgcaacccaggagcaggagccggaggagctgccctctgacagcaggtgcagcagagatggctacagctcaggagctgggaaggtgatggggcacagggaaagcacagatgttctgcagcgccccaaagtgacccattgcctggagaaagagaagaaaatattttttaaaaagctagtttatttagcttctcattaattcattcaaataaagtcgtgaggtgactaattagagaataaaaattactttggactactcaaaaatacaccaaa

SEQ ID NO: 199098 - DNA, 4914 bp, Homo sapiens
  Payload ID: 19280
  Gene Name: v-ets avian erythroblastosis virus E26 oncogene homolog
  Uniprot ID: P11308
  ENST ID: ENST00000398911
  CDS Start-End: 150-1538
gttattccaggatctttggagacccgaggaaagccgtgttgaccaaaagcaagacaaatgactcacagagaaaaaagatggcagaaccaagggcaactaaagccgtcaggttctgaacagctggtagatgggctggcttactgaaggacatgattcagactgtcccggacccagcagctcatatcaaggaagccttatcagttgtgagtgaggaccagtcgttgtttgagtgtgcctacggaacgccacacctggctaagacagagatgaccgcgtcctcctccagcgactatggacagacttccaagatgagcccacgcgtccctcagcaggattggctgtctcaacccccagccagggtcaccatcaaaatggaatgtaaccctagccaggtgaatggctcaaggaactctcctgatgaatgcagtgtggccaaaggcgggaagatggtgggcagcccagacaccgttgggatgaactacggcagctacatggaggagaagcacatgccacccccaaacatgaccacgaacgagcgcagagttatcgtgccagcagatcctacgctatggagtacagaccatgtgcggcagtggctggagtgggcggtgaaagaatatggccttccagacgtcaacatcttgttattccagaacatcgatgggaaggaactgtgcaagatgaccaaggacgacttccagaggctcacccccagctacaacgccgacatccttctctcacatctccactacctcagagagactcctcttccacatttgacttcagatgatgttgataaagccttacaaaactctccacggttaatgcatgctagaaacacagatttaccatatgagccccccaggagatcagcctggaccggtcacggccaccccacgccccagtcgaaagctgctcaaccatctccttccacagtgcccaaaactgaagaccagcgtcctcagttagatccttatcagattcttggaccaacaagtagccgccttgcaaatccaggcagtggccagatccagctttggcagttcctcctggagctcctgtcggacagctccaactccagctgcatcacctgggaaggcaccaacggggagttcaagatgacggatcccgacgaggtggcccggcgctggggagagcggaagagcaaacccaacatgaactacgataagctcagccgcgccctccgttactactatgacaagaacatcatgaccaaggtccatgggaagcgctacgcctacaagttcgacttccacgggatcgcccaggccctccagccccaccccccggagtcatctctgtacaagtacccctcagacctcccgtacatgggctcctatcacgcccacccacagaagatgaactttgtggcgccccaccctccagccctccccgtgacatcttccagtttttttgctgccccaaacccatactggaattcaccaactgggggtatataccccaacactaggctccccaccagccatatgccttctcatctgggcacttactactaaagacctggcggaggcttttcccatcagcgtgcattcaccagcccatcgccacaaactctatcggagaacatgaatcaaaagtgcctcaagaggaatgaaaaaagctttactggggctggggaaggaagccggggaagagatccaaagactcttgggagggagttactgaagtcttactacagaaatgaggaggatgctaaaaatgtcacgaatatggacatatcatctgtggactgaccttgtaaaagacagtgtatgtagaagcatgaagtcttaaggacaaagtgccaaagaaagtggtcttaagaaatgtataaactttagagtagagtttggaatcccactaatgcaaactgggatgaaactaaagcaatagaaacaacacagttttgacctaacataccgtttataatgccattttaaggaaaactacctgtatttaaaaatagaaacatatcaaaaacaagagaaaagacacgagagagactgtggcccatcaacagacgttgatatgcaactgcatggcatgtgctgttttggttgaaatcaaatacattccgtttgatggacagctgtcagctttctcaaactgtgaagatgacccaaagtttccaactcctttacagtattaccgggactatgaactaaaaggtgggactgaggatgtgtatagagtgagcgtgtgattgtagacagaggggtgaagaaggaggaggaagaggcagagaaggaggagaccagggctgggaaagaaacttctcaagcaatgaagactggactcaggacatttggggactgtgtacaatgagttatggagactcgagggttcatgcagtcagtgttataccaaacccagtgttaggagaaaggacacagcgtaatggagaaaggggaagtagtagaattcagaaacaaaaatgcgcatctctttctttgtttgtcaaatgaaaattttaactggaattgtctgatatttaagagaaacattcaggacctcatcattatgtgggggctttgttctccacagggtcaggtaagagatggccttcttggctgccacaatcagaaatcacgcaggcattttgggtaggcggcctccagttttcctttgagtcgcgaacgctgtgcgtttgtcagaatgaagtatacaagtcaatgtttttccccctttttatataataattatataacttatgcatttatacactacgagttgatctcggccagccaaagacacacgacaaaagagacaatcgatataatgtggccttgaattttaactctgtatgcttaatgtttacaatatgaagttattagttcttagaatgcagaatgtatgtaataaaataagcttggcctagcatggcaaatcagatttatacaggagtctgcatttgcactttttttagtgactaaagttgcttaatgaaaacatgtgctgaatgttgtggattttgtgttataatttactttgtccaggaacttgtgcaagggagagccaaggaaataggatgtttggcacccaaatggcgtcagcctctccaggtccttcttgcctcccctcctgtcttttatttctagccccttttggaacagaaggaccccgggtttcacattggagcctccatatttatgcctggaatggaaagaggcctatgaagctggggttgtcattgagaaattctagttcagcacctggtcacaaatcacccttaattcctgctatgattaaaatacatttgttgaacagtgaacaagctaccactcgtaaggcaaactgtattattactggcaaataaagcgtcatggatagctgcaatttctcactttacagaaacaagggataacgtctagatttgctgcggggtttctctttcaggagctctcactaggtagacagctttagtcctgctacatcagagttacctgggcactgtggcttgggattcactagccctgagcctgatgttgctggctatcccttgaagacaatgtttatttccataatctagagtcagtttccctgggcatcttttctttgaatcacaaatgctgccaaccttggtccaggtgaaggcaactcaaaaggtgaaaatacaaggtgaccgtgcgaaggcgctagccgaaacatcttagctgaataggtttctgaactggcccttttcatagctgtttcagggcctgtttttttcacgttgcagtccttttgctatgattatgtgaagttgccaaacctctgtgctgtggatgttttggcagtgggctttgaagtcggcaggacacgattaccaatgctcctgacaccccgtgtcatttggattagacggagcccaaccatccatcattttgcagcagcctgggaaggcccacaaagtgcccgtatctccttagggaaaataaataaatacaatcatgaaagctggcagttaggctgacccaaactgtgctaatggaaaagatcagtcatttttattttggaatgcaaagtcaagacacacctacattcttcatagaaatacacatttacttggataatcactcagttctctcttcaagactgtctcatgagcaagatcataaaaacaagacatgattatcatattcaattttaacagatgttttccattagatccctcaaccctccacccccagtccaggttattagcaagtcttatgagcaactgggataattttggataacatgataatactgagttccttcaaatacataattcttaaattgtttcaaaatggcattaactctctgttactgttgtaatctaattccaaagccccctccaggtcatattcataattgcatgaaccttttctctctgtttgtccctgtctcttggcttgccctgatgtatactcagactcctgtacaatcttactcctgctggcaagagatttgtcttcttttcttgtcttcaattggctttcgggccttgtatgtggtaaaatcaccaaatcacagtcaagactgtgtttttgttcctagtttgatgcccttatgtcccggaggggttcacaaagtgctttgtcaggactgctgcagttagaaggctcactgcttctcctaagccttctgcacagatgtggcacctgcaacccaggagcaggagccggaggagctgccctctgacagcaggtgcagcagagatggctacagctcaggagctgggaaggtgatggggcacagggaaagcacagatgttctgcagcgccccaaagtgacccattgcctggagaaagagaagaaaatattttttaaaaagctagtttatttagcttctcattaattcattcaaataaagtcgtgaggtgactaattagagaataaaaattactttggactactcaaaaatacaccaaa

SEQ ID NO: 199099 - DNA, 1868 bp, Homo sapiens
  Payload ID: 19280
  Gene Name: v-ets avian erythroblastosis virus E26 oncogene homolog
  Uniprot ID: P11308
  ENST ID: ENST00000398919
  CDS Start-End: 296-1756
gctgagcccgtcggcgccgagggagttagtgcgacccggctcggcgcgcacggccaaggcacgcgcgctggcacacgcgggcgcggacacgcgcggacacacacgtgcgggacacgccctcccccgacggcggcgctaacctctcggttattccaggatctttggagacccgaggaaagccgtgttgaccaaaagcaagacaaatgactcacagagaaaaaagatggcagaaccaagggcaactaaagccgtcaggttctgaacagctggtagatgggctggcttactgaaggacatgattcagactgtcccggacccagcagctcatatcaaggaagccttatcagttgtgagtgaggaccagtcgttgtttgagtgtgcctacggaacgccacacctggctaagacagagatgaccgcgtcctcctccagcgactatggacagacttccaagatgagcccacgcgtccctcagcaggattggctgtctcaacccccagccagggtcaccatcaaaatggaatgtaaccctagccaggtgaatggctcaaggaactctcctgatgaatgcagtgtggccaaaggcgggaagatggtgggcagcccagacaccgttgggatgaactacggcagctacatggaggagaagcacatgccacccccaaacatgaccacgaacgagcgcagagttatcgtgccagcagatcctacgctatggagtacagaccatgtgcggcagtggctggagtgggcggtgaaagaatatggccttccagacgtcaacatcttgttattccagaacatcgatgggaaggaactgtgcaagatgaccaaggacgacttccagaggctcacccccagctacaacgccgacatccttctctcacatctccactacctcagagagactcctcttccacatttgacttcagatgatgttgataaagccttacaaaactctccacggttaatgcatgctagaaacacagggggtgcagcttttattttcccaaatacttcagtatatcctgaagctacgcaaagaattacaactaggccagatttaccatatgagccccccaggagatcagcctggaccggtcacggccaccccacgccccagtcgaaagctgctcaaccatctccttccacagtgcccaaaactgaagaccagcgtcctcagttagatccttatcagattcttggaccaacaagtagccgccttgcaaatccaggcagtggccagatccagctttggcagttcctcctggagctcctgtcggacagctccaactccagctgcatcacctgggaaggcaccaacggggagttcaagatgacggatcccgacgaggtggcccggcgctggggagagcggaagagcaaacccaacatgaactacgataagctcagccgcgccctccgttactactatgacaagaacatcatgaccaaggtccatgggaagcgctacgcctacaagttcgacttccacgggatcgcccaggccctccagccccaccccccggagtcatctctgtacaagtacccctcagacctcccgtacatgggctcctatcacgcccacccacagaagatgaactttgtggcgccccaccctccagccctccccgtgacatcttccagtttttttgctgccccaaacccatactggaattcaccaactgggggtatataccccaacactaggctccccaccagccatatgccttctcatctgggcacttactactaaagacctggcggaggcttttcccatcagcgtgcattcaccagcccatcgccacaaactctatcggagaacatgaatcaaaagtgcctcaagaggaatgaaaaaagctttactg

SEQ ID NO: 199100 - DNA, 5034 bp, Homo sapiens
  Payload ID: 19280
  Gene Name: v-ets avian erythroblastosis virus E26 oncogene homolog
  Uniprot ID: P11308
  ENST ID: ENST00000442448
  CDS Start-End: 273-1661
gttttcacttggtcggaatggggagagtgtgcaagagatcgctgcgggacaggttcctagagatcgctccgggacggtcgtgacggcccccgagggacatgagagaagaggagcggcgctcaggttattccaggatctttggagacccgaggaaagccgtgttgaccaaaagcaagacaaatgactcacagagaaaaaagatggcagaaccaagggcaactaaagccgtcaggttctgaacagctggtagatgggctggcttactgaaggacatgattcagactgtcccggacccagcagctcatatcaaggaagccttatcagttgtgagtgaggaccagtcgttgtttgagtgtgcctacggaacgccacacctggctaagacagagatgaccgcgtcctcctccagcgactatggacagacttccaagatgagcccacgcgtccctcagcaggattggctgtctcaacccccagccagggtcaccatcaaaatggaatgtaaccctagccaggtgaatggctcaaggaactctcctgatgaatgcagtgtggccaaaggcgggaagatggtgggcagcccagacaccgttgggatgaactacggcagctacatggaggagaagcacatgccacccccaaacatgaccacgaacgagcgcagagttatcgtgccagcagatcctacgctatggagtacagaccatgtgcggcagtggctggagtgggcggtgaaagaatatggccttccagacgtcaacatcttgttattccagaacatcgatgggaaggaactgtgcaagatgaccaaggacgacttccagaggctcacccccagctacaacgccgacatccttctctcacatctccactacctcagagagactcctcttccacatttgacttcagatgatgttgataaagccttacaaaactctccacggttaatgcatgctagaaacacagatttaccatatgagccccccaggagatcagcctggaccggtcacggccaccccacgccccagtcgaaagctgctcaaccatctccttccacagtgcccaaaactgaagaccagcgtcctcagttagatccttatcagattcttggaccaacaagtagccgccttgcaaatccaggcagtggccagatccagctttggcagttcctcctggagctcctgtcggacagctccaactccagctgcatcacctgggaaggcaccaacggggagttcaagatgacggatcccgacgaggtggcccggcgctggggagagcggaagagcaaacccaacatgaactacgataagctcagccgcgccctccgttactactatgacaagaacatcatgaccaaggtccatgggaagcgctacgcctacaagttcgacttccacgggatcgcccaggccctccagccccaccccccggagtcatctctgtacaagtacccctcagacctcccgtacatgggctcctatcacgcccacccacagaagatgaactttgtggcgccccaccctccagccctccccgtgacatcttccagtttttttgctgccccaaacccatactggaattcaccaactgggggtatataccccaacactaggctccccaccagccatatgccttctcatctgggcacttactactaaagacctggcggaggcttttcccatcagcgtgcattcaccagcccatcgccacaaactctatcggagaacatgaatcaaaagtgcctcaagaggaatgaaaaaagctttactggggctggggaaggaagccggggaagagatccaaagactcttgggagggagttactgaagtcttactacagaaatgaggaggatgctaaaaatgtcacgaatatggacatatcatctgtggactgaccttgtaaaagacagtgtatgtagaagcatgaagtcttaaggacaaagtgccaaagaaagtggtcttaagaaatgtataaactttagagtagagtttggaatcccactaatgcaaactgggatgaaactaaagcaatagaaacaacacagttttgacctaacataccgtttataatgccattttaaggaaaactacctgtatttaaaaatagaaacatatcaaaaacaagagaaaagacacgagagagactgtggcccatcaacagacgttgatatgcaactgcatggcatgtgctgttttggttgaaatcaaatacattccgtttgatggacagctgtcagctttctcaaactgtgaagatgacccaaagtttccaactcctttacagtattaccgggactatgaactaaaaggtgggactgaggatgtgtatagagtgagcgtgtgattgtagacagaggggtgaagaaggaggaggaagaggcagagaaggaggagaccagggctgggaaagaaacttctcaagcaatgaagactggactcaggacatttggggactgtgtacaatgagttatggagactcgagggttcatgcagtcagtgttataccaaacccagtgttaggagaaaggacacagcgtaatggagaaaggggaagtagtagaattcagaaacaaaaatgcgcatctctttctttgtttgtcaaatgaaaattttaactggaattgtctgatatttaagagaaacattcaggacctcatcattatgtgggggctttgttctccacagggtcaggtaagagatggccttcttggctgccacaatcagaaatcacgcaggcattttgggtaggcggcctccagttttcctttgagtcgcgaacgctgtgcgtttgtcagaatgaagtatacaagtcaatgtttttccccctttttatataataattatataacttatgcatttatacactacgagttgatctcggccagccaaagacacacgacaaaagagacaatcgatataatgtggccttgaattttaactctgtatgcttaatgtttacaatatgaagttattagttcttagaatgcagaatgtatgtaataaaataagcttggcctagcatggcaaatcagatttatacaggagtctgcatttgcactttttttagtgactaaagttgcttaatgaaaacatgtgctgaatgttgtggattttgtgttataatttactttgtccaggaacttgtgcaagggagagccaaggaaataggatgtttggcacccaaatggcgtcagcctctccaggtccttcttgcctcccctcctgtcttttatttctagccccttttggaacagaaggaccccgggtttcacattggagcctccatatttatgcctggaatggaaagaggcctatgaagctggggttgtcattgagaaattctagttcagcacctggtcacaaatcacccttaattcctgctatgattaaaatacatttgttgaacagtgaacaagctaccactcgtaaggcaaactgtattattactggcaaataaagcgtcatggatagctgcaatttctcactttacagaaacaagggataacgtctagatttgctgcggggtttctctttcaggagctctcactaggtagacagctttagtcctgctacatcagagttacctgggcactgtggcttgggattcactagccctgagcctgatgttgctggctatcccttgaagacaatgtttatttccataatctagagtcagtttccctgggcatcttttctttgaatcacaaatgctgccaaccttggtccaggtgaaggcaactcaaaaggtgaaaatacaaggtgaccgtgcgaaggcgctagccgaaacatcttagctgaataggtttctgaactggcccttttcatagctgtttcagggcctgtttttttcacgttgcagtccttttgctatgattatgtgaagttgccaaacctctgtgctgtggatgttttggcagtgggctttgaagtcggcaggacacgattaccaatgctcctgacaccccgtgtcatttggattagacggagcccaaccatccatcattttgcagcagcctgggaaggcccacaaagtgcccgtatctccttagggaaaataaataaatacaatcatgaaagctggcagttaggctgacccaaactgtgctaatggaaaagatcagtcatttttattttggaatgcaaagtcaagacacacctacattcttcatagaaatacacatttacttggataatcactcagttctctcttcaagactgtctcatgagcaagatcataaaaacaagacatgattatcatattcaattttaacagatgttttccattagatccctcaaccctccacccccagtccaggttattagcaagtcttatgagcaactgggataattttggataacatgataatactgagttccttcaaatacataattcttaaattgtttcaaaatggcattaactctctgttactgttgtaatctaattccaaagccccctccaggtcatattcataattgcatgaaccttttctctctgtttgtccctgtctcttggcttgccctgatgtatactcagactcctgtacaatcttactcctgctggcaagagatttgtcttcttttcttgtcttcaattggctttcgggccttgtatgtggtaaaatcaccaaatcacagtcaagactgtgtttttgttcctagtttgatgcccttatgtcccggaggggttcacaaagtgctttgtcaggactgctgcagttagaaggctcactgcttctcctaagccttctgcacagatgtggcacctgcaacccaggagcaggagccggaggagctgccctctgacagcaggtgcagcagagatggctacagctcaggagctgggaaggtgatggggcacagggaaagcacagatgttctgcagcgccccaaagtgacccattgcctggagaaagagaagaaaatattttttaaaaagctagtttatttagcttctcattaattcattcaaataaagtcgtgaggtgactaattagagaataaaaattactttggactactcaaaaatacacc

SEQ ID NO: 199101 - DNA, 1595 bp, Homo sapiens
  Payload ID: 19280
  Gene Name: v-ets avian erythroblastosis virus E26 oncogene homolog
  ENST ID: ENST00000453032
  CDS Start-End: 155-1318
tccgctctaaacaacctcatcaaaactactttctggtcagagagaagcaataattattattaacatttattaacgatcaataaacttgatcgcattatggccagcactattaaggaactctcctgatgaatgcagtgtggccaaaggcgggaagatggtgggcagcccagacaccgttgggatgaactacggcagctacatggaggagaagcacatgccacccccaaacatgaccacgaacgagcgcagagttatcgtgccagcagatcctacgctatggagtacagaccatgtgcggcagtggctggagtgggcggtgaaagaatatggccttccagacgtcaacatcttgttattccagaacatcgatgggaaggaactgtgcaagatgaccaaggacgacttccagaggctcacccccagctacaacgccgacatccttctctcacatctccactacctcagagagactcctcttccacatttgacttcagatgatgttgataaagccttacaaaactctccacggttaatgcatgctagaaacacagggggtgcagcttttattttcccaaatacttcagtatatcctgaagctacgcaaagaattacaactaggccagatttaccatatgagccccccaggagatcagcctggaccggtcacggccaccccacgccccagtcgaaagctgctcaaccatctccttccacagtgcccaaaactgaagaccagcgtcctcagttagatccttatcagattcttggaccaacaagtagccgccttgcaaatccaggcagtggccagatccagctttggcagttcctcctggagctcctgtcggacagctccaactccagctgcatcacctgggaaggcaccaacggggagttcaagatgacggatcccgacgaggtggcccggcgctggggagagcggaagagcaaacccaacatgaactacgataagctcagccgcgccctccgttactactatgacaagaacatcatgaccaaggtccatgggaagcgctacgcctacaagttcgacttccacgggatcgcccaggccctccagccccaccccccggagtcatctctgtacaagtacccctcagacctcccgtacatgggctcctatcacgcccacccacagaagatgaactttgtggcgccccaccctccagccctccccgtgacatcttccagtttttttgctgccccaaacccatactggaattcaccaactgggggtatataccccaacactaggctccccaccagccatatgccttctcatctgggcacttactactaaagacctggcggaggcttttcccatcagcgtgcattcaccagcccatcgccacaaactctatcggagaacatgaatcaaaagtgcctcaagaggaatgaaaaaagctttactggggctggggaaggaagccggggaagagatccaaagactcttgggagggagttactgaagtcttactacagaaatgaggaggatgctaaaaatgtcacgaatatggacatatcatctgtggactgaccttgtaaaagacagtgtatgtagaagcatgaagtcttaa

SEQ ID NO: 199102 - DNA, 5023 bp, Homo sapiens
  Payload ID: 19280
  Gene Name: v-ets avian erythroblastosis virus E26 oncogene homolog
  Uniprot ID: P11308
  ENST ID: ENST00000417133
  CDS Start-End: 187-1647
cccccgagggacatgagagaagaggagcggcgctcaggttattccaggatctttggagacccgaggaaagccgtgttgaccaaaagcaagacaaatgactcacagagaaaaaagatggcagaaccaagggcaactaaagccgtcaggttctgaacagctggtagatgggctggcttactgaaggacatgattcagactgtcccggacccagcagctcatatcaaggaagccttatcagttgtgagtgaggaccagtcgttgtttgagtgtgcctacggaacgccacacctggctaagacagagatgaccgcgtcctcctccagcgactatggacagacttccaagatgagcccacgcgtccctcagcaggattggctgtctcaacccccagccagggtcaccatcaaaatggaatgtaaccctagccaggtgaatggctcaaggaactctcctgatgaatgcagtgtggccaaaggcgggaagatggtgggcagcccagacaccgttgggatgaactacggcagctacatggaggagaagcacatgccacccccaaacatgaccacgaacgagcgcagagttatcgtgccagcagatcctacgctatggagtacagaccatgtgcggcagtggctggagtgggcggtgaaagaatatggccttccagacgtcaacatcttgttattccagaacatcgatgggaaggaactgtgcaagatgaccaaggacgacttccagaggctcacccccagctacaacgccgacatccttctctcacatctccactacctcagagagactcctcttccacatttgacttcagatgatgttgataaagccttacaaaactctccacggttaatgcatgctagaaacacagggggtgcagcttttattttcccaaatacttcagtatatcctgaagctacgcaaagaattacaactaggccagatttaccatatgagccccccaggagatcagcctggaccggtcacggccaccccacgccccagtcgaaagctgctcaaccatctccttccacagtgcccaaaactgaagaccagcgtcctcagttagatccttatcagattcttggaccaacaagtagccgccttgcaaatccaggcagtggccagatccagctttggcagttcctcctggagctcctgtcggacagctccaactccagctgcatcacctgggaaggcaccaacggggagttcaagatgacggatcccgacgaggtggcccggcgctggggagagcggaagagcaaacccaacatgaactacgataagctcagccgcgccctccgttactactatgacaagaacatcatgaccaaggtccatgggaagcgctacgcctacaagttcgacttccacgggatcgcccaggccctccagccccaccccccggagtcatctctgtacaagtacccctcagacctcccgtacatgggctcctatcacgcccacccacagaagatgaactttgtggcgccccaccctccagccctccccgtgacatcttccagtttttttgctgccccaaacccatactggaattcaccaactgggggtatataccccaacactaggctccccaccagccatatgccttctcatctgggcacttactactaaagacctggcggaggcttttcccatcagcgtgcattcaccagcccatcgccacaaactctatcggagaacatgaatcaaaagtgcctcaagaggaatgaaaaaagctttactggggctggggaaggaagccggggaagagatccaaagactcttgggagggagttactgaagtcttactacagaaatgaggaggatgctaaaaatgtcacgaatatggacatatcatctgtggactgaccttgtaaaagacagtgtatgtagaagcatgaagtcttaaggacaaagtgccaaagaaagtggtcttaagaaatgtataaactttagagtagagtttggaatcccactaatgcaaactgggatgaaactaaagcaatagaaacaacacagttttgacctaacataccgtttataatgccattttaaggaaaactacctgtatttaaaaatagaaacatatcaaaaacaagagaaaagacacgagagagactgtggcccatcaacagacgttgatatgcaactgcatggcatgtgctgttttggttgaaatcaaatacattccgtttgatggacagctgtcagctttctcaaactgtgaagatgacccaaagtttccaactcctttacagtattaccgggactatgaactaaaaggtgggactgaggatgtgtatagagtgagcgtgtgattgtagacagaggggtgaagaaggaggaggaagaggcagagaaggaggagaccagggctgggaaagaaacttctcaagcaatgaagactggactcaggacatttggggactgtgtacaatgagttatggagactcgagggttcatgcagtcagtgttataccaaacccagtgttaggagaaaggacacagcgtaatggagaaaggggaagtagtagaattcagaaacaaaaatgcgcatctctttctttgtttgtcaaatgaaaattttaactggaattgtctgatatttaagagaaacattcaggacctcatcattatgtgggggctttgttctccacagggtcaggtaagagatggccttcttggctgccacaatcagaaatcacgcaggcattttgggtaggcggcctccagttttcctttgagtcgcgaacgctgtgcgtttgtcagaatgaagtatacaagtcaatgtttttccccctttttatataataattatataacttatgcatttatacactacgagttgatctcggccagccaaagacacacgacaaaagagacaatcgatataatgtggccttgaattttaactctgtatgcttaatgtttacaatatgaagttattagttcttagaatgcagaatgtatgtaataaaataagcttggcctagcatggcaaatcagatttatacaggagtctgcatttgcactttttttagtgactaaagttgcttaatgaaaacatgtgctgaatgttgtggattttgtgttataatttactttgtccaggaacttgtgcaagggagagccaaggaaataggatgtttggcacccaaatggcgtcagcctctccaggtccttcttgcctcccctcctgtcttttatttctagccccttttggaacagaaggaccccgggtttcacattggagcctccatatttatgcctggaatggaaagaggcctatgaagctggggttgtcattgagaaattctagttcagcacctggtcacaaatcacccttaattcctgctatgattaaaatacatttgttgaacagtgaacaagctaccactcgtaaggcaaactgtattattactggcaaataaagcgtcatggatagctgcaatttctcactttacagaaacaagggataacgtctagatttgctgcggggtttctctttcaggagctctcactaggtagacagctttagtcctgctacatcagagttacctgggcactgtggcttgggattcactagccctgagcctgatgttgctggctatcccttgaagacaatgtttatttccataatctagagtcagtttccctgggcatcttttctttgaatcacaaatgctgccaaccttggtccaggtgaaggcaactcaaaaggtgaaaatacaaggtgaccgtgcgaaggcgctagccgaaacatcttagctgaataggtttctgaactggcccttttcatagctgtttcagggcctgtttttttcacgttgcagtccttttgctatgattatgtgaagttgccaaacctctgtgctgtggatgttttggcagtgggctttgaagtcggcaggacacgattaccaatgctcctgacaccccgtgtcatttggattagacggagcccaaccatccatcattttgcagcagcctgggaaggcccacaaagtgcccgtatctccttagggaaaataaataaatacaatcatgaaagctggcagttaggctgacccaaactgtgctaatggaaaagatcagtcatttttattttggaatgcaaagtcaagacacacctacattcttcatagaaatacacatttacttggataatcactcagttctctcttcaagactgtctcatgagcaagatcataaaaacaagacatgattatcatattcaattttaacagatgttttccattagatccctcaaccctccacccccagtccaggttattagcaagtcttatgagcaactgggataattttggataacatgataatactgagttccttcaaatacataattcttaaattgtttcaaaatggcattaactctctgttactgttgtaatctaattccaaagccccctccaggtcatattcataattgcatgaaccttttctctctgtttgtccctgtctcttggcttgccctgatgtatactcagactcctgtacaatcttactcctgctggcaagagatttgtcttcttttcttgtcttcaattggctttcgggccttgtatgtggtaaaatcaccaaatcacagtcaagactgtgtttttgttcctagtttgatgcccttatgtcccggaggggttcacaaagtgctttgtcaggactgctgcagttagaaggctcactgcttctcctaagccttctgcacagatgtggcacctgcaacccaggagcaggagccggaggagctgccctctgacagcaggtgcagcagagatggctacagctcaggagctgggaaggtgatggggcacagggaaagcacagatgttctgcagcgccccaaagtgacccattgcctggagaaagagaagaaaatattttttaaaaagctagtttatttagcttctcattaattcattcaaataaagtcgtgaggtgactaattagagaataaaaattactttggactactcaaaaatacaccaaa

SEQ ID NO: 199103 - DNA, 1052 bp, Homo sapiens
  Payload ID: 19280
  Gene Name: v-ets avian erythroblastosis virus E26 oncogene homolog
  ENST ID: ENST00000429727
  CDS Start-End: 390-1052
gttttcacttggtcggaatggggagagtgtgcaagagatcgctgcgggacaggttcctagagatcgctccgggacggtcgtgacggcccccgagggacatgagagaagaggagcggcgctcaggttattccaggatctttggagacccgaggaaagccgtgttgaccaaaagcaagacaaatgactcacagagaaaaaagatggcagaaccaagggcaactaaagccgtcaggttctgaacagctggtagatgggctggcttactgaaggacatgattcagactgtcccggacccagcagctcatatcaaggaagccttatcagttgtgagtgaggaccagtcgttgtttgagtgtgcctacggaacgccacacctggctaagacagagatgaccgcgtcctcctccagcgactatggacagacttccaagatgagcccacgcgtccctcagcaggattggctgtctcaacccccagccagggtcaccatcaaaatggaatgtaaccctagccaggtgaatggctcaaggaactctcctgatgaatgcagtgtggccaaaggcgggaagatggtgggcagcccagacaccgttgggatgaactacggcagctacatggaggagaagcacatgccacccccaaacatgaccacgaacgagcgcagagttatcgtgccagcagatcctacgctatggagtacagaccatgtgcggcagtggctggagtgggcggtgaaagaatatggccttccagacgtcaacatcttgttattccagaacatcgatgggaaggaactgtgcaagatgaccaaggacgacttccagaggctcacccccagctacaacgccgacatccttctctcacatctccactacctcagagagactcctcttccacatttgacttcagatgatgttgataaagccttacaaaactctccacggttaatgcatgctagaaacacagggggtgcagcttttattttcccaaatacttcagtatatcctgaagctacgcaaagaattacaactaggccaggaatatatagatga

SEQ ID NO: 199104 - DNA, 2231 bp, Homo sapiens
  Payload ID: 19281
  Gene Name: v-ets avian erythroblastosis virus E26 oncogene homolog 1
  Uniprot ID: P14921
  ENST ID: ENST00000319397
  CDS Start-End: 311-1636
gagagcgaacgaggcagccgccggcggagaggagggagcgggcgagggccgggcaggaggagcgggcgcggcgcgggcgaggctgggacccgagcgcgctcacttcgccgcaaagtgccaacttcccctggagtgccgggcgcgcaccgtccgggcgcgggggaaagaaaggcagcgggaatttgagatttttgggaagaaagtcggatttcccccgtccccttccccctgttactaatcctcattaaaaagaaaaacaacagtaactgcaaacttgctaccatcccgtacgtcccccactcctggcaccatgaaggcggccgtcgatctcaagccgactctcaccatcatcaagacggaaaaagtcgatctggagcttttcccctccccggatatggaatgtgcagatgtcccactattaactccaagcagcaaagaaatgatgtctcaagcattaaaagctactttcagtggtttcactaaagaacagcaacgactggggatcccaaaagacccccggcagtggacagaaacccatgttcgggactgggtgatgtgggctgtgaatgaattcagcctgaaaggtgtagacttccagaagttctgtatgaatggagcagccctctgcgccctgggtaaagactgctttctcgagctggccccagactttgttggggacatcttatgggaacatctagagatcctgcagaaagaggatgtgaaaccatatcaagttaatggagtcaacccagcctatccagaatcccgctatacctcggattacttcattagctatggtattgagcatgcccagtgtgttccaccatcggagttctcagagcccagcttcatcacagagtcctatcagacgctccatcccatcagctcggaagagctcctctccctcaagtatgagaatgactacccctcggtcattctccgagaccctctccagacagacaccttgcagaatgactactttgctatcaaacaagaagtcgtcaccccagacaacatgtgcatggggaggaccagtcgtggtaaactcgggggccaggactcttttgaaagcatagagagctacgatagttgtgatcgcctcacccagtcctggagcagccagtcatctttcaacagcctgcagcgtgttccctcctatgacagcttcgactcagaggactatccggctgccctgcccaaccacaagcccaagggcaccttcaaggactatgtgcgggaccgtgctgacctcaataaggacaagcctgtcattcctgctgctgccctagctggctacacaggcagtggaccaatccagctatggcagtttcttctggaattactcactgataaatcctgtcagtcttttatcagctggacaggagatggctgggaattcaaactttctgacccagatgaggtggccaggagatggggaaagaggaaaaacaaacctaagatgaattatgagaaactgagccgtggcctacgctactattacgacaaaaacatcatccacaagacagcggggaaacgctacgtgtaccgctttgtgtgtgacctgcagagcctgctggggtacacccctgaggagctgcacgccatgctggacgtcaagccagatgccgacgagtgatggcactgaaggggctggggaaaccctgctgagaccttccaaggacagccgtgttggttggactctgaattttgaattgttattctattttttattttccagaactcattttttaccttcaggggtgggagctaagtcagttgcagctgtaatcaattgtgcgcagttgggaaaggaaagccaggacttgtggggtgggtgggaccagaaattcttgagcaaattttcaggagagggagaagggccttctcagaagcttgaaggctctggcttaacagagaaagagactaatgtgtccaatcatttttaaaaatcatccatgaaaaagtgtcttgagttgtggacccattagcaagtgacattgtcacatcagaactcatgaaactgatgtaaggcaattaatttgcttctgtttttaggtctgggagggcaaaaaagaggtgggtgggatgaaacatgttttggggggggatgcactgaaaatctgagaactatttacctatcactctagttttgaagcaaagatggacttcagtggggaggggccaaaaccgttgttgtgttaaaatttattttattaaattttgtgccagta

SEQ ID NO: 199105 - DNA, 5139 bp, Homo sapiens
  Payload ID: 19281
  Gene Name: v-ets avian erythroblastosis virus E26 oncogene homolog 1
  Uniprot ID: P14921
  ENST ID: ENST00000392668
  CDS Start-End: 86-1543
agttggaaagagaccacagactttgagggaagctcactcaggatctgctctccggcaaagtagtaagtgaggtgctgagagcagaatgagctactttgtggattctgctgggagcagccccgtcccttactcagcgcctcgtcctgcagtggtgaggcaaggacctagcaacacttatgaagatcctcgaatgaactgtggtttccagtccaattatcaccagcaaagaccttgctaccccttttgggatgagatggcaactcaggaagttcctactggtcttgaacactgtgtctcagatatggaatgtgcagatgtcccactattaactccaagcagcaaagaaatgatgtctcaagcattaaaagctactttcagtggtttcactaaagaacagcaacgactggggatcccaaaagacccccggcagtggacagaaacccatgttcgggactgggtgatgtgggctgtgaatgaattcagcctgaaaggtgtagacttccagaagttctgtatgaatggagcagccctctgcgccctgggtaaagactgctttctcgagctggccccagactttgttggggacatcttatgggaacatctagagatcctgcagaaagaggatgtgaaaccatatcaagttaatggagtcaacccagcctatccagaatcccgctatacctcggattacttcattagctatggtattgagcatgcccagtgtgttccaccatcggagttctcagagcccagcttcatcacagagtcctatcagacgctccatcccatcagctcggaagagctcctctccctcaagtatgagaatgactacccctcggtcattctccgagaccctctccagacagacaccttgcagaatgactactttgctatcaaacaagaagtcgtcaccccagacaacatgtgcatggggaggaccagtcgtggtaaactcgggggccaggactcttttgaaagcatagagagctacgatagttgtgatcgcctcacccagtcctggagcagccagtcatctttcaacagcctgcagcgtgttccctcctatgacagcttcgactcagaggactatccggctgccctgcccaaccacaagcccaagggcaccttcaaggactatgtgcgggaccgtgctgacctcaataaggacaagcctgtcattcctgctgctgccctagctggctacacaggcagtggaccaatccagctatggcagtttcttctggaattactcactgataaatcctgtcagtcttttatcagctggacaggagatggctgggaattcaaactttctgacccagatgaggtggccaggagatggggaaagaggaaaaacaaacctaagatgaattatgagaaactgagccgtggcctacgctactattacgacaaaaacatcatccacaagacagcggggaaacgctacgtgtaccgctttgtgtgtgacctgcagagcctgctggggtacacccctgaggagctgcacgccatgctggacgtcaagccagatgccgacgagtgatggcactgaaggggctggggaaaccctgctgagaccttccaaggacagccgtgttggttggactctgaattttgaattgttattctattttttattttccagaactcattttttaccttcaggggtgggagctaagtcagttgcagctgtaatcaattgtgcgcagttgggaaaggaaagccaggacttgtggggtgggtgggaccagaaattcttgagcaaattttcaggagagggagaagggccttctcagaagcttgaaggctctggcttaacagagaaagagactaatgtgtccaatcatttttaaaaatcatccatgaaaaagtgtcttgagttgtggacccattagcaagtgacattgtcacatcagaactcatgaaactgatgtaaggcaattaatttgcttctgtttttaggtctgggagggcaaaaaagaggtgggtgggatgaaacatgttttggggggggatgcactgaaaatctgagaactatttacctatcactctagttttgaagcaaagatggacttcagtggggaggggccaaaaccgttgttgtgttaaaatttattttattaaattttgtgccagtattttttttcttaaaaatcgtcttaagctctaaggtggtctcagtattgcaatatcatgtaagtttgtttttatttgccggctgaggattctgtcacaatgaaagaaaactgtttatatagaccccattggaaaagcaaaacgctctcactgagatcagggatcccaaattcatgggacttatataagaaggacaattaatgctgatttgggtacaggggaattatgtgtgtgaatgtcatctacaattaaaaaaaattagcacatccctttacttacttgttatcagtggattctcggggtttggacttaatgttgagctaagaagcattaagtctttgaactgaatgtattttgcatccctggttttggacgacagtaaacgtaggagcactgttgaagtcctggaagggagatcgaaggaggaagattgacttggttctttcttagtcctatatctgtagcatagatgacttggaataaaagctgtatgcatgggcattacccctcaggtcctaagaaataagtcctgaatgcatgtcgttccaaactaacactctgtaatttttcttttatgtcttattttccaagagtcctccattttttgcaccccctcaccgccaactctgttattcagtagagagaagtgtacggctttctgattggtgagtgaaaaagtaacttgagacacgacctaagttgaagagtttagacttgctgagttttagaagtgatggaaattaagagagcatttcaataaaatgtgacttggctgtctttggaagagaagtgcaaggctttcctttgaagaatttaaattagtccggtaggatgtcaggtgagactgtgtatgcaaaatgaatggcacaggtgatgccagggcctcttgcttgggtctgatgtcttggcacagggtaagtgaaggttaattccagaagagaggaatgacttgaaggcaaaggaaactaaggaaggaggttcagtgaggaaaataaggttgtccatgagatttgaatagatttttagttcccccaaggtttaaatacaaacatagtcaagcaaggtagtcatctttctgctggttgtgagggggaatctgaaaatggagttttagaggaaaagtcaacatctaactagtgaggaaaagtgcctaatacaattagaatctccctcactctatagttgcccagttgaaaggataaggaggaggggtggcttttatggacttccatgagagaaggaaagaaatatttcaggtaagcttctcagggctggccctttttgggatttggatgagaaattggaagtactaactactttctagcatatctttaagaaaattgattgttatttactcccagatcctcttgcagacccagaattatcaggaacatagctctgtgattcatgagtgtccccatactgatgaattggagcatccatatggaaagcaaaggcagaattatcccagctgtattattttgatcttttggatgcaggtgccttaatgaagctctcaaaatattttaggagctgctcagggagtgttgggtggaactgtttggactacattgttttctcttagattatgtgatttttgttgggcactggcaaaaggtgtgtgtgtgaatgtgtgcatgtgtgtgaatgttgtgtgtgtgtgtgtgtgtgtgtgtgtgtgtgtgtgtgtgtgtgtttgcagacatgcaaaactgcagctgaaataataccttagatttctaggtaagtctttccacatttcaataatgggtaagagtagaaccagggccgggtatcaattattgcttgctgtttgcaaccaggcataaaatcactttctcaaatcatccaccgttcctattaaatttatgccggaaactctccttctgtgagtataactcctgcagttcctatagcagataagatataagaaagtgcctcctagtgctcctccgcccgcttgtttgctaaaattccctttctctctaagtccaccattttcaagatttgtagatagtgtattagttaagacagctttgtcgatctggccagatgttttttctcctttgtccaaaggccagagaccatcccaggaagagtggtgggtggtttatacactggaaatgttgcgtttatgctttttaaaaacacacgttaacttcagaggaaggatgggcaaatctggtctagctgggtgaaacccttattttcccagagatgccttaacctttgttggttttggctttagggttcagagtcacttttgttcccttctccattctggagagggacttcccctacatagagccctgatttttgtggctgtggggattggaggtagcattcaaagatcagatgtgcttttcctcactttggagatgaacactctgggttttacagcattaacctgcctaaccttcatggtgagaaatacaccatctctcttctagtcatgctgtgcatgccgcttactctgttggggtctatataaatttgttgaactcttacctacattccaaagaagtttcaaggaaccataaatatatgtatacatatacatatataaaatatatatattaaaataaaattatcaggaatactgcctcagttattgaacttttttttttaagaatactttttttttaagctgagaagtatagggatgaaaaagatgttatattgtgtttgactattttccaacttgtattttcatataatttatattttttaaaagctgaaaatttagaagcaagatgaaaaaaaggaaaagcaggtgctttttaaaaatcagaactgaggtagcttagagatgtagcgatgtaagtgtcgatgtttttttaaaaaaaaatgcaaaaaaattcttatggcggagttttttgtttgtttattttagtagctgatgctggcacatcattttgctggagagttttttatatactgtagcctgatttcatattgtattttaaactgtgtgaaattaaaaacaaagaatttcattcataa

SEQ ID NO: 199106 - DNA, 3389 bp, Homo sapiens
  Payload ID: 19281
  Gene Name: v-ets avian erythroblastosis virus E26 oncogene homolog 1
  Uniprot ID: P14921
  ENST ID: ENST00000526145
  CDS Start-End: 208-1272
ttcgccgcaaagtgccaacttcccctggagtgccgggcgcgcaccgtccgggcgcgggggaaagaaaggcagcgggaatttgagatttttgggaagaaagtcggatttcccccgtccccttccccctgttactaatcctcattaaaaagaaaaacaacagtaactgcaaacttgctaccatcccgtacgtcccccactcctggcaccatgaaggcggccgtcgatctcaagccgactctcaccatcatcaagacggaaaaagtcgatctggagcttttcccctccccggatatggaatgtgcagatgtcccactattaactccaagcagcaaagaaatgatgtctcaagcattaaaagctactttcagtggtttcactaaagaacagcaacgactggggatcccaaaagacccccggcagtggacagaaacccatgttcgggactgggtgatgtgggctgtgaatgaattcagcctgaaaggtgtagacttccagaagttctgtatgaatggagcagccctctgcgccctgggtaaagactgctttctcgagctggccccagactttgttggggacatcttatgggaacatctagagatcctgcagaaagaggatgtgaaaccatatcaagttaatggagtcaacccagcctatccagaatcccgctatacctcggattacttcattagctatggtattgagcatgcccagtgtgttccaccatcggagttctcagagcccagcttcatcacagagtcctatcagacgctccatcccatcagctcggaagagctcctctccctcaagtatgagaatgactacccctcggtcattctccgagaccctctccagacagacaccttgcagaatgactactttgctatcaaacaagaagtcgtcaccccagacaacatgtgcatggggaggaccagtcgtggcagtggaccaatccagctatggcagtttcttctggaattactcactgataaatcctgtcagtcttttatcagctggacaggagatggctgggaattcaaactttctgacccagatgaggtggccaggagatggggaaagaggaaaaacaaacctaagatgaattatgagaaactgagccgtggcctacgctactattacgacaaaaacatcatccacaagacagcggggaaacgctacgtgtaccgctttgtgtgtgacctgcagagcctgctggggtacacccctgaggagctgcacgccatgctggacgtcaagccagatgccgacgagtgatggcactgaaggggctggggaaaccctgctgagaccttccaaggacagccgtgttggttggactctgaattttgaattgttattctattttttattttccagaactcattttttaccttcaggggtgggagctaagtcagttgcagctgtaatcaattgtgcgcagttgggaaaggaaagccaggacttgtggggtgggtgggaccagaaattcttgagcaaattttcaggagagggagaagggccttctcagaagcttgaaggctctggcttaacagagaaagagactaatgtgtccaatcatttttaaaaatcatccatgaaaaagtgtcttgagttgtggacccattagcaagtgacattgtcacatcagaactcatgaaactgatgtaaggcaattaatttgcttctgtttttaggtctgggagggcaaaaaagaggtgggtgggatgaaacatgttttggggggggatgcactgaaaatctgagaactatttacctatcactctagttttgaagcaaagatggacttcagtggggaggggccaaaaccgttgttgtgttaaaatttattttattaaattttgtgccagtattttttttcttaaaaatcgtcttaagctctaaggtggtctcagtattgcaatatcatgtaagtttgtttttatttgccggctgaggattctgtcacaatgaaagaaaactgtttatatagaccccattggaaaagcaaaacgctctcactgagatcagggatcccaaattcatgggacttatataagaaggacaattaatgctgatttgggtacaggggaattatgtgtgtgaatgtcatctacaattaaaaaaaattagcacatccctttacttacttgttatcagtggattctcggggtttggacttaatgttgagctaagaagcattaagtctttgaactgaatgtattttgcatccctggttttggacgacagtaaacgtaggagcactgttgaagtcctggaagggagatcgaaggaggaagattgacttggttctttcttagtcctatatctgtagcatagatgacttggaataaaagctgtatgcatgggcattacccctcaggtcctaagaaataagtcctgaatgcatgtcgttccaaactaacactctgtaatttttcttttatgtcttattttccaagagtcctccattttttgcaccccctcaccgccaactctgttattcagtagagagaagtgtacggctttctgattggtgagtgaaaaagtaacttgagacacgacctaagttgaagagtttagacttgctgagttttagaagtgatggaaattaagagagcatttcaataaaatgtgacttggctgtctttggaagagaagtgcaaggctttcctttgaagaatttaaattagtccggtaggatgtcaggtgagactgtgtatgcaaaatgaatggcacaggtgatgccagggcctcttgcttgggtctgatgtcttggcacagggtaagtgaaggttaattccagaagagaggaatgacttgaaggcaaaggaaactaaggaaggaggttcagtgaggaaaataaggttgtccatgagatttgaatagatttttagttcccccaaggtttaaatacaaacatagtcaagcaaggtagtcatctttctgctggttgtgagggggaatctgaaaatggagttttagaggaaaagtcaacatctaactagtgaggaaaagtgcctaatacaattagaatctccctcactctatagttgcccagttgaaaggataaggaggaggggtggcttttatggacttccatgagagaaggaaagaaatatttcaggtaagcttctcagggctggccctttttgggatttggatgagaaattggaagtactaactactttctagcatatctttaagaaaattgattgttatttactcccagatcctcttgcagacccagaattatcaggaacatagctctgtgattcatgagtgtccccatactgatgaattggagcatccatatggaaagcaaaggcagaattatcccagctgtattattttgatcttttggatgcaggtgccttaatgaagctctcaaaata

SEQ ID NO: 199107 - DNA, 2134 bp, Homo sapiens
  Payload ID: 19281
  Gene Name: v-ets avian erythroblastosis virus E26 oncogene homolog 1
  Uniprot ID: P14921
  ENST ID: ENST00000531611
  CDS Start-End: 271-1089
ggcgagggccgggcaggaggagcgggcgcggcgcgggcgaggctgggacccgagcgcgctcacttcgccgcaaagtgccaacttcccctggagtgccgggcgcgcaccgtccgggcgcgggggaaagaaaggcagcgggaatttgagatttttgggaagaaagtcggatttcccccgtccccttccccctgttactaatcctcattaaaaagaaaaacaacagtaactgcaaacttgctaccatcccgtacgtcccccactcctggcaccatgaaggcggccgtcgatctcaagccgactctcaccatcatcaagacggaaaaagtcgatctggagcttttcccctccccggatatggaatgtgcagatgtcccactattaactccaagcagcaaagaaatgatgtctcaagcattaaaagctactttcagtggtttcactaaagaacagcaacgactggggatcccaaaagacccccggcagtggacagaaacccatgttcgggactgggtgatgtgggctgtgaatgaattcagcctgaaaggtgtagacttccagaagttctgtatgaatggagcagccctctgcgccctgggtaaagactgctttctcgagctggccccagactttgttggggacatcttatgggaacatctagagatcctgcagaaagaggatgtgaaaccatatcaagttaatggagtcaacccagcctatccagaatcccgctatacctcggattacttcattagctatggtattgagcatgcccagtgtgttccaccatcggagttctcagagcccagcttcatcacagagtcctatcagacgctccatcccatcagctcggaagagctcctctccctcaagtatgagaatgactacccctcggtcattctccgagaccctctccagacagacaccttgcagaatgactactttgctatcaaacaagaagtcgtcaccccagacaacatgtgcatggggaggaccagtcgtggtaaactcgggggccaggactcttttgaaagcatagagagctacgatagttgtggccaggagatggggaaagaggaaaaacaaacctaagatgaattatgagaaactgagccgtggcctacgctactattacgacaaaaacatcatccacaagacagcggggaaacgctacgtgtaccgctttgtgtgtgacctgcagagcctgctggggtacacccctgaggagctgcacgccatgctggacgtcaagccagatgccgacgagtgatggcactgaaggggctggggaaaccctgctgagaccttccaaggacagccgtgttggttggactctgaattttgaattgttattctattttttattttccagaactcattttttaccttcaggggtgggagctaagtcagttgcagctgtaatcaattgtgcgcagttgggaaaggaaagccaggacttgtggggtgggtgggaccagaaattcttgagcaaattttcaggagagggagaagggccttctcagaagcttgaaggctctggcttaacagagaaagagactaatgtgtccaatcatttttaaaaatcatccatgaaaaagtgtcttgagttgtggacccattagcaagtgacattgtcacatcagaactcatgaaactgatgtaaggcaattaatttgcttctgtttttaggtctgggagggcaaaaaagaggtgggtgggatgaaacatgttttggggggggatgcactgaaaatctgagaactatttacctatcactctagttttgaagcaaagatggacttcagtggggaggggccaaaaccgttgttgtgttaaaatttattttattaaattttgtgccagtattttttttcttaaaaatcgtcttaagctctaaggtggtctcagtattgcaatatcatgtaagtttgtttttatttgccggctgaggattctgtcacaatgaaagaaaactgtttatatagaccccattggaaaagcaaaacgctctcactgagatcagggatcccaaattcatgggacttatataagaaggacaattaatgctgatttgggtacaggggaattatgtgtgtgaatgtcatctacaattaaaaaaaattagcacatcccttta

SEQ ID NO: 199108 - DNA, 4594 bp, Homo sapiens
  Payload ID: 19281
  Gene Name: v-ets avian erythroblastosis virus E26 oncogene homolog 1
  Uniprot ID: P14921
  ENST ID: ENST00000535549
  CDS Start-End: 317-994
gagatcgagagcgaacgaggcagccgccggcggagaggagggagcgggcgagggccgggcaggaggagcgggcgcggcgcgggcgaggctgggacccgagcgcgctcacttcgccgcaaagtgccaacttcccctggagtgccgggcgcgcaccgtccgggcgcgggggaaagaaaggcagcgggaatttgagatttttgggaagaaagtcggatttcccccgtccccttccccctgttactaatcctcattaaaaagaaaaacaacagtaactgcaaacttgctaccatcccgtacgtcccccactcctggcaccatgaaggcggccgtcgatctcaagccgactctcaccatcatcaagacggaaaaagtcgatctggagcttttcccctccccgggtaaactcgggggccaggactcttttgaaagcatagagagctacgatagttgtgatcgcctcacccagtcctggagcagccagtcatctttcaacagcctgcagcgtgttccctcctatgacagcttcgactcagaggactatccggctgccctgcccaaccacaagcccaagggcaccttcaaggactatgtgcgggaccgtgctgacctcaataaggacaagcctgtcattcctgctgctgccctagctggctacacaggcagtggaccaatccagctatggcagtttcttctggaattactcactgataaatcctgtcagtcttttatcagctggacaggagatggctgggaattcaaactttctgacccagatgaggtggccaggagatggggaaagaggaaaaacaaacctaagatgaattatgagaaactgagccgtggcctacgctactattacgacaaaaacatcatccacaagacagcggggaaacgctacgtgtaccgctttgtgtgtgacctgcagagcctgctggggtacacccctgaggagctgcacgccatgctggacgtcaagccagatgccgacgagtgatggcactgaaggggctggggaaaccctgctgagaccttccaaggacagccgtgttggttggactctgaattttgaattgttattctattttttattttccagaactcattttttaccttcaggggtgggagctaagtcagttgcagctgtaatcaattgtgcgcagttgggaaaggaaagccaggacttgtggggtgggtgggaccagaaattcttgagcaaattttcaggagagggagaagggccttctcagaagcttgaaggctctggcttaacagagaaagagactaatgtgtccaatcatttttaaaaatcatccatgaaaaagtgtcttgagttgtggacccattagcaagtgacattgtcacatcagaactcatgaaactgatgtaaggcaattaatttgcttctgtttttaggtctgggagggcaaaaaagaggtgggtgggatgaaacatgttttggggggggatgcactgaaaatctgagaactatttacctatcactctagttttgaagcaaagatggacttcagtggggaggggccaaaaccgttgttgtgttaaaatttattttattaaattttgtgccagtattttttttcttaaaaatcgtcttaagctctaaggtggtctcagtattgcaatatcatgtaagtttgtttttatttgccggctgaggattctgtcacaatgaaagaaaactgtttatatagaccccattggaaaagcaaaacgctctcactgagatcagggatcccaaattcatgggacttatataagaaggacaattaatgctgatttgggtacaggggaattatgtgtgtgaatgtcatctacaattaaaaaaaattagcacatccctttacttacttgttatcagtggattctcggggtttggacttaatgttgagctaagaagcattaagtctttgaactgaatgtattttgcatccctggttttggacgacagtaaacgtaggagcactgttgaagtcctggaagggagatcgaaggaggaagattgacttggttctttcttagtcctatatctgtagcatagatgacttggaataaaagctgtatgcatgggcattacccctcaggtcctaagaaataagtcctgaatgcatgtcgttccaaactaacactctgtaatttttcttttatgtcttattttccaagagtcctccattttttgcaccccctcaccgccaactctgttattcagtagagagaagtgtacggctttctgattggtgagtgaaaaagtaacttgagacacgacctaagttgaagagtttagacttgctgagttttagaagtgatggaaattaagagagcatttcaataaaatgtgacttggctgtctttggaagagaagtgcaaggctttcctttgaagaatttaaattagtccggtaggatgtcaggtgagactgtgtatgcaaaatgaatggcacaggtgatgccagggcctcttgcttgggtctgatgtcttggcacagggtaagtgaaggttaattccagaagagaggaatgacttgaaggcaaaggaaactaaggaaggaggttcagtgaggaaaataaggttgtccatgagatttgaatagatttttagttcccccaaggtttaaatacaaacatagtcaagcaaggtagtcatctttctgctggttgtgagggggaatctgaaaatggagttttagaggaaaagtcaacatctaactagtgaggaaaagtgcctaatacaattagaatctccctcactctatagttgcccagttgaaaggataaggaggaggggtggcttttatggacttccatgagagaaggaaagaaatatttcaggtaagcttctcagggctggccctttttgggatttggatgagaaattggaagtactaactactttctagcatatctttaagaaaattgattgttatttactcccagatcctcttgcagacccagaattatcaggaacatagctctgtgattcatgagtgtccccatactgatgaattggagcatccatatggaaagcaaaggcagaattatcccagctgtattattttgatcttttggatgcaggtgccttaatgaagctctcaaaatattttaggagctgctcagggagtgttgggtggaactgtttggactacattgttttctcttagattatgtgatttttgttgggcactggcaaaaggtgtgtgtgtgaatgtgtgcatgtgtgtgaatgttgtgtgtgtgtgtgtgtgtgtgtgtgtgtgtgtgtgtgtgtgtgtttgcagacatgcaaaactgcagctgaaataataccttagatttctaggtaagtctttccacatttcaataatgggtaagagtagaaccagggccgggtatcaattattgcttgctgtttgcaaccaggcataaaatcactttctcaaatcatccaccgttcctattaaatttatgccggaaactctccttctgtgagtataactcctgcagttcctatagcagataagatataagaaagtgcctcctagtgctcctccgcccgcttgtttgctaaaattccctttctctctaagtccaccattttcaagatttgtagatagtgtattagttaagacagctttgtcgatctggccagatgttttttctcctttgtccaaaggccagagaccatcccaggaagagtggtgggtggtttatacactggaaatgttgcgtttatgctttttaaaaacacacgttaacttcagaggaaggatgggcaaatctggtctagctgggtgaaacccttattttcccagagatgccttaacctttgttggttttggctttagggttcagagtcacttttgttcccttctccattctggagagggacttcccctacatagagccctgatttttgtggctgtggggattggaggtagcattcaaagatcagatgtgcttttcctcactttggagatgaacactctgggttttacagcattaacctgcctaaccttcatggtgagaaatacaccatctctcttctagtcatgctgtgcatgccgcttactctgttggggtctatataaatttgttgaactcttacctacattccaaagaagtttcaaggaaccataaatatatgtatacatatacatatataaaatatatatattaaaataaaattatcaggaatactgcctcagttattgaacttttttttttaagaatactttttttttaagctgagaagtatagggatgaaaaagatgttatattgtgtttgactattttccaacttgtattttcatataatttatattttttaaaagctgaaaatttagaagcaagatgaaaaaaaggaaaagcaggtgctttttaaaaatcagaactgaggtagcttagagatgtagcgatgtaagtgtcgatgtttttttaaaaaaaaatgcaaaaaaattcttatggcggagttttttgtttgtttattttagtagctgatgctggcacatcattttgctggagagttttttatatactgtagcctgatttcatattgtattttaaactgtgtgaaattaaaaacaaagaatttcattcataatgct

SEQ ID NO: 199109 - DNA, 545 bp, Homo sapiens
  Payload ID: 19281
  Gene Name: v-ets avian erythroblastosis virus E26 oncogene homolog 1
  ENST ID: ENST00000608978
  CDS Start-End: 407-545
aactagagctgcttgtgttacttcaggccatggcctttctgggggtcaacagatagcttcattaattagatagatcagattcaacttactggccagtgcccctgatattaagttctggctttgtcagtggggtttgttgtattccctcaaccctatcaccatggctcagtgaccctatttggaataccagcaggactagaagggtagtggtgtaaaacctttaaatgatatgaggcactctgcctttcagtgctttttagataaaggttcatagatcactgaagttaactgcagtcttcactctttctggattgacaggaatagcaccctcaaatttcagagccatcagacaccatggtatcatgctatcggagttgactgttgaaagttgcttaatatccctgatatggaatgtgcagatgtcccactattaactccaagcagcaaagaaatgatgtctcaagcattaaaagctactttcagtggtttcactaaagaacagcaacgactggggatcccaaaagacccccggcagtggacagaaa

SEQ ID NO: 199110 - DNA, 3936 bp, Homo sapiens
  Payload ID: 19282
  Gene Name: v-ets avian erythroblastosis virus E26 oncogene homolog 2
  Uniprot ID: P15036
  ENST ID: ENST00000360214
  CDS Start-End: 461-1870
agaatgatcattagtcctaagcccattcagaggttcaagaatggggtcggctcaatttcagggccttattacccaagcccggctgcccttcggtgccaccagcaccactgctccgtcgctgcggaattccaaaggcaggtttggcgttagggccttggccccagagaggacgccgagcgctccacggaaagtctccgcccggctcccagggcgcacactcgcgcgcacgtggggccgaggccctgctcccggggcctcagggccagccggcgagggacccagccgagtgacagcaggaggcggagggaagctcagagctcccggagccgcccggccagcgtccggcctccctgatcgtctctggccggcgccctcgccctcgcccggcgcgcaccgagcagccgcgggcgccgagcagccaccgtcccgaccaagcgccggccctgcccgcagcggcaggatgaatgatttcggaatcaagaatatggaccaggtagcccctgtggctaacagttacagagggacactcaagcgccagccagcctttgacacctttgatgggtccctgtttgctgtttttccttctctaaatgaagagcaaacactgcaagaagtgccaacaggcttggattccatttctcatgactccgccaactgtgaattgcctttgttaaccccgtgcagcaaggctgtgatgagtcaagccttaaaagctaccttcagtggcttcaaaaaggaacagcggcgcctgggcattccaaagaacccctggctgtggagtgagcaacaggtatgccagtggcttctctgggccaccaatgagttcagtctggtgaacgtgaatctgcagaggttcggcatgaatggccagatgctgtgtaaccttggcaaggaacgctttctggagctggcacctgactttgtgggtgacattctctgggaacatctggagcaaatgatcaaagaaaaccaagaaaagacagaagatcaatatgaagaaaattcacacctcacctccgttcctcattggattaacagcaatacattaggttttggcacagagcaggcgccctatggaatgcagacacagaattaccccaaaggcggcctcctggacagcatgtgtccggcctccacacccagcgtactcagctctgagcaggagtttcagatgttccccaagtctcggctcagctccgtcagcgtcacctactgctctgtcagtcaggacttcccaggcagcaacttgaatttgctcaccaacaattctgggactcccaaagaccacgactcccctgagaacggtgcggacagcttcgagagctcagactccctcctccagtcctggaacagccagtcgtccttgctggatgtgcaacgggttccttccttcgagagcttcgaagatgactgcagccagtctctctgcctcaataagccaaccatgtctttcaaggattacatccaagagaggagtgacccagtggagcaaggcaaaccagttatacctgcagctgtgctggccggcttcacaggaagtggacctattcagctgtggcagtttctcctggagctgctatcagacaaatcctgccagtcattcatcagctggactggagacggatgggagtttaagctcgccgaccccgatgaggtggcccgccggtggggaaagaggaaaaataagcccaagatgaactacgagaagctgagccggggcttacgctactattacgacaagaacatcatccacaagacgtcggggaagcgctacgtgtaccgcttcgtgtgcgacctccagaacttgctggggttcacgcccgaggaactgcacgccatcctgggcgtccagcccgacacggaggactgaggtcgccgggaccaccctgagccggccccaggctcgtggactgagtgggaagcccatcctgaccagctgctccgaggacccaggaaaggcaggattgaaaatgtccaggaaagtggccaagaagcagtggccttattgcatcccaaaccacgcctcttgaccaggctgcctcccttgtggcagcaacggcacagctaattctactcacagtgcttttaagtgaaaatggtcgagaaagaggcaccaggaagccgtcctggcgcctggcagtccgtgggacgggatggttctggctgtttgagattctcaaaggagcgagcatgtcgtggacacacacagactatttttagattttcttttgccttttgcaaccaggaacagcaaatgcaaaaactctttgagagggtaggagggtgggaaggaaacaaccatgtcatttcagaagttagtttgtatatattattataatcttataattgttctcagaatcccttaacagttgtatttaacagaaattgtatattgtaatttaaaataattatataactgtatttgaaataagaattcagacatctgaggttttatttcatttttcaatagcacatatggaattttgcaaagatttaatctgccaagggccgactaagagaagttgtaaagtatgtattatttacatttaatagacttacagggataaggcctgtggggggtaatccctgctttttgtgtttttttgtttgtttgtttgtttgtttttggggggttttcttgccttggttgtctggcaaggactttgtacatttgggagtttttatgagaaacttaaatgttattatctgggcttatatctggcctctgctttctcctttaattgtaaagtaaaagctataaagcagtatttttcttgacaaatggcatatgttttccacttctttgcatgcgtttaagtcagtttatacacaaaatggattttattttttagtttaactgtgtttctccgacagctcacctctctctgaccacccagccatttccttcctgtgctccacgttcttctgtgtgattaaaataagaatattatttttggaaatatgcaactccttttcagagatcaggagggatttatgtagcagctatttttactgcaaaagtaattcactggaaaaaaaatgtaatttgtaagaaagctttatttttatctcagctctatgtaaagttaaagttactgtacagagctgaaggacggggggcggtaggggtcttgatgaaacctcttgaacgaagcacagtttgtcccatctttgttcactcgtgtgtctcaaccatcttaatagcatgctgctcctttttgctcagtgtccacagcaagatgacgtgattcttattttcttggacacagactattctgaggcacagagcggggacttaagatgggaaagagaaagcatcggagccattcattcggagaaaacgttttgatcaaaatggagacttttgtagtcgtttcaaaagagcacctgagtcatgtgtattcccggcctttataaatgacccggtcaagttggtttcaaagtccgacaggcttgtctgtttactagctgcgtggccttggacgggtggctgacatctgtaaagaatcctcctgtgatgaaactgaggaatcgggtggccgggcaagctgggaagagcaaagccagagctgcgctgcctcaatacccacaaaagaccattcccagtatacataagcacaggatgtttttctcaagagggatgtatttatcacttggacatctgtttataatataaacagacatgtgactgggaacatcttgctgccaaaagaatcctaggcagtggctcattgtatgtgaggttgaaccacgtgaaattgccaatattaggctggcttttatctacaaagaaggagtttcatggggttcagcctaacagttatggaaactacagtccttataaaccattggcatggtaataaacagatcttaagtataaaaattttgtaattgggcctttactctctcaataataaagtattttgtttatataaa

SEQ ID NO: 199111 - DNA, 3766 bp, Homo sapiens
  Payload ID: 19282
  Gene Name: v-ets avian erythroblastosis virus E26 oncogene homolog 2
  Uniprot ID: P15036
  ENST ID: ENST00000360938
  CDS Start-End: 291-1700
cgtttcctcccctcccctccactcggccgtccctccttcctcctccctcctccctcctcctcccgctcctgaagagcgcgccgcgtgggggacggcccggttacttcctccagagactgacgagtgcggtgtcgctccagctcagagctcccggagccgcccggccagcgtccggcctccctgatcgtctctggccggcgccctcgccctcgcccggcgcgcaccgagcagccgcgggcgccgagcagccaccgtcccgaccaagcgccggccctgcccgcagcggcaggatgaatgatttcggaatcaagaatatggaccaggtagcccctgtggctaacagttacagagggacactcaagcgccagccagcctttgacacctttgatgggtccctgtttgctgtttttccttctctaaatgaagagcaaacactgcaagaagtgccaacaggcttggattccatttctcatgactccgccaactgtgaattgcctttgttaaccccgtgcagcaaggctgtgatgagtcaagccttaaaagctaccttcagtggcttcaaaaaggaacagcggcgcctgggcattccaaagaacccctggctgtggagtgagcaacaggtatgccagtggcttctctgggccaccaatgagttcagtctggtgaacgtgaatctgcagaggttcggcatgaatggccagatgctgtgtaaccttggcaaggaacgctttctggagctggcacctgactttgtgggtgacattctctgggaacatctggagcaaatgatcaaagaaaaccaagaaaagacagaagatcaatatgaagaaaattcacacctcacctccgttcctcattggattaacagcaatacattaggttttggcacagagcaggcgccctatggaatgcagacacagaattaccccaaaggcggcctcctggacagcatgtgtccggcctccacacccagcgtactcagctctgagcaggagtttcagatgttccccaagtctcggctcagctccgtcagcgtcacctactgctctgtcagtcaggacttcccaggcagcaacttgaatttgctcaccaacaattctgggactcccaaagaccacgactcccctgagaacggtgcggacagcttcgagagctcagactccctcctccagtcctggaacagccagtcgtccttgctggatgtgcaacgggttccttccttcgagagcttcgaagatgactgcagccagtctctctgcctcaataagccaaccatgtctttcaaggattacatccaagagaggagtgacccagtggagcaaggcaaaccagttatacctgcagctgtgctggccggcttcacaggaagtggacctattcagctgtggcagtttctcctggagctgctatcagacaaatcctgccagtcattcatcagctggactggagacggatgggagtttaagctcgccgaccccgatgaggtggcccgccggtggggaaagaggaaaaataagcccaagatgaactacgagaagctgagccggggcttacgctactattacgacaagaacatcatccacaagacgtcggggaagcgctacgtgtaccgcttcgtgtgcgacctccagaacttgctggggttcacgcccgaggaactgcacgccatcctgggcgtccagcccgacacggaggactgaggtcgccgggaccaccctgagccggccccaggctcgtggactgagtgggaagcccatcctgaccagctgctccgaggacccaggaaaggcaggattgaaaatgtccaggaaagtggccaagaagcagtggccttattgcatcccaaaccacgcctcttgaccaggctgcctcccttgtggcagcaacggcacagctaattctactcacagtgcttttaagtgaaaatggtcgagaaagaggcaccaggaagccgtcctggcgcctggcagtccgtgggacgggatggttctggctgtttgagattctcaaaggagcgagcatgtcgtggacacacacagactatttttagattttcttttgccttttgcaaccaggaacagcaaatgcaaaaactctttgagagggtaggagggtgggaaggaaacaaccatgtcatttcagaagttagtttgtatatattattataatcttataattgttctcagaatcccttaacagttgtatttaacagaaattgtatattgtaatttaaaataattatataactgtatttgaaataagaattcagacatctgaggttttatttcatttttcaatagcacatatggaattttgcaaagatttaatctgccaagggccgactaagagaagttgtaaagtatgtattatttacatttaatagacttacagggataaggcctgtggggggtaatccctgctttttgtgtttttttgtttgtttgtttgtttgtttttggggggttttcttgccttggttgtctggcaaggactttgtacatttgggagtttttatgagaaacttaaatgttattatctgggcttatatctggcctctgctttctcctttaattgtaaagtaaaagctataaagcagtatttttcttgacaaatggcatatgttttccacttctttgcatgcgtttaagtcagtttatacacaaaatggattttattttttagtttaactgtgtttctccgacagctcacctctctctgaccacccagccatttccttcctgtgctccacgttcttctgtgtgattaaaataagaatattatttttggaaatatgcaactccttttcagagatcaggagggatttatgtagcagctatttttactgcaaaagtaattcactggaaaaaaaatgtaatttgtaagaaagctttatttttatctcagctctatgtaaagttaaagttactgtacagagctgaaggacggggggcggtaggggtcttgatgaaacctcttgaacgaagcacagtttgtcccatctttgttcactcgtgtgtctcaaccatcttaatagcatgctgctcctttttgctcagtgtccacagcaagatgacgtgattcttattttcttggacacagactattctgaggcacagagcggggacttaagatgggaaagagaaagcatcggagccattcattcggagaaaacgttttgatcaaaatggagacttttgtagtcgtttcaaaagagcacctgagtcatgtgtattcccggcctttataaatgacccggtcaagttggtttcaaagtccgacaggcttgtctgtttactagctgcgtggccttggacgggtggctgacatctgtaaagaatcctcctgtgatgaaactgaggaatcgggtggccgggcaagctgggaagagcaaagccagagctgcgctgcctcaatacccacaaaagaccattcccagtatacataagcacaggatgtttttctcaagagggatgtatttatcacttggacatctgtttataatataaacagacatgtgactgggaacatcttgctgccaaaagaatcctaggcagtggctcattgtatgtgaggttgaaccacgtgaaattgccaatattaggctggcttttatctacaaagaaggagtttcatggggttcagcctaacagttatggaaactacagtccttataaaccattggcatggtaataaacagatcttaagtataaaaattttgtaattgggcctttactctctcaataataaagtattttgtttatataaa

SEQ ID NO: 199112 - DNA, 1033 bp, Homo sapiens
  Payload ID: 19282
  Gene Name: v-ets avian erythroblastosis virus E26 oncogene homolog 2
  ENST ID: ENST00000432278
  CDS Start-End: 529-1033
cgagtgcggtgtcgctccagctcagagctcccggagccgcccggccagcgtccggcctccctgatcgtctctggccggcgccctcgccctcgcccggcgcgcaccgagcagccgcgggcgccgagcagccaccgtcccgaccaagcgccggccctgcccgcagcggcagggaaacgcaggcctggtagggggtcctgcccagtggatgtcccggcgaacatgatttcgcgaacgggagtgggggcacaggagagcgtgtccgaggtggcctggcgccccggctttgagggtgacttcctggagcggcgccgggcccggaggatctggggcgcccaagacacctgaaggctgcggcaccgcgggaacctgcggggcgcggggtgccatggtcacctgctcgccgcgtccagggcccgggctggggacccctcggtcgtgcgaggagagcgtggggaacctgtcggaaatgagatctggttgcgctgggctgcctttattttctcgttcctacagcatttgaatgaagagatgaatgatttcggaatcaagaatatggaccaggtagcccctgtggctaacagttacagagggacactcaagcgccagccagcctttgacacctttgatgggtccctgtttgctgtttttccttctctaaatgaagagcaaacactgcaagaagtgccaacaggcttggattccatttctcatgactccgccaactgtgaattgcctttgttaaccccgtgcagcaaggctgtgatgagtcaagccttaaaagctaccttcagtggcttcaaaaaggaacagcggcgcctgggcattccaaagaacccctggctgtggagtgagcaacaggtatgccagtggcttctctgggccaccaatgagttcagtctggtgaacgtgaatctgcagaggttcggcatgaatggccagatgctgtgtaaccttggcaaggaacgctttctggagctggcacctgactttgtgggtgacattctctgggaacatctggagcaaatgatcaaag

SEQ ID NO: 199113 - DNA, 972 bp, Homo sapiens
  Payload ID: 19282
  Gene Name: v-ets avian erythroblastosis virus E26 oncogene homolog 2
  ENST ID: ENST00000456966
  CDS Start-End: 162-972
gcccactgccccactgtacccacccaagcactcacctaagctggccatggaaatgtgaatgaaaagcctgacccaggccctcttgccctgctaacccagcaaggaggctctgaccagccagccagcaagtgactttttctgtgacatctaagtggaattcaatgaatgatttcggaatcaagaatatggaccaggtagcccctgtggctaacagttacagagggacactcaagcgccagccagcctttgacacctttgatgggtccctgtttgctgtttttccttctctaaatgaagagcaaacactgcaagaagtgccaacaggcttggattccatttctcatgactccgccaactgtgaattgcctttgttaaccccgtgcagcaaggctgtgatgagtcaagccttaaaagctaccttcagtggcttcaaaaaggaacagcggcgcctgggcattccaaagaacccctggctgtggagtgagcaacaggtatgccagtggcttctctgggccaccaatgagttcagtctggtgaacgtgaatctgcagaggttcggcatgaatggccagatgctgtgtaaccttggcaaggaacgctttctggagctggcacctgactttgtgggtgacattctctgggaacatctggagcaaatgatcaaagaaaaccaagaaaagacagaagatcaatatgaagaaaattcacacctcacctccgttcctcattggattaacagcaatacattaggttttggcacagagcaggcgccctatggaatgcagacacagaattaccccaaaggcggcctcctggacagcatgtgtccggcctccacacccagcgtactcagctctgagcaggagtttcagatgttccccaagtctcggctcagctccgtcagcgtcacctactgctctgtcagtcaggacttcccaggcagcaacttgaatttgctcaccaacaattctg

SEQ ID NO: 199114 - DNA, 3435 bp, Homo sapiens
  Payload ID: 19283
  Gene Name: vezatin, adherens junctions transmembrane protein
  ENST ID: ENST00000261219
  CDS Start-End: 1-1383
agcttgctcgtttcccacttggtggattgttcctggctggtatggggagtgattctatttgtgtatctggtcataagagctttgagattatggaggacagccaaactacaagtgaccctaaaaaaatacagcgttcatttggaagatatggccacaaacagccgagcttttactaacctcgtgagaaaagctttacgtctcattcaagaaaccgaagtgatttccagaggatttacactggtcagtgctgcttgcccatttaataaagctggacagcatccaagtcagcatctcatcggtcttcggaaagctgtctaccgaactctaagagccaacttccaagcagcaaggctagctaccctatatatgctgaaaaactaccccctgaactctgagagtgacaatgtaaccaactacatctgtgtggtgccttttaaagagctgggccttggacttagtgaagagcagatttcagaagaggaagcacataactttacagatggcttcagcctgcctgcattgaaggttttgttccaactctgggtggcacagagttcagagttcttcagacggttagccctattactttctacagccaattcacctcctgggcccttacttactccagcacttctgcctcatcgtatcttatctgatgtgactcaaggtctacctcatgctcattctgcctgtttggaagagcttaagcgcagctatgagttctatcggtactttgaaactcagcaccagtcagtaccgcagtgtttatccaaaactcaacagaagtcaagagaactgaataatgttcacacagcagtgcgtagcttgcagctccatctgaaagcattactgaatgaggtaataattcttgaagatgaacttgaaaagcttgtttgtactaaagaaacacaagaactagtgtcagaggcttatcccatcctagaacagaaattaaagttgattcagccccacgttcaagcaagcaacaattgctgggaagaggccatttctcaggtcgacaaactgctacgaagaaatacagataaaaaaggcaagcctgaaatagcatgtgaaaacccacattgtacagtagtacctttgaagcagcctactctacacattgcagacaaagatccaatcccagaggagcaggaattagaagcttatgtagatgatatagatattgatagtgatttcagaaaggatgatttttattacttgtctcaagaagacaaagagagacagaagcgtgagcatgaagaatccaagagggtgctccaagaattaaaatctgtgctgggatttaaagcttcagaggcagaaaggcagaagtggaagcaacttctatttagtgatcatggggtaaagtccgcatggaattagagggggaaagtctgcactggaacctgctgtggccattttttttctgttgttgctgcttctctagtggagttactgcagcttagggatggttcctggaagtggacacattttacaaaaacgttttttaaatacacgccagctcttcgagaagcacttttttccttccgtcatgcttcatactatattgtattgtactaacccctcatgctgggatgagcgactgcctagcaagcaacccactgcctactaacatcaagaggggctaaataaaactgcattttccttgcaaggacaacttctaccgtatgaatatatattatatttatgtattatattttgtacaatagttgatcttgaatgcagacttcatttgtatttttcgtggtactacaaaatgtgtagaagttatggcttttctttcattagggtcttgttaggtggttggcaagtaagttaaattgtatgttgcatttttttccatgctgttttaacttgtaaatatatatgtatacatatggaagatattattattatctagattactttaagccttttatctgatgtattatcagtgaaaaccatgctgcttattccctaatacaatggttctcaaactttagtgtgtatcagaatcaagatgagggcttgtaaaatatagctggtccctactcccagagtttccatttcaggaggtctgggatcaggcccaagaatttgcatttttaacaaattcctaggtgataactgataatgttggttcagggaacacactttcagaaccactgctttaatattttaaataagataatatgtgaggtgtcataaaaaccttcatcaaatccctatctcatttcatttcttaggcattttctctcttataaagtttcctggatttataaattttcattgattttactagaaagttttatttagcttttatttatttattgttctttttaagaaaaaaactgagagtttgaattaaaagtttaaatcattgctaggtccttagttattttttttcttttttctttttttttatttgaagccgtgttgaaatccttgtctcctgtagacccagtggaacccataagtaattcagaaccatcaatgaattcagatatgggaaaagtcagtaaaaatgatactgaagaggaaagtaataaatccgccacaacagacaatgaaataagtaggactgagtatttatgtgaaaactctctagaaggtaaaaataaagataattcttcaaatgaagtcttcccccaaggagcagaagaaagaatgtgttaccaatgtgagagtgaagatgaaccacaagcagatggaagtggtctgaccactgcccctccaactcccagggactcattacagccctccattaagcagaggctggcacggctacagctgtcaccagattttaccttcactgctggccttgctgcagaagtggctgctagatctctctcctttaccaccatgcaggaacagacttttggtggtgaggaggaagaacaaataatagaagaaaataaaaatgagatagaagaaaagtaagaaccaagattcatatgaagtgatattagattgttccttttacaaaagtgtttagcttcaagactggaaagggaatatgagtgtaagtttactatatataaagctaagatgtggatttacaggaagaaccctggtttgaataactgatctgaaattagtagttacctgtaaatggcagatcttttaggaaaataagagaaaggtaagggctcttttgaataaactgctgttttatttgtggcacaactgatcaatcttggaaattctttaagtatttttaataagaaatgaattatcatttcttgccagaatttgctaccttaaggtgattgggaaaattctgttgcaagaacattaacatttagtatgactcctttttactgtattcttgcagttaataactgcagctattatgttaataacaagttgtttgtattttatttttgtttataccagtcttaaagatccaggttctgaataaaaaaattaattgat

SEQ ID NO: 199115 - DNA, 2484 bp, Homo sapiens
  Payload ID: 19283
  Gene Name: vezatin, adherens junctions transmembrane protein
  ENST ID: ENST00000397792
  CDS Start-End: 316-2484
ttttgtactgtggttcttctggagaaacaagtgggaatcatcaaagaaagaaatgtatggataaaaaagaatatggacaagaggcagtaaatttttcatttaggtcaactggagaaattagaaccatgctatctaattctccactttaccaatacttacaggatctgggacacacagactttgaaatatgttcttctttgtcaccaaaaacagaaaaatgcacaacagagggacaacaaaagcctcctacaagagtcctaccaaaatacctgggatatagtaatcactcaatgaatataaactgcacttactggcatgctcaaggaatgggctattaagcaaggtatcctgttaaaagtggctgaaaccatcaaaagttggatttttttttctcagtgcaataagaaagatgacttacttcacaagttggatattggattccgactcgactcattacataccatcctgcaacaggaagtcctgttacaagaggatgtggagctgattgagctacttgatcccagtatcctgtctgcagggcaatctcaacaacaggaaaatggacaccttccaacactttgctccctggcaacccctaatatttgggatctctcaatgctatttgccttcattagcttgctcgttatgcttcccacttggtggattgtgtcttcctggctggtatggggagtgattctatttgtgtatctggtcataagagctttgagattatggaggacagccaaactacaagtgaccctaaaaaaatacagcgttcatttggaagatatggccacaaacagccgagcttttactaacctcgtgagaaaagctttacgtctcattcaagaaaccgaagtgatttccagaggatttacacttttgcttgacagggtcagtgctgcttgcccatttaataaagctggacagcatccaagtcagcatctcatcggtcttcggaaagctgtctaccgaactctaagagccaacttccaagcagcaaggctagctaccctatatatgctgaaaaactaccccctgaactctgagagtgacaatgtaaccaactacatctgtgtggtgccttttaaagagctgggccttggacttagtgaagagcagatttcagaagaggaagcacataactttacagatggcttcagcctgcctgcattgaaggttttgttccaactctgggtggcacagagttcagagttcttcagacggttagccctattactttctacagccaattcacctcctgggcccttacttactccagcacttctgcctcatcgtatcttatctgatgtgactcaaggtctacctcatgctcattctgcctgtttggaagagcttaagcgcagctatgagttctatcggtactttgaaactcagcaccagtcagtaccgcagtgtttatccaaaactcaacagaagtcaagagaactgaataatgttcacacagcagtgcgtagcttgcagctccatctgaaagcattactgaatgaggtaataattcttgaagatgaacttgaaaagcttgtttgtactaaagaaacacaagaactagtgtcagaggcttatcccatcctagaacagaaattaaagttgattcagccccacgttcaagcaagcaacaattgctgggaagaggccatttctcaggtcgacaaactgctacgaagaaatacagataaaaaaggcaagcctgaaatagcatgtgaaaacccacattgtacagtagtacctttgaagcagcctactctacacattgcagacaaagatccaatcccagaggagcaggaattagaagcttatgtagatgatatagatattgatagtgatttcagaaaggatgatttttattacttgtctcaagaagacaaagagagacagaagcgtgagcatgaagaatccaagagggtgctccaagaattaaaatctgtgctgggatttaaagcttcagaggcagaaaggcagaagtggaagcaacttctatttagtgatcatgccgtgttgaaatccttgtctcctgtagacccagtggaacccataagtaattcagaaccatcaatgaattcagatatgggaaaagtcagtaaaaatgatactgaagaggaaagtaataaatccgccacaacagacaatgaaataagtaggactgagtatttatgtgaaaactctctagaaggtaaaaataaagataattcttcaaatgaagtcttcccccaaggagcagaagaaagaatgtgttaccaatgtgagagtgaagatgaaccacaagcagatggaagtggtctgaccactgcccctccaactcccagggactcattacagccctccattaagcagaggctggcacggctacagctgtcaccagattttaccttcactgctggccttgctgcagaagtggctgctagatctctctcctttaccaccatgcaggaacagacttttggtggtgaggaggaagaacaa

SEQ ID NO: 199116 - DNA, 4562 bp, Homo sapiens
  Payload ID: 19283
  Gene Name: vezatin, adherens junctions transmembrane protein
  Uniprot ID: Q9HBM0
  ENST ID: ENST00000436874
  CDS Start-End: 106-2445
gtagttttctggacccacgggacgggcaggagctggagctccgtgccgcctgtactcccgccttcatttcccatcgtgctgaggcgggtggcatggcggagaaggatgacaccggagtttgacgaagaggtggtttttgagaattctccactttaccaatacttacaggatctgggacacacagactttgaaatatgttcttctttgtcaccaaaaacagaaaaatgcacaacagagggacaacaaaagcctcctacaagagtcctaccaaaacaaggtatcctgttaaaagtggctgaaaccatcaaaagttggatttttttttctcagtgcaataagaaagatgacttacttcacaagttggatattggattccgactcgactcattacataccatcctgcaacaggaagtcctgttacaagaggatgtggagctgattgagctacttgatcccagtatcctgtctgcagggcaatctcaacaacaggaaaatggacaccttccaacactttgctccctggcaacccctaatatttgggatctctcaatgctatttgccttcattagcttgctcgttatgcttcccacttggtggattgtgtcttcctggctggtatggggagtgattctatttgtgtatctggtcataagagctttgagattatggaggacagccaaactacaagtgaccctaaaaaaatacagcgttcatttggaagatatggccacaaacagccgagcttttactaacctcgtgagaaaagctttacgtctcattcaagaaaccgaagtgatttccagaggatttacactggtcagtgctgcttgcccatttaataaagctggacagcatccaagtcagcatctcatcggtcttcggaaagctgtctaccgaactctaagagccaacttccaagcagcaaggctagctaccctatatatgctgaaaaactaccccctgaactctgagagtgacaatgtaaccaactacatctgtgtggtgccttttaaagagctgggccttggacttagtgaagagcagatttcagaagaggaagcacataactttacagatggcttcagcctgcctgcattgaaggttttgttccaactctgggtggcacagagttcagagttcttcagacggttagccctattactttctacagccaattcacctcctgggcccttacttactccagcacttctgcctcatcgtatcttatctgatgtgactcaaggtctacctcatgctcattctgcctgtttggaagagcttaagcgcagctatgagttctatcggtactttgaaactcagcaccagtcagtaccgcagtgtttatccaaaactcaacagaagtcaagagaactgaataatgttcacacagcagtgcgtagcttgcagctccatctgaaagcattactgaatgaggtaataattcttgaagatgaacttgaaaagcttgtttgtactaaagaaacacaagaactagtgtcagaggcttatcccatcctagaacagaaattaaagttgattcagccccacgttcaagcaagcaacaattgctgggaagaggccatttctcaggtcgacaaactgctacgaagaaatacagataaaaaaggcaagcctgaaatagcatgtgaaaacccacattgtacagtagtacctttgaagcagcctactctacacattgcagacaaagatccaatcccagaggagcaggaattagaagcttatgtagatgatatagatattgatagtgatttcagaaaggatgatttttattacttgtctcaagaagacaaagagagacagaagcgtgagcatgaagaatccaagagggtgctccaagaattaaaatctgtgctgggatttaaagcttcagaggcagaaaggcagaagtggaagcaacttctatttagtgatcatgccgtgttgaaatccttgtctcctgtagacccagtggaacccataagtaattcagaaccatcaatgaattcagatatgggaaaagtcagtaaaaatgatactgaagaggaaagtaataaatccgccacaacagacaatgaaataagtaggactgagtatttatgtgaaaactctctagaaggtaaaaataaagataattcttcaaatgaagtcttcccccaaggagcagaagaaagaatgtgttaccaatgtgagagtgaagatgaaccacaagcagatggaagtggtctgaccactgcccctccaactcccagggactcattacagccctccattaagcagaggctggcacggctacagctgtcaccagattttaccttcactgctggccttgctgcagaagtggctgctagatctctctcctttaccaccatgcaggaacagacttttggtggtgaggaggaagaacaaataatagaagaaaataaaaatgagatagaagaaaagtaagaaccaagattcatatgaagtgatattagattgttccttttacaaaagtgtttagcttcaagactggaaagggaatatgagtgtaagtttactatatataaagctaagatgtggatttacaggaagaaccctggtttgaataactgatctgaaattagtagttacctgtaaatggcagatcttttaggaaaataagagaaaggtaagggctcttttgaataaactgctgttttatttgtggcacaactgatcaatcttggaaattctttaagtatttttaataagaaatgaattatcatttcttgccagaatttgctaccttaaggtgattgggaaaattctgttgcaagaacattaacatttagtatgactcctttttactgtattcttgcagttaataactgcagctattatgttaataacaagttgtttgtattttatttttgtttataccagtcttaaagatccaggttctgaataaaaaaattaattgatacaattgatgtgtgctggggtttggaactaaaagtagtttcaacagtgcgtgggttatgacatttcttatgtttctttgttcatgtgtgtatttagtagttaattttaagatgtcctagtgatctttaaaagaaaaatattgtaccattttttagaattacactttcacctttctttttgcaattgaaagtgatgatgtcaaagtgggatttctgtactccaaggccccacccccaatttagcaagcagaaaaacgttccttgtatcactttaccttggataattgggtgccattaacacaaacaggtcacaatcctgctgttttctagccctgtccaccataatgagattcaggaaacatcctgtcagcctcctggaaagcatccttgtctccttagtatttcatttacaaactacctcttaacagagactgcttttcaaattggccaatcttacctgttttgtgttgtgattgcattttcaaagagtaattattttcagcatatacagttttgaaacctgtagctcctatgcaataacatagttctatagacattatttgggggaaatgtagtaataactcaatctatgttgctgtcctagaaaggaaattgcatgatgaatctagattgtctttagagtaaagaaacacattcaaattcctgtaacttatcactttcagtgagtaaatttacttataccaaaggggattttttttctttcaggaatctaaggaaatttactttttaacctgagaaaaaaacttggttctgctttatataaacagtagagattattgtactataagtgattttgcctttttgccaaaatcctggaactcatctataattaacctcttcggagcaataccttaggttgggccttgctttactacttagaaatagctaaatttcaattttaaaaatctttgtgtgttataactgttaaattattcaataatacttagggtttactttcttatttaaatcacttatttagtttaccgacttcatttttctttggatttagaagaagcaattatggaaaaacttggtaatctctctcaacctataaccttacacaggaagaattagagtttaataatttttaattcttttattgtatgttacttttattacaccagtttgggggaaaatcttcataaaattgtatcagttttattcagtgttctctaaggtgataccttttaattttgaaagactaaataattttaatcgagaatttccagtctttcagtctgatctatttaattcactacttgttacataatccagtgaaaactctacttgttgaaattatgacataaagatcttgcagctttatttgagtatttgttcttttgtgtagtttccatcttttaaaatatttaaaatattttcaagataaagtattatcttctctgcaaaaattcctggagtaattttctctcataatatttgaagtcagtggttctcagttgtattagtggggtaactacatcaaaataaataaagtcttatttttaaaatgcaaattttagaccatactcccagtgattcttagttggtctttttggaatgagccataggtaatgtttatgtccaataaaatctaggaacctc

SEQ ID NO: 199117 - DNA, 588 bp, Homo sapiens
  Payload ID: 19283
  Gene Name: vezatin, adherens junctions transmembrane protein
  ENST ID: ENST00000548245
  CDS Start-End: 40-339
tttcccatcgtgctgaggcgggtggcatggcggagaaggatgacaccggagtttgacgaagaggtggtttttgagaattctccactttaccaatacttacaggatctgggacacacagactttgaaatatgttcttctttgtcaccaaaaacagaaaaatgcacaacagagggacaacaaaagcctcctacaagagtcctaccaaaacaaggtatcctgttaaaagtggctgaaaccatcaaaagttggatttttttttctcagtgcaataagaaagatgacttacttcacaagttggtggagccatctcattcttcagtgatactaggactgtggtaaggatattggattccgactcgactcattacataccatcctgcaacaggaagtcctgttacaagaggatgtggagctgattgagctacttgatcccagtatcctgtctgcagggcaatctcaacaacaggaaaatggacaccttccaacactttgctccctggcaacccctaatatttgggatctctcaatgctatttgccttcattagcttgctcgttatgcttcccacttggtggattgtgtcttcctg

SEQ ID NO: 199118 - DNA, 526 bp, Homo sapiens
  Payload ID: 19283
  Gene Name: vezatin, adherens junctions transmembrane protein
  Uniprot ID: Q9HBM0
  ENST ID: ENST00000547484
  CDS Start-End: 44-283
ttcatttcccatcgtgctgaggcgggtggcatggcggagaaggatgacaccggagtttgacgaagaggtggtttttgagaattctccactttaccaatacttacaggatctgggacacacagactttgaaatatgttcttctttgtcaccaaaaacagaaaaatgcacaacagagggacaacaaaagcctcctacaagagtcctaccaaaatacctgggatatagtaatcactcaatgaatataaactgcacttactggcatgctcaaggaatgggctattaagcaaggtatcctgttaaaagtggctgaaaccatcaaaagttggatttttttttctcagtgcaataagaaagatgacttacttcacaagttggtggagccatctcattcttcagtgatactaggactgtggtaagtgtcaagcctgatgcctggcttatagaagatattccttgatagatgaatagaaagaagagaaggagaaataaatgagctcgtatatgtgaaggcattttgtaaactata

SEQ ID NO: 199119 - DNA, 1024 bp, Homo sapiens
  Payload ID: 19283
  Gene Name: vezatin, adherens junctions transmembrane protein
  Uniprot ID: Q9HBM0
  ENST ID: ENST00000548455
  CDS Start-End: 41-280
atttcccatcgtgctgaggcgggtggcatggcggagaaggatgacaccggagtttgacgaagaggtggtttttgagaattctccactttaccaatacttacaggatctgggacacacagactttgaaatatgttcttctttgtcaccaaaaacagaaaaatgcacaacagagggacaacaaaagcctcctacaagagtcctaccaaaatacctgggatatagtaatcactcaatgaatataaactgcacttactggcatgctcaaggaatgggctattaagcaaggtatcctgttaaaagtggctgaaaccatcaaaagttggatttttttttctcagtgcaataagaaagatgacttacttcacaagttggatattggattccgactcgactcattacataccatcctgcaacaggaagtcctgttacaagaggatgtggagctgattgagctacttgatcccagtatcctgtctgcagggcaatctcaacaacaggaaaatggacaccttccaacactttgctccctggcaacccctaatatttggttttatcgtaactatattgtagagacaccaagaataggatgggacatggagggatctctcaatgctatttgccttcattagcttgctcgttatgcttcccacttggtggattgtgtcttcctggctggtatggggagtgattctatttgtgtatctggtcataagagctttgagattatggaggacagccaaactacaagtgaccctaaaaaaatacagcgttcatttggaagatatggccacaaacagccgagcttttactaacctcgtgagaaaagctttacgtctcattcaagaaaccgaagtgatttccagaggatttacacttttgcttgacagggtcagtgctgcttgcccatttaataaagctggacagcatccaagtcagcatctcatcggtcttcggaaagctgtctaccgaactctaagagccaacttccaagcagcaaggctagctaccctatatatgctgaaaa

SEQ ID NO: 199120 - DNA, 1068 bp, Homo sapiens
  Payload ID: 19283
  Gene Name: vezatin, adherens junctions transmembrane protein
  Uniprot ID: Q9HBM0
  ENST ID: ENST00000546557
  CDS Start-End: 88-327
gggacgggcaggagctggagctccgtgccgcctgtactcccgccttcatttcccatcgtgctgaggcgggtggcatggcggagaaggatgacaccggagtttgacgaagaggtggtttttgagaattctccactttaccaatacttacaggatctgggacacacagactttgaaatatgttcttctttgtcaccaaaaacagaaaaatgcacaacagagggacaacaaaagcctcctacaagagtcctaccaaaatacctgggatatagtaatcactcaatgaatataaactgcacttactggcatgctcaaggaatgggctattaaggatattggattccgactcgactcattacataccatcctgcaacaggaagtcctgttacaagaggatgtggagctgattgagctacttgatcccagtatcctgtctgcagggcaatctcaacaacaggaaaatggacaccttccaacactttgctccctggcaacccctaatatttgggatctctcaatgctatttgccttcattagcttgctcgttatgcttcccacttggtggattgtgtcttcctggctggtatggggagtgattctatttgtgtatctggtcataagagctttgagattatggaggacagccaaactacaagtgaccctaaaaaaatacagcgttcatttggaagatatggccacaaacagccgagcttttactaacctcgtgagaaaagctttacgtctcattcaagaaaccgaagtgatttccagaggatttacactggtcagtgctgcttgcccatttaataaagctggacagcatccaagtcagcatctcatcggtcttcggaaagctgtctaccgaactctaagagccaacttccaagcagcaaggctagctaccctatatatgctgaaaaactaccccctgaactctgagagtgacaatgtaaccaactacatctgtgtggtgccttttaaagagctgggccttggacttagtgaagagcagatttcagaagaggaagcacataactttacagatggcttcagcctgcctgcattgaaggt

SEQ ID NO: 199121 - DNA, 562 bp, Homo sapiens
  Payload ID: 19283
  Gene Name: vezatin, adherens junctions transmembrane protein
  ENST ID: ENST00000546445
  CDS Start-End: 267-562
atccgcgatttttttgggtcagtatccagagtgcttcaggtcactgttcaccgtcaaggcgtggccctcggaatgaaggcagcagaattctccactttaccaatacttacaggatctgggacacacagactttgaaatatgttcttctttgtcaccaaaaacagaaaaatgcacaacagagggacaacaaaagcctcctacaagagtcctaccaaaatacctgggatatagtaatcactcaatgaatataaactgcacttactggcatgctcaaggaatgggctattaaggatattggattccgactcgactcattacataccatcctgcaacaggaagtcctgttacaagaggatgtggagctgattgagctacttgatcccagtatcctgtctgcagggcaatctcaacaacaggaaaatggacaccttccaacactttgctccctggcaacccctaatatttgggatctctcaatgctatttgccttcattagcttgctcgttatgcttcccacttggtggattgtgtcttcctggctggtatggggagtgattctatt

SEQ ID NO: 199122 - DNA, 999 bp, Homo sapiens
  Payload ID: 19283
  Gene Name: vezatin, adherens junctions transmembrane protein
  ENST ID: ENST00000548371
  CDS Start-End: 10-207
cggagaaggatgacaccggagtttgacgaagaggtggtttttgagaattctccactttaccaatacttacaggatctgggacacacagactttgaaatatgttcttctttgtcaccaaaaacagaaaaatgcacaacagagggacaacaaaagcctcctacaagagtcctaccaaaaggatctctcaatgctatttgccttcattagcttgctcgttatgcttcccacttggtggattgtgtcttcctggctggtatggggagtgattctatttgtgtatctggtcataagagctttgagattatggaggacagccaaactacaagtgaccctaaaaaaatacagcgttcatttggaagatatggccacaaacagccgagcttttactaacctcgtgagaaaagctttacgtctcattcaagaaaccgaagtgatttccagaggatttacacttttgcttgacagggtcagtgctgcttgcccatttaataaagctggacagcatccaagtcagcatctcatcggtcttcggaaagctgtctaccgaactctaagagccaacttccaagcagcaaggctagctaccctatatatgctgaaaaactaccccctgaactctgagagtgacaatgtaaccaactacatctgtgtggtgccttttaaagagctgggccttggacttagtgaagagcagatttcagaagaggaagcacataactttacagatggcttcagcctgcctgcattgaaggttttgttccaactctgggtggcacagagttcagagttcttcagacgggtaataattcttgaagatgaacttgaaaagcttgtttgtactaaagaaacacaagaactagtgtcagaggcttatcccatcctagaacagaaattaaagttgattcagccccacgttcaagcaagcaacaattgctgggaagaggccatttctcaggtcgacaaactgctacgaagaaatacagataaaaaaggtacctg

SEQ ID NO: 199123 - DNA, 482 bp, Homo sapiens
  Payload ID: 19283
  Gene Name: vezatin, adherens junctions transmembrane protein
  ENST ID: ENST00000552821
  CDS Start-End: 26-482
gaggcgggtggcatggcggagaaggatgacaccggagtttgacgaagaggtggtttttgaggatctgggacacacagactttgaaatatgttcttctttgtcaccaaaaacagaaaaatgcacaacagagggacaacaaaagcctcctacaagagtcctaccaaaacaaggtatcctgttaaaagtggctgaaaccatcaaaagttggatttttttttctcagtgcaataagaaagatgacttacttcacaagttggatattggattccgactcgactcattacataccatcctgcaacaggaagtcctgttacaagaggatgtggagctgattgagctacttgatcccagtatcctgtctgcagggcaatctcaacaacaggaaaatggacaccttccaacactttgctccctggcaacccctaatatttgggatctctcaatgctatttgccttcattagcttgctcgttatgcttccca

SEQ ID NO: 199124 - DNA, 2712 bp, Homo sapiens
  Payload ID: 19283
  Gene Name: vezatin, adherens junctions transmembrane protein
  Uniprot ID: Q9HBM0
  ENST ID: ENST00000552660
  CDS Start-End: 40-279
tttcccatcgtgctgaggcgggtggcatggcggagaaggatgacaccggagtttgacgaagaggtggtttttgagaattctccactttaccaatacttacaggatctgggacacacagactttgaaatatgttcttctttgtcaccaaaaacagaaaaatgcacaacagagggacaacaaaagcctcctacaagagtcctaccaaaatacctgggatatagtaatcactcaatgaatataaactgcacttactggcatgctcaaggaatgggctattaagcaaggtatcctgttaaaagtggctgaaaccatcaaaagttggatttttttttctcagtgcaataagaaagatgacttacttcacaagttggatattggattccgactcgactcattacataccatcctgcaacaggaagtcctgttacaagaggatgtggagctgattgagctacttgatcccagtatcctgtctgcagggcaatctcaacaacaggaaaatggacaccttccaacactttgctccctggcaacccctaatatttgggatctctcaatgctatttgccttcattagcttgctcgttatgcttcccacttggtggattgtgtcttcctggctggtatggggagtgattctatttgtgtatctggtcataagagctttgagattatggaggacagccaaactacaagtgaccctaaaaaaatacagcgttcatttggaagatatggccacaaacagccgagcttttactaacctcgtgagaaaagctttacgtctcattcaagaaaccgaagtgatttccagaggatttacacttttgcttgacagggtcagtgctgcttgcccatttaataaagctggacagcatccaagtcagcatctcatcggtcttcggaaagctgtctaccgaactctaagagccaacttccaagcagcaaggctagctaccctatatatgctgaaaaactaccccctgaactctgagagtgacaatgtaaccaactacatctgtgtggtgccttttaaagagctgggccttggacttagtgaagagcagatttcagaagaggaagcacataactttacagatggcttcagcctgcctgcattgaaggttttgttccaactctgggtggcacagagttcagagttcttcagacggttagccctattactttctacagccaattcacctcctgggcccttacttactccagcacttctgcctcatcgtatcttatctgatgtgactcaaggtctacctcatgctcattctgcctgtttggaagagcttaagcgcagctatgagttctatcggtactttgaaactcagcaccagtcagtaccgcagtgtttatccaaaactcaacagaagtcaagagaactgaataatgttcacacagcagtgcgtagcttgcagctccatctgaaagcattactgaatgaggtaataattcttgaagatgaacttgaaaagcttgtttgtactaaagaaacacaagaactagtgtcagaggcttatcccatcctagaacagaaattaaagttgattcagccccacgttcaagcaagcaacaattgctgggaagaggccatttctcaggtcgacaaactgctacgaagaaatacagataaaaaaggcaagcctgaaatagcatgtgaaaacccacattgtacagtagtacctttgaagcagcctactctacacattgcagacaaagatccaatcccagaggagcaggaattagaagcttatgtagatgatatagatattgatagtgatttcagaaaggatgatttttattacttgtctcaagaagacaaagagagacagaagcgtgagcatgaagaatccaagagggtgctccaagaattaaaatctgtgctgggatttaaagcttcagaggcagaaaggcagaagtggaagcaacttctatttagtgatcatgccgtgttgaaatccttgtctcctgtagacccagtggaacccataagtaattcagaaccatcaatgaattcagatatgggaaaagtcagtaaaaatgatactgaagaggaaagtaataaatccgccacaacagacaatgaaataagtaggactgagtatttatgtgaaaactctctagaaggtaaaaataaagataattcttcaaatgaagtcttcccccaaggagcagaagaaagaatgtgttaccaatgtgagagtgaagatgaaccacaagcagatggaagtggtctgaccactgcccctccaactcccagggactcattacagccctccattaagcagaggctggcacggctacagctgtcaccagattttaccttcactgctggccttgctgcagaagtggctgctagatctctctcctttaccaccatgcaggaacagacttttggtggtgaggaggaagaacaaataatagaagaaaataaaaatgagatagaagaaaagtaagaaccaagattcatatgaagtgatattagattgttccttttacaaaagtgtttagcttcaagactggaaagggaatatgagtgtaagtttactatatataaagctaagatgtggatttacaggaagaaccctggtttgaataactgatctgaaattagtagttacctgtaaatggcagatcttttaggaaaataagagaaaggtaagggctcttttgaataaactgctgttttatttgtggcacaact

SEQ ID NO: 199125 - DNA, 1224 bp, Homo sapiens
  Payload ID: 19283
  Gene Name: vezatin, adherens junctions transmembrane protein
  ENST ID: ENST00000547611
  CDS Start-End: 99-296
tctggacccacgggacgggcaggagctggagctccgtgccgcctgtactcccgccttcatttcccatcgtgctgaggcgggtggcatggcggagaaggatgacaccggagtttgacgaagaggtggtttttgagaattctccactttaccaatacttacaggatctgggacacacagactttgaaatatgttcttctttgtcaccaaaaacagaaaaatgcacaacagagggacaacaaaagcctcctacaagagtcctaccaaaaggatctctcaatgctatttgccttcattagcttgctcgttatgcttcccacttggtggattgtgtcttcctggctggtatggggagtgattctatttgtgtatctggtcataagagctttgagattatggaggacagccaaactacaagtgaccctaaaaaaatacagcgttcatttggaagatatggccacaaacagccgagcttttactaacctcgtgagaaaagctttacgtctcattcaagaaaccgaagtgatttccagaggatttacacttttgcttgacagggtcagtgctgcttgcccatttaataaagctggacagcatccaagtcagcatctcatcggtcttcggaaagctgtctaccgaactctaagagccaacttccaagcagcaaggctagctaccctatatatgctgaaaaacccctgaactctgagagtgacaatgtaaccaactacatctgtgtggtgccttttaaagagctgggccttggacttagtgaagagcagatttcagaagaggaagcacataactttacagatggcttcagcctgcctgcattgaaggttttgttccaactctgggtggcacagagttcagagttcttcagacggttagccctattactttctacagccaattcacctcctgggcccttacttactccagcacttctgcctcatcgtatcttatctgatgtgactcaaggtctacctcatgctcattctgcctgtttggaagagcttaagcgcagctatgagttctatcggtactttgaaactcagcaccagtcagtaccgcagtgtttatccaaaactcaacagaagtcaagagaactgaataatgttcacacagcagtgcgtagcttgcagctccatctgaaagcattactgaatgaggtaataattcttgaagatgaacttgaaaagcttgtttgtactaaagaaacacaag

SEQ ID NO: 199126 - DNA, 595 bp, Homo sapiens
  Payload ID: 19283
  Gene Name: vezatin, adherens junctions transmembrane protein
  ENST ID: ENST00000548822
  CDS Start-End: 40-336
tttcccatcgtgctgaggcgggtggcatggcggagaaggatgacaccggagtttgacgaagaggtggtttttgaggttcggccagtgggaaggacctgcagatcagaggatggaggaaagagcgccagagagaattctccactttaccaatacttacaggatctgggacacacagactttgaaatatgttcttctttgtcaccaaaaacagaaaaatgcacaacagagggacaacaaaagcctcctacaagagtcctaccaaaatacctgggatatagtaatcactcaatgaatataaactgcacttactggcatgctcaaggaatgggctattaagcaaggtatcctgttaaaagtggctgaaaccatcaaaagttggatttttttttctcagtgcaataagaaagatgacttacttcacaagttggatattggattccgactcgactcattacataccatcctgcaacaggaagtcctgttacaagaggatgtggagctgattgagctacttgatcccagtatcctgtctgcagggcaatctcaacaacaggaaaatggacaccttccaacactttgctccctggcaacccct

SEQ ID NO: 199127 - DNA, 542 bp, Homo sapiens
  Payload ID: 19283
  Gene Name: vezatin, adherens junctions transmembrane protein
  Uniprot ID: Q9HBM0
  ENST ID: ENST00000549624
  CDS Start-End: 40-279
tttcccatcgtgctgaggcgggtggcatggcggagaaggatgacaccggagtttgacgaagaggtggtttttgagaattctccactttaccaatacttacaggatctgggacacacagactttgaaatatgttcttctttgtcaccaaaaacagaaaaatgcacaacagagggacaacaaaagcctcctacaagagtcctaccaaaatacctgggatatagtaatcactcaatgaatataaactgcacttactggcatgctcaaggaatgggctattaaggtatcctgttaaaagtggctgaaaccatcaaaagttggatttttttttctcagtgcaataagaaagatgacttacttcacaagttggatattggattccgactcgactcattacataccatcctgcaacaggaagtcctgttacaagaggatgtggagctgattgagctacttgatcccagtatcctgtctgcagggcaatctcaacaacaggaaaatggacaccttccaacactttgctccctggcaacccctaatatttg

SEQ ID NO: 199128 - DNA, 2362 bp, Homo sapiens
  Payload ID: 19283
  Gene Name: vezatin, adherens junctions transmembrane protein
  ENST ID: ENST00000551994
  CDS Start-End: 34-213
atcgtgctgaggcgggtggcatggcggagaaggatgacaccggagtttgacgaagaggtggtttttgagaattctccactttaccaatacttacaggatctgggacacacagactttgaaatatgttcttctttgtcaccaaaaacagaaaaatgcacaacagagggacaacaaaagcctcctacaagagtcctaccaaaagtatcctgttaaaagtggctgaaaccatcaaaagttggatttttttttctcagtgcaataagaaagatgacttacttcacaagttggatattggattccgactcgactcattacataccatcctgcaacaggaagtcctgttacaagaggatgtggagctgattgagctacttgatcccagtatcctgtctgcagggcaatctcaacaacaggaaaatggacaccttccaacactttgctccctggcaacccctaatatttgggatctctcaatgctatttgccttcattagcttgctcgttatgcttcccacttggtggattgtgtcttcctggctggtatggggagtgattctatttgtgtatctggtcataagagctttgagattatggaggacagccaaactacaagtgaccctaaaaaaatacagcgttcatttggaagatatggccacaaacagccgagcttttactaacctcgtgagaaaagctttacgtctcattcaagaaaccgaagtgatttccagaggatttacacttttgcttgacagggtcagtgctgcttgcccatttaataaagctggacagcatccaagtcagcatctcatcggtcttcggaaagctgtctaccgaactctaagagccaacttccaagcagcaaggctagctaccctatatatgctgaaaaactaccccctgaactctgagagtgacaatgtaaccaactacatctgtgtggtgccttttaaagagctgggccttggacttagtgaagagcagatttcagaagaggaagcacataactttacagatggcttcagcctgcctgcattgaaggttttgttccaactctgggtggcacagagttcagagttcttcagacggttagccctattactttctacagccaattcacctcctgggcccttacttactccagcacttctgcctcatcgtatcttatctgatgtgactcaaggtctacctcatgctcattctgcctgtttggaagagcttaagcgcagctatgagttctatcggtactttgaaactcagcaccagtcagtaccgcagtgtttatccaaaactcaacagaagtcaagagaactgaataatgttcacacagcagtgcgtagcttgcagctccatctgaaagcattactgaatgaggtaataattcttgaagatgaacttgaaaagcttgtttgtactaaagaaacacaagaactagtgtcagaggcttatcccatcctagaacagaaattaaagttgattcagccccacgttcaagcaagcaacaattgctgggaagaggccatttctcaggtcgacaaactgctacgaagaaatacagataaaaaaggcaagcctgaaatagcatgtgaaaacccacattgtacagtagtacctttgaagcagcctactctacacattgcagacaaagatccaatcccagaggagcaggaattagaagcttatgtagatgatatagatattgatagtgatttcagaaaggatgatttttattacttgtctcaagaagacaaagagagacagaagcgtgagcatgaagaatccaagagggtgctccaagaattaaaatctgtgctgggatttaaagcttcagaggcagaaaggcagaagtggaagcaacttctatttagtgatcatgccgtgttgaaatccttgtctcctgtagacccagtggaacccataagtaattcagaaccatcaatgaattcagatatgggaaaagtcagtaaaaatgatactgaagaggaaagtaataaatccgccacaacagacaatgaaataagtaggactgagtatttatgtgaaaactctctagaaggtaaaaataaagataattcttcaaatgaagtcttcccccaaggagcagaagaaagaatgtgttaccaatgtgagagtgaagatgaaccacaagcagatggaagtggtctgaccactgcccctccaactcccagggactcattacagccctccattaagcagaggctggcacggctacagctgtcaccagattttaccttcactgctggccttgctgcagaagtggctgctagatctctctcctttaccaccatgcaggaacagacttttggtggtgaggaggaagaacaaataatagaagaaaataaaaa

SEQ ID NO: 199129 - DNA, 564 bp, Homo sapiens
  Payload ID: 19283
  Gene Name: vezatin, adherens junctions transmembrane protein
  ENST ID: ENST00000551039
  CDS Start-End: 34-138
atcgtgctgaggcgggtggcatggcggagaaggatgacaccggagtttgacgaagaggtggtttttgaggcagcagagcccttgctagaagccagtggcatgctcttgaacttcccagcctgcagaactatgagctaaaattctccactttaccaatacttacaggatctgggacacacagactttgaaatatgttcttctttgtcaccaaaaacagaaaaatgcacaacagagggacaacaaaagcctcctacaagagtcctaccaaaacaaggtatcctgttaaaagtggctgaaaccatcaaaagttggatttttttttctcagtgcaataagaaagatgacttacttcacaagttggatattggattccgactcgactcattacataccatcctgcaacaggaagtcctgttacaagaggatgtggagctgattgagctacttgatcccagtatcctgtctgcagggcaatctcaacaacaggaaaatggacaccttccaacactttgctccctggcaacccctaatatttgggatctctcaatgctatttgccttcatt

SEQ ID NO: 199130 - DNA, 2338 bp, Homo sapiens
  Payload ID: 19283
  Gene Name: vezatin, adherens junctions transmembrane protein
  ENST ID: ENST00000548838
  CDS Start-End: 53-250
actcccgccttcatttcccatcgtgctgaggcgggtggcatggcggagaaggatgacaccggagtttgacgaagaggtggtttttgagaattctccactttaccaatacttacaggatctgggacacacagactttgaaatatgttcttctttgtcaccaaaaacagaaaaatgcacaacagagggacaacaaaagcctcctacaagagtcctaccaaaaggatctctcaatgctatttgccttcattagcttgctcgttatgcttcccacttggtggattgtgtcttcctggctggtatggggagtgattctatttgtgtatctggtcataagagctttgagattatggaggacagccaaactacaagtgaccctaaaaaaatacagcgttcatttggaagatatggccacaaacagccgagcttttactaacctcgtgagaaaagctttacgtctcattcaagaaaccgaagtgatttccagaggatttacactggtcagtgctgcttgcccatttaataaagctggacagcatccaagtcagcatctcatcggtcttcggaaagctgtctaccgaactctaagagccaacttccaagcagcaaggctagctaccctatatatgctgaaaaactaccccctgaactctgagagtgacaatgtaaccaactacatctgtgtggtgccttttaaagagctgggccttggacttagtgaagagcagatttcagaagaggaagcacataactttacagatggcttcagcctgcctgcattgaaggttttgttccaactctgggtggcacagagttcagagttcttcagacgggtaataattcttgaagatgaacttgaaaagcttgtttgtactaaagaaacacaagaactagtgtcagaggcttatcccatcctagaacagaaattaaagttgattcagccccacgttcaagcaagcaacaattgctgggaagaggccatttctcaggtcgacaaactgctacgaagaaatacagataaaaaaggcaagcctgaaatagcatgtgaaaacccacattgtacagtagtacctttgaagcagcctactctacacattgcagacaaagatccaatcccagaggagcaggaattagaagcttatgtagatgatatagatattgatagtgatttcagaaaggatgatttttattacttgtctcaagaagacaaagagagacagaagcgtgagcatgaagaatccaagagggtgctccaagaattaaaatctgtgctgggatttaaagcttcagaggcagaaaggcagaagtggaagcaacttctatttagtgatcatgccgtgttgaaatccttgtctcctgtagacccagtggaacccataagtaattcagaaccatcaatgaattcagatatgggaaaagtcagtaaaaatgatactgaagaggaaagtaataaatccgccacaacagacaatgaaataagtaggactgagtatttatgtgaaaactctctagaaggtaaaaataaagataattcttcaaatgaagtcttcccccaaggagcagaagaaagaatgtgttaccaatgtgagagtgaagatgaaccacaagcagatggaagtggtctgaccactgcccctccaactcccagggactcattacagccctccattaagcagaggctggcacggctacagctgtcaccagattttaccttcactgctggccttgctgcagaagtggctgctagatctctctcctttaccaccatgcaggaacagacttttggtggtgaggaggaagaacaaataatagaagaaaataaaaatgagatagaagaaaagtaagaaccaagattcatatgaagtgatattagattgttccttttacaaaagtgtttagcttcaagactggaaagggaatatgagtgtaagtttactatatataaagctaagatgtggatttacaggaagaaccctggtttgaataactgatctgaaattagtagttacctgtaaatggcagatcttttaggaaaataagagaaaggtaagggctcttttgaataaactgctgttttatttgtggcacaactgatcaatcttggaaattctttaagtatttttaataagaaatgaattatcatttcttgccagaatttgctaccttaaggtgattgggaaaattctgttgcaagaacattaacatttagtatgactcctttttactgtattcttgcagttaataactgcagctattatgttaataacaagttgtttgtattttatttttgtttataccagtcttaaagatccaggttctgaataaaaaaattaattgatac

SEQ ID NO: 199131 - DNA, 648 bp, Homo sapiens
  Payload ID: 19283
  Gene Name: vezatin, adherens junctions transmembrane protein
  Uniprot ID: Q9HBM0
  ENST ID: ENST00000550803
  CDS Start-End: 106-345
gtagttttctggacccacgggacgggcaggagctggagctccgtgccgcctgtactcccgccttcatttcccatcgtgctgaggcgggtggcatggcggagaaggatgacaccggagtttgacgaagaggtggtttttgagaattctccactttaccaatacttacaggatctgggacacacagactttgaaatatgttcttctttgtcaccaaaaacagaaaaatgcacaacagagggacaacaaaagcctcctacaagagtcctaccaaaatacctgggatatagtaatcactcaatgaatataaactgcacttactggcatgctcaaggaatgggctattaagcaaggtatcctgttaaaagtggctgaaaccatcaaaagttggatttttttttctcagtgcaataagaaagatgacttacttcacaagttggtggagccatctcattcttcagtgatactaggactgtggtaaggatattggattccgactcgactcattacataccatcctgcaacaggaagtcctgttacaagaggatgtggagctgattgagctacttgatcccagtatcctgtctgcagggcaatctcaacaacaggaaaatggacaccttccaacactttgctccctggcaaccccta

SEQ ID NO: 199132 - DNA, 3002 bp, Homo sapiens
  Payload ID: 19283
  Gene Name: vezatin, adherens junctions transmembrane protein
  Uniprot ID: Q9HBM0
  ENST ID: ENST00000547997
  CDS Start-End: 91-330
cacgggacgggcaggagctggagctccgtgccgcctgtactcccgccttcatttcccatcgtgctgaggcgggtggcatggcggagaaggatgacaccggagtttgacgaagaggtggtttttgagaattctccactttaccaatacttacaggatctgggacacacagactttgaaatatgttcttctttgtcaccaaaaacagaaaaatgcacaacagagggacaacaaaagcctcctacaagagtcctaccaaaatacctgggatatagtaatcactcaatgaatataaactgcacttactggcatgctcaaggaatgggctattaagcaaggtatcctgttaaaagtggctgaaaccatcaaaagttggatttttttttctcagtgcaataagaaagatgacttacttcacaagttggatattggattccgactcgactcattacataccatcctgcaacaggaagtcctgttacaagaggatgtggagctgattgagctacttgatcccagtatcctgtctgcagggcaatctcaacaacaggaaaatggacaccttccaacactttgctccctggcaacccctaatatttgggatctctcaatgctatttgccttcattagcttgctcgttatgcttcccacttggtggattgtgtcttcctggctggtatggggagtgattctatttgtgtatctggtcataagagctttgagattatggaggacagccaaactacaagtgaccctaaaaaaatacagcgttcatttggaagatatggccacaaacagccgagcttttactaacctcgtgagaaaagctttacgtctcattcaagaaaccgaagtgatttccagaggatttacactggtcagtgctgcttgcccatttaataaagctggacagcatccaagtcagcatctcatcggtcttcggaaagctgtctaccgaactctaagagccaacttccaagcagcaaggctagctaccctatatatgctgaaaaactaccccctgaactctgagagtgacaatgtaaccaactacatctgtgtggtgccttttaaagagctgggccttggacttagtgaagagcagatttcagaagaggaagcacataactttacagatggcttcagcctgcctgcattgaaggttttgttccaactctgggtggcacagagttcagagttcttcagacggttagccctattactttctacagccaattcacctcctgggcccttacttactccagcacttctgcctcatcgtatcttatctgatgtgactcaaggtctacctcatgctcattctgcctgtttggaagagcttaagcgcagctatgagttctatcggtactttgaaactcagcaccagtcagtaccgcagtgtttatccaaaactcaacagaagtcaagagaactgaataatgttcacacagcagtgcgtagcttgcagctccatctgaaagcattactgaatgaggtaataattcttgaagatgaacttgaaaagcttgtttgtactaaagaaacacaagaactagtgtcagaggcttatcccatcctagaacagaaattaaagttgattcagccccacgttcaagcaagcaacaattgctgggaagaggccatttctcaggtcgacaaactgctacgaagaaatacagataaaaaaggcaagcctgaaatagcatgtgaaaacccacattgtacagtagtacctttgaagcagcctactctacacattgcagacaaagatccaatcccagaggagcaggaattagaagcttatgtagatgatatagatattgatagtgatttcagaaaggatgatttttattacttgtctcaagaagacaaagagagacagaagcgtgagcatgaagaatccaagagggtgctccaagaattaaaatctgtgctgggatttaaagcttcagaggcagaaaggcagaagtggaagcaacttctatttagtgatcatgccgtgttgaaatccttgtctcctgtagacccagtggaacccataagtaattcagaaccatcaatgaattcagatatgggaaaagtcagtaaaaatgatactgaagaggaaagtaataaatccgccacaacagacaatgaaataagtaggactgagtatttatgtgaaaactctctagaaggtaaaaataaagataattcttcaaatgaagtcttcccccaaggagcagaagaaagaatgtgttaccaatgtgagagtgaagatgaaccacaagcagatggaagtggtctgaccactgcccctccaactcccagggactcattacagccctccattaagcagaggctggcacggctacagctgtcaccagattttaccttcactgctggccttgctgcagaagtggctgctagatctctctcctttaccaccatgcaggaacagacttttggtggtgaggaggaagaacaaataatagaagaaaataaaaatgagatagaagaaaagtaagaaccaagattcatatgaagtgatattagattgttccttttacaaaagtgtttagcttcaagactggaaagggaatatgagtgtaagtttactatatataaagctaagatgtggatttacaggaagaaccctggtttgaataactgatctgaaattagtagttacctgtaaatggcagatcttttaggaaaataagagaaaggtaagggctcttttgaataaactgctgttttatttgtggcacaactgatcaatcttggaaattctttaagtatttttaataagaaatgaattatcatttcttgccagaatttgctaccttaaggtgattgggaaaattctgttgcaagaacattaacatttagtatgactcctttttactgtattcttgcagttaataactgcagctattatgttaataacaagttgtttgtattttatttttgtttataccagtcttaaagatccaggttctgaataaaaaaattaattgatacaa

SEQ ID NO: 199133 - DNA, 566 bp, Homo sapiens
  Payload ID: 19283
  Gene Name: vezatin, adherens junctions transmembrane protein
  ENST ID: ENST00000549002
  CDS Start-End: 90-566
acgggacgggcaggagctggagctccgtgccgcctgtactcccgccttcatttcccatcgtgctgaggcgggtggcatggcggagaaggatgacaccggagtttgacgaagaggtggtttttgagaattctccactttaccaatacttacaggatctgggacacacagactttgaaatatgttcttctttgtcaccaaaaacagaaaaatgcacaacagagggacaacaaaagcctcctacaagagtcctaccaaaagatattggattccgactcgactcattacataccatcctgcaacaggaagtcctgttacaagaggatgtggagctgattgagctacttgatcccagtatcctgtctgcagggcaatctcaacaacaggaaaatggacaccttccaacactttgctccctggcaacccctaatatttgggatctctcaatgctatttgccttcattagcttgctcgttatgcttcccacttggtggattgtgtcttcctggctggtatggggagtgattctatttgtgtatctggtcataagagctttgagattatggagg

SEQ ID NO: 199134 - DNA, 608 bp, Homo sapiens
  Payload ID: 19283
  Gene Name: vezatin, adherens junctions transmembrane protein
  ENST ID: ENST00000551472
  CDS Start-End: 42-608
catttcccatcgtgctgaggcgggtggcatggcggagaaggatgacaccggagtttgacgaagaggtggtttttgaggttcggccagtgggaaggacctgcagatcagaggatggaggaaagagcgccagagagaattctccactttaccaatacttacaggatctgggacacacagactttgaaatatgttcttctttgtcaccaaaaacagaaaaatgcacaacagagggacaacaaaagcctcctacaagagtcctaccaaaacaaggtatcctgttaaaagtggctgaaaccatcaaaagttggatttttttttctcagtgcaataagaaagatgacttacttcacaagttggatattggattccgactcgactcattacataccatcctgcaacaggaagtcctgttacaagaggatgtggagctgattgagctacttgatcccagtatcctgtctgcagggcaatctcaacaacaggaaaatggacaccttccaacactttgctccctggcaacccctaatatttgggatctctcaatgctatttgccttcattagcttgctcgttatgcttcccacttggtggattgtgtcttcctggctg

SEQ ID NO: 199135 - DNA, 565 bp, Homo sapiens
  Payload ID: 19283
  Gene Name: vezatin, adherens junctions transmembrane protein
  ENST ID: ENST00000551311
  CDS Start-End: 298-565
agatagtcacaacttagcctcctccttttccatccgcgatttttttgggtcagtatccagagtgcttcaggtcactgttcaccgtcaaggcgtggccctcggaatgaaggcagcagaattctccactttaccaatacttacaggatctgggacacacagactttgaaatatgttcttctttgtcaccaaaaacagaaaaatgcacaacagagggacaacaaaagcctcctacaagagtcctaccaaaatacctgggatatagtaatcactcaatgaatataaactgcacttactggcatgctcaaggaatgggctattaagcaaggtatcctgttaaaagtggctgaaaccatcaaaagttggatttttttttctcagtgcaataagaaagatgacttacttcacaagttggatattggattccgactcgactcattacataccatcctgcaacaggaagtcctgttacaagaggatgtggagctgattgagctacttgatcccagtatcctgtctgcagggcaatctcaacaacaggaaaatggacaccttccaacactttgct

SEQ ID NO: 199136 - DNA, 2575 bp, Homo sapiens
  Payload ID: 19284
  Gene Name: VGF nerve growth factor inducible
  Uniprot ID: O15240
  ENST ID: ENST00000249330
  CDS Start-End: 241-2088
gcggtggaggcgcgggcgctgtccagcgtgctgaagccggagcgagctagccgcccggagccgcgccgacccagctgagcccagcccacgggacgccagacctcgaccgtcgctcctaccccggccaccgctcggagccgaggcggacgcgtcccgatcttcccctgtccccaccctgccccgaccctcctctccacctctcgcgtcgtgacaccagctgtctccggcagcctcttggtcatgaaagccctcagattgtcggcttccgccctcttctgccttctgctgatcaacgggttaggggcagcaccccctggtcgccctgaggcgcagcctcctcctctcagctctgagcataaagagccggtagccggggacgcagtgcccgggccaaaggatggcagcgccccagaggtccgaggcgctcggaattccgagccgcaggacgagggagagcttttccagggcgtggatccccgggcgctggccgcggtgctgctgcaggcactcgaccgtcccgcctcacccccggcaccaagcggctcccagcaggggccggaggaagaagcagctgaagctctgctgaccgagaccgtgcgcagccagacccacagcctcccggcgccggagagcccggagcccgcggctccgcctcgccctcagactccggagaatgggcccgaggcgagcgatccctccgaggagctcgaggcgctagcgtccctgctccaggaactgcgagatttcagtccaagtagcgccaagcgccagcaggagacggcggcagcagagacggaaacccgcacgcacacgctgacccgagtgaatctggagagcccggggccagagcgcgtatggcgcgcttcctggggagagttccaggcgcgtgtcccggagcgcgcgcccctgccgcccccggccccctctcaattccaggcgcgtatgcccgacagcgggccccttcccgaaacccacaagttcggggaaggagtgtcctcccccaaaacacacctaggcgaggcattggcacccctgtccaaggcgtaccaaggcgtggccgccccgttccccaaggcgcgccggccggagagcgcactcctgggcggctccgaggcgggcgagcgccttctccagcaagggctggcgcaggtggaggccgggcggcggcaggcggaggccacgcggcaggccgcggcgcaggaagagcggctggccgacctcgcctcggacctgctgctccagtatttgctgcagggcggggcccggcagcgcggcctcgggggtcgggggctgcaggaggcggcggaggagcgagagagtgcaagggaggaggaggaggcggagcaggagagacgcggcggggaggagagggtgggggaagaggatgaggaggcggccgaggcggaggcagaggcggaggaggcggagagggcgcggcagaacgcgctcctgttcgcggaggaggaggacggggaagccggcgccgaggacaagcgctcccaggaggagacgccgggccaccggcggaaggaggccgaggggacagaggagggcggggaggaggaggacgacgaggagatggatccgcagacgatcgacagcctcattgagctgtccaccaaactccacctgccagcggacgacgtggtcagcatcatcgaggaggtggaggagaagcggaagcggaagaagaacgcccctcccgagcccgtgccgcccccccgtgccgcccccgcccccacccacgtccgctccccgcagcccccgccccccgcccccgctcccgcacgagacgagctgccggactggaacgaggtgctcccgccctgggatcgggaggaggacgaggtgtacccgccagggccgtaccaccctttccccaactacatccggccgcggacactgcagccgccctcggccttgcgccgccgccactaccaccacgccttgccgccttcgcgccactatcccggccgggaggcccaggcgcggcgcgcgcaggaggaggcggaggcggaggagcgccggctgcaggagcaggaggagctggagaattacatcgagcacgtgctgctccggcgcccgtgactgcccttcccggtcccgcccccgcgcgcccccgccgcgcgcgcgcgccggcgcccccctccgtgttgcccgctccccctcggtgtttgcatgcgccccggccctgccccttggccctgcccctgtccccgggctgcgtcgggacctgccagacccccctcccgggtcctgagcccgaactcccagagctcacccgcgggtgaccgggggccagcccaggagggcgggtggtttgtgcgagttcccttgccacgcggggccccggccccatcaagtccctctggggacgtccccgtcggaaaccggaaaaagcagttccagttaattgtgtgaagtgtgtctgtctccagcccttcgggcctcccacgagcccctccagcctctccaagtcgctgtgaattgaccccttctttcctttctctgttgtaaatacccctcacggaggaaatagttttgctaagaaataaaagtgactattttattagga

SEQ ID NO: 199137 - DNA, 2477 bp, Homo sapiens
  Payload ID: 19284
  Gene Name: VGF nerve growth factor inducible
  Uniprot ID: O15240
  ENST ID: ENST00000445482
  CDS Start-End: 150-1997
agatggctcagggaaggggccgaggaggccctgggtaagcgagggcttcgggggttattttcccatttacacggctccagagatcggcacaacatcttcctcctttgctcctaaacgttcctcttctggtctccggcagcctcttggtcatgaaagccctcagattgtcggcttccgccctcttctgccttctgctgatcaacgggttaggggcagcaccccctggtcgccctgaggcgcagcctcctcctctcagctctgagcataaagagccggtagccggggacgcagtgcccgggccaaaggatggcagcgccccagaggtccgaggcgctcggaattccgagccgcaggacgagggagagcttttccagggcgtggatccccgggcgctggccgcggtgctgctgcaggcactcgaccgtcccgcctcacccccggcaccaagcggctcccagcaggggccggaggaagaagcagctgaagctctgctgaccgagaccgtgcgcagccagacccacagcctcccggcgccggagagcccggagcccgcggctccgcctcgccctcagactccggagaatgggcccgaggcgagcgatccctccgaggagctcgaggcgctagcgtccctgctccaggaactgcgagatttcagtccaagtagcgccaagcgccagcaggagacggcggcagcagagacggaaacccgcacgcacacgctgacccgagtgaatctggagagcccggggccagagcgcgtatggcgcgcttcctggggagagttccaggcgcgtgtcccggagcgcgcgcccctgccgcccccggccccctctcaattccaggcgcgtatgcccgacagcgggccccttcccgaaacccacaagttcggggaaggagtgtcctcccccaaaacacacctaggcgaggcattggcacccctgtccaaggcgtaccaaggcgtggccgccccgttccccaaggcgcgccggccggagagcgcactcctgggcggctccgaggcgggcgagcgccttctccagcaagggctggcgcaggtggaggccgggcggcggcaggcggaggccacgcggcaggccgcggcgcaggaagagcggctggccgacctcgcctcggacctgctgctccagtatttgctgcagggcggggcccggcagcgcggcctcgggggtcgggggctgcaggaggcggcggaggagcgagagagtgcaagggaggaggaggaggcggagcaggagagacgcggcggggaggagagggtgggggaagaggatgaggaggcggccgaggcggaggcagaggcggaggaggcggagagggcgcggcagaacgcgctcctgttcgcggaggaggaggacggggaagccggcgccgaggacaagcgctcccaggaggagacgccgggccaccggcggaaggaggccgaggggacagaggagggcggggaggaggaggacgacgaggagatggatccgcagacgatcgacagcctcattgagctgtccaccaaactccacctgccagcggacgacgtggtcagcatcatcgaggaggtggaggagaagcggaagcggaagaagaacgcccctcccgagcccgtgccgcccccccgtgccgcccccgcccccacccacgtccgctccccgcagcccccgccccccgcccccgctcccgcacgagacgagctgccggactggaacgaggtgctcccgccctgggatcgggaggaggacgaggtgtacccgccagggccgtaccaccctttccccaactacatccggccgcggacactgcagccgccctcggccttgcgccgccgccactaccaccacgccttgccgccttcgcgccactatcccggccgggaggcccaggcgcggcgcgcgcaggaggaggcggaggcggaggagcgccggctgcaggagcaggaggagctggagaattacatcgagcacgtgctgctccggcgcccgtgactgcccttcccggtcccgcccccgcgcgcccccgccgcgcgcgcgcgccggcgcccccctccgtgttgcccgctccccctcggtgtttgcatgcgccccggccctgccccttggccctgcccctgtccccgggctgcgtcgggacctgccagacccccctcccgggtcctgagcccgaactcccagagctcacccgcgggtgaccgggggccagcccaggagggcgggtggtttgtgcgagttcccttgccacgcggggccccggccccatcaagtccctctggggacgtccccgtcggaaaccggaaaaagcagttccagttaattgtgtgaagtgtgtctgtctccagcccttcgggcctcccacgagcccctccagcctctccaagtcgctgtgaattgaccccttctttcctttctctgttgtaaatacccctcacggaggaaatagttttgctaagaaataaaagtgactatttt

SEQ ID NO: 199138 - DNA, 1622 bp, Homo sapiens
  Payload ID: 19284
  Gene Name: VGF nerve growth factor inducible
  ENST ID: ENST00000611537
  CDS Start-End: 206-1339
gccggagcgagctagccgcccggagccgcgccgacccagctgagcccagcccacgggacgccagacctcgaccgtcgctcctaccccggccaccgctcggagccgaggcggacgcgtcccgatcttcccctgtccccaccctgccccgaccctcctctccacctctcgcgtcgtgacaccagctgtctccggcagcctcttggtcatgaaagccctcagattgtcggcttccgccctcttctgccttctgctgatcaacgggttaggggcagcaccccctggtcgccctgaggcgcagcctcctcctctcagctctgagcataaagagccggtagccggggacgcagtgcccgggccaaaggatggcagcgccccagaggtccgaggcgctcggaattccgagccgcaggacgagggagagcttttccagggcgtggatccccgggcgctggccgcggtgctgctgcaggcactcgaccgtcccgcctcacccccggcaccaagcggctcccagcaggggccggaggaagaagcagctgaagctctgctgaccgagaccgtgcgcagccagacccacagcctcccggcgccggagagcccggagcccgcggctccgcctcgccctcagactccggagaatgggcccgaggcgagcgatccctccgaggagctcgaggcgctagcgtccctgctccaggaactgcgagatttcagtccaagtagcgccaagcgccagcaggagacggcggcagcagagacggaaacccgcacgcacacgctgacccgagtgaatctggagagcccggggccagagcgcgtatggcgcgcttcctggggagagttccaggcgcgtgtcccggagcgcgcgcccctgccgcccccggccccctctcaattccaggcgcgtatgcccgacagcgggccccttcccgaaacccacaagttcggggaaggagtgtcctcccccaaaacacacctaggcgaggcattggcacccctgtccaaggcgtaccaaggcgtggccgccccgttccccaaggcgcgccggccggagagcgcactcctgggcggctccgaggcgggcgagcgccttctccagcaagggctggcgcaggtggaggccgggcggcggcaggcggaggccacgcggcaggccgcggcgcaggaagagcggctggccgacctcgcctcggacctgctgctccagtttgctgcagggcggggcccggcagcgcggccctgccccttggccctgcccctgtccccgggctgcgtcgggacctgccagacccccctcccgggtcctgagcccgaactcccagagctcacccgcgggtgaccgggggccagcccaggagggcgggtggtttgtgcgagttcccttgccacgcggggccccggccccatcaagtccctctggggacgtccccgtcggaaaccggaaaaagcagttccagttaattgtgtgaagtgtgtctgtctccagcccttcgggcctcccacgagcccctccagcctctccaagtcgctgtgaattgaccccttctttcctttctctgttgtaaatacccctcacggaggaaatagttttgctaagaaataaaagtgactattttattagg

SEQ ID NO: 199139 - DNA, 6531 bp, Homo sapiens
  Payload ID: 19285
  Gene Name: villin 1
  Uniprot ID: P09327
  ENST ID: ENST00000248444
  CDS Start-End: 89-2572
acaaaggtcgctcttctgcagccagcttgccacaattccctgagatctcccaggtggcagctgcctccccaagacaggctcactcaccatgaccaagctgagcgcccaagtcaaaggctctctcaacatcaccaccccggggctgcagatatggaggatcgaggccatgcagatggtgcctgttccttccagcacctttggaagcttcttcgatggtgactgctacatcatcctggctatccacaagacagccagcagcctgtcctatgacatccactactggattggccaggactcatccctggatgagcagggggcagctgccatctacaccacacagatggatgacttcctgaagggccgggctgtgcagcaccgcgaggtccagggcaacgagagcgaggccttccgaggctacttcaagcaaggccttgtgatccggaaagggggcgtggcttctggcatgaagcacgtggagaccaactcctatgacgtccagaggctgctgcatgtcaagggcaagaggaacgtggtagctggagaggtagagatgtcctggaagagtttcaaccgaggggatgttttcctcctggaccttgggaagcttatcatccagtggaatggaccggaaagcacccgtatggagagactcaggggcatgactctggccaaggagatccgagaccaggagcggggagggcgcacctatgtaggcgtggtggacggagagaatgaattggcatccccgaagctgatggaggtgatgaaccacgtgctgggcaagcgcagggagctgaaggcggccgtgcccgacacggtggtggagccggcactcaaggctgcactcaaactgtaccatgtgtctgactccgaggggaatctggtggtgagggaagtcgccacacggccactgacacaggacctgctcagtcacgaggactgttacatcctggaccaggggggcctgaagatctacgtgtggaaagggaagaaagccaatgagcaggagaagaagggagccatgagccatgcgctgaacttcatcaaagccaagcagtacccaccaagcacacaggtggaggtgcagaatgatggggctgagtcggccgtctttcagcagctcttccagaagtggacagcgtccaaccggacctcaggcctaggcaaaacccacactgtgggctccgtggccaaagtggaacaggtgaagttcgatgccacatccatgcatgtcaagcctcaggtggctgcccagcagaagatggtagatgatgggagtggggaagtgcaggtgtggcgcattgagaacctagagctggtacctgtggattccaagtggctaggccacttctatgggggcgactgctacctgctgctctacacctacctcatcggcgagaagcagcattacctgctctacgtttggcagggcagccaggccagccaagatgaaattacagcatcagcttatcaagccgtcatcctggaccagaagtacaatggtgaaccagtccagatccgggtcccaatgggcaaggagccacctcatcttatgtccatcttcaagggacgcatggtggtctaccagggaggcacctcccgaactaacaacttggagaccgggccctccacacggctgttccaggtccagggaactggcgccaacaacaccaaggcctttgaggtcccagcgcgggccaatttcctcaattccaatgatgtctttgtcctcaagacccagtcttgctgctatctatggtgtgggaagggttgtagcggggacgagcgggagatggccaagatggttgctgacaccatctcccggacggagaagcaagtggtggtggaagggcaggagccagccaacttctggatggccctgggtgggaaggccccctatgccaacaccaagagactacaggaagaaaacctggtcatcaccccccggctctttgagtgttccaacaagactgggcgcttcctggccacagagatccctgacttcaatcaggatgacttggaagaggatgatgtgttcctactagatgtctgggaccaggtcttcttctggattgggaaacatgccaacgaggaggagaagaaggccgcagcaaccactgcacaggaatacctcaagacccatcccagcgggcgtgaccctgagacccccatcattgtggtgaagcagggacacgagccccccaccttcacaggctggttcctggcttgggatcccttcaagtggagtaacaccaaatcctatgaggacctgaaggcggagcttggcaactctagggactggagccagatcactgctgaggtcacaagccccaaagtggacgtgttcaatgctaacagcaacctcagttctgggcctctgcccatcttccccctggagcagctagtgaacaagcctgtagaggagctccccgagggtgtggaccccagcaggaaggaggaacacctgtccattgaagatttcactcaggcctttgggatgactccagctgccttctctgctctgcctcgatggaagcaacaaaacctcaagaaagaaaaaggactattttgagaagagtagctgtggttgtaaagcagtaccctaccctgattgtagggtctcattttctcaccgatattagtcctacaccaattgaagtgaaattttgcagatgtgcctatgagcacaaacttctgtggcaaatgccagttttgtttaataatgtacctattccttcagaaagatgataccccaaaaggagcctatggtcctcatttcaacttctaaggtcgctagattgtttctatcctgaggtattgcatcaattttaatactcctatagttttctcttcttagaagagcacaaacactccatggaacattagagttctgaggcactaccctagcttgtcctctatcatgactcatttttatctatggcaggtaggctgaagcactttgcaggtttacatcttccccagagtaacagcttttccttttcacatatactttccttactgccttactcagtgggtaagttaaagggctgaaggagagttgaatggtccacaagactaccctcttaagaggtttcacaaattccaaacagtaccagtgagagcagcacttccactggggctaggcttgagacctaaaggcaagtatgaaatgcatatgctacttcactccctctcccaacccttaataatgaggcaaagcaagagcctagtgaaggccaatgctaggtttacaaacttacccagaagcctctgcaaagcttcacaggctcctcagatgaaaataacaggaatcaatggggactacggccagacactggtttgccattctgttccttttaagaagtaacagtgctgcaaggaagtccatgtcagaaagccaacagaaggtgatttccacaactttgaacaggttgttacaagtatcagcaagaatgtgtccttttcagaaataacagtcaaatcaaagaaggttaataaaggctttaatttcatacacacaaaaaaactctatgcataatttaaaaaggaaacaaaaacaaagaaaaaccgtaaaggatacagaggaacagttctgctaaaacacagataaaagtgccgctccatacaaaacataaagaatcagaatcaaaagtcactctgaacataaagaaaaaaaatcatctcacaaataatgtggccacagctgccagaaaacctggtagtggctcaattaggcaaagtgtaggaatctcatttttgtttttctctccttaagtttaaagaaacaacaatgacaataggccagagaagttagggagggaaagaaaagctcaaagggagggaaacctggggacaagaggtgtgcacacccacatgtggtctcactcttcacacaggcccactatttttgaagtagaccagtttagttgactgttcttctttgttctggcatctgactggaccaacctggaacctggtccagaccctcacccactctattcttatgccaatggacatacctatactttgaacctctgtacttttaagaaaagtccaatgttacaaaatcaaatgcttatattcagactggcacactttttaaataaaaactccatacacctcagacatatagcacacatggagacaacttactaattgtgtgtaagtatgatacaatgaatgagactgcctgaagtctagtaatcaaagcatgccataaggtgaatgattgtggttaaacacagcaaaataattgtcacaaaactttcaaggcctaacaaattagaattttccaataaaaaatatatattttttcagatgttaataagacatatcagtagagacaaaattaggattttgaagtaatgcaataaaaagatgttggagggcagaagtctatttagtttttgtatacacttgcaagagtgcattactcagtataaagcaaaatggggaggaaaaagacatccatccattttattggaacacttttatgtgacttgaatctggtgttaggttgttgatttttctaaaaatctcctatatatacaaaatccatatgtacttggagatccagctgttgccccctgtttaaaacaaaagaccacctcggggggtcaattaaattaaaaaggccctccaaccaccctaaatgggataactaagagtatctactgcagtcatttcagaggacagagaaggaaaatattttaatttgctttaatataacctcttttcagtagatcacaaatgagtttacaaactacttttttttctctttaatttaggtgtttgcagataattttcattatatccgtagctgtatgtgtgtatagttacataatggtaactacacacgatacagaagaatcagtaaattcatggattattttgctgaggttttaaattttaaagcctctgtttcagaattttatacttgatcaaggagaaaaataaatgtgtagtctaacatttgctttctggagttaattaactgatctgtaagaaccactgcatatgtcttaaaatgtaaacatatttacatttgttgtatttgttattgagcctttaaggttaggcccagaatgaacagaccatagcaagtaaacaaataatttttagaatcaaagtattaatagaagaccagttcatggatttgcttattctatcctgctgagacaaaactcatgagtgtgcacacacatgtgaatatatccctacgaaacagtctatcttctcataggcttaaattatagtcatggctattaaagaaattaacagcatccagccacatgcaactttccaaccttcagtactattaggtgattaaaatcaacaaatatgaagtttagttcatttttcccttaaaattccaacaaagatcaaaaggttgtatctagaactaattgccatcaagttccaattcaatgtcatttaaagtaatgtaaccacacatttggtattttcaataggaaggttaattaggtattgtgcaaactgcctgcaacggaagcactcagtccttatctaacttgtcccttcctggccccaacatgctaactgccccatccccaattctgggcaaactgatcacaatgtgcaaaaaataatatattatctatttataattttaaaatatatacagccagctcaaaaacaacaacaaaccccatcaacatagtccagctgaaatctccactggtagtcaaagaagtagattaaaggagtaaaggaaggagaaggctgatagggccacaagaatggacagacatcaagtaaaatttgagtcccaaacatgcaagtacatgagcagtgagataacttatatattccaataacctattttcaacaactcctgcccaagacatgaagatcaaatcaggtttctgaggtaagtgtacttctaaaccatacacacatgaaagctatgaaagcaattcaaatgaggctgcttcatgaggcaatctagacttatggcattatttctacttttctccatgttttaattgcagcctgcactttaaatctttcccaataatttttaacagtgcctctcaaatgcaaagacacgtaaaagaattaataactagccaaagaattttatcaccgcttcactcatttataagaaaaccaattatttccaagcaaaatcaaaccaaaccaaagaggctcctggtagaaatgaaacaaaactttaaagctagttttaaaacaaatattttcctctgctctaaactactctggcgttttctaccactctaccattttggaacattcattacaataaggtatataggtagatggtaggaggcaaagcatttatcagtagttgagcaaaactgctgaggccatttataattcaaagaatgaaaacttagaatagtttactacattagaatacatccaagttccaagagtaggactggagctctcttaaggcaatctttcagaaaagatgttgcatcttctgtgatgatggtttgtgttttttttgtttttgttttcgttttttttaatgagatggagtctcac

SEQ ID NO: 199140 - DNA, 1968 bp, Homo sapiens
  Payload ID: 19285
  Gene Name: villin 1
  ENST ID: ENST00000392114
  CDS Start-End: 230-1780
acaattccctgagatctcccaggtggcagctgcctccccaagacaggctgcactcaaactgtaccatgtgtctgactccgaggggaatctggtggtgagggaagtcgccacacggccactgacacaggacctgctcagtcacgaggactgttacatcctggaccaggggggcctgaagatctacgtgtggaaagggaagaaagccaatgagcaggagaagaagggagccatgagccatgcgctgaacttcatcaaagccaagcagtacccaccaagcacacaggtggaggtgcagaatgatggggctgagtcggccgtctttcagcagctcttccagaagtggacagcgtccaaccggacctcaggcctaggcaaaacccacactgtgggctccgtggccaaagtggaacaggtgaagttcgatgccacatccatgcatgtcaagcctcaggtggctgcccagcagaagatggtagatgatgggagtggggaagtgcaggtgtggcgcattgagaacctagagctggtacctgtggattccaagtggctaggccacttctatgggggcgactgctacctgctgctctacacctacctcatcggcgagaagcagcattacctgctctacgtttggcagggcagccaggccagccaagatgaaattacagcatcagcttatcaagccgtcatcctggaccagaagtacaatggtgaaccagtccagatccgggtcccaatgggcaaggagccacctcatcttatgtccatcttcaagggacgcatggtggtctaccagggaggcacctcccgaactaacaacttggagaccgggccctccacacggctgttccaggtccagggaactggcgccaacaacaccaaggcctttgaggtcccagcgcgggccaatttcctcaattccaatgatgtctttgtcctcaagacccagtcttgctgctatctatggtgtgggaagggttgtagcggggacgagcgggagatggccaagatggttgctgacaccatctcccggacggagaagcaagtggtggtggaagggcaggagccagccaacttctggatggccctgggtgggaaggccccctatgccaacaccaagagactacaggaagaaaacctggtcatcaccccccggctctttgagtgttccaacaagactgggcgcttcctggccacagagatccctgacttcaatcaggatgacttggaagaggatgatgtgttcctactagatgtctgggaccaggtcttcttctggattgggaaacatgccaacgaggaggagaagaaggccgcagcaaccactgcacaggaatacctcaagacccatcccagcgggcgtgaccctgagacccccatcattgtggtgaagcagggacacgagccccccaccttcacaggctggttcctggcttgggatcccttcaagtggagtaacaccaaatcctatgaggacctgaaggcggagcttggcaactctagggactggagccagatcactgctgaggtcacaagccccaaagtggacgtgttcaatgctaacagcaacctcagttctgggcctctgcccatcttccccctggagcagctagtgaacaagcctgtagaggagctccccgagggtgtggaccccagcaggaaggaggaacacctgtccattgaagatttcactcaggcctttgggatgactccagctgccttctctgctctgcctcgatggaagcaacaaaacctcaagaaagaaaaaggactattttgagaagagtagctgtggttgtaaagcagtaccctaccctgattgtagggtctcattttctcaccgatattagtcctacaccaattgaagtgaaattttgcagatgtgcctatgagcacaaacttctgtggcaaatgccagttttgtttaataatgtacctattccttcagaaagatgataccccaaaagg

SEQ ID NO: 199141 - DNA, 639 bp, Homo sapiens
  Payload ID: 19285
  Gene Name: villin 1
  ENST ID: ENST00000419986
  CDS Start-End: 1-639
ggagcagaaaggaaaggaggaggtttggggttaaggctggggttgcagggcagccaggccagccaagatgaaattacagcatcagcttatcaagccgtcatcctggaccagaagtacaatggtgaaccagtccagatccgggtcccaatgggcaaggagccacctcatcttatgtccatcttcaagggacgcatggtggtctaccagggaggcacctcccgaactaacaacttggagaccgggccctccacacggctgttccaggtccagggaactggcgccaacaacaccaaggcctttgaggtcccagcgcgggccaatttcctcaattccaatgatgtctttgtcctcaagacccagtcttgctgctatctatggtgtgggaagggttgtagcggggacgagcgggagatggccaagatggttgctgacaccatctcccggacggagaagcaagtggtggtggaagggcaggagccagccaacttctggatggccctgggtgggaaggccccctatgccaacaccaagagactacaggaagaaaacctggtcatcaccccccggctctttgagtgttccaacaagactgggcgcttcctggccacagagatccctgacttcaatcaggatgacttg

SEQ ID NO: 199142 - DNA, 1454 bp, Homo sapiens
  Payload ID: 19285
  Gene Name: villin 1
  Uniprot ID: P09327
  ENST ID: ENST00000440053
  CDS Start-End: 15-1280
caggctcactcaccatgaccaagctgagcgcccaagtcaaaggctctctcaacatcaccaccccggggctgcagatatggaggatcgaggccatgcagatggtgcctgttccttccagcacctttggaagcttcttcgatggtgactgctacatcatcctggctatccacaagacagccagcagcctgtcctatgacatccactactggattggccaggactcatccctggatgagcagggggcagctgccatctacaccacacagatggatgacttcctgaagggccgggctgtgcagcaccgcgaggtccagggcaacgagagcgaggccttccgaggctacttcaagcaaggccttgtgatccggaaagggggcgtggcttctggcatgaagcacgtggagaccaactcctatgacgtccagaggctgctgcatgtcaagggcaagaggaacgtggtagctggagaggtagagatgtcctggaagagtttcaaccgaggggatgttttcctcctggaccttgggaagcttatcatccagtggaatggaccggaaagcacccgtatggagagactcaggggcatgactctggccaaggagatccgagaccaggagcggggagggcgcacctatgtaggcgtggtggacggagagaatgaattggcatccccgaagctgatggaggtgatgaaccacgtgctgggcaagcgcagggagctgaaggcggccgtgcccgacacggtggtggagccggcactcaaggctgcactcaaactgtaccatgtgtctgactccgaggggaatctggtggtgagggaagtcgccacacggccactgacacaggacctgctcagtcacgaggactgttacatcctggaccaggggggcctgaagatctacgtgtggaaagggaagaaagccaatgagcaggagaagaagggagccatgagccatgcgctgaacttcatcaaagccaagcagtacccaccaagcacacaggtggaggtgcagaatgatggggctgagtcggccgtctttcagcagctcttccagaagtggacagcgtccaaccggacctcaggcctaggcaaaacccacactgtgggctccgtgggtgagggccaggcgggggcagtgagggagccaggatccaggagctgggccaggagagccacttggtccaccacccaccctccttccctgacgtgcatcttcaacgaagacttttacgctggctctgggcttgtcctagcagatggggacgtggacaaactctagttgtcacaaaaagggagctgagagggctgggcatggtggcacatgcctgtaatcccagcactttgggaggctgaggcgggtggatcacctgaggtcaggagtttgagattagcctaacatggtgaaaccccgtctctactgaaaaaaagaactaataaattagccaagcatggt

SEQ ID NO: 199143 - DNA, 532 bp, Homo sapiens
  Payload ID: 19285
  Gene Name: villin 1
  ENST ID: ENST00000454069
  CDS Start-End: 60-532
ccacaattccctgagatctcccaggtggcagctgcctccccaagacaggctcactcaccatgaccaagctgagcgcccaagtcaaaggctctctcaacatcaccaccccggggctgcagatatggaggatcgaggccatgcagatggtgcctgttccttccagcacctttggaagcttcttcgatggtgactgctacatcatcctggctatccacaagacagccagcagcctgtcctatgacatccactactggattggccaggactcatccctggatgagcagggggcagctgccatctacaccacacagatggatgacttcctgaagggccgggctgtgcagcaccgcgaggtccagggcaacgagagcgaggccttccgaggctacttcaagatccggaaagggggcgtggcttctggcatgaagcacgtggagaccaactcctatgacgtccagaggctgctgcatgtcaagggcaagaggaacgtggtagctggagaggtagagatgtcctggaagagtttcaaccg

SEQ ID NO: 199144 - DNA, 2970 bp, Homo sapiens
  Payload ID: 19286
  Gene Name: villin-like
  Uniprot ID: O15195
  ENST ID: ENST00000283713
  CDS Start-End: 267-2837
gagggcgggaagggccctctgtggggctgccattttggctgggacctaaatgcagtaaaggagcagctacgggaatatagagagtggggcttccaggcagagaagcctgcagtgcaaaggtctgcagacaacgacctgggcgtcttcaagggacacaaggaatcatattgccagaacacattgtacaggtagccaggtgtcggtctccagcctgagaactctggctgttgttccttgtgtcgtcccatattcctgcctggcctgcgatggacatcagcaagggcctcccaggcatgcagggaggcctccacatatggatctctgagaaccggaagatggtgccggtacccgagggggcttacgggaacttttttgaggaacactgctatgtcatcctccacgtcccccagagcccgaaggccacgcagggggcgtccagcgacctgcactactgggtcgggaagcaggcgggtgcggaagcgcagggcgctgcggaggccttccagcagcgcctacaggacgagctggggggccagaccgtgctgcaccgcgaggcgcagggccacgagtccgactgcttctgcagctacttccgcccgggaatcatctacaggaagggaggcctagcatctgacctcaagcatgtggagaccaacttgttcaacatccagcgactgctgcacatcaaagggaggaagcacgtgtctgccactgaggtggagctctcctggaacagctttaataagggtgacatcttcctgctggacctaggcaagatgatgattcagtggaatgggcccaagaccagcatttctgagaaggctcgggggctggctttgacctacagcctccgggacagggaacgtggtggtggtcgtgcacagattggtgtggtggatgatgaggccaaagccccggacctcatgcagatcatggaggctgtgctgggccgcagggtgggcagcctgcgtgccgccacgcccagcaaggatatcaaccagctgcagaaggccaatgttcgcctgtaccatgtctatgagaagggcaaagacctggtggtcctggagttggcgacccccccactgacccaggacctgctgcaggaggaggacttctacatcctggaccagggtggcttcaagatctatgtgtggcagggacgcatgtctagcctccaggagagaaaggctgccttcagccgggctgtgggcttcatccaggccaagggctacccgacctacaccaacgtggaggtggtgaacgacggcgccgagtcggccgcgttcaagcagctcttccggacttggtctgagaagcggcgcaggaaccagaagctcggcgggagggataaatcgattcatgtaaagctggacgtgggcaagctgcacacccagcctaagttagcggcccagctcaggatggtggacgacggctctgggaaggtggaggtgtggtgcatccaggacttacacaggcagcccgtggaccccaagcgtcatggacagctgtgtgcaggcaactgctaccttgtgctctacacataccagaggctgggccgtgtccagtacatcctgtacctatggcagggccaccaggccactgcggatgagattgaggccctgaacagcaacgctgaggaactagatgtcatgtatggtggcgtcctagtacaggagcatgtgaccatgggcagcgagcccccccacttcctcgccatcttccagggccagctggtgatcttccaggagagagctgggcaccatggaaaggggcagtcagcatccaccacaaggcttttccaagtgcaaggcactgacagccacaacaccaggaccatggaggtgccagcccgtgcctcatccctcaactccagtgacatcttcttgctggtcacagccagcgtctgctacctctggtttgggaagggctgtaatggtgatcagcgtgagatggcacgggtggtggtcactgtcatttccaggaagaatgaggaaacggtgctggagggtcaggagcctccccacttctgggaggccctgggaggccgggccccctaccccagcaacaagaggctccctgaggaggtccccagcttccagccacgactgtttgagtgctccagccacatgggctgcctggtcctcgcagaagtggggttcttcagccaggaggacctggacaagtatgacatcatgttactggacacctggcaggagatcttcctgtggcttggggaagctgcaagtgagtggaaggaggcggtggcctggggccaggagtacctgaagactcacccagcagggaggagcccggccacacccatcgtgctggtcaagcagggccatgagcctcccaccttcattggatggttcttcacttgggacccctacaagtggactagccacccgtcccacaaggaagtggtggatggcagcccggcagcagcatcaaccatctctgagataacagcagaagtcaacaacttgcggctatccagatggccgggcaatggcagggcaggtgccgtggccctgcaggccctcaagggctcccaggacagctcagagaatgatctggtgcgaagccccaagtcggctggcagcagaaccagcagctccgtcagcagcaccagcgccacgatcaacgggggcctgcgccgggaacaactgatgcaccaggctgttgaggacctgccagagggcgtggaccctgcccgcagggagttctatctctcagactctgacttccaagatatctttgggaaatccaaggaggaattctacagcatggccacgtggaggcagcggcaggagaaaaagcagctgggcttcttctgaacccaagccctctcgactgcccctatcccctggaccccaacatacctacaatgctggggaggccctgcttccactcccctcagaggcttttggtcatcctctgcgtgtcagtaaaagcaggcagcccatacga

SEQ ID NO: 199145 - DNA, 2787 bp, Homo sapiens
  Payload ID: 19286
  Gene Name: villin-like
  Uniprot ID: O15195
  ENST ID: ENST00000383759
  CDS Start-End: 87-2657
ttgtacaggtagccaggtgtcggtctccagcctgagaactctggctgttgttccttgtgtcgtcccatattcctgcctggcctgcgatggacatcagcaagggcctcccaggcatgcagggaggcctccacatatggatctctgagaaccggaagatggtgccggtacccgagggggcttacgggaacttttttgaggaacactgctatgtcatcctccacgtcccccagagcccgaaggccacgcagggggcgtccagcgacctgcactactgggtcgggaagcaggcgggtgcggaagcgcagggcgctgcggaggccttccagcagcgcctacaggacgagctggggggccagaccgtgctgcaccgcgaggcgcagggccacgagtccgactgcttctgcagctacttccgcccgggaatcatctacaggaagggaggcctagcatctgacctcaagcatgtggagaccaacttgttcaacatccagcgactgctgcacatcaaagggaggaagcacgtgtctgccactgaggtggagctctcctggaacagctttaataagggtgacatcttcctgctggacctaggcaagatgatgattcagtggaatgggcccaagaccagcatttctgagaaggctcgggggctggctttgacctacagcctccgggacagggaacgtggtggtggtcgtgcacagattggtgtggtggatgatgaggccaaagccccggacctcatgcagatcatggaggctgtgctgggccgcagggtgggcagcctgcgtgccgccacgcccagcaaggatatcaaccagctgcagaaggccaatgttcgcctgtaccatgtctatgagaagggcaaagacctggtggtcctggagttggcgacccccccactgacccaggacctgctgcaggaggaggacttctacatcctggaccagggtggcttcaagatctatgtgtggcagggacgcatgtctagcctccaggagagaaaggctgccttcagccgggctgtgggcttcatccaggccaagggctacccgacctacaccaacgtggaggtggtgaacgacggcgccgagtcggccgcgttcaagcagctcttccggacttggtctgagaagcggcgcaggaaccagaagctcggcgggagggataaatcgattcatgtaaagctggacgtgggcaagctgcacacccagcctaagttagcggcccagctcaggatggtggacgacggctctgggaaggtggaggtgtggtgcatccaggacttacacaggcagcccgtggaccccaagcgtcatggacagctgtgtgcaggcaactgctaccttgtgctctacacataccagaggctgggccgtgtccagtacatcctgtacctatggcagggccaccaggccactgcggatgagattgaggccctgaacagcaacgctgaggaactagatgtcatgtatggtggcgtcctagtacaggagcatgtgaccatgggcagcgagcccccccacttcctcgccatcttccagggccagctggtgatcttccaggagagagctgggcaccatggaaaggggcagtcagcatccaccacaaggcttttccaagtgcaaggcactgacagccacaacaccaggaccatggaggtgccagcccgtgcctcatccctcaactccagtgacatcttcttgctggtcacagccagcgtctgctacctctggtttgggaagggctgtaatggtgatcagcgtgagatggcacgggtggtggtcactgtcatttccaggaagaatgaggaaacggtgctggagggtcaggagcctccccacttctgggaggccctgggaggccgggccccctaccccagcaacaagaggctccctgaggaggtccccagcttccagccacgactgtttgagtgctccagccacatgggctgcctggtcctcgcagaagtggggttcttcagccaggaggacctggacaagtatgacatcatgttactggacacctggcaggagatcttcctgtggcttggggaagctgcaagtgagtggaaggaggcggtggcctggggccaggagtacctgaagactcacccagcagggaggagcccggccacacccatcgtgctggtcaagcagggccatgagcctcccaccttcattggatggttcttcacttgggacccctacaagtggactagccacccgtcccacaaggaagtggtggatggcagcccggcagcagcatcaaccatctctgagataacagcagaagtcaacaacttgcggctatccagatggccgggcaatggcagggcaggtgccgtggccctgcaggccctcaagggctcccaggacagctcagagaatgatctggtgcgaagccccaagtcggctggcagcagaaccagcagctccgtcagcagcaccagcgccacgatcaacgggggcctgcgccgggaacaactgatgcaccaggctgttgaggacctgccagagggcgtggaccctgcccgcagggagttctatctctcagactctgacttccaagatatctttgggaaatccaaggaggaattctacagcatggccacgtggaggcagcggcaggagaaaaagcagctgggcttcttctgaacccaagccctctcgactgcccctatcccctggaccccaacatacctacaatgctggggaggccctgcttccactcccctcagaggcttttggtcatcctctgcgtgtcagtaaaagcaggcagcccata

SEQ ID NO: 199146 - DNA, 813 bp, Homo sapiens
  Payload ID: 19286
  Gene Name: villin-like
  ENST ID: ENST00000412008
  CDS Start-End: 1-305
gcatgtctagcctccaggagagaaaggctgccttcagccgggctgtgggcttcatccaggccaagggctacccgacctacaccaacgtggaggtggtgaacgacggcgccgagtcggccgcgttcaagcagctcttccggacttggtctgagaagcggcgcaggaaccagaagctcggcgggagggataaatcgattcatgtaaagctggacgtgggcaagctgcacacccagcctaagttagcggcccagctcaggatggtggacgacggctctgggaaggtggagggcctacctgggatttgaccagagtccgcctggctccaggctctgccacccacaggaagaagaaactacactgacagatgtgtggtgcatccaggacttacacaggcagcccgtggaccccaagcgtcatggacagctgtgtgcaggcaactgctaccttgtgctctacacataccagaggctgggccgtgtccagtacatcctgtacctatggcagggccaccaggccactgcggatgagattgaggccctgaacagcaacgctgaggaactagatgtcatgtatggtggcgtcctagtacaggagcatgtgaccatgggcagcgagcccccccacttcctcgccatcttccagggccagctggtgatcttccaggagagagctgggcaccatggaaaggggcagtcagcatccaccacaaggcttttccaagtgcaaggcactgacagccacaacaccaggaccatggaggtgccagcccgtgcctcatccctcaactccagtgacatcttcttgctggtcaca

SEQ ID NO: 199147 - DNA, 582 bp, Homo sapiens
  Payload ID: 19286
  Gene Name: villin-like
  ENST ID: ENST00000416303
  CDS Start-End: 191-582
agttacagtggtggggaccaggagtagggaggcagagactggccccgtgccaggcctagcactgcccacaggcagggcgaaggcgcgggagcagtttccagcagttgtacaggtagccaggtgtcggtctccagcctgagaactctggctgttgttccttgtgtcgtcccatattcctgcctggcctgcgatggacatcagcaagggcctcccaggcatgcagggaggcctccacatatggatctctgagaaccggaagatggtgccggtacccgagggggcttacgggaacttttttgaggaacactgctatgtcatcctccacgtcccccagagcccgaaggccacgcagggggcgtccagcgacctgcactactgggtcgggaagcaggcgggtgcggaagcgcagggcgctgcggaggccttccagcagcgcctacaggacgagctggggggccagaccgtgctgcaccgcgaggcgcagggccacgagtccgactgcttctgcagctacttccgcccgggaatcatctacaggaagggaggcctagcatctgacctcaagcatgtggagaccaactt

SEQ ID NO: 199148 - DNA, 1857 bp, Homo sapiens
  Payload ID: 19286
  Gene Name: villin-like
  ENST ID: ENST00000465644
  CDS Start-End: 27-1751
cggaagcccctgcctagcgtctccccatggcccttggtacatcctccccttctccacccgcacctccgtcttccccgcaacacatatacacaaacacccggaccctaggtcccccagagcccgaaggccacgcagggggcggctacccgacctacaccaacgtggaggtggtgaacgacggcgccgagtcggccgcgttcaagcagctcttccggacttggtctgagaagcggcgcaggaaccagaagctcggcgggagggataaatcgattcatgtaaagctggacgtgggcaagctgcacacccagcctaagttagcggcccagctcaggatggtggacgacggctctgggaaggtggaggtgtggtgcatccaggacttacacaggcagcccgtggaccccaagcgtcatggacagctgtgtgcaggcaactgctaccttgtgctctacacataccagaggctgggccgtgtccagtacatcctgtacctatggcagggccaccaggccactgcggatgagattgaggccctgaacagcaacgctgaggaactagatgtcatgtatggtggcgtcctagtacaggagcatgtgaccatgggcagcgagcccccccacttcctcgccatcttccagggccagctggtgatcttccaggagagagctgggcaccatggaaaggggcagtcagcatccaccacaaggcttttccaagtgcaaggcactgacagccacaacaccaggaccatggaggtgccagcccgtgcctcatccctcaactccagtgacatcttcttgctggtcacagccagcgtctgctacctctggtttgggaagggctgtaatggtgatcagcgtgagatggcacgggtggtggtcactgtcatttccaggaagaatgaggaaacggtgctggagggtcaggagcctccccacttctgggaggccctgggaggccgggccccctaccccagcaacaagaggctccctgaggaggtccccagcttccagccacgactgtttgagtgctccagccacatgggctgcctggtcctcgcagaagtggggttcttcagccaggaggacctggacaagtatgacatcatgttactggacacctggcaggagatcttcctgtggcttggggaagctgcaagtgagtggaaggaggcggtggcctggggccaggagtacctgaagactcacccagcagggaggagcccggccacacccatcgtgctggtcaagcagggccatgagcctcccaccttcattggatggttcttcacttgggacccctacaagtggactagccacccgtcccacaaggaagtggtggatggcagcccggcagcagcatcaaccatctctgagataacagcagaagtcaacaacttgcggctatccagatggccgggcaatggcagggcaggtgccgtggccctgcaggccctcaagggctcccaggacagctcagagaatgatctggtgcgaagccccaagtcggctggcagcagaaccagcagctccgtcagcagcaccagcgccacgatcaacgggggcctgcgccgggaacaactgatgcaccaggctgttgaggacctgccagagggcgtggaccctgcccgcagggagttctatctctcagactctgacttccaagatatctttgggaaatccaaggaggaattctacagcatggccacgtggaggcagcggcaggagaaaaagcagctgggcttcttctgaacccaagccctctcgactgcccctatcccctggaccccaacatacctacaatgctggggaggccctgcttccactcccctcagaggcttttggtcatcctctgcgt

SEQ ID NO: 199149 - DNA, 686 bp, Homo sapiens
  Payload ID: 19286
  Gene Name: villin-like
  ENST ID: ENST00000492491
  CDS Start-End: 126-686
agggcggcaccactccctgctccatggaaactgagcaagttgtacaggtagccaggtgtcggtctccagcctgagaactctggctgttgttccttgtgtcgtcccatattcctgcctggcctgcgatggacatcagcaagggcctcccaggcatgcagggaggcctccacatatggatctctgagaaccggaagatggtgccggtacccgagggggcttacgggaacttttttgaggaacactgctatgtcatcctccacgtcccccagagcccgaaggccacgcagggggcgtccagcgacctgcactactgggtcgggaagcaggcgggtgcggaagcgcagggcgctgcggaggccttccagcagcgcctacaggacgagctggggggccagaccgtgctgcaccgcgaggcgcagggccacgagtccgactgcttctgcagctacttccgcccgggaatcatctacaggaagggaggcctagcatctgacctcaagcatgtggagaccaacttgttcaacatccagcgactgctgcacatcaaagggaggaagcacgtgtctgccactgaggtggagctctcctggaacagctttaataagggtgacatcttcctgctggacctaggcaagatgatgattcagtggaatgggcccaagaccagcatttctgagaaggctcgg

SEQ ID NO: 199150 - DNA, 1868 bp, Homo sapiens
  Payload ID: 19287
  Gene Name: vimentin
  Uniprot ID: P08670
  ENST ID: ENST00000224237
  CDS Start-End: 146-1546
ctctgccactctcgctccgaggtccccgcgccagagacgcagccgcgctcccaccacccacacccaccgcgccctcgttcgcctcttctccgggagccagtccgcgccaccgccgccgcccaggccatcgccaccctccgcagccatgtccaccaggtccgtgtcctcgtcctcctaccgcaggatgttcggcggcccgggcaccgcgagccggccgagctccagccggagctacgtgactacgtccacccgcacctacagcctgggcagcgcgctgcgccccagcaccagccgcagcctctacgcctcgtccccgggcggcgtgtatgccacgcgctcctctgccgtgcgcctgcggagcagcgtgcccggggtgcggctcctgcaggactcggtggacttctcgctggccgacgccatcaacaccgagttcaagaacacccgcaccaacgagaaggtggagctgcaggagctgaatgaccgcttcgccaactacatcgacaaggtgcgcttcctggagcagcagaataagatcctgctggccgagctcgagcagctcaagggccaaggcaagtcgcgcctgggggacctctacgaggaggagatgcgggagctgcgccggcaggtggaccagctaaccaacgacaaagcccgcgtcgaggtggagcgcgacaacctggccgaggacatcatgcgcctccgggagaaattgcaggaggagatgcttcagagagaggaagccgaaaacaccctgcaatctttcagacaggatgttgacaatgcgtctctggcacgtcttgaccttgaacgcaaagtggaatctttgcaagaagagattgcctttttgaagaaactccacgaagaggaaatccaggagctgcaggctcagattcaggaacagcatgtccaaatcgatgtggatgtttccaagcctgacctcacggctgccctgcgtgacgtacgtcagcaatatgaaagtgtggctgccaagaacctgcaggaggcagaagaatggtacaaatccaagtttgctgacctctctgaggctgccaaccggaacaatgacgccctgcgccaggcaaagcaggagtccactgagtaccggagacaggtgcagtccctcacctgtgaagtggatgcccttaaaggaaccaatgagtccctggaacgccagatgcgtgaaatggaagagaactttgccgttgaagctgctaactaccaagacactattggccgcctgcaggatgagattcagaatatgaaggaggaaatggctcgtcaccttcgtgaataccaagacctgctcaatgttaagatggcccttgacattgagattgccacctacaggaagctgctggaaggcgaggagagcaggatttctctgcctcttccaaacttttcctccctgaacctgagggaaactaatctggattcactccctctggttgatacccactcaaaaaggacacttctgattaagacggttgaaactagagatggacaggttatcaacgaaacttctcagcatcacgatgaccttgaataaaaattgcacacactcagtgcagcaatatattaccagcaagaataaaaaagaaatccatatcttaaagaaacagctttcaagtgcctttctgcagtttttcaggagcgcaagatagatttggaataggaataagctctagttcttaacaaccgacactcctacaagatttagaaaaaagtttacaacataatctagtttacagaaaaatcttgtgctagaatactttttaaaaggtattttgaataccattaaaactgcttttttttttccagcaagtatccaaccaacttggttctgcttcaataaatctttggaaaaactc

SEQ ID NO: 199151 - DNA, 753 bp, Homo sapiens
  Payload ID: 19287
  Gene Name: vimentin
  ENST ID: ENST00000421459
  CDS Start-End: 1-522
ggtttcctcgttcccctttggttaatgcgcaactgtttcagattgcaggaggagatgcttcagagagaggaagccgaaaacaccctgcaatctttcagacaggatgttgacaatgcgtctctggcacgtcttgaccttgaacgcaaagtggaatctttgcaagaagagattgcctttttgaagaaactccacgaagaggaaatccaggagctgcaggctcagattcaggaacagcatgtccaaatcgatgtggatgtttccaagcctgacctcacggctgccctgcgtgacgtacgtcagcaatatgaaagtgtggctgccaagaacctgcaggaggcagaagaatggtacaaatccaagtttgctgacctctctgaggctgccaaccggaacaatgacgccctgcgccaggcaaagcaggagtccactgagtaccggagacaggtgcagtccctcacctgtgaagtggatgcccttaaaggaaccgtgagtaccaaccctgcagtaaaagagggaaaataatgacccattctgctgactaggctcatgatgatacctgaacaaaatgttgagtgagtaaaaatgtatatcataatgcaaagaaaatgagttatcaagacagactcaaaagggacttcatggaactcttgaaggttttagcttgcctatatcattgcttctaatatgaaggacttggtactcgcattctccacctaaaattagagtggtcgccatttgccgctaatggaaatt

SEQ ID NO: 199152 - DNA, 2666 bp, Homo sapiens
  Payload ID: 19287
  Gene Name: vimentin
  ENST ID: ENST00000469543
  CDS Start-End: 630-1316
aagtagctgggcctcgggagggggctggagggagaggggaacgcccccccggcccccgcgagagctgccacgcccttggggatgtggccggggggaggcctgccagggagacagcggagagcggggctgtggctgtggtggcgcagccccgcccagaacccagaccttgcagttcgcatttcctcctctgtccccacacattgcccaaggacgctccgtttcaagttacagatttcttaaaactaccactttgtgtgcagttgaaggcccttgggcacaatgagagccagtcctccaaactttcagaaagtttcctgccccttctggcaggctgccaatcaccgggcgggagaaggaaggaggggaaggcggtggagggagcgagacaaagggatggtccctcgggggcggggatggcggggctgtcctgtaggtctgtgcggccaccgtgattgcccctctgcgcggtgcccgaagtcccgctgaaacctgccgagggcagcaggtctgaaagctgcaggcgctagttgcgcggaggtggcgcagctgctctggaggcgcagagcgaatacgtggtgtttgggtgtggccgccccgcccctggcggtttcctcgttcccctttggttaatgcgcaactgtttcagattgcaggaggagatgcttcagagagaggaagccgaaaacaccctgcaatctttcagacaggatgttgacaatgcgtctctggcacgtcttgaccttgaacgcaaagtggaatctttgcaagaagagattgcctttttgaagaaactccacgaagaggaaatccaggagctgcaggctcagattcaggaacagcatgtccaaatcgatgtggatgtttccaagcctgacctcacggctgccctgcgtgacgtacgtcagcaatatgaaagtgtggctgccaagaacctgcaggaggcagaagaatggtacaaatccaagtttgctgacctctctgaggctgccaaccggaacaatgacgccctgcgccaggcaaagcaggagtccactgagtaccggagacaggtgcagtccctcacctgtgaagtggatgcccttaaaggaaccaatgagtccctggaacgccagatgcgtgaaatggaagagaactttgccgttgaagctgctaactaccaagacactattggccgcctgcaggatgagattcagaatatgaaggaggaaatggctcgtcaccttcgtgaataccaagacctgctcaatgttaagatggcccttgacattgagattgccacctacaggaagctgctggaaggcgaggagagcaggtagggaactcagacttggatgcgtgaactaatggtgaccatttgttaggccctgtgccactgggctctaagcagtgtcacatttaatctttagaaagtttctttgaggtaactgctttccactttttgtagaggaggaatttgaattgagagagagtaagtgacttgctgaaaaagggttaatcaacagcagagctgggatttgaacccataactctgtcaaagcctccactcctaactcctgttcatgctcctgtggagaaaatgcttgtagtaacatattttaaatgtactaacaagaccagtcatgggaaaatgtttctgagacaaatctctagtttatgatttaaaacagtacgttttcttacgtgacgaaaacaaaaagtgtgttaatttgttcccagtggttgaagttatttgccaacaattttactgtttctcttcatctgtttataggatttctctgcctcttccaaacttttcctccctgaacctgaggggtaagcattttatttccctttaggaaaaacgtcagctgcttgtaaccactgtgtttatgtcaaagcattcattttttttaggatatctgaaaaaatgccatataagagaaaactctataaaacatctataattttcgaacccaagtacactcttgcattctatgctttaagttaaatgcaaactcctttttccttcttcctgctgcaagtactatctcatcctgatgctcaagagtgtcagggcctgggtttccaaacagagactaccctaaaattatttggcgagtagtactttacacaattgcctctcccccacaaatcataattgtttcagtaaaatggttacttggtttttccaagaaaaaactcgtttttactcatttttggcctgtttgtttatttagaaactaatctggattcactccctctggttgatacccactcaaaaaggacacttctgattaagacggttgaaactagagatggacaggttatcaacgaaacttctcagcatcacgatgaccttgaataaaaattgcacacactcagtgcagcaatatattaccagcaagaataaaaaagaaatccatatcttaaagaaacagctttcaagtgcctttctgcagtttttcaggagcgcaagatagatttggaataggaataagctctagttcttaacaaccgacactcctacaagatttagaaaaaagtttacaacataatctagtttacagaaaaatcttgtgctagaatactttttaaaaggtattttgaataccattaaaactgcttttttttttccagcaagtatccaaccaacttggttctgcttcaataaatctttggaaaaactc

SEQ ID NO: 199153 - DNA, 2272 bp, Homo sapiens
  Payload ID: 19287
  Gene Name: vimentin
  ENST ID: ENST00000487938
  CDS Start-End: 146-1441
ctctgccactctcgctccgaggtccccgcgccagagacgcagccgcgctcccaccacccacacccaccgcgccctcgttcgcctcttctccgggagccagtccgcgccaccgccgccgcccaggccatcgccaccctccgcagccatgtccaccaggtccgtgtcctcgtcctcctaccgcaggatgttcggcggcccgggcaccgcgagccggccgagctccagccggagctacgtgactacgtccacccgcacctacagcctgggcagcgcgctgcgccccagcaccagccgcagcctctacgcctcgtccccgggcggcgtgtatgccacgcgctcctctgccgtgcgcctgcggagcagcgtgcccggggtgcggctcctgcaggactcggtggacttctcgctggccgacgccatcaacaccgagttcaagaacacccgcaccaacgagaaggtggagctgcaggagctgaatgaccgcttcgccaactacatcgacaaggtgcgcttcctggagcagcagaataagatcctgctggccgagctcgagcagctcaagggccaaggcaagtcgcgcctgggggacctctacgaggaggagatgcgggagctgcgccggcaggtggaccagctaaccaacgacaaagcccgcgtcgaggtggagcgcgacaacctggccgaggacatcatgcgcctccgggagaaattgcaggaggagatgcttcagagagaggaagccgaaaacaccctgcaatctttcagacaggatgttgacaatgcgtctctggcacgtcttgaccttgaacgcaaagtggaatctttgcaagaagagattgcctttttgaagaaactccacgaagaggaaatccaggagctgcaggctcagattcaggaacagcatgtccaaatcgatgtggatgtttccaagcctgacctcacggctgccctgcgtgacgtacgtcagcaatatgaaagtgtggctgccaagaacctgcaggaggcagaagaatggtacaaatccaagtttgctgacctctctgaggctgccaaccggaacaatgacgccctgcgccaggcaaagcaggagtccactgagtaccggagacaggtgcagtccctcacctgtgaagtggatgcccttaaaggaaccaatgagtccctggaacgccagatgcgtgaaatggaagagaactttgccgttgaagctgctaactaccaagacactattggccgcctgcaggatgagattcagaatatgaaggaggaaatggctcgtcaccttcgtgaataccaagacctgctcaatgttaagatggcccttgacattgagattgccacctacaggaagctgctggaaggcgaggagagcaggatttctctgcctcttccaaacttttcctccctgaacctgaggggtaagcattttatttccctttaggaaaaacgtcagctgcttgtaaccactgtgtttatgtcaaagcattcattttttttaggatatctgaaaaaatgccatataagagaaaactctataaaacatctataattttcgaacccaagtacactcttgcattctatgctttaagttaaatgcaaactcctttttccttcttcctgctgcaagtactatctcatcctgatgctcaagagtgtcagggcctgggtttccaaacagagactaccctaaaattatttggcgagtagtactttacacaattgcctctcccccacaaatcataattgtttcagtaaaatggttacttggtttttccaagaaaaaactcgtttttactcatttttggcctgtttgtttatttagaaactaatctggattcactccctctggttgatacccactcaaaaaggacacttctgattaagacggttgaaactagagatggacaggttatcaacgaaacttctcagcatcacgatgaccttgaataaaaattgcacacactcagtgcagcaatatattaccagcaagaataaaaaagaaatccatatcttaaagaaacagctttcaagtgcctttctgcagtttttcaggagcgcaagatagatttggaataggaataagctctagttcttaacaaccgacactcctacaagatttagaaaaaagtttacaacataatctagtttacagaaaaatcttgtgctagaatactttttaaaaggtattttgaataccattaaaactgcttttttttttccagcaagtatccaaccaacttggttctgcttcaataaatctttggaaaaactc

SEQ ID NO: 199154 - DNA, 2128 bp, Homo sapiens
  Payload ID: 19287
  Gene Name: vimentin
  Uniprot ID: P08670
  ENST ID: ENST00000544301
  CDS Start-End: 414-1814
gcctctccaaaggctgcagaagtttcttgctaacaaaaagtccgcacattcgagcaaagacaggctttagcgagttattaaaaacttaggggcgctcttgtcccccacagggcccgaccgcacacagcaaggcgatggcccagctgtaagttggtagcactgagaactagcagcgcgcgcggagcccgctgagacttgaatcaatctggtctaacggtttcccctaaaccgctaggagccctcaatcggcgggacagcagggcgcgtcctctgccactctcgctccgaggtccccgcgccagagacgcagccgcgctcccaccacccacacccaccgcgccctcgttcgcctcttctccgggagccagtccgcgccaccgccgccgcccaggccatcgccaccctccgcagccatgtccaccaggtccgtgtcctcgtcctcctaccgcaggatgttcggcggcccgggcaccgcgagccggccgagctccagccggagctacgtgactacgtccacccgcacctacagcctgggcagcgcgctgcgccccagcaccagccgcagcctctacgcctcgtccccgggcggcgtgtatgccacgcgctcctctgccgtgcgcctgcggagcagcgtgcccggggtgcggctcctgcaggactcggtggacttctcgctggccgacgccatcaacaccgagttcaagaacacccgcaccaacgagaaggtggagctgcaggagctgaatgaccgcttcgccaactacatcgacaaggtgcgcttcctggagcagcagaataagatcctgctggccgagctcgagcagctcaagggccaaggcaagtcgcgcctgggggacctctacgaggaggagatgcgggagctgcgccggcaggtggaccagctaaccaacgacaaagcccgcgtcgaggtggagcgcgacaacctggccgaggacatcatgcgcctccgggagaaattgcaggaggagatgcttcagagagaggaagccgaaaacaccctgcaatctttcagacaggatgttgacaatgcgtctctggcacgtcttgaccttgaacgcaaagtggaatctttgcaagaagagattgcctttttgaagaaactccacgaagaggaaatccaggagctgcaggctcagattcaggaacagcatgtccaaatcgatgtggatgtttccaagcctgacctcacggctgccctgcgtgacgtacgtcagcaatatgaaagtgtggctgccaagaacctgcaggaggcagaagaatggtacaaatccaagtttgctgacctctctgaggctgccaaccggaacaatgacgccctgcgccaggcaaagcaggagtccactgagtaccggagacaggtgcagtccctcacctgtgaagtggatgcccttaaaggaaccaatgagtccctggaacgccagatgcgtgaaatggaagagaactttgccgttgaagctgctaactaccaagacactattggccgcctgcaggatgagattcagaatatgaaggaggaaatggctcgtcaccttcgtgaataccaagacctgctcaatgttaagatggcccttgacattgagattgccacctacaggaagctgctggaaggcgaggagagcaggatttctctgcctcttccaaacttttcctccctgaacctgagggaaactaatctggattcactccctctggttgatacccactcaaaaaggacacttctgattaagacggttgaaactagagatggacaggttatcaacgaaacttctcagcatcacgatgaccttgaataaaaattgcacacactcagtgcagcaatatattaccagcaagaataaaaaagaaatccatatcttaaagaaacagctttcaagtgcctttctgcagtttttcaggagcgcaagatagatttggaataggaataagctctagttcttaacaaccgacactcctacaagatttagaaaaaagtttacaacataatctagtttacagaaaaatcttgtgctagaatactttttaaaaggtattttgaataccattaaaactgcttttttttttccagcaagtatccaaccaacttggttctgcttcaataaatctttgg

SEQ ID NO: 199155 - DNA, 2254 bp, Homo sapiens
  Payload ID: 19288
  Gene Name: vimentin-type intermediate filament associated coiled-coil protein
  Uniprot ID: Q2NL98
  ENST ID: ENST00000339485
  CDS Start-End: 34-543
gggcgtggccgggcctgtacagcagcctgggccatgtcggcgccgccggccctgcagatccgggaggcaaacgcacacctggcagccgtgcaccggcgcgcagcggagctggaggcgcggctggacgcggcggagcgcacggtgcacgcccaagccgagcgcctggccctccacgaccagcagctgcgcgccgccctagacgaactgggtcgcgccaaggaccgtgagattgccacactccaggagcagctgatgacctcagaagccactgtccacagcctgcaggccaccgtgcaccagagggacgagctcattaggcagttgcagccccgggctgagctgctgcaggacatctgccgccgccggccacccctggctgggctgctggatgccctggctgaggctgagcgcctggggcccctgccggccagtgaccccggccacccaccccccggtgggcctggtccaccccttgacaacagcactggggaagaggcggacagggaccacctccagcctgcagtgtttgggaccacagtgtgagcccggaatgcagattacagaatggagacagaaagccactgctgtcagtgtccttgggagtcaccagcaccctgcagggggaccctacggcagagccaaagtcctgtctaagcatcagaacaggctgaacagtcaaaaagttttcaaataggcccacaggccaggtgcagacgtttaacccagacagaagtgttcttgtttgtttttaagctttgaatcagtcacccttgctaaaaacctggcaatgcaaacacaaagatctggatttctggcaagacttggccaagcttgcctggagttcagggcaccctctttagccagggtgtgagtttctgttttttgtttttttttttttaagacagagtcccactctgtcgccctggctggggtgcagtggtgcgattttggctaactgcaacctccgcctcccaggttcaagcgattctcctgtctcatccttcagagtagctgggattacaggcgcccaccaccacacccggatattttatatttttggtagagaccggggaggggagggggtttcaccatgttgaccaggctggtctcaaactcctgaccttaggtgatccacccgcctcggccttcgaaagtgctgcagttataggtgtaagccaccgcgcccggccctagcctagcttttgtagcatgcaactgtctcctttttatacgccctaaagaatatatttttgaactccttgtttctgcgctgtccttcttagcccaggacattcagggtgctttgcttgttgtcaaaccagggaaaggagaaaactcctgtgcctttctgggccagcctgtcaccctggcctggtcggcagccattcccctacctcctcactcaggaactgtcacaccaggaaccggcgaggggcacagcctgtttcagaccagaaaggtcggaggccacccacggccttcaggatggcgcccgcctgcctgcctggcaacagtgacccctcagtgcagtaacaatgggcccattttctcctctggatgaacaaggaggggggttgtttgtacaaaggaaaggcaggctggggcctgtctgtgctcaagaataaaccggatgatttcctggcctgggggcaagagggaggccctctgtgttatttgtgcctcctggtagggtcctgctgggccaggtagaatctagggagtgtaggccaagcactctctacagcgattgcatctaatcttcgagtttccctgtagacacaggctttgtcctcattttacagctgtggaaagtgaggcccaggccgggcgcggtgtctcacgcctgtaatcccagcactttgggatgcgggtggatcacctgaggtcaggagttcgagaccaccctggccaacatggtgaaaccccgtctctactaaaaatactaaaattagccgggcttggtggcgggtgcctgtaatcccagctactgaacccgggaggcggaggttgcagtgagtggagattgcaccactgcactccagcctgggagacagagtgagactcagtctcaaagaaaacaacaacaacaacaacaacaacaacaacaacaacaaacagaggcccagaggtgtgaagggaacacactccgggtctggagggccagggccacttccaattctgggggaagttattgctgaaattctgttttctttctttctttcttttttttttaaagagacaaagtctcactgtt

SEQ ID NO: 199156 - DNA, 5482 bp, Homo sapiens
  Payload ID: 19289
  Gene Name: vinculin
  Uniprot ID: P18206
  ENST ID: ENST00000211998
  CDS Start-End: 95-3499
gtagtcgctgcacagtctgtctcttcgccggttcccggccccgtggatcctacttctctgtcgcccgcggttcgccgccccgctcgccgccgcgatgccagtgtttcatacgcgcacgatcgagagcatcctggagccggtggcacagcagatctcccacctggtgataatgcacgaggagggcgaggtggacggcaaagccattcctgacctcaccgcgcccgtggccgccgtgcaggcggccgtcagcaacctcgtccgggttggaaaagagactgttcaaaccactgaggatcagattttgaagagagatatgccaccagcatttattaaggttgagaatgcttgcaccaagcttgtccaggcagctcagatgcttcagtcagacccttactcagtgcctgctcgagattatctaattgatgggtcaaggggcatcctctctggaacatcagacctgctccttaccttcgatgaggctgaggtccgtaaaattattagagtttgcaaaggaattttggaatatcttacagtggcagaggtggtggagactatggaagatttggtcacttacacaaagaatcttgggccaggaatgactaagatggccaagatgattgacgagagacagcaggagctcactcaccaggagcaccgagtgatgttggtgaactcgatgaacaccgtgaaagagttgctgccagttctcatttcagctatgaagatttttgtaacaactaaaaactcaaaaaaccaaggcatagaggaagctttaaaaaatcgcaattttactgtagaaaaaatgagtgctgaaattaatgagataattcgtgtgttacaactcacctcttgggatgaagatgcctgggccagcaaggacactgaagccatgaagagagcattggcctccatagactccaaactgaaccaggccaaaggttggctccgtgaccctagtgcctccccaggggatgctggtgagcaggccatcagacagatcttagatgaagctggaaaagttggtgaactctgtgcaggcaaagaacgcagggagattctgggaacttgcaaaatgctagggcagatgactgatcaagtggctgacctccgtgccagaggacaaggatcctcaccggtggccatgcagaaagctcagcaggtatctcagggtctggatgtgctcacagcaaaagtggaaaatgcagctcgcaagctggaagccatgaccaactcaaagcagagcattgcaaagaagatcgatgctgctcagaactggcttgcagatccaaatggtggaccggaaggagaagagcagattcgaggtgctttggctgaagctcggaaaatagcagaattatgtgatgatcctaaagaaagagatgacattctacgttcccttggggaaatatctgctctgacttctaaattagcagatctacgaagacaggggaaaggagattctccagaggctcgagccttggccaaacaggtggccacggccctgcagaacctgcagaccaaaaccaaccgggctgtggccaacagcagaccggccaaagcagctgtacaccttgagggcaagattgagcaagcacagcggtggattgataatcccacagtggatgaccgtggagtcggtcaggctgccatccgggggcttgtggccgaagggcatcgtctggctaatgttatgatggggccttatcggcaagatcttctcgccaagtgtgaccgagtggaccagctgacagcccagctggctgacctggctgccagaggggaaggggagagtcctcaggcacgagcacttgcatctcagctccaagactccttaaaggatctaaaagctcggatgcaggaggccatgactcaggaagtgtcagatgttttcagcgataccacaactcccatcaagctgttggcagtggcagccacggcgcctcctgatgcgcctaacagggaagaggtatttgatgagagggcagctaactttgaaaaccattcaggaaagcttggtgctacggccgagaaggcggctgcggttggtactgctaataaatcaacagtggaaggcattcaggcctcagtgaagacggcccgagaactcacaccccaggtggtctcggctgctcgtatcttacttaggaaccctggaaatcaagctgcttatgaacattttgagaccatgaagaaccagtggatcgataatgttgaaaaaatgacagggctggtggacgaagccattgataccaaatctctgttggatgcttcagaagaagcaattaaaaaagacctggacaagtgcaaggtagctatggccaacattcagcctcagatgctggttgctggggcaaccagtattgctcgtcgggccaaccggatcctgctggtggctaagagggaggtggagaattccgaggatcccaagttccgtgaggctgtgaaagctgcctctgatgaattgagcaaaaccatctccccgatggtgatggatgcaaaagctgtggctggaaacatttccgaccctggactgcaaaagagcttcctggactcaggatatcggatcctgggagctgtggccaaggtcagagaagccttccaacctcaggagcctgacttcccgccgcctccaccagaccttgaacaactccgactaacagatgagcttgctcctcccaaaccacctctgcctgaaggtgaggtccctccacctaggcctccaccaccagaggaaaaggatgaagagttccctgagcagaaggccggggaggtgattaaccagccaatgatgatggctgccagacagctccatgatgaagctcgcaaatggtccagcaagccgggcatcccagccgctgaggtgggtataggtgttgtagctgaggcagatgcggccgatgctgctggcttccctgtcccccctgacatggaagacgattacgaacctgagctgctgttaatgccatccaatcagccggtcaaccagcccattctggccgcggctcagtccttgcatcgggaagctaccaagtggtctagtaagggcaatgacatcattgcagcagccaagcgcatggctctgctgatggctgagatgtctcggctggtaagagggggcagtggtaccaagcgggcactcattcagtgtgccaaggacatcgccaaggcctcagatgaggtgactcggttggccaaggaggttgccaagcagtgcacagataaacggattagaaccaacctcttacaggtatgtgagcgaatcccaaccataagcacccagctcaaaatcctgtccacagtgaaggccaccatgctgggccggaccaacatcagtgatgaggagtctgagcaggccacagagatgctggttcacaatgcccagaacctcatgcagtctgtgaaggagactgtgcgggaagctgaagctgcttcaatcaaaattcgaacagatgctggatttacactgcgctgggttagaaagactccctggtaccagtaggcacctggctgagcctggctggcacagaaacctctactaaaaagaaggaaaatgatctgagtcccaggagctgcccagagttgctgggagctgaaaaatcacatcctggcctggcacatcagaaaggaatgggggcctcttcaaattagaagacatttatactcttttttcatggacactttgaaatgtgtttctgtataaagcctgtattctcaaacacagttacacttgtgcaccctctatcccaataggcagactgggtttctagcccatggacttcacataagctcagaatccaagtgaacactagccagacactctgctctgcccttgttccctaggggacacttccctctgtttctctttccttggctcccattcactcttccagaatcccaagacccagggcccaggcaaatcagttactaagaagaaaattgctgtgcctcccaaaattgttttgagctttccatgttgctgccaaccataccttccttccctgggctgtgctacctgggtccttttcagaagtgagctttgctgctacaggggaaggtggcctctgtggagccccagcatatgggggcctggattcatttcctgcccttcctcagtttaatccttctagtttcccacaatataaaactgtacttcactgtcaggaagaaatcacagaatcatatgattctgcttttaccatgcccctgagcaatgtctgtgctagggaaacttcccgtcccatatcctgcctcagcccgccaaggtagccatcccatgaacacactgtgtcctggtgctctctgccactggaagggcagagtagccagggtgtggccctgccatcttcccagcagggccactcccggcactccatgcttagtcactgcctgcagaggtctgtgctgaggccttatcattcattcttagctcttaattgttcattttgagctgaaatgctgcattttaattttaaccaaaacatgtctcctatcctggtttttgtagccttcctccacatcctttctaaacaagattttaaagacatgtaggtgtttgttcatctgtaactctaaaagatcctttttaaattcagtcctaagaaagaggagtgcttgtcccctaagagtgtttaatggcaaggcagccctgtctgaaggacacttcctgcctaagggagagtggtatttgcagactagaattctagtgctgctgaagatgaatcaatgggaaatactactcctgtaattcctacctccctgcaaccaactacaaccaagctctctgcatctactcccaagtatggggttcaagagagtaatgggtttcatatttcttatcaccacagtaagttcctactaggcaaaatgagagggcagtgtttcctttttggtacttattactgctaagtatttcccagcacatgaaaccttattttttcccaaagccagaaccagatgagtaaaggagtaagaaccttgcctgaacatccttccttcccacccatcgctgtgtgttagttcccaacatcgaatgtgtacaacttaagttggtcctttacactcaggctttcactatttcctttataatgaggatgattattttcaaggccctcagcatatttgtatagttgcttgcctgatataaatgcaatattaatgcctttaaagtatgaatctatgccaaagatcacttgttgttttactaaagaaagattacttagaggaaataagaaaaatcatgtttgctctcccggttcttccagtggtttgagacactggtttacactttatgccggatgtgcttttctccaatatcagtgctcgagacacagtgaagcaaattaaaaaaaaaaaaaaaaaaaatccctgaatgatgattagagacatcaccgctaaaaaactacatttataagctaggatttgttatatgcaaatattttctgcctcttcttttgttctgtttaaaacaataaaatgcatttgt

SEQ ID NO: 199157 - DNA, 6489 bp, Homo sapiens
  Payload ID: 19289
  Gene Name: vinculin
  Uniprot ID: P18206
  ENST ID: ENST00000372755
  CDS Start-End: 95-3295
gtagtcgctgcacagtctgtctcttcgccggttcccggccccgtggatcctacttctctgtcgcccgcggttcgccgccccgctcgccgccgcgatgccagtgtttcatacgcgcacgatcgagagcatcctggagccggtggcacagcagatctcccacctggtgataatgcacgaggagggcgaggtggacggcaaagccattcctgacctcaccgcgcccgtggccgccgtgcaggcggccgtcagcaacctcgtccgggttggaaaagagactgttcaaaccactgaggatcagattttgaagagagatatgccaccagcatttattaaggttgagaatgcttgcaccaagcttgtccaggcagctcagatgcttcagtcagacccttactcagtgcctgctcgagattatctaattgatgggtcaaggggcatcctctctggaacatcagacctgctccttaccttcgatgaggctgaggtccgtaaaattattagagtttgcaaaggaattttggaatatcttacagtggcagaggtggtggagactatggaagatttggtcacttacacaaagaatcttgggccaggaatgactaagatggccaagatgattgacgagagacagcaggagctcactcaccaggagcaccgagtgatgttggtgaactcgatgaacaccgtgaaagagttgctgccagttctcatttcagctatgaagatttttgtaacaactaaaaactcaaaaaaccaaggcatagaggaagctttaaaaaatcgcaattttactgtagaaaaaatgagtgctgaaattaatgagataattcgtgtgttacaactcacctcttgggatgaagatgcctgggccagcaaggacactgaagccatgaagagagcattggcctccatagactccaaactgaaccaggccaaaggttggctccgtgaccctagtgcctccccaggggatgctggtgagcaggccatcagacagatcttagatgaagctggaaaagttggtgaactctgtgcaggcaaagaacgcagggagattctgggaacttgcaaaatgctagggcagatgactgatcaagtggctgacctccgtgccagaggacaaggatcctcaccggtggccatgcagaaagctcagcaggtatctcagggtctggatgtgctcacagcaaaagtggaaaatgcagctcgcaagctggaagccatgaccaactcaaagcagagcattgcaaagaagatcgatgctgctcagaactggcttgcagatccaaatggtggaccggaaggagaagagcagattcgaggtgctttggctgaagctcggaaaatagcagaattatgtgatgatcctaaagaaagagatgacattctacgttcccttggggaaatatctgctctgacttctaaattagcagatctacgaagacaggggaaaggagattctccagaggctcgagccttggccaaacaggtggccacggccctgcagaacctgcagaccaaaaccaaccgggctgtggccaacagcagaccggccaaagcagctgtacaccttgagggcaagattgagcaagcacagcggtggattgataatcccacagtggatgaccgtggagtcggtcaggctgccatccgggggcttgtggccgaagggcatcgtctggctaatgttatgatggggccttatcggcaagatcttctcgccaagtgtgaccgagtggaccagctgacagcccagctggctgacctggctgccagaggggaaggggagagtcctcaggcacgagcacttgcatctcagctccaagactccttaaaggatctaaaagctcggatgcaggaggccatgactcaggaagtgtcagatgttttcagcgataccacaactcccatcaagctgttggcagtggcagccacggcgcctcctgatgcgcctaacagggaagaggtatttgatgagagggcagctaactttgaaaaccattcaggaaagcttggtgctacggccgagaaggcggctgcggttggtactgctaataaatcaacagtggaaggcattcaggcctcagtgaagacggcccgagaactcacaccccaggtggtctcggctgctcgtatcttacttaggaaccctggaaatcaagctgcttatgaacattttgagaccatgaagaaccagtggatcgataatgttgaaaaaatgacagggctggtggacgaagccattgataccaaatctctgttggatgcttcagaagaagcaattaaaaaagacctggacaagtgcaaggtagctatggccaacattcagcctcagatgctggttgctggggcaaccagtattgctcgtcgggccaaccggatcctgctggtggctaagagggaggtggagaattccgaggatcccaagttccgtgaggctgtgaaagctgcctctgatgaattgagcaaaaccatctccccgatggtgatggatgcaaaagctgtggctggaaacatttccgaccctggactgcaaaagagcttcctggactcaggatatcggatcctgggagctgtggccaaggtcagagaagccttccaacctcaggagcctgacttcccgccgcctccaccagaccttgaacaactccgactaacagatgagcttgctcctcccaaaccacctctgcctgaaggtgaggtccctccacctaggcctccaccaccagaggaaaaggatgaagagttccctgagcagaaggccggggaggtgattaaccagccaatgatgatggctgccagacagctccatgatgaagctcgcaaatggtccagcaagggcaatgacatcattgcagcagccaagcgcatggctctgctgatggctgagatgtctcggctggtaagagggggcagtggtaccaagcgggcactcattcagtgtgccaaggacatcgccaaggcctcagatgaggtgactcggttggccaaggaggttgccaagcagtgcacagataaacggattagaaccaacctcttacaggtatgtgagcgaatcccaaccataagcacccagctcaaaatcctgtccacagtgaaggccaccatgctgggccggaccaacatcagtgatgaggagtctgagcaggccacagagatgctggttcacaatgcccagaacctcatgcagtctgtgaaggagactgtgcgggaagctgaagctgcttcaatcaaaattcgaacagatgctggatttacactgcgctgggttagaaagactccctggtaccagtaggcacctggctgagcctggctggcacagaaacctctactaaaaagaaggaaaatgatctgagtcccaggagctgcccagagttgctgggagctgaaaaatcacatcctggcctggcacatcagaaaggaatgggggcctcttcaaattagaagacatttatactcttttttcatggacactttgaaatgtgtttctgtataaagcctgtattctcaaacacagttacacttgtgcaccctctatcccaataggcagactgggtttctagcccatggacttcacataagctcagaatccaagtgaacactagccagacactctgctctgcccttgttccctaggggacacttccctctgtttctctttccttggctcccattcactcttccagaatcccaagacccagggcccaggcaaatcagttactaagaagaaaattgctgtgcctcccaaaattgttttgagctttccatgttgctgccaaccataccttccttccctgggctgtgctacctgggtccttttcagaagtgagctttgctgctacaggggaaggtggcctctgtggagccccagcatatgggggcctggattcatttcctgcccttcctcagtttaatccttctagtttcccacaatataaaactgtacttcactgtcaggaagaaatcacagaatcatatgattctgcttttaccatgcccctgagcaatgtctgtgctagggaaacttcccgtcccatatcctgcctcagcccgccaaggtagccatcccatgaacacactgtgtcctggtgctctctgccactggaagggcagagtagccagggtgtggccctgccatcttcccagcagggccactcccggcactccatgcttagtcactgcctgcagaggtctgtgctgaggccttatcattcattcttagctcttaattgttcattttgagctgaaatgctgcattttaattttaaccaaaacatgtctcctatcctggtttttgtagccttcctccacatcctttctaaacaagattttaaagacatgtaggtgtttgttcatctgtaactctaaaagatcctttttaaattcagtcctaagaaagaggagtgcttgtcccctaagagtgtttaatggcaaggcagccctgtctgaaggacacttcctgcctaagggagagtggtatttgcagactagaattctagtgctgctgaagatgaatcaatgggaaatactactcctgtaattcctacctccctgcaaccaactacaaccaagctctctgcatctactcccaagtatggggttcaagagagtaatgggtttcatatttcttatcaccacagtaagttcctactaggcaaaatgagagggcagtgtttcctttttggtacttattactgctaagtatttcccagcacatgaaaccttattttttcccaaagccagaaccagatgagtaaaggagtaagaaccttgcctgaacatccttccttcccacccatcgctgtgtgttagttcccaacatcgaatgtgtacaacttaagttggtcctttacactcaggctttcactatttcctttataatgaggatgattattttcaaggccctcagcatatttgtatagttgcttgcctgatataaatgcaatattaatgcctttaaagtatgaatctatgccaaagatcacttgttgttttactaaagaaagattacttagaggaaataagaaaaatcatgtttgctctcccggttcttccagtggtttgagacactggtttacactttatgccggatgtgcttttctccaatatcagtgctcgagacacagtgaagcaaattaaaaaaaaaaaaaaaaaaaatccctgaatgatgattagagacatcaccgctaaaaaactacatttataagctaggatttgttatatgcaaatattttctgcctcttcttttgttctgtttaaaacaataaaatgcatttgtataaaaaatgctttaaatgatggatatgttactttagcaagaacttttaggtcaggtttctcctttgttttgatgaatagtcaatgaaactaatcctcaagatctggaaactaaagatttttatttaatccaaatgttgcactggaagaagaaatcaacagtggtatatttacttaacaaggatgtgtgtaatacaagacaaccctggggattacacacttgaaggaatggaagtggcaaaggttaacaggcagaaagcagctggatgaaacagtttattttcatcttagaagattctagctatctgtggagaccaccactgttccccgaaaagctaaagttgttaagtttgtaggagtaccacaggtccttccccctgctgcaagacagagacttgctctgttgcccaggctgcagtgcagtggtgcaatctcagctcactgcaacctctgcctcccgggttcaagcaattctcctgcctcagcctcccatgtagctgggattacaggtgtgcgccaccatgcctggctaatttttgtatttttagtagagatggagtttcaccatgttggccaggctggtctcgaactcctgacctcaagtgatccgcccaccttgacctcccaaagtgctgggattacaggtgtgatccaccacgcccggccacacaggtccatttttcatattccaaagcccagtatagaataaatagggttttcagggatccaccagggctataaaacagagttagcttttggggacatagtcctcttcttccttaaagaaacactgactaaaatagtaggagcaggtttttagagtagagttgggacatcactttttccctgattttctagatctgaaaggggtaacatgtcattaaagggtgatgatattgatatttagtgttgccaactgctattatcactgctttatcttggaaagttgccgactataaagacagattccagcctgcttgagttaagggaaaggccaaggctgctactgaattagcagtttctaaaactgtcttgtttttgccatttaccatatgttcactggtgctgccttcctgctgtagtataatcattttctcaaatcagttgcctctcaggacaagatcagcattttcctagggtccttctgtagcaccacttaaggaatgaacctatcacaggaactccctttgaataaaatgatggtgactccca

SEQ ID NO: 199158 - DNA, 4412 bp, Homo sapiens
  Payload ID: 19289
  Gene Name: vinculin
  ENST ID: ENST00000436396
  CDS Start-End: 1-2421
gggcagatgactgatcaagtggctgacctccgtgccagaggacaaggatcctcaccggtggccatgcagaaagctcagcaggtatctcagggtctggatgtgctcacagcaaaagtggaaaatgcagctcgcaagctggaagccatgaccaactcaaagcagagcattgcaaagaagatcgatgctgctcagaactggcttgcagatccaaatggtggaccggaaggagaagagcagattcgaggtgctttggctgaagctcggaaaatagcagaattatgtgatgatcctaaagaaagagatgacattctacgttcccttggggaaatatctgctctgacttctaaattagcagatctacgaagacaggggaaaggagattctccagaggctcgagccttggccaaacaggtggccacggccctgcagaacctgcagaccaaaaccaaccgggctgtggccaacagcagaccggccaaagcagctgtacaccttgagggcaagattgagcaagcacagcggtggattgataatcccacagtggatgaccgtggagtcggtcaggctgccatccgggggcttgtggccgaagggcatcgtctggctaatgttatgatggggccttatcggcaagatcttctcgccaagtgtgaccgagtggaccagctgacagcccagctggctgacctggctgccagaggggaaggggagagtcctcaggcacgagcacttgcatctcagctccaagactccttaaaggatctaaaagctcggatgcaggaggccatgactcaggaagtgtcagatgttttcagcgataccacaactcccatcaagctgttggcagtggcagccacggcgcctcctgatgcgcctaacagggaagaggtatttgatgagagggcagctaactttgaaaaccattcaggaaagcttggtgctacggccgagaaggcggctgcggttggtactgctaataaatcaacagtggaaggcattcaggcctcagtgaagacggcccgagaactcacaccccaggtggtctcggctgctcgtatcttacttaggaaccctggaaatcaagctgcttatgaacattttgagaccatgaagaaccagtggatcgataatgttgaaaaaatgacagggctggtggacgaagccattgataccaaatctctgttggatgcttcagaagaagcaattaaaaaagacctggacaagtgcaaggtagctatggccaacattcagcctcagatgctggttgctggggcaaccagtattgctcgtcgggccaaccggatcctgctggtggctaagagggaggtggagaattccgaggatcccaagttccgtgaggctgtgaaagctgcctctgatgaattgagcaaaaccatctccccgatggtgatggatgcaaaagctgtggctggaaacatttccgaccctggactgcaaaagagcttcctggactcaggatatcggatcctgggagctgtggccaaggtcagagaagccttccaacctcaggagcctgacttcccgccgcctccaccagaccttgaacaactccgactaacagatgagcttgctcctcccaaaccacctctgcctgaaggtgaggtccctccacctaggcctccaccaccagaggaaaaggatgaagagttccctgagcagaaggccggggaggtgattaaccagccaatgatgatggctgccagacagctccatgatgaagctcgcaaatggtccagcaagccgggcatcccagccgctgaggtgggtataggtgttgtagctgaggcagatgcggccgatgctgctggcttccctgtcccccctgacatggaagacgattacgaacctgagctgctgttaatgccatccaatcagccggtcaaccagcccattctggccgcggctcagtccttgcatcgggaagctaccaagtggtctagtaagggcaatgacatcattgcagcagccaagcgcatggctctgctgatggctgagatgtctcggctggtaagagggggcagtggtaccaagcgggcactcattcagtgtgccaaggacatcgccaaggcctcagatgaggtgactcggttggccaaggaggttgccaagcagtgcacagataaacggattagaaccaacctcttacaggtatgtgagcgaatcccaaccataagcacccagctcaaaatcctgtccacagtgaaggccaccatgctgggccggaccaacatcagtgatgaggagtctgagcaggccacagagatgctggttcacaatgcccagaacctcatgcagtctgtgaaggagactgtgcgggaagctgaagctgcttcaatcaaaattcgaacagatgctggatttacactgcgctgggttagaaagactccctggtaccagtaggcacctggctgagcctggctggcacagaaacctctactaaaaagaaggaaaatgatctgagtcccaggagctgcccagagttgctgggagctgaaaaatcacatcctggcctggcacatcagaaaggaatgggggcctcttcaaattagaagacatttatactcttttttcatggacactttgaaatgtgtttctgtataaagcctgtattctcaaacacagttacacttgtgcaccctctatcccaataggcagactgggtttctagcccatggacttcacataagctcagaatccaagtgaacactagccagacactctgctctgcccttgttccctaggggacacttccctctgtttctctttccttggctcccattcactcttccagaatcccaagacccagggcccaggcaaatcagttactaagaagaaaattgctgtgcctcccaaaattgttttgagctttccatgttgctgccaaccataccttccttccctgggctgtgctacctgggtccttttcagaagtgagctttgctgctacaggggaaggtggcctctgtggagccccagcatatgggggcctggattcatttcctgcccttcctcagtttaatccttctagtttcccacaatataaaactgtacttcactgtcaggaagaaatcacagaatcatatgattctgcttttaccatgcccctgagcaatgtctgtgctagggaaacttcccgtcccatatcctgcctcagcccgccaaggtagccatcccatgaacacactgtgtcctggtgctctctgccactggaagggcagagtagccagggtgtggccctgccatcttcccagcagggccactcccggcactccatgcttagtcactgcctgcagaggtctgtgctgaggccttatcattcattcttagctcttaattgttcattttgagctgaaatgctgcattttaattttaaccaaaacatgtctcctatcctggtttttgtagccttcctccacatcctttctaaacaagattttaaagacatgtaggtgtttgttcatctgtaactctaaaagatcctttttaaattcagtcctaagaaagaggagtgcttgtcccctaagagtgtttaatggcaaggcagccctgtctgaaggacacttcctgcctaagggagagtggtatttgcagactagaattctagtgctgctgaagatgaatcaatgggaaatactactcctgtaattcctacctccctgcaaccaactacaaccaagctctctgcatctactcccaagtatggggttcaagagagtaatgggtttcatatttcttatcaccacagtaagttcctactaggcaaaatgagagggcagtgtttcctttttggtacttattactgctaagtatttcccagcacatgaaaccttattttttcccaaagccagaaccagatgagtaaaggagtaagaaccttgcctgaacatccttccttcccacccatcgctgtgtgttagttcccaacatcgaatgtgtacaacttaagttggtcctttacactcaggctttcactatttcctttataatgaggatgattattttcaaggccctcagcatatttgtatagttgcttgcctgatataaatgcaatattaatgcctttaaagtatgaatctatgccaaagatcacttgttgttttactaaagaaagattacttagaggaaataagaaaaatcatgtttgctctcccggttcttccagtggtttgagacactggtttacactttatgccggatgtgcttttctccaatatcagtgctcgagacacagtgaagcaaattaaaaaaaaaaaaaaaaaaaatccctgaatgatgattagagacatcaccgctaaaaaactacatttataagctaggatttgttatatgcaaatattttctgcctcttcttttgttctgtttaaaacaataaaatgcatttgtataaaaaa

SEQ ID NO: 199159 - DNA, 3307 bp, Homo sapiens
  Payload ID: 19289
  Gene Name: vinculin
  ENST ID: ENST00000624354
  CDS Start-End: 95-268
gtagtcgctgcacagtctgtctcttcgccggttcccggccccgtggatcctacttctctgtcgcccgcggttcgccgccccgctcgccgccgcgatgccagtgtttcatacgcgcacgatcgagagcatcctggagccggtggcacagcagatctcccacctggtgataatgcacgaggagggcgaggtggacggcaaagccattcctgacctcaccgcgcccgtggccgccgtgcaggcggccgtcagcaacctcgtccggggttgagaatgcttgcaccaagcttgtccaggcagctcagatgcttcagtcagacccttactcagtgcctgctcgagattatctaattgatgggtcaaggggcatcctctctggaacatcagacctgctccttaccttcgatgaggctgaggtccgtaaaattattagagtttgcaaaggaattttggaatatcttacagtggcagaggtggtggagactatggaagatttggtcacttacacaaagaatcttgggccaggaatgactaagatggccaagatgattgacgagagacagcaggagctcactcaccaggagcaccgagtgatgttggtgaactcgatgaacaccgtgaaagagttgctgccagttctcatttcagctatgaagatttttgtaacaactaaaaactcaaaaaaccaaggcatagaggaagctttaaaaaatcgcaattttactgtagaaaaaatgagtgctgaaattaatgagataattcgtgtgttacaactcacctcttgggatgaagatgcctgggccagcaaggacactgaagccatgaagagagcattggcctccatagactccaaactgaaccaggccaaaggttggctccgtgaccctagtgcctccccaggggatgctggtgagcaggccatcagacagatcttagatgaagctggaaaagttggtgaactctgtgcaggcaaagaacgcagggagattctgggaacttgcaaaatgctagggcagatgactgatcaagtggctgacctccgtgccagaggacaaggatcctcaccggtggccatgcagaaagctcagcaggtatctcagggtctggatgtgctcacagcaaaagtggaaaatgcagctcgcaagctggaagccatgaccaactcaaagcagagcattgcaaagaagatcgatgctgctcagaactggcttgcagatccaaatggtggaccggaaggagaagagcagattcgaggtgctttggctgaagctcggaaaatagcagaattatgtgatgatcctaaagaaagagatgacattctacgttcccttggggaaatatctgctctgacttctaaattagcagatctacgaagacaggggaaaggagattctccagaggctcgagccttggccaaacaggtggccacggccctgcagaacctgcagaccaaaaccaaccgggctgtggccaacagcagaccggccaaagcagctgtacaccttgagggcaagattgagcaagcacagcggtggattgataatcccacagtggatgaccgtggagtcggtcaggctgccatccgggggcttgtggccgaagggcatcgtctggctaatgttatgatggggccttatcggcaagatcttctcgccaagtgtgaccgagtggaccagctgacagcccagctggctgacctggctgccagaggggaaggggagagtcctcaggcacgagcacttgcatctcagctccaagactccttaaaggatctaaaagctcggatgcaggaggccatgactcaggaagtgtcagatgttttcagcgataccacaactcccatcaagctgttggcagtggcagccacggcgcctcctgatgcgcctaacagggaagaggtatttgatgagagggcagctaactttgaaaaccattcaggaaagcttggtgctacggccgagaaggcggctgcggttggtactgctaataaatcaacagtggaaggcattcaggcctcagtgaagacggcccgagaactcacaccccaggtggtctcggctgctcgtatcttacttaggaaccctggaaatcaagctgcttatgaacattttgagaccatgaagaaccagtggatcgataatgttgaaaaaatgacagggctggtggacgaagccattgataccaaatctctgttggatgcttcagaagaagcaattaaaaaagacctggacaagtgcaaggtagctatggccaacattcagcctcagatgctggttgctggggcaaccagtattgctcgtcgggccaaccggatcctgctggtggctaagagggaggtggagaattccgaggatcccaagttccgtgaggctgtgaaagctgcctctgatgaattgagcaaaaccatctccccgatggtgatggatgcaaaagctgtggctggaaacatttccgaccctggactgcaaaagagcttcctggactcaggatatcggatcctgggagctgtggccaaggtcagagaagccttccaacctcaggagcctgacttcccgccgcctccaccagaccttgaacaactccgactaacagatgagcttgctcctcccaaaccacctctgcctgaaggtgaggtccctccacctaggcctccaccaccagaggaaaaggatgaagagttccctgagcagaaggccggggaggtgattaaccagccaatgatgatggctgccagacagctccatgatgaagctcgcaaatggtccagcaagccgggcatcccagccgctgaggtgggtataggtgttgtagctgaggcagatgcggccgatgctgctggcttccctgtcccccctgacatggaagacgattacgaacctgagctgctgttaatgccatccaatcagccggtcaaccagcccattctggccgcggctcagtccttgcatcgggaagctaccaagtggtctagtaagggcaatgacatcattgcagcagccaagcgcatggctctgctgatggctgagatgtctcggctggtaagagggggcagtggtaccaagcgggcactcattcagtgtgccaaggacatcgccaaggcctcagatgaggtgactcggttggccaaggaggttgccaagcagtgcacagataaacggattagaaccaacctcttacaggtatgtgagcgaatcccaaccataagcacccagctcaaaatcctgtccacagtgaaggccaccatgctgggccggaccaacatcagtgatgaggagtctgagcaggccacagagatgctggttcacaatgc

SEQ ID NO: 199160 - DNA, 1892 bp, Homo sapiens
  Payload ID: 19290
  Gene Name: visinin-like 1
  Uniprot ID: P62760
  ENST ID: ENST00000295156
  CDS Start-End: 272-847
gcgcatccagctccagggaccctaggttttctatgggattcccaatctgcagcagagatttacccgagcgtgttgcggcagcggctgggcttgcaaggcgcgatccaagagggatttaagcagcccagagctccagagaaaaagagagcgagagagaaccacacacagagacggcttaagcgtttacccgaattaaatatatatttttaaaaagaactgttgagttttatcattttcgttaagtgaccgtgcgcagcgctgtaactgcaggatggggaagcagaatagcaaactggcccctgaagtgatggaggacctggtgaagagcacagagtttaatgagcatgaactcaagcagtggtacaaaggatttctcaaggactgtccaagtgggaggctaaatctcgaggaatttcagcagctctatgtgaagttctttccttatggagacgcctccaagtttgcccagcatgccttccgaaccttcgacaagaatggggacggcaccattgacttccgagagttcatctgcgctctgtccatcacctccaggggcagctttgagcagaagctgaactgggccttcaatatgtatgacctggatggtgatggcaagatcacccgagtggagatgctggagatcatcgaggctatctacaaaatggtaggcactgtgatcatgatgaaaatgaatgaggatggcctgacgcctgagcagcgagtagacaagattttcagcaagatggataagaacaaagatgaccagattacactggatgaattcaaagaagctgcaaagagcgacccttccattgtattacttctgcagtgcgacatccagaaatgagctgatgtcaatgctatggactgcacaaaagtctcaatgttccattcagtctgcagctattcacacacacacacacacacacacacacacacacacacacacacacaaatattgcttggactacctataaatggacttgcttcttgtgtttgaaacactcgtgtgcatgagaatgtcatttgctaatgaattttaaaagcatatataaaacaaaacaaacaacctgccacaatgtgatatgtgtaatatcatttcataaaaatccctcttcctccaaagcctgggcagaaatgtgctgcaaagagttatatgacttcttgttcatgttttgctaatgctcgtatctccttgattacataatgttagtagcactgagacccccatggtaatgtaacttaattataagctatgtcactaccctcctgtaaaatactattggacagacacagagggacccttggctcctgtgtctggtccacacaccacagaagcttgtattatcagtgaatataaatgtactacatttgcatgccttttgggtttgccttaattcttacctcatttgcatcctatcgatctggaaagagctgttttggatgaatgcagtataaaatgtaaaaaccctgctaaatgacttattgattaagtatatctatctatatatacatatacacaaagatattatttatcgaaagtaaaaaagatggaagtgtattggtttctgtttgaattttcaaaggcttccaatgtggtggcaataaatgtcccaaataaatttataacaattgattttccccctaattcttattttataattttaaaattgcagcagttgctagcaacaacttactaaatctactcttaaatatacaactttggaatttgaagaattaatgacaacaaaagggaaaaaagcaactttccaacttttcatccaggctcccaaaagagggacaacgaacatggcatgtgaaaagtaaaacagatttgttcattccgaaaaaaaaatgttcattctatgacaataaattttatctcagtgtga

SEQ ID NO: 199161 - DNA, 992 bp, Homo sapiens
  Payload ID: 19290
  Gene Name: visinin-like 1
  Uniprot ID: P62760
  ENST ID: ENST00000404666
  CDS Start-End: 283-858
caaccttcccgaggcgtcctgcccgggaagccagttcctgggttctgggctggctaggttggcagcgaatgaggcttaggcatcactgcctgaggccctcacttagcatgtcgacagccacagacttgtctggcggagtttctcctggtgcccacttaagtagtctcaagtttgttcaaagctggactcctcgacttggaaccaggagcagctggagatttgtcaatttagagctcatttgccacgggagacgctcttggtgtccccagcaccgaaggcaggatggggaagcagaatagcaaactggcccctgaagtgatggaggacctggtgaagagcacagagtttaatgagcatgaactcaagcagtggtacaaaggatttctcaaggactgtccaagtgggaggctaaatctcgaggaatttcagcagctctatgtgaagttctttccttatggagacgcctccaagtttgcccagcatgccttccgaaccttcgacaagaatggggacggcaccattgacttccgagagttcatctgcgctctgtccatcacctccaggggcagctttgagcagaagctgaactgggccttcaatatgtatgacctggatggtgatggcaagatcacccgagtggagatgctggagatcatcgaggctatctacaaaatggtaggcactgtgatcatgatgaaaatgaatgaggatggcctgacgcctgagcagcgagtagacaagattttcagcaagatggataagaacaaagatgaccagattacactggatgaattcaaagaagctgcaaagagcgacccttccattgtattacttctgcagtgcgacatccagaaatgagctgatgtcaatgctatggactgcacaaaagtctcaatgttccattcagtctgcagctattcacacacacacacacacacacacacacacacacacacacacacacaaatattgcttggactacctataaatgg

SEQ ID NO: 199162 - DNA, 2725 bp, Homo sapiens
  Payload ID: 19290
  Gene Name: visinin-like 1
  Uniprot ID: P62760
  ENST ID: ENST00000406397
  CDS Start-End: 526-1101
agactagatttaagacaggtgaaactgagatgctttcttagtttgtcttagacagatttaagtagctaattgaccgattgtgaagttttccggttgctgataaaactattgagcgggtacagtcgagtagcaacctgtcatccgtgggattggtgcaccatttttctcactgtggaagggcagcaaaggtgtttgctaagtaaaactgagtggatgagattggtatggaaatcatggttgatctctgagcgggatgttagtgtttaagatccacggagtcaggcgcaaaatgagcacatttctctcagtattcagaaatgagtagataatttttttcgtctttgatttttgtcacaatggtgaatgggcagaaaagggaaagatgctctactgcactgtcgattttgaacggagtcacaggctcggtcgctgaatggggactgtcagacccaaactagttacctgcctttgcattccgtgttcgccatccggaatctggggttaaaaaatgtaaatcaaggcaggatggggaagcagaatagcaaactggcccctgaagtgatggaggacctggtgaagagcacagagtttaatgagcatgaactcaagcagtggtacaaaggatttctcaaggactgtccaagtgggaggctaaatctcgaggaatttcagcagctctatgtgaagttctttccttatggagacgcctccaagtttgcccagcatgccttccgaaccttcgacaagaatggggacggcaccattgacttccgagagttcatctgcgctctgtccatcacctccaggggcagctttgagcagaagctgaactgggccttcaatatgtatgacctggatggtgatggcaagatcacccgagtggagatgctggagatcatcgaggctatctacaaaatggtaggcactgtgatcatgatgaaaatgaatgaggatggcctgacgcctgagcagcgagtagacaagattttcagcaagatggataagaacaaagatgaccagattacactggatgaattcaaagaagctgcaaagagcgacccttccattgtattacttctgcagtgcgacatccagaaatgagctgatgtcaatgctatggactgcacaaaagtctcaatgttccattcagtctgcagctattcacacacacacacacacacacacacacacacacacacacacacacaaatattgcttggactacctataaatggacttgcttcttgtgtttgaaacactcgtgtgcatgagaatgtcatttgctaatgaattttaaaagcatatataaaacaaaacaaacaacctgccacaatgtgatatgtgtaatatcatttcataaaaatccctcttcctccaaagcctgggcagaaatgtgctgcaaagagttatatgacttcttgttcatgttttgctaatgctcgtatctccttgattacataatgttagtagcactgagacccccatggtaatgtaacttaattataagctatgtcactaccctcctgtaaaatactattggacagacacagagggacccttggctcctgtgtctggtccacacaccacagaagcttgtattatcagtgaatataaatgtactacatttgcatgccttttgggtttgccttaattcttacctcatttgcatcctatcgatctggaaagagctgttttggatgaatgcagtataaaatgtaaaaaccctgctaaatgacttattgattaagtatatctatctatatatacatatacacaaagatattatttatcgaaagtaaaaaagatggaagtgtattggtttctgtttgaattttcaaaggcttccaatgtggtggcaataaatgtcccaaataaatttataacaattgattttccccctaattcttattttataattttaaaattgcagcagttgctagcaacaacttactaaatctactcttaaatatacaactttggaatttgaagaattaatgacaacaaaagggaaaaaagcaactttccaacttttcatccaggctcccaaaagagggacaacgaacatggcatgtgaaaagtaaaacagatttgttcattccgaaaaaaaaatgttcattctatgacaataaattttatctcagtgtgactttggtgctaacaacgtatgttcagtgcaactacgtggagctgtgcacacacagcaggtaggctgcaggtgtcccccaacataagtcagtaggaaagaagacatctgtcttcccaaatctaaagtaggcaaaaaataacagaagtagctatttttaataacagaacagaactctgactcttttgatcttgaaggaggcagaagagattccatcaaaacctctaaaagcaggtttgcattttcagaacatgcccccctagagagttgagttttttacacagcactacccggtagtactttctctgatgatgggaaggtctacatctgcacagcacgctagctataactgcacatatggctactgagcacttcaagtatggctagcgtgactaaggaactgaattttatactgtaattaagtgtaatttgccacatatagctagtggctttagtaacagacagtttagtgctatattatttattcaagtactttttatcaaattcgttttttaccgaattcgttttttaccattctttatttgtcttaggatcattacataacactaaactagggtctaa

SEQ ID NO: 199163 - DNA, 562 bp, Homo sapiens
  Payload ID: 19290
  Gene Name: visinin-like 1
  ENST ID: ENST00000451533
  CDS Start-End: 250-562
aatctgcagcagagatttacccgagcgtgttgcggcagcggctgggcttgcaaggcgcgatccaagagggatttaagcagcccagagctccagagaaaaagagagcgagagagaaccacacacagagacggcttaagcgtttacccgaattaaatatatatttttaaaaagaactgttgagttttatcattttcgttaagtgaccgtgcgcagcgctgtaactgacttactggattatttccaggcaggatggggaagcagaatagcaaactggcccctgaagtgatggaggacctggtgaagagcacagagtttaatgagcatgaactcaagcagtggtacaaaggatttctcaaggactgtccaagtgggaggctaaatctcgaggaatttcagcagctctatgtgaagttctttccttatggagacgcctccaagtttgcccagcatgccttccgaaccttcgacaagaatggggacggcaccattgacttccgagagttcatctgcgctctgtccatcacctccaggggcagctttgagcagaagctgaactgggcct

SEQ ID NO: 199164 - DNA, 576 bp, Homo sapiens
  Payload ID: 19290
  Gene Name: visinin-like 1
  ENST ID: ENST00000457525
  CDS Start-End: 222-576
agtgcatacagaaggcgcttggctcagggtacacagggcaagaagcctcggatcccagctccctttaacacacattttttcaacgccgttctggaccgagactgtccggggcactgggtgctgcaggacccggctcccagtactcctagcagaagaccctctgatgaaatggcccatgacaaaatgaccaccataaccgttccttcagtaagccaggcaggatggggaagcagaatagcaaactggcccctgaagtgatggaggacctggtgaagagcacagagtttaatgagcatgaactcaagcagtggtacaaaggatttctcaaggactgtccaagtgggaggctaaatctcgaggaatttcagcagctctatgtgaagttctttccttatggagacgcctccaagtttgcccagcatgccttccgaaccttcgacaagaatggggacggcaccattgacttccgagagttcatctgcgctctgtccatcacctccaggggcagctttgagcagaagctgaactgggccttcaatatgtatgacctggatggtgatggcaagatcacccgag

SEQ ID NO: 199165 - DNA, 943 bp, Homo sapiens
  Payload ID: 19291
  Gene Name: visual system homeobox 1
  Uniprot ID: Q9NZR4
  ENST ID: ENST00000376707
  CDS Start-End: 36-755
tccagagaggctcgcgccttgcttgctaaggaaccatgaccggccgggactcgctttccgacgggcgcactagcagcagggcgctggtgcctggcggttcccctaggggctcgcgcccccggggcttcgccatcacggacctgctgggcttggaggccgagctgccggcgcccgctggcccaggacagggatctggctgcgagggtccggcagtcgcgccgtgcccgggcccggggcttgacggctccagcctggcgcgtggggccctaccgctgggactcggcctcctctgtggcttcggcacgcagccgccggcggccgctcgagcaccctgcctgctcctagcggacgtgccgttcctgccgcccaggggccccgagcccgctgccccgctggctcccagccgtccgccgcctgcgctcggccgccagaagcgcagcgacagcgtctccacgtccgatgaggacagccagtctgaagacaggaatgacctaaaggcatcccccaccttgggcaagaggaagaagcggcggcacaggacagttttcactgctcaccagctggaagagttggagaaggcattcagcgaggcccactaccctgatgtgtatgcccgagaaatgctggctgtgaaaactgagctccccgaagaccggatacaggtgtctggggtcccttttctccgctccaaagataccacagagaacgtgtcattcccacattcagtgagccaatcagcagtcccttctctatagccaacacgctccctttgcatagaaactgagggtcccttagctgaaggcaccacaagagcttgcccctatgaccctcatgccttttttcattttattattatttagtatcaaatcattctttaaaatcacatgataatgtgtgctgcaactagaaactataaagatatgtcaatgaaaaaaaaaaaaaa

SEQ ID NO: 199166 - DNA, 2192 bp, Homo sapiens
  Payload ID: 19291
  Gene Name: visual system homeobox 1
  Uniprot ID: Q9NZR4
  ENST ID: ENST00000376709
  CDS Start-End: 270-1367
ggggtggggtggggtgggctggacagaagagaggaggagaaggaggtgactgaggggactgcagctgggtgggcggtaaccgaggggaggggaactggtggcgtccccatctcgcggggtccggaacggcgacgcgcccgcgcccagctgattggagcccttcaggcctcccgcgcccgaccggcagcccaatcctataaagcttcctctaagctgggccctccgcaaacgggatccagagaggctcgcgccttgcttgctaaggaaccatgaccggccgggactcgctttccgacgggcgcactagcagcagggcgctggtgcctggcggttcccctaggggctcgcgcccccggggcttcgccatcacggacctgctgggcttggaggccgagctgccggcgcccgctggcccaggacagggatctggctgcgagggtccggcagtcgcgccgtgcccgggcccggggcttgacggctccagcctggcgcgtggggccctaccgctgggactcggcctcctctgtggcttcggcacgcagccgccggcggccgctcgagcaccctgcctgctcctagcggacgtgccgttcctgccgcccaggggccccgagcccgctgccccgctggctcccagccgtccgccgcctgcgctcggccgccagaagcgcagcgacagcgtctccacgtccgatgaggacagccagtctgaagacaggaatgacctaaaggcatcccccaccttgggcaagaggaagaagcggcggcacaggacagttttcactgctcaccagctggaagagttggagaaggcattcagcgaggcccactaccctgatgtgtatgcccgagaaatgctggctgtgaaaactgagctccccgaagaccggatacaggtctggtttcaaaaccgcagggccaaatggcgcaagcgggagaagcgctggggcggcagcagcgtgatggccgagtacgggctgtacggggccatggtgcgccactgcatcccgctgccagactccgtgctcaactccgccgagggcggcctgctgggctcctgcgcgccctggctcctggggatgcataaaaaatccatggggatgataaggaagccaggaagtgaagataagttggcaggactctggggctctgaccacttcaaagaaggttctagccagagtgagtcaggatcacagagaggctcagataaagtgagccctgagaatggcttggaagatgtggctattgacctctccagctctgcccggcaggagaccaagaaagtgcaccctggggctggtgctcaaggaggctccaactccacggcactggaggggccccagccagggaaggtgggagccacatgagacccacaggtcccactgtcaaaggctgaaaatgtgcatattcctcactggcattttccaaaagacaaaaattgtccaagacatatactctcagtttgattttcttctgacaatgtcaagataaaatgcaatgccacttgctttaagaggacagatgagtgacctagggaaaattctatttcattctagaatggaaacggttccttaatggcactttaaccagttaacttggtgcaaaacttttgattctcttttgtagcttgagcagggaggatccgaagttcaaaaatgatttcactgctgggcatcatttgagatgtgtggttcaatgtactgtatagatgaataggttaggtctgatgtcctcattctcaattaggaaatataaaattgtttaatatccagaagaatctgatatcatcatagtgaagactccatacagacacatgaatgaattatattgtctttaccttgaacttggccttggatatttcaattttcttgttagggagtaattttgtgttttcttgagtgtcacttgataggctatgcatattggaattcaaagaaacccatactctagtcgtttctgcatttcctttaaaaatagcatgggatcatatttaaacaattgttggatagctggaaacagtgtttttaggtcagaccaggcttttggtctttcaaaatttgtgattgaaagcactttagtgacttggattttgtaaatctttcctttcctgcgtttcctttgccatttatttattctttaaaaataaacattttgtggtgtgtttacttttcaaggcactcctctattacaca

SEQ ID NO: 199167 - DNA, 1486 bp, Homo sapiens
  Payload ID: 19291
  Gene Name: visual system homeobox 1
  Uniprot ID: Q9NZR4
  ENST ID: ENST00000409285
  CDS Start-End: 36-878
tccagagaggctcgcgccttgcttgctaaggaaccatgaccggccgggactcgctttccgacgggcgcactagcagcagggcgctggtgcctggcggttcccctaggggctcgcgcccccggggcttcgccatcacggacctgctgggcttggaggccgagctgccggcgcccgctggcccaggacagggatctggctgcgagggtccggcagtcgcgccgtgcccgggcccggggcttgacggctccagcctggcgcgtggggccctaccgctgggactcggcctcctctgtggcttcggcacgcagccgccggcggccgctcgagcaccctgcctgctcctagcggacgtgccgttcctgccgcccaggggccccgagcccgctgccccgctggctcccagccgtccgccgcctgcgctcggccgccagaagcgcagcgacagcgtctccacgtccgatgaggacagccagtctgaagacaggaatgacctaaaggcatcccccaccttgggcaagaggaagaagcggcggcacaggacagttttcactgctcaccagctggaagagttggagaaggcattcagcgaggcccactaccctgatgtgtatgcccgagaaatgctggctgtgaaaactgagctccccgaagaccggatacaggtctggtttcaaaaccgcagggccaaatggcgcaagcgggagaagcgctggggcggcagcagcgtgatggccgagtacgggctgtacggggccatggtgcgccactgcatcccgctgccagactccgtgctcaactccgccgagggcggcctgctgggctcctgcgcgccctggctcctggagggtgagacattgggctgcagagaaatgaagtgaacctgctaagccgattgtcaaatggatgagaaactcagagccaaggatcgggaaaacacccttaaagaacgagtgcaaacttctgctcctggaggctcccgttcactggactttgcaggagacacacaggctccccagaccccgtggtggtgcctgatgaccttcagctgaaccctgtaatgctgctaaagtctgcccctctggagaagtgctcaggtagcattgttctgcctcaggaagcatgccgattttcctgtgtcatccttgatgatcactgctaccagacttgccccctgcagggcaccccatgtgcaaggaattcaacaacctaggagttgaaagcattggtctcccaagttcagtgtgttcttttccgtatctattaccagctgatgagaataaacctgcagtcatgacagctaggtcctagtgacaggtgcagaaagctgctcttacagaaactcccctccttattaagaggctttgtctatcactcggaactgcttctactcaagattatctgttgaaagggaactgtccataccagggcattgttctgacttttctggacttcctcaacccaaaatgccttgaagaaaaaaaaaaaa

SEQ ID NO: 199168 - DNA, 1305 bp, Homo sapiens
  Payload ID: 19291
  Gene Name: visual system homeobox 1
  Uniprot ID: Q9NZR4
  ENST ID: ENST00000409958
  CDS Start-End: 36-692
tccagagaggctcgcgccttgcttgctaaggaaccatgaccggccgggactcgctttccgacgggcgcactagcagcagggcgctggtgcctggcggttcccctaggggctcgcgcccccggggcttcgccatcacggacctgctgggcttggaggccgagctgccggcgcccgctggcccaggacagggatctggctgcgagggtccggcagtcgcgccgtgcccgggcccggggcttgacggctccagcctggcgcgtggggccctaccgctgggactcggcctcctctgtggcttcggcacgcagccgccggcggccgctcgagcaccctgcctgctcctagcggacgtgccgttcctgccgcccaggggccccgagcccgctgccccgctggctcccagccgtccgccgcctgcgctcggccgccagaagcgcagcgacagcgtctccacgtccgatgaggacagccagtctgaagacaggaatgacctaaaggcatcccccaccttgggcaagaggaagaagcggcggcacaggacagttttcactgctcaccagctggaagagttggagaaggcattcagcgaggcccactaccctgatgtgtatgcccgagaaatgctggctgtgaaaactgagctccccgaagaccggatacagagggtgagacattgggctgcagagaaatgaagtgaacctgctaagccgattgtcaaatggatgagaaactcagagccaaggatcgggaaaacacccttaaagaacgagtgcaaacttctgctcctggaggctcccgttcactggactttgcaggagacacacaggctccccagaccccgtggtggtgcctgatgaccttcagctgaaccctgtaatgctgctaaagtctgcccctctggagaagtgctcaggtagcattgttctgcctcaggaagcatgccgattttcctgtgtcatccttgatgatcactgctaccagacttgccccctgcagggcaccccatgtgcaaggaattcaacaacctaggagttgaaagcattggtctcccaagttcagtgtgttcttttccgtatctattaccagctgatgagaataaacctgcagtcatgacagctaggtcctagtgacaggtgcagaaagctgctcttacagaaactcccctccttattaagaggctttgtctatcactcggaactgcttctactcaagattatctgttgaaagggaactgtccataccagggcattgttctgacttttctggacttcctcaacccaaaatgccttgaagaaaaaaaaaaaa

SEQ ID NO: 199169 - DNA, 1197 bp, Homo sapiens
  Payload ID: 19291
  Gene Name: visual system homeobox 1
  Uniprot ID: Q9NZR4
  ENST ID: ENST00000444511
  CDS Start-End: 36-746
tccagagaggctcgcgccttgcttgctaaggaaccatgaccggccgggactcgctttccgacgggcgcactagcagcagggcgctggtgcctggcggttcccctaggggctcgcgcccccggggcttcgccatcacggacctgctgggcttggaggccgagctgccggcgcccgctggcccaggacagggatctggctgcgagggtccggcagtcgcgccgtgcccgggcccggggcttgacggctccagcctggcgcgtggggccctaccgctgggactcggcctcctctgtggcttcggcacgcagccgccggcggccgctcgagcaccctgcctgctcctagcggacgtgccgttcctgccgcccaggggccccgagcccgctgccccgctggctcccagccgtccgccgcctgcgctcggccgccagaagcgcagcgacagcgtctccacgtccgatgaggacagccagtctgaagacaggaatgacctaaaggcatcccccaccttgggcaagaggaagaagcggcggcacaggacagttttcactgctcaccagctggaagagttggagaaggcattcagcgaggcccactaccctgatgtgtatgcccgagaaatgctggctgtgaaaactgagctccccgaagaccggatacagtgcaaacttctgctcctggaggctcccgttcactggactttgcaggagacacacaggctccccagaccccgtggtggtgcctgatgaccttcagctgaaccctgtaatgctgctaaagtctgcccctctggagaagtgctcaggtagcattgttctgcctcaggaagcatgccgattttcctgtgtcatccttgatgatcactgctaccagacttgccccctgcagggcaccccatgtgcaaggaattcaacaacctaggagttgaaagcattggtctcccaagttcagtgtgttcttttccgtatctattaccagctgatgagaataaacctgcagtcatgacagctaggtcctagtgacaggtgcagaaagctgctcttacagaaactcccctccttattaagaggctttgtctatcactcggaactgcttctactcaagattatctgttgaaagggaactgtccataccagggcattgttctgacttttctggacttcctcaacccaaaatgccttgaagaaaaaaaaaaaa

SEQ ID NO: 199170 - DNA, 1977 bp, Homo sapiens
  Payload ID: 19291
  Gene Name: visual system homeobox 1
  Uniprot ID: Q9NZR4
  ENST ID: ENST00000429762
  CDS Start-End: 36-941
tccagagaggctcgcgccttgcttgctaaggaaccatgaccggccgggactcgctttccgacgggcgcactagcagcagggcgctggtgcctggcggttcccctaggggctcgcgcccccggggcttcgccatcacggacctgctgggcttggaggccgagctgccggcgcccgctggcccaggacagggatctggctgcgagggtccggcagtcgcgccgtgcccgggcccggggcttgacggctccagcctggcgcgtggggccctaccgctgggactcggcctcctctgtggcttcggcacgcagccgccggcggccgctcgagcaccctgcctgctcctagcggacgtgccgttcctgccgcccaggggccccgagcccgctgccccgctggctcccagccgtccgccgcctgcgctcggccgccagaagcgcagcgacagcgtctccacgtccgatgaggacagccagtctgaagacaggaatgacctaaaggcatcccccaccttgggcaagaggaagaagcggcggcacaggacagttttcactgctcaccagctggaagagttggagaaggcattcagcgaggcccactaccctgatgtgtatgcccgagaaatgctggctgtgaaaactgagctccccgaagaccggatacaggtctggtttcaaaaccgcagggccaaatggcgcaagcgggagaagcgctggggcggcagcagcgtgatggccgagtacgggctgtacggggccatggtgcgccactgcatcccgctgccagactccgtgctcaactccgccgagggcggcctgctgggctcctgcgcgccctggctcctggtgcaaacttctgctcctggaggctcccgttcactggactttgcaggagacacacaggctccccagaccccgtggtggtgcctgatgaccttcagctgaaccctgtaatgctgctaaagtctgcccctctggagaagtgctcaggtagcattgttctgcctcaggaagcatgccgattttcctgtgtcatccttgatgatcactgctaccagacttgccccctgcagggcaccccatgtgcaaggaattcaacaacctaggagttgaaagcattggtctcccaagttcagtgtgttcttttccgtatctattaccagctgatgagaataaacctgcagtcatgacagctaggtcctagtgacaggtgcagaaagctgctcttacagaaactcccctccttattaagaggctttgtctatcactcggaactgcttctactcaagattatctgttgaaagggaactgtccataccagggcattgttctgacttttctggacttcctcaacccaaaatgccttgaagaaaaaaaaaaaagaccctgagtgttagggcagggtctcactctgtctccaggctggagtgcagtggcacaatcatagctcaccgcaacctctaactcctgggctgaagtgatcctcccacctcagtctcctatgttgctaggattacagcgtgagccactgccccagctactccaacttaagagttcccccaaggctggctgcccttctcctctccttccatcatgaatgacacatgggcatccccttcggctagcatggctgacctgtgcctgcctgggtgctcagcttggcacccatgtgagtttgcagcctgaaattttaaatggaggagtttctgtgcttttctgccctgattcctcttactgaccctctaagtcaccagctgtggtcgtctcctctttgacccctgatctcaacccgggctttgaaatgtgtttgttcacataattgtccattacccatccttcctgtcattgcagaatctgttgtctcatactgacattttaagactttttttcactttcttctgttgaagatcacctactaagaagtacttcctccttttcattctttctttataagaattaattaaattttaattgacaaaaa

SEQ ID NO: 199171 - DNA, 2995 bp, Homo sapiens
  Payload ID: 19292
  Gene Name: visual system homeobox 2
  Uniprot ID: P58304
  ENST ID: ENST00000261980
  CDS Start-End: 91-1176
cctgggaccaacttcgcgaagcgggaagcccggcgggggggtggggggagctaaagacctgcggcctcagcccctccaaagaacagggagatgacggggaaagcaggggaagcgctgagcaagcccaaatccgagacagtggccaagagtacctcggggggcgccccggccaggtgcactgggttcggcatccaggagatcctgggcttgaacaaggagcccccgagctcccacccgcgggcagcgctcgacggcctggcccccgggcacttgctggcggcgcgctcagtgctcagccccgcgggggtgggcggcatggggcttctggggcccggggggctccctggcttctacacgcagcccaccttcctggaagtgctgtccgacccgcagagcgtccacttgcagccattgggcagagcatcggggccgctggacaccagccagacggccagctcggattctgaagatgtttcctccagcgatcgaaaaatgtccaaatctgctttaaaccagaccaagaaacggaagaagcggcgacacaggacaatctttacctcctaccagctagaggagctggagaaggcattcaacgaagcccactacccagacgtctatgcccgggagatgctggccatgaaaacggagctgccggaagacaggatacaggtctggttccagaaccgtcgagccaagtggaggaagcgggagaagtgctggggccggagcagtgtcatggcggagtatgggctctacggggccatggtgcggcactccatccccctgcccgagtccatcctcaagtcagccaaggatggcatcatggactcctgtgccccgtggctactggggatgcacaaaaagtcgctggaggcagcagccgagtcggggaggaagcccgagggggaacgccaggccctgcccaagctcgacaagatggagcaggacgagcggggccccgacgctcaggcggccatctcccaggaggaactgagggagaacagcattgcggtgctccgggccaaagctcaggagcacagcaccaaagtgctggggactgtgtctgggccggacagcctggcccggagtaccgagaagccagaggaggaggaggccatggatgaagacaggccggcggagaggctcagtccaccgcagctggaggacatggcttaggtcaaggcgcgctcagatgccggagccccaagactctgctctcctcgggccctgtggtgctgggagatgctctctgaggcaaggcccagacctggcctctgccatcctccctgttccccacaggtcctccatcacccctggtggctgcaggcaccgctgggttctgactctggaccatgctgagacatccctcatctagtcttgacctctccagcatcccagcctcagaagccttcttgctgcccacaacgtcccctcaagccccttctctcaatccctttgcaacgctcactggttttggccaccccttgctctctgttctcttgctttaaagagtcctccttcccagctctacattctgctctgcccatgcctaaagcccattgctgcaaatgcattgtgaattgcctgccatggctgtgacacagacggaggactggaactgcaactccagcgtcctcagcaccccactcctcagtaaaagtcttctcccaactcagcctgttccttcctgcagacctggctgggcctgggcttccacagtgtgaagacactgtgcaggcccaggcaggcccagcctctgccccacccatcagtggagtccagatggcaggctacagttgggaagtctcagcctgggcccctcagccacccttggtctcatgccccgccatggtcaccctcaggaacccaccctctccacacccagcctgtcccactggctcctcccagcacaggcacctatgtggcatgtggtgatgtacgctgcgtgccatgagtccatgtcctatgcctcacaaatgctgtggttcactgcactgttcaggagtccaaaccttctaccctgggtcctcgggcccctgagcctgtgtcctgaagaatctcgactctcgtgatatgctgcttgtgaccttgacttgccatgaaggcacctgcccccacagctccttgcaaactatgagttcacatgtgccctgccttgaacaacccaatctggctggtaaatgacatctacgaagccacaggcctggcctcaactgagaagccaagcctggagtaggcctggggctatgcatacgcattaagggcctgctggagaaaccttcactccagacagacagggggctaaggggctagggctgagcacctctcagagcaagcctttgacctgttcagaaggatgggaaaaaggctggaaggaaagcaaggcagaaggccaggagtaagcccaagctaagctgcaggcacacacgccttcatgccagtgcatgccaggaagcacgttcactagactaaaacacggtaaccatgatggaataaggagctggggcttctttctgctggctgatgggtggacctgtgtatggtgacctctccggcctggccttttccattcgcatgaacaatgggagcacatagccctgttgacctgcccgatccagattcccaggccaggctcccgaccccatccacctatccaccaccccacccacctttgcagggaatacctcgttagagaatggcctgagacagtgcgttgcaactttttaattccatatcaaaagttgatttcttcttcattccatttatggaacttccctccccctagtccggttcttcttgtctttgtccctgttggtttgaagtgttagactatagcccctggtgtgtaaataatgtacatagagtgagaagaaagaaacttgatattgaggtgtttgaaatatggaactgtaataacttctaggtattcgaaacctgtgatttctgtgccattttctgtaaagatacaagtaagaataaaattgacttaaaaata

SEQ ID NO: 199172 - DNA, 4773 bp, Homo sapiens
  Payload ID: 19293
  Gene Name: vitamin D (1,25- dihydroxyvitamin D3) receptor
  Uniprot ID: P11473
  ENST ID: ENST00000229022
  CDS Start-End: 283-1566
ctgcttgtcaaaaggcggcagcggagccgtgtgcgccgggagcgcggaacagcttgtccacccgccggccggaccagggctcctgaacctagcccagctggacggagaaatggactctagcctcctctgatagcctcatgccaggccccgtgcacattgctttgcttgcctccctcaatcctcatagcttctctttgggaagcctttgggtctgaagtgtctgtgagacctcacagaagagcacccctgggctccacttacctgccccctgctccttcagggatggaggcaatggcggccagcacttccctgcctgaccctggagactttgaccggaacgtgccccggatctgtggggtgtgtggagaccgagccactggctttcacttcaatgctatgacctgtgaaggctgcaaaggcttcttcaggcgaagcatgaagcggaaggcactattcacctgccccttcaacggggactgccgcatcaccaaggacaaccgacgccactgccaggcctgccggctcaaacgctgtgtggacatcggcatgatgaaggagttcattctgacagatgaggaagtgcagaggaagcgggagatgatcctgaagcggaaggaggaggaggccttgaaggacagtctgcggcccaagctgtctgaggagcagcagcgcatcattgccatactgctggacgcccaccataagacctacgaccccacctactccgacttctgccagttccggcctccagttcgtgtgaatgatggtggagggagccatccttccaggcccaactccagacacactcccagcttctctggggactcctcctcctcctgctcagatcactgtatcacctcttcagacatgatggactcgtccagcttctccaatctggatctgagtgaagaagattcagatgacccttctgtgaccctagagctgtcccagctctccatgctgccccacctggctgacctggtcagttacagcatccaaaaggtcattggctttgctaagatgataccaggattcagagacctcacctctgaggaccagatcgtactgctgaagtcaagtgccattgaggtcatcatgttgcgctccaatgagtccttcaccatggacgacatgtcctggacctgtggcaaccaagactacaagtaccgcgtcagtgacgtgaccaaagccggacacagcctggagctgattgagcccctcatcaagttccaggtgggactgaagaagctgaacttgcatgaggaggagcatgtcctgctcatggccatctgcatcgtctccccagatcgtcctggggtgcaggacgccgcgctgattgaggccatccaggaccgcctgtccaacacactgcagacgtacatccgctgccgccacccgcccccgggcagccacctgctctatgccaagatgatccagaagctagccgacctgcgcagcctcaatgaggagcactccaagcagtaccgctgcctctccttccagcctgagtgcagcatgaagctaacgccccttgtgctcgaagtgtttggcaatgagatctcctgactaggacagcctgtggcggtgcctgggtggggctgctcctccagggccacgtgccaggcccggggctggcggctactcagcagccctcctcaccccgtctggggttcagcccctcctctgccacctcccctatccacccagcccattctctctcctgtccaacctaacccctttcctgcgggcttttccccggtcccttgagacctcagccatgaggagttgctgtttgtttgacaaagaaacccaagtgggggcagagggcagaggctggaggcagggccttgcccagagatgcctccaccgctgcctaagtggctgctgactgatgttgagggaacagacaggagaaatgcatccattcctcagggacagagacacctgcacctccccccactgcaggccccgcttgtccagcgcctagtggggtctccctctcctgcctactcacgataaataatcggcccacagctcccaccccacccccttcagtgcccaccaacatcccattgccctggttatattctcacgggcagtagctgtggtgaggtgggttttcttcccatcactggagcaccaggcacgaacccacctgctgagagacccaaggaggaaaaacagacaaaaacagcctcacagaagaatatgacagctgtccctgtcaccaagctcacagttcctcgccctgggtctaaggggttggttgaggtggaagccctccttccacggatccatgtagcaggactgaattgtccccagtttgcagaaaagcacctgccgacctcgtcctccccctgccagtgccttacctcctgcccaggagagccagccctccctgtcctcctcggatcaccgagagtagccgagagcctgctcccccaccccctccccaggggagagggtctggagaagcagtgagccgcatcttctccatctggcagggtgggatggaggagaagaattttcagaccccagcggctgagtcatgatctccctgccgcctcaatgtggttgcaaggccgctgttcacccacagggctaagagctagcgctgccgcaccccagagtgtgggaagggagagcggggcagtctcgggtggctagtcagagagagtgtttgggggttccgtgatgtagggtaaggtgccttcttattctcactccaccacccaaaagtcaaaaggtgcctgtgaggcaggggcggagtgatacaacttcaagtgcatgctctctgcagccagcccagcccagctggtgggaagcgtctgtccgtttactccaaggtggggtctttgtgagagtgagctgtaggtgtgcgggaccggtacagaaaggcgttcttcgaggtggatcacagaggcttcttcagatcagtgcttgagtttggggaatgcggccgcattccctgagtcaccaggaatgttaaagtcagtgggaacgtgactgccccaactcctggaagctgtgtccttgcacctgcatccgtagttccctgaaaacccagagaggaatcagacttcacactgcaagagccttggtgtccacctggccccatgtctctcagaattcttcaggtggaaaaacatctgaaagccacgttccttactgcagaatagcatatatatcgcttaatcttaaatttattagatatgagttgttttcagactcagactccatttgtattatagtctaatatacagggtagcaggtaccactgatttggagatatttatggggggagaacttacattgtgaaacttctgtacattaattattattgctgttgttattttacaagggtctagggagagacccttgtttgattttagctgcagaacgtattggtccagcttgctcttcagtgggagaaaacacttgtaagttgctaaacgagtcaatcccctcattcaggaaaactgacagaggagggcgtgactcacccaagcatatataactagctagaagtgggccaggacaggcccggcgcggtggctcacgcctgtaatcccagcagtttgggaggtcgaggtaggtggatcacctgaggtcgggagttcgagaccaacctgaccaacatggagaaaccctgtctctattaaaaatacaaaaaaaaaaaaaaaaaaaatagccgggcatggtggcgcaagcctgtaatcccagctactcaggaggctgaggcagaagaattgaacccaggaggtggaggttgcagtgagctgagatcgtgccgttactctccaacctggacaacaagagcgaaactccgtcttagaagtggaccaggacaggaccagattttggagtcatggtccggtgtccttttcactacaccatgtttgagctcagacccccactctcattccccaggtggctgacccagtccctgggggaagccctggatttcagaaagagcaagtctggatctgggaccctttccttccttccctggcttgtaactccaccaacccatcagaaggagaaggaaggagactcacctctgcctcaatgtgaatcagaccctaccccaccacgatgtggccctggcctgctgggctctccacctcagccttggataatgctgttgcctcatctataacatgcatttgtctttgtaatgtcaccaccttcccagctctccctctggccctgccttcttcggggaactcctggaaatatcagttactcagccctgggccccaccacctaggccactcctccaaaggaagtctaggagctgggaggaaaagaaaagaggggaaaatgagtttttatggggctgaacggggagaaaaggtcatcatcgattctactttagaatgagagtgtgaaatagacatttgtaaatgtaaaacttttaaggtatatcattataactgaaggagaaggtgccccaaaatgcaagattttccacaagattcccagagacaggaaaatcctctggctggctaactggaagcatgtaggagaatccaagcgaggtcaacagagaaggcaggaatgtgtggcagatttagtgaaagctagagatatggcagcgaaaggatgtaaacagtgcctgctgaatgatttccaaagagaaaaaaagtttgccagaagtttgtcaagtcaaccaatgtagaaagctttgcttatggtaataaaaatggctcatacttatatagcacttactttgttgcaagtactgctgtaaataaatgctttatgcaaacc

SEQ ID NO: 199173 - DNA, 4762 bp, Homo sapiens
  Payload ID: 19293
  Gene Name: vitamin D (1,25- dihydroxyvitamin D3) receptor
  Uniprot ID: P11473
  ENST ID: ENST00000395324
  CDS Start-End: 270-1553
ggggacaggggtgaggccagagacggacggacgcaggggcccggcccaaggcgagggagaacagcggcactgaggcagaaaggaagagggcggtgtgttcacccgcagcccaatccatcactcagcaactcctagacgctggtagaaagttcctccgaggagcctgccatccagtcgtgcgtgcagaagcctttgggtctgaagtgtctgtgagacctcacagaagagcacccctgggctccacttacctgccccctgctccttcagggatggaggcaatggcggccagcacttccctgcctgaccctggagactttgaccggaacgtgccccggatctgtggggtgtgtggagaccgagccactggctttcacttcaatgctatgacctgtgaaggctgcaaaggcttcttcaggcgaagcatgaagcggaaggcactattcacctgccccttcaacggggactgccgcatcaccaaggacaaccgacgccactgccaggcctgccggctcaaacgctgtgtggacatcggcatgatgaaggagttcattctgacagatgaggaagtgcagaggaagcgggagatgatcctgaagcggaaggaggaggaggccttgaaggacagtctgcggcccaagctgtctgaggagcagcagcgcatcattgccatactgctggacgcccaccataagacctacgaccccacctactccgacttctgccagttccggcctccagttcgtgtgaatgatggtggagggagccatccttccaggcccaactccagacacactcccagcttctctggggactcctcctcctcctgctcagatcactgtatcacctcttcagacatgatggactcgtccagcttctccaatctggatctgagtgaagaagattcagatgacccttctgtgaccctagagctgtcccagctctccatgctgccccacctggctgacctggtcagttacagcatccaaaaggtcattggctttgctaagatgataccaggattcagagacctcacctctgaggaccagatcgtactgctgaagtcaagtgccattgaggtcatcatgttgcgctccaatgagtccttcaccatggacgacatgtcctggacctgtggcaaccaagactacaagtaccgcgtcagtgacgtgaccaaagccggacacagcctggagctgattgagcccctcatcaagttccaggtgggactgaagaagctgaacttgcatgaggaggagcatgtcctgctcatggccatctgcatcgtctccccagatcgtcctggggtgcaggacgccgcgctgattgaggccatccaggaccgcctgtccaacacactgcagacgtacatccgctgccgccacccgcccccgggcagccacctgctctatgccaagatgatccagaagctagccgacctgcgcagcctcaatgaggagcactccaagcagtaccgctgcctctccttccagcctgagtgcagcatgaagctaacgccccttgtgctcgaagtgtttggcaatgagatctcctgactaggacagcctgtggcggtgcctgggtggggctgctcctccagggccacgtgccaggcccggggctggcggctactcagcagccctcctcaccccgtctggggttcagcccctcctctgccacctcccctatccacccagcccattctctctcctgtccaacctaacccctttcctgcgggcttttccccggtcccttgagacctcagccatgaggagttgctgtttgtttgacaaagaaacccaagtgggggcagagggcagaggctggaggcagggccttgcccagagatgcctccaccgctgcctaagtggctgctgactgatgttgagggaacagacaggagaaatgcatccattcctcagggacagagacacctgcacctccccccactgcaggccccgcttgtccagcgcctagtggggtctccctctcctgcctactcacgataaataatcggcccacagctcccaccccacccccttcagtgcccaccaacatcccattgccctggttatattctcacgggcagtagctgtggtgaggtgggttttcttcccatcactggagcaccaggcacgaacccacctgctgagagacccaaggaggaaaaacagacaaaaacagcctcacagaagaatatgacagctgtccctgtcaccaagctcacagttcctcgccctgggtctaaggggttggttgaggtggaagccctccttccacggatccatgtagcaggactgaattgtccccagtttgcagaaaagcacctgccgacctcgtcctccccctgccagtgccttacctcctgcccaggagagccagccctccctgtcctcctcggatcaccgagagtagccgagagcctgctcccccaccccctccccaggggagagggtctggagaagcagtgagccgcatcttctccatctggcagggtgggatggaggagaagaattttcagaccccagcggctgagtcatgatctccctgccgcctcaatgtggttgcaaggccgctgttcacccacagggctaagagctagcgctgccgcaccccagagtgtgggaagggagagcggggcagtctcgggtggctagtcagagagagtgtttgggggttccgtgatgtagggtaaggtgccttcttattctcactccaccacccaaaagtcaaaaggtgcctgtgaggcaggggcggagtgatacaacttcaagtgcatgctctctgcagccagcccagcccagctggtgggaagcgtctgtccgtttactccaaggtggggtctttgtgagagtgagctgtaggtgtgcgggaccggtacagaaaggcgttcttcgaggtggatcacagaggcttcttcagatcagtgcttgagtttggggaatgcggccgcattccctgagtcaccaggaatgttaaagtcagtgggaacgtgactgccccaactcctggaagctgtgtccttgcacctgcatccgtagttccctgaaaacccagagaggaatcagacttcacactgcaagagccttggtgtccacctggccccatgtctctcagaattcttcaggtggaaaaacatctgaaagccacgttccttactgcagaatagcatatatatcgcttaatcttaaatttattagatatgagttgttttcagactcagactccatttgtattatagtctaatatacagggtagcaggtaccactgatttggagatatttatggggggagaacttacattgtgaaacttctgtacattaattattattgctgttgttattttacaagggtctagggagagacccttgtttgattttagctgcagaacgtattggtccagcttgctcttcagtgggagaaaacacttgtaagttgctaaacgagtcaatcccctcattcaggaaaactgacagaggagggcgtgactcacccaagcatatataactagctagaagtgggccaggacaggcccggcgcggtggctcacgcctgtaatcccagcagtttgggaggtcgaggtaggtggatcacctgaggtcgggagttcgagaccaacctgaccaacatggagaaaccctgtctctattaaaaatacaaaaaaaaaaaaaaaaaaaatagccgggcatggtggcgcaagcctgtaatcccagctactcaggaggctgaggcagaagaattgaacccaggaggtggaggttgcagtgagctgagatcgtgccgttactctccaacctggacaacaagagcgaaactccgtcttagaagtggaccaggacaggaccagattttggagtcatggtccggtgtccttttcactacaccatgtttgagctcagacccccactctcattccccaggtggctgacccagtccctgggggaagccctggatttcagaaagagcaagtctggatctgggaccctttccttccttccctggcttgtaactccaccaacccatcagaaggagaaggaaggagactcacctctgcctcaatgtgaatcagaccctaccccaccacgatgtggccctggcctgctgggctctccacctcagccttggataatgctgttgcctcatctataacatgcatttgtctttgtaatgtcaccaccttcccagctctccctctggccctgccttcttcggggaactcctggaaatatcagttactcagccctgggccccaccacctaggccactcctccaaaggaagtctaggagctgggaggaaaagaaaagaggggaaaatgagtttttatggggctgaacggggagaaaaggtcatcatcgattctactttagaatgagagtgtgaaatagacatttgtaaatgtaaaacttttaaggtatatcattataactgaaggagaaggtgccccaaaatgcaagattttccacaagattcccagagacaggaaaatcctctggctggctaactggaagcatgtaggagaatccaagcgaggtcaacagagaaggcaggaatgtgtggcagatttagtgaaagctagagatatggcagcgaaaggatgtaaacagtgcctgctgaatgatttccaaagagaaaaaaagtttgccagaagtttgtcaagtcaaccaatgtagaaagctttgcttatggtaataaaaatggctcatacttatatagcacttactttgttgcaagtactgctgtaaataaatgctttatgcaaaccaa

SEQ ID NO: 199174 - DNA, 3925 bp, Homo sapiens
  Payload ID: 19293
  Gene Name: vitamin D (1,25- dihydroxyvitamin D3) receptor
  Uniprot ID: P11473
  ENST ID: ENST00000550325
  CDS Start-End: 374-1807
gtgtgcgccgggagcgcggaacagcttgtccacccgccggccggaccaggtgcgaacccgggagcagcgggaaagggggtctcaggatagggactcggggtcggggcgtctgggataccggggcctgagcgcccggctgcgagcattagagtctaagtctcagcggtaaacttggctactgaggtccgggctgtcgtgccatgaggctgggacactaaggggcactgaggtttgagaaagctgaagttcgtgccaggctggcgaggggagcagcgacatcctcggcgcttaggagaaatgctccgctaacacagtgcttagcacttgggcaacaagaagtatttgtttccttcttctgtcggggcgccttggcatggagtggaggaataagaaaaggagcgattggctgtcgatggtgctcagaactgctggagtggaggaagcctttgggtctgaagtgtctgtgagacctcacagaagagcacccctgggctccacttacctgccccctgctccttcagggatggaggcaatggcggccagcacttccctgcctgaccctggagactttgaccggaacgtgccccggatctgtggggtgtgtggagaccgagccactggctttcacttcaatgctatgacctgtgaaggctgcaaaggcttcttcaggcgaagcatgaagcggaaggcactattcacctgccccttcaacggggactgccgcatcaccaaggacaaccgacgccactgccaggcctgccggctcaaacgctgtgtggacatcggcatgatgaaggagttcattctgacagatgaggaagtgcagaggaagcgggagatgatcctgaagcggaaggaggaggaggccttgaaggacagtctgcggcccaagctgtctgaggagcagcagcgcatcattgccatactgctggacgcccaccataagacctacgaccccacctactccgacttctgccagttccggcctccagttcgtgtgaatgatggtggagggagccatccttccaggcccaactccagacacactcccagcttctctggggactcctcctcctcctgctcagatcactgtatcacctcttcagacatgatggactcgtccagcttctccaatctggatctgagtgaagaagattcagatgacccttctgtgaccctagagctgtcccagctctccatgctgccccacctggctgacctggtcagttacagcatccaaaaggtcattggctttgctaagatgataccaggattcagagacctcacctctgaggaccagatcgtactgctgaagtcaagtgccattgaggtcatcatgttgcgctccaatgagtccttcaccatggacgacatgtcctggacctgtggcaaccaagactacaagtaccgcgtcagtgacgtgaccaaagccggacacagcctggagctgattgagcccctcatcaagttccaggtgggactgaagaagctgaacttgcatgaggaggagcatgtcctgctcatggccatctgcatcgtctccccagatcgtcctggggtgcaggacgccgcgctgattgaggccatccaggaccgcctgtccaacacactgcagacgtacatccgctgccgccacccgcccccgggcagccacctgctctatgccaagatgatccagaagctagccgacctgcgcagcctcaatgaggagcactccaagcagtaccgctgcctctccttccagcctgagtgcagcatgaagctaacgccccttgtgctcgaagtgtttggcaatgagatctcctgactaggacagcctgtggcggtgcctgggtggggctgctcctccagggccacgtgccaggcccggggctggcggctactcagcagccctcctcaccccgtctggggttcagcccctcctctgccacctcccctatccacccagcccattctctctcctgtccaacctaacccctttcctgcgggcttttccccggtcccttgagacctcagccatgaggagttgctgtttgtttgacaaagaaacccaagtgggggcagagggcagaggctggaggcagggccttgcccagagatgcctccaccgctgcctaagtggctgctgactgatgttgagggaacagacaggagaaatgcatccattcctcagggacagagacacctgcacctccccccactgcaggccccgcttgtccagcgcctagtggggtctccctctcctgcctactcacgataaataatcggcccacagctcccaccccacccccttcagtgcccaccaacatcccattgccctggttatattctcacgggcagtagctgtggtgaggtgggttttcttcccatcactggagcaccaggcacgaacccacctgctgagagacccaaggaggaaaaacagacaaaaacagcctcacagaagaatatgacagctgtccctgtcaccaagctcacagttcctcgccctgggtctaaggggttggttgaggtggaagccctccttccacggatccatgtagcaggactgaattgtccccagtttgcagaaaagcacctgccgacctcgtcctccccctgccagtgccttacctcctgcccaggagagccagccctccctgtcctcctcggatcaccgagagtagccgagagcctgctcccccaccccctccccaggggagagggtctggagaagcagtgagccgcatcttctccatctggcagggtgggatggaggagaagaattttcagaccccagcggctgagtcatgatctccctgccgcctcaatgtggttgcaaggccgctgttcacccacagggctaagagctagcgctgccgcaccccagagtgtgggaagggagagcggggcagtctcgggtggctagtcagagagagtgtttgggggttccgtgatgtagggtaaggtgccttcttattctcactccaccacccaaaagtcaaaaggtgcctgtgaggcaggggcggagtgatacaacttcaagtgcatgctctctgcagccagcccagcccagctggtgggaagcgtctgtccgtttactccaaggtggggtctttgtgagagtgagctgtaggtgtgcgggaccggtacagaaaggcgttcttcgaggtggatcacagaggcttcttcagatcagtgcttgagtttggggaatgcggccgcattccctgagtcaccaggaatgttaaagtcagtgggaacgtgactgccccaactcctggaagctgtgtccttgcacctgcatccgtagttccctgaaaacccagagaggaatcagacttcacactgcaagagccttggtgtccacctggccccatgtctctcagaattcttcaggtggaaaaacatctgaaagccacgttccttactgcagaatagcatatatatcgcttaatcttaaatttattagatatgagttgttttcagactcagactccatttgtattatagtctaatatacagggtagcaggtaccactgatttggagatatttatggggggagaacttacattgtgaaacttctgtacattaattattattgctgttgttattttacaagggtctagggagagacccttgtttgattttagctgcagaacgtattggtccagcttgctcttcagtgggagaaaacacttgtaagttgctaaacgagtcaatcccctcattcaggaaaactgacagaggagggcgtgactcacccaagcatatataactagctagaagtgggccaggacaggcccggcgcggtggctcacgcctgtaatcccagcagtttgggaggtcgaggtaggtggatcacctgaggtcgggagttcgagaccaacctgaccaacatggagaaaccctgtctctattaaaaatacaaaaaaaaaaaaaaaa

SEQ ID NO: 199175 - DNA, 937 bp, Homo sapiens
  Payload ID: 19293
  Gene Name: vitamin D (1,25- dihydroxyvitamin D3) receptor
  ENST ID: ENST00000546653
  CDS Start-End: 187-937
cggcagcggagccgtgtgcgccgggagcgcggaacagcttgtccacccgccggccggaccagggctcctgaacctagcccagctggacggagaaatggactctagcctcctctgatagcctcatgccaggccccgtgcacattgctttgcttgcctccctcaatcctcatagcttctctttgggggatggaggcaatggcggccagcacttccctgcctgaccctggagactttgaccggaacgtgccccggatctgtggggtgtgtggagaccgagccactggctttcacttcaatgctatgacctgtgaaggctgcaaaggcttcttcaggcgaagcatgaagcggaaggcactattcacctgccccttcaacggggactgccgcatcaccaaggacaaccgacgccactgccaggcctgccggctcaaacgctgtgtggacatcggcatgatgaaggagttcattctgacagatgaggaagtgcagaggaagcgggagatgatcctgaagcggaaggaggaggaggccttgaaggacagtctgcggcccaagctgtctgaggagcagcagcgcatcattgccatactgctggacgcccaccataagacctacgaccccacctactccgacttctgccagttccggcctccagttcgtgtgaatgatggtggagggagccatccttccaggcccaactccagacacactcccagcttctctggggactcctcctcctcctgctcagatcactgtatcacctcttcagacatgatggactcgtccagcttctccaatctggatctgagtgaagaagattcagatgacccttctgtgaccctagagctgtcccagctctccatgctgccccacctggctgacctggtcagttacagcatccaaaaggtcattggctttgctaagatgataccaggat

SEQ ID NO: 199176 - DNA, 1782 bp, Homo sapiens
  Payload ID: 19293
  Gene Name: vitamin D (1,25- dihydroxyvitamin D3) receptor
  ENST ID: ENST00000547065
  CDS Start-End: 71-220
aaaaggcggcagcggagccgtgtgcgccgggagcgcggaacagcttgtccacccgccggccggaccagggatggaggcaatggcggccagcacttccctgcctgaccctggagactttgaccggaacgtgccccggatctgtggggtgtgtggagaccgagccactggctttcacttcaatgctatgacctgtgaaggctgcaaaggcttcttcaggtgagccctcctcccaggctctccccagtggaaagggagggagaagaagcaaggtgtttccatgaagggagcccttgcatttttcacatctccttccttacaatgtccatggaacatgcggcgctcacagccacaggagcaggagggtcttggcgaagcatgaagcggaaggcactattcacctgccccttcaacggggactgccgcatcaccaaggacaaccgacgccactgccaggcctgccggctcaaacgctgtgtggacatcggcatgatgaaggagttcattctgacagatgaggaagtgcagaggaagcgggagatgatcctgaagcggaaggaggaggaggccttgaaggacagtctgcggcccaagctgtctgaggagcagcagcgcatcattgccatactgctggacgcccaccataagacctacgaccccacctactccgacttctgccagttccggcctccagttcgtgtgaatgatggtggagggagccatccttccaggcccaactccagacacactcccagcttctctggggactcctcctcctcctgctcagatcactgtatcacctcttcagacatgatggactcgtccagcttctccaatctggatctgagtgaagaagattcagatgacccttctgtgaccctagagctgtcccagctctccatgctgccccacctggctgacctggtcagttacagcatccaaaaggtcattggctttgctaagatgataccaggattcagagacctcacctctgaggaccagatcgtactgctgaagtcaagtgccattgaggtcatcatgttgcgctccaatgagtccttcaccatggacgacatgtcctggacctgtggcaaccaagactacaagtaccgcgtcagtgacgtgaccaaagccggacacagcctggagctgattgagcccctcatcaagttccaggtgggactgaagaagctgaacttgcatgaggaggagcatgtcctgctcatggccatctgcatcgtctccccagatcgtcctggggtgcaggacgccgcgctgattgaggccatccaggaccgcctgtccaacacactgcagacgtacatccgctgccgccacccgcccccgggcagccacctgctctatgccaagatgatccagaagctagccgacctgcgcagcctcaatgaggagcactccaagcagtaccgctgcctctccttccagcctgagtgcagcatgaagctaacgccccttgtgctcgaagtgtttggcaatgagatctcctgactaggacagcctgtggcggtgcctgggtggggctgctcctccagggccacgtgccaggcccggggctggcggctactcagcagccctcctcaccccgtctggggttcagcccctcctctgccacctcccctatccacccagcccattctctctcctgtccaacctaacccctttcctgcgggcttttccccggtcccttgagacctcagccatgaggagttgctgtttgtttgacaaagaaacccaagtgggggcagagggcagaggctggaggca

SEQ ID NO: 199177 - DNA, 562 bp, Homo sapiens
  Payload ID: 19293
  Gene Name: vitamin D (1,25- dihydroxyvitamin D3) receptor
  ENST ID: ENST00000550314
  CDS Start-End: 245-562
gatgacatggcatgcctgctcccaacaagccacttctgtttgcagtcactgatctggggactaaagtccctggaaagagcctctcgtgcccacttccttagagactggggaggcggtcagcgctccgccttagataaaaggtttccccttcttcatttcagaagcctttgggtctgaagtgtctgtgagacctcacagaagagcacccctgggctccacttacctgccccctgctccttcagggatggaggcaatggcggccagcacttccctgcctgaccctggagactttgaccggaacgtgccccggatctgtggggtgtgtggagaccgagccactggctttcacttcaatgctatgacctgtgaaggctgcaaaggcttcttcaggcgaagcatgaagcggaaggcactattcacctgccccttcaacggggactgccgcatcaccaaggacaaccgacgccactgccaggcctgccggctcaaacgctgtgtggacatcggcatgatgaaggagttcattctgacagatgaggaagtgcagaggaagcgggagatg

SEQ ID NO: 199178 - DNA, 4644 bp, Homo sapiens
  Payload ID: 19293
  Gene Name: vitamin D (1,25- dihydroxyvitamin D3) receptor
  Uniprot ID: P11473
  ENST ID: ENST00000549336
  CDS Start-End: 152-1435
aaaaggcggcagcggagccgtgtgcgccgggagcgcggaacagcttgtccacccgccggccggaccagaagcctttgggtctgaagtgtctgtgagacctcacagaagagcacccctgggctccacttacctgccccctgctccttcagggatggaggcaatggcggccagcacttccctgcctgaccctggagactttgaccggaacgtgccccggatctgtggggtgtgtggagaccgagccactggctttcacttcaatgctatgacctgtgaaggctgcaaaggcttcttcaggcgaagcatgaagcggaaggcactattcacctgccccttcaacggggactgccgcatcaccaaggacaaccgacgccactgccaggcctgccggctcaaacgctgtgtggacatcggcatgatgaaggagttcattctgacagatgaggaagtgcagaggaagcgggagatgatcctgaagcggaaggaggaggaggccttgaaggacagtctgcggcccaagctgtctgaggagcagcagcgcatcattgccatactgctggacgcccaccataagacctacgaccccacctactccgacttctgccagttccggcctccagttcgtgtgaatgatggtggagggagccatccttccaggcccaactccagacacactcccagcttctctggggactcctcctcctcctgctcagatcactgtatcacctcttcagacatgatggactcgtccagcttctccaatctggatctgagtgaagaagattcagatgacccttctgtgaccctagagctgtcccagctctccatgctgccccacctggctgacctggtcagttacagcatccaaaaggtcattggctttgctaagatgataccaggattcagagacctcacctctgaggaccagatcgtactgctgaagtcaagtgccattgaggtcatcatgttgcgctccaatgagtccttcaccatggacgacatgtcctggacctgtggcaaccaagactacaagtaccgcgtcagtgacgtgaccaaagccggacacagcctggagctgattgagcccctcatcaagttccaggtgggactgaagaagctgaacttgcatgaggaggagcatgtcctgctcatggccatctgcatcgtctccccagatcgtcctggggtgcaggacgccgcgctgattgaggccatccaggaccgcctgtccaacacactgcagacgtacatccgctgccgccacccgcccccgggcagccacctgctctatgccaagatgatccagaagctagccgacctgcgcagcctcaatgaggagcactccaagcagtaccgctgcctctccttccagcctgagtgcagcatgaagctaacgccccttgtgctcgaagtgtttggcaatgagatctcctgactaggacagcctgtggcggtgcctgggtggggctgctcctccagggccacgtgccaggcccggggctggcggctactcagcagccctcctcaccccgtctggggttcagcccctcctctgccacctcccctatccacccagcccattctctctcctgtccaacctaacccctttcctgcgggcttttccccggtcccttgagacctcagccatgaggagttgctgtttgtttgacaaagaaacccaagtgggggcagagggcagaggctggaggcagggccttgcccagagatgcctccaccgctgcctaagtggctgctgactgatgttgagggaacagacaggagaaatgcatccattcctcagggacagagacacctgcacctccccccactgcaggccccgcttgtccagcgcctagtggggtctccctctcctgcctactcacgataaataatcggcccacagctcccaccccacccccttcagtgcccaccaacatcccattgccctggttatattctcacgggcagtagctgtggtgaggtgggttttcttcccatcactggagcaccaggcacgaacccacctgctgagagacccaaggaggaaaaacagacaaaaacagcctcacagaagaatatgacagctgtccctgtcaccaagctcacagttcctcgccctgggtctaaggggttggttgaggtggaagccctccttccacggatccatgtagcaggactgaattgtccccagtttgcagaaaagcacctgccgacctcgtcctccccctgccagtgccttacctcctgcccaggagagccagccctccctgtcctcctcggatcaccgagagtagccgagagcctgctcccccaccccctccccaggggagagggtctggagaagcagtgagccgcatcttctccatctggcagggtgggatggaggagaagaattttcagaccccagcggctgagtcatgatctccctgccgcctcaatgtggttgcaaggccgctgttcacccacagggctaagagctagcgctgccgcaccccagagtgtgggaagggagagcggggcagtctcgggtggctagtcagagagagtgtttgggggttccgtgatgtagggtaaggtgccttcttattctcactccaccacccaaaagtcaaaaggtgcctgtgaggcaggggcggagtgatacaacttcaagtgcatgctctctgcagccagcccagcccagctggtgggaagcgtctgtccgtttactccaaggtggggtctttgtgagagtgagctgtaggtgtgcgggaccggtacagaaaggcgttcttcgaggtggatcacagaggcttcttcagatcagtgcttgagtttggggaatgcggccgcattccctgagtcaccaggaatgttaaagtcagtgggaacgtgactgccccaactcctggaagctgtgtccttgcacctgcatccgtagttccctgaaaacccagagaggaatcagacttcacactgcaagagccttggtgtccacctggccccatgtctctcagaattcttcaggtggaaaaacatctgaaagccacgttccttactgcagaatagcatatatatcgcttaatcttaaatttattagatatgagttgttttcagactcagactccatttgtattatagtctaatatacagggtagcaggtaccactgatttggagatatttatggggggagaacttacattgtgaaacttctgtacattaattattattgctgttgttattttacaagggtctagggagagacccttgtttgattttagctgcagaacgtattggtccagcttgctcttcagtgggagaaaacacttgtaagttgctaaacgagtcaatcccctcattcaggaaaactgacagaggagggcgtgactcacccaagcatatataactagctagaagtgggccaggacaggcccggcgcggtggctcacgcctgtaatcccagcagtttgggaggtcgaggtaggtggatcacctgaggtcgggagttcgagaccaacctgaccaacatggagaaaccctgtctctattaaaaatacaaaaaaaaaaaaaaaaaaaatagccgggcatggtggcgcaagcctgtaatcccagctactcaggaggctgaggcagaagaattgaacccaggaggtggaggttgcagtgagctgagatcgtgccgttactctccaacctggacaacaagagcgaaactccgtcttagaagtggaccaggacaggaccagattttggagtcatggtccggtgtccttttcactacaccatgtttgagctcagacccccactctcattccccaggtggctgacccagtccctgggggaagccctggatttcagaaagagcaagtctggatctgggaccctttccttccttccctggcttgtaactccaccaacccatcagaaggagaaggaaggagactcacctctgcctcaatgtgaatcagaccctaccccaccacgatgtggccctggcctgctgggctctccacctcagccttggataatgctgttgcctcatctataacatgcatttgtctttgtaatgtcaccaccttcccagctctccctctggccctgccttcttcggggaactcctggaaatatcagttactcagccctgggccccaccacctaggccactcctccaaaggaagtctaggagctgggaggaaaagaaaagaggggaaaatgagtttttatggggctgaacggggagaaaaggtcatcatcgattctactttagaatgagagtgtgaaatagacatttgtaaatgtaaaacttttaaggtatatcattataactgaaggagaaggtgccccaaaatgcaagattttccacaagattcccagagacaggaaaatcctctggctggctaactggaagcatgtaggagaatccaagcgaggtcaacagagaaggcaggaatgtgtggcagatttagtgaaagctagagatatggcagcgaaaggatgtaaacagtgcctgctgaatgatttccaaagagaaaaaaagtttgccagaagtttgtcaagtcaaccaatgtagaaagctttgcttatggtaataaaaatggctcatacttatatagcacttactttgttgcaagtactgctgtaaataaatgctttatgcaaaccaa

SEQ ID NO: 199179 - DNA, 596 bp, Homo sapiens
  Payload ID: 19293
  Gene Name: vitamin D (1,25- dihydroxyvitamin D3) receptor
  ENST ID: ENST00000548664
  CDS Start-End: 292-596
gggctgtctctgcttgtcaaaaggcggcagcggagccgtgtgcgccgggagcgcggaacagcttgtccacccgccggccggaccagggctcctgaacctagcccagctggacggagaaatggactctagcctcctctgatagcctcatgccaggccccgtgcacattgctttgcttgcctccctcaatcctcatagcttctctttgggaagcctttgggtctgaagtgtctgtgagacctcacagaagagcacccctgggctccacttacctgccccctgctccttcagggatggaggcaatggcggccagcacttccctgcctgaccctggagactttgaccggaacgtgccccggatctgtggggtgtgtggagaccgagccactggctttcacttcaatgctatgacctgtgaaggctgcaaaggcttcttcaggcgaagcatgaagcggaaggcactattcacctgccccttcaacggggactgccgcatcaccaaggacaaccgacgccactgccaggcctgccggctcaaacgctgtgtggacatcggcatgatgaaggagttcattctgacagatgaggaagtgcagag

SEQ ID NO: 199180 - DNA, 876 bp, Homo sapiens
  Payload ID: 19294
  Gene Name: vitamin K epoxide reductase complex, subunit 1
  ENST ID: ENST00000300851
  CDS Start-End: 32-481
ccgcgggcgcctcgggcggaacctggagataatgggcagcacctgggggagccctggctgggtgcggctcgctctttgcctgacgggcttagtgctctcgctctacgcgctgcacgtgaaggcggcgcgcgcccgggaccgggattaccgcgcgctctgcgacgtgggcaccgccatcagctgttcgcgcgtcttctcctccagggtccaaggcactgggttgacagtcctaacctggttccaccccaccccacccctctgccaggtggggcaggggtttcgggctggtggagcatgtgctgggacaggacagcatcctcaatcaatccaacagcatattcggttgcatcttctacacactacagctattgttaggttgcctgcggacacgctgggcctctgtcctgatgctgctgagctccctggtgtctctcgctggttctgtctacctggcctggatcctgttcttcgtgctctatgatttctgcattgtttgtatcaccacctatgctatcaacgtgagcctgatgtggctcagtttccggaaggtccaagaaccccagggcaaggctaagaggcactgagccctcaacccaagccaggctgacctcatctgctttgctttggcatgtgagccttgcctaagggggcatatctgggtccctagaaggccctagatgtggggcttctagattaccccctcctcctgccatacccgcacatgacaatggaccaaatgtgccacacgctcgctcttttttacacccagtgcctctgactctgtccccatgggctggtctccaaagctctttccattgcccagggagggaaggttctgagcaataaagtttcttagatcaatcagccaagtctgaa

SEQ ID NO: 199181 - DNA, 1077 bp, Homo sapiens
  Payload ID: 19294
  Gene Name: vitamin K epoxide reductase complex, subunit 1
  Uniprot ID: Q9BQB6
  ENST ID: ENST00000319788
  CDS Start-End: 212-682
cttacccgcttcactagtcccggcattcttcgctgttttcctaactcgcccgcttgactagcgccctggaacagccatttgggtcgtggagtgcgagcacggccggccaatcgccgagtcagagggccaggaggggcgcggccattcgccgcccggcccctgctccgtggctggttttctccgcgggcgcctcgggcggaacctggagataatgggcagcacctgggggagccctggctgggtgcggctcgctctttgcctgacgggcttagtgctctcgctctacgcgctgcacgtgaaggcggcgcgcgcccgggaccgggattaccgcgcgctctgcgacgtgggcaccgccatcagctgttcgcgcgtcttctcctccaggtggggcaggggtttcgggctggtggagcatgtgctgggacaggacagcatcctcaatcaatccaacagcatattcggttgcatcttctacacactacagctattgttagatggtgtctcgccatgttgcccaggctggtctcaagcaatctgtctgcctcagcctcccaaagtgctggggggattacaggcgttgcctgcggacacgctgggcctctgtcctgatgctgctgagctccctggtgtctctcgctggttctgtctacctggcctggatcctgttcttcgtgctctatgatttctgcattgtttgtatcaccacctatgctatcaacgtgagcctgatgtggctcagtttccggaaggtccaagaaccccagggcaaggctaagaggcactgagccctcaacccaagccaggctgacctcatctgctttgctttggcatgtgagccttgcctaagggggcatatctgggtccctagaaggccctagatgtggggcttctagattaccccctcctcctgccatacccgcacatgacaatggaccaaatgtgccacacgctcgctcttttttacacccagtgcctctgactctgtccccatgggctggtctccaaagctctttccattgcccagggagggaaggttctgagcaataaagtttcttagatcaatcagccaagtctgaa

SEQ ID NO: 199182 - DNA, 901 bp, Homo sapiens
  Payload ID: 19294
  Gene Name: vitamin K epoxide reductase complex, subunit 1
  Uniprot ID: Q9BQB6
  ENST ID: ENST00000354895
  CDS Start-End: 228-506
gcgattccgcacgtcccttacccgcttcactagtcccggcattcttcgctgttttcctaactcgcccgcttgactagcgccctggaacagccatttgggtcgtggagtgcgagcacggccggccaatcgccgagtcagagggccaggaggggcgcggccattcgccgcccggcccctgctccgtggctggttttctccgcgggcgcctcgggcggaacctggagataatgggcagcacctgggggagccctggctgggtgcggctcgctctttgcctgacgggcttagtgctctcgctctacgcgctgcacgtgaaggcggcgcgcgcccgggaccgggattaccgcgcgctctgcgacgtgggcaccgccatcagctgttcgcgcgtcttctcctccaggttgcctgcggacacgctgggcctctgtcctgatgctgctgagctccctggtgtctctcgctggttctgtctacctggcctggatcctgttcttcgtgctctatgatttctgcattgtttgtatcaccacctatgctatcaacgtgagcctgatgtggctcagtttccggaaggtccaagaaccccagggcaaggctaagaggcactgagccctcaacccaagccaggctgacctcatctgctttgctttggcatgtgagccttgcctaagggggcatatctgggtccctagaaggccctagatgtggggcttctagattaccccctcctcctgccatacccgcacatgacaatggaccaaatgtgccacacgctcgctcttttttacacccagtgcctctgactctgtccccatgggctggtctccaaagctctttccattgcccagggagggaaggttctgagcaataaagtttcttagatcaatcagccaagtctgaa

SEQ ID NO: 199183 - DNA, 664 bp, Homo sapiens
  Payload ID: 19294
  Gene Name: vitamin K epoxide reductase complex, subunit 1
  ENST ID: ENST00000394971
  CDS Start-End: 49-531
cgggagtgggaggcgtggggcctcggagcagggcggccaggatgccagatgattattctggagtctgggatcggtgtgcccggggaacggacacggggctggactgctcgcggggtcgttgcacaggggctgagctacccagcgatactggtgttcgaaataagagtgcgaggcaagggaccagacagtgctggggactgggattattccggggactcgcacgtgaattggatgccaaggaataacggtgaccaggaaaggcggggaggcaggatggcggtagagattgacgatggtctcaaggacggcgcgcaggtggggcaggggtttcgggctggtggagcatgtgctgggacaggacagcatcctcaatcaatccaacagcatattcggttgcatcttctacacactacagctattgttaggttgcctgcggacacgctgggcctctgtcctgatgctgctgagctccctggtgtctctcgctggttctgtctacctggcctggatcctgttcttcgtgctctatgatttctgcattgtttgtatcaccacctatgctatcaacgtgagcctgatgtggctcagtttccggaaggtccaagaaccccagggcaaggctaagaggcactgagccctcaacccaagccaggctgacctcatc

SEQ ID NO: 199184 - DNA, 1012 bp, Homo sapiens
  Payload ID: 19294
  Gene Name: vitamin K epoxide reductase complex, subunit 1
  Uniprot ID: Q9BQB6
  ENST ID: ENST00000394975
  CDS Start-End: 229-720
cgcgattccgcacgtcccttacccgcttcactagtcccggcattcttcgctgttttcctaactcgcccgcttgactagcgccctggaacagccatttgggtcgtggagtgcgagcacggccggccaatcgccgagtcagagggccaggaggggcgcggccattcgccgcccggcccctgctccgtggctggttttctccgcgggcgcctcgggcggaacctggagataatgggcagcacctgggggagccctggctgggtgcggctcgctctttgcctgacgggcttagtgctctcgctctacgcgctgcacgtgaaggcggcgcgcgcccgggaccgggattaccgcgcgctctgcgacgtgggcaccgccatcagctgttcgcgcgtcttctcctccaggtggggcaggggtttcgggctggtggagcatgtgctgggacaggacagcatcctcaatcaatccaacagcatattcggttgcatcttctacacactacagctattgttaggttgcctgcggacacgctgggcctctgtcctgatgctgctgagctccctggtgtctctcgctggttctgtctacctggcctggatcctgttcttcgtgctctatgatttctgcattgtttgtatcaccacctatgctatcaacgtgagcctgatgtggctcagtttccggaaggtccaagaaccccagggcaaggctaagaggcactgagccctcaacccaagccaggctgacctcatctgctttgctttggcatgtgagccttgcctaagggggcatatctgggtccctagaaggccctagatgtggggcttctagattaccccctcctcctgccatacccgcacatgacaatggaccaaatgtgccacacgctcgctcttttttacacccagtgcctctgactctgtccccatgggctggtctccaaagctctttccattgcccagggagggaaggttctgagcaataaagtttcttagatcaatcagccaagtctgaa

SEQ ID NO: 199185 - DNA, 870 bp, Homo sapiens
  Payload ID: 19294
  Gene Name: vitamin K epoxide reductase complex, subunit 1
  ENST ID: ENST00000498155
  CDS Start-End: 323-808
gcaaggaagaagtgaggaagtagagactgggagtgtagaatctttccaaaaacttgaatgtggaggggtagatgggataatgccgggagaggaggctggtgaaggacctcttagtgaagggagatttgttgctgtttctgagatgggaaagagaaacaagttgcagtgtagatggggaggatggagaggttgaaggtgtaggagagatgggtcaccatcagatgggacgtctgtgaaggagagacctcatctggcccacagcttggaaaggagagactgactgttgagttgatgcaagctcaggtgttgccaggcgggcgccatgatagtagagaggttaggatactgtcaagggtgtgtgtggccaaaggagtggttctgtgaatgtatgggagaaagggagaccgaccaccaggaagcactggtgaggcaggacccgggaggatgggaggctgcagcccgaatggtgcctgaaatagtttcaggggaaatgcttggttcccgaatcggatcgccgtattcgctggatcccctgatccgctggtctctaggtcccggatgctgcaattcttacaacaggacttggcatagggtggggcaggggtttcgggctggtggagcatgtgctgggacaggacagcatcctcaatcaatccaacagcatattcggttgcatcttctacacactacagctattgttaggttgcctgcggacacgctgggcctctgtcctgatgctgctgagctccctggtgtctctcgctggttctgtctacctggcctggatcctgttcttcgtgctctatgatttctgcattgtttgtatcaccacctatgctatcaacgtgagcctgatgtggctcagtttcc

SEQ ID NO: 199186 - DNA, 746 bp, Homo sapiens
  Payload ID: 19294
  Gene Name: vitamin K epoxide reductase complex, subunit 1
  ENST ID: ENST00000420057
  CDS Start-End: 1-278
gtcaagggtgtgtgtggccaaaggagtggttctgtgaatgtatgggagaaagggagaccgaccaccaggaagcactggtgaggcaggacccgggaggatgggaggctgcagcccgaatggtgcctgaaatagtttcaggggaaatgcttggttcccgaatcggatcgccgtattcgctggatcccctgatccgctggtctctaggtcccggatgctgcaattcttacaacaggacttggcatagggttgcctgcggacacgctgggcctctgtcctgatgctgctgagctccctggtgtctctcgctggttctgtctacctggcctggatcctgttcttcgtgctctatgatttctgcattgtttgtatcaccacctatgctatcaacgtgagcctgatgtggctcagtttccggaaggtccaagaaccccagggcaaggctaagaggcactgagccctcaacccaagccaggctgacctcatctgctttgctttggcatgtgagccttgcctaagggggcatatctgggtccctagaaggccctagatgtggggcttctagattaccccctcctcctgccatacccgcacatgacaatggaccaaatgtgccacacgctcgctcttttttacacccagtgcctctgactctgtccccatgggctggtctccaaagctctttccattgcccagggagggaaggttctgagcaataaagtttcttagatcaatcagccaagtctgaa

SEQ ID NO: 199187 - DNA, 461 bp, Homo sapiens
  Payload ID: 19294
  Gene Name: vitamin K epoxide reductase complex, subunit 1
  ENST ID: ENST00000472468
  CDS Start-End: 333-461
gtgacatggaatcctgacgtggccaaaggtgcccggtgccaggagatcatcgacccttggactaggatgggaggtcggggaacagaggatagcccaggtggcttcttggaaatcacctttctcgggcagggtccaaggcactgggttgacagtcctaacctggttccaccccaccccacccctctgccaggtggggcaggggtttcgggctggtggagcatgtgctgggacaggacagcatcctcaatcaatccaacagcatattcggttgcatcttctacacactacagctattgttaggttgcctgcggacacgctgggcctctgtcctgatgctgctgagctccctggtgtctctcgctggttctgtctacctggcctggatcctgttcttcgtgctctatgatttctgcattgtttgtatcaccacctatgctatcaacgtgagcctgatgtggctc

SEQ ID NO: 199188 - DNA, 5899 bp, Homo sapiens
  Payload ID: 19295
  Gene Name: vitamin K epoxide reductase complex, subunit 1-like 1
  Uniprot ID: Q8N0U8
  ENST ID: ENST00000360768
  CDS Start-End: 106-636
ggcggcggaggcggcggtggcggcggtggcggctgggtcgggccccgacgggcggcggcggctgaggtggaggcggagggaggcggcggcggcggcggcgggaagatggcggctcccgtcctgctaagagtgtcggtgccgcggtgggagcgggtggcccggtatgcagtgtgcgctgccggaatcctgctctccatctacgcctaccacgtggagcgggagaaggagcgggaccccgagcaccgggccctctgcgacctggggccctgggtgaagtgctccgccgcccttgcctccagatggggtcgaggatttggtcttttgggttccatttttggaaaggatggtgtattaaaccagccaaacagtgtctttggacttatattttatatactacagttattacttggcatgacagcaagcgctgtggcggctttgatcctcatgacgtcctccatcatgtcggtcgtggggtccctgtacctggcctacattctgtactttgtgctgaaggagttctgcatcatctgcatcgtcacgtacgtgctgaacttccttcttctcattatcaactacaaacgactagtttacttgaacgaggcctggaagcggcagctgcaacccaagcaggactgacgcccgacagactccaccctaacagtctcaagcccctttccattcagtttattttgcagcaggtttttattattattattattattattattcacaacagacactttccctaagaatctcaaactgatttttaaaaatccggtaaattagaaggggccctcgctattttctgtgtcagtcttcattttaaatatggatacaaaaaggatacgccgagccaatcaaagacaagctttaactttactttgaagtgtttctgaaatgataaaatgtagccctagccccctgccctcaattgtaaagtgagcaaccattgctagtaattctttaatgtgtataaattcaatttcaggtataacaaatgtgatcatgacatgaaaatattctagaatagatactgtattaaatattgccatgtttacaatatgtaatatgtttttagccgatggatttaaacatgtagattcaactagaatccatttgtgatatttgtaaataaaggtagaaatattagatccatttctgcagaacttactgtacagtttagttggagtgtagcactgaagaactgtcagctcagcgttgactgaggagatagtgaaaatagcctatacacagcatcttgtgaaaagtactggcagccgtggttgcagcaaataatagggcaaaaaaaataataatagggtggtcggttccctttcatctccctcttctgaaaggaaaaaattgaattggaacgttcaagtccagtttgtgttcagtcataaaactgggccagttgttaaccttacagaatgagtcatgtggccagaccttcaagtccaaggccttcagacactaaggatgggaaaatgggtatttttctttggagaaaagctggaaatataaacatggcatttttaggtaaagtttcttccactagttgaattttcatgcagatatttttccttaacgttggtgccagtcaagcaaagagtattatgatggaaaagaccagtccaagccccatcgctccggagtgggagccagtgttcttgctaattgtttctttctgcactaaccactcagatgtctaatttaattgttttgcagtcaaatactggatttgtaaccttcagggctgacatgctgcccagtttgcttcatcgggagaatagcaacaggtagacacatctcaaggctaaatctgctcatgtcgccactgctctcataatgacacacatgcagtaagaagacttttgtaaggggatttgagtacacccaaatgaaattgtgacaggatgtttgtatggttaacatctgatatcagaatgttaaaagtgccttctgtcttaaatctcaaaccaaatattttgtgtgttgaccttgggcagaagaagtgtccttccctcctttcttcaccgtcaggtagaaaacctgcactctgcagaagggtcctgtgtgatcacttaatcctctggttgagaagcagcagtaatgtttttgcttccaacctgattaatcattttatgttgaaaatagtcaatgagaccagtatctcttgagtgctttatttgccttctctttgaagggaggggacgggctctgctctgtaaactcaaatgtgtagagtcagcaacaattccgtagcttccaactgactcagaattgatgcaacgtaggtcttctggcccgaggcaggtatcaagtccaaatcataatgaacttttcaccagtttcaaccagtttcttaaaagagagcttaagtcaagatttcatcaagacttgtgttttcccatgaatgtgaatctttcaatggctgttggagtatgtatgtactgttcttgcattctgaagtagttaaagaactctagaaagtactgattggccatctggtgtctatggagaaagaagtcctcacgtttgagggctgtacagtgaggccatcttgtagcagcgcatccagctctaccaaggcagtcctctggttcttttttctaagctacagtggaaatggcctaatggttaaaactgtggtatacatgacatcggttgtgctaaacaagttcctcgtgtcccaatatccaatggtttttcatcctattttgtatcaatcaacagagtatagttaaagcttgtcttgatgttgcattcttgcaaatgtcttcaactcttacctgagaaaacatggcaaaatggtcagccagacccttccagtttttcctttgcttttctaagcctcggggaaaccactgtttcagttgtataaaaacttttgccacattcctatggcccagtcgaattaataccctttttctcactgagagaggaacacgtactgcctgtcataacagcattgtaatgccagtgtctcagtaacagaatcctggtgggtgttaattgggtgttttttgccctggagaattcagattcctttctatacctccgattctgcccagaagagggggggaatcaccagtgttacaaaattagaagattgttttgcctgttttagactgaatatttgaacactgcagcattactagccaccagtgttaaaggacagatgaggggaaacatttgtttttagcagtaattccatgcctcatcttttttaagtgatttgttccaaatgaagccatttattgacttgatgttcacaaatatcatttgaagaaataacaggaattggggttagatgataaattctagggaatctaggtgatttggaggatttcatttgttttgcattacagctagttgctctcactaaaggtaaatttccggtgaaataactcaggtttaactagctgtgtgcccagaatcactgttccttcatacatgtgtcctctccttaaattcattactttcaaatgatgttcaaagcattgactattttcattcaaagaaactacattcggccgggcacggtggctcacgcctataatcccagcactttgggaggccgaggcgggtggattacctaaggtcaggagttcaagaccagcctggccagcatagtgaaaccccatctctactaaaaatacaaaaattagccaggcgcagtggcacacccctgtaatcccagctactcgggaggctgagggaggagaattgcttgagcccgggagacagaggttgcagtgagtcaagatcatgccactgcactccagcctggccaacagagcgagactgtcccccccccaaaaaaaaaagagagagactgcattcaaagaggaccaagactacagtgaaattaaaactgtttgctggctgggcatggtggctcacacctgtaatcccagcactttgggaggccgaggcggttggatcacctgaggtcagaagttcgagatcagcctgaccgacatagtggaaccctgtctttactaaaaatacaaaaattagctgggcatggtggcggcacctgtaatgccagctcctccagaggctgaggcaggagaattgcttgaacccagtaggtggaggttgcagtgagccacagttgcgccattgcactccagcctgggcaatgagtgaaactctgtctcaaataaaaaaataaaaataaaaactatttgttgacttttgtttttcatttagttttggaaaagactatttgcaaaagtacagagttatcttcagcaattacttcacaacttagattggtaccaagagtgacaggagatcttgtcttggaagatcattattagatgccaacaaggagacccactgtgatttctggtaacctatttggggaaaaagacctaatgacctaatatgcaatttctgtcctcgtgtctttttctctaacacacagtcatgggtgaaacatttcagacacctcaggcagcacttatggtttctaattgtgagaactacccttccatcaaacaaaaagggcaagggtgggagccccggctacttggttaaacattttttactacaaattcgcccagaaaaggtgaaatattttgttataaaactgtattaagcatggcctaagtatttattaggtatatgatctgtgtagtatgttccatcagaaatatttcttactagtgctttaagctccagagtaaacagtcatttaaaatggagttcactgggcaggtttcccctttaatctagatagaaatactctttatcagagatttaaggcactgttttgctaactggtaaataaaaccaaatgtaaatatgtaagaatgtttatttgttgcacataacttttttggtataaaataaatgtagaagttacctgtggaagttgtgctcccattattcttaaactgcagggttgcattccaaaagaactgaaacgaagtctttttagactcagtaggagccttatattcttgaagtcaatactgtaacctcatttctaaggtatacagggttgattctttttctcttaaatcatatgtaacttgcagaagattcagagtcctcagacctctagttcttggaattcctgtaggtttacggtgtatgtgattgtcaagaattaatgacaaaaatgtgtcactgcctacagttctgtgaacactcagaatgtattaatgagctgtttttccatagttttactttagcttaccttgaatactccctgtataatcctctaaaaaggtagcatcggcaagaaagatgaatccgttggaaatacagctgagccatacttcacggaatagaacaagtgtgttctgtgctggagctcaagacctgtggaaagggactgcccccactgggtgcaatggctcatgcctgtaatcccagcactttgggaggtagaggcgggtggatcacttgaggtcaggagttcaagaccagcctggccaacatggtgaaacctgcctctactgaaaaatacagaaaaattagccaggattgtggtgtgcgcctgtaatcccagctattcaggaagctgaggcaggagaattgcttgaaccagggaggcggaggttgcagtgagacgagatcacgccactgcactgcagcctaggcgacagaggaagactccagctcaagaaaaaaaacaatggactgcccctaatttgtaaaccatttaaatgtgtctattacatttaacttttcttaatgtttgtcaactaaaagttttattcattatactttgacatactggaacacaaaacttgattcctttgaaaaactaaagagaagttgataaaaaaaatacagaagctctagattcctaattggaactgactacactcatttttaaaaaatggacgatgcctaataaaaccacatgaaattaacttta

SEQ ID NO: 199189 - DNA, 1541 bp, Homo sapiens
  Payload ID: 19295
  Gene Name: vitamin K epoxide reductase complex, subunit 1-like 1
  Uniprot ID: Q8N0U8
  ENST ID: ENST00000434382
  CDS Start-End: 4-537
aagatggcggctcccgtcctgctaagagtgtcggtgccgcggtgggagcgggtggcccggtatgcagtgtgcgctgccggaatcctgctctccatctacgcctaccacgtggagcgggagaaggagcgggaccccgagcaccgggccctctgcgacctggggccctgggtgaagtgctccgccgcccttgcctccaggcatgacagcaagcgctgtggcggctttgatcctcatgacgtcctccatcatgtcggtcgtggggtccctgtacctggcctacattctgtactttgtgctgaaggagttctgcatcatctgcatcgtcacgtacgtgctgaacttccttcttctcattatcaactacaaacgactagtttacttgaacgaggcctggaagcggcagctgcaacccaagcaggactgacgcccgacagactccaccctaacagtctcaagcccctttccattcagtttattttgcagcaggtttttattattattattattattattattcacaacagacactttccctaagaatctcaaactgatttttaaaaatccggtaaattagaaggggccctcgctattttctgtgtcagtcttcattttaaatatggatacaaaaaggatacgccgagccaatcaaagacaagctttaactttactttgaagtgtttctgaaatgataaaatgtagccctagccccctgccctcaattgtaaagtgagcaaccattgctagtaattctttaatgtgtataaattcaatttcaggtataacaaatgtgatcatgacatgaaaatattctagaatagatactgtattaaatattgccatgtttacaatatgtaatatgtttttagccgatggatttaaacatgtagattcaactagaatccatttgtgatatttgtaaataaaggtagaaatattagatccatttctgcagaacttactgtacagtttagttggagtgtagcactgaagaactgtcagctcagcgttgactgaggagatagtgaaaatagcctatacacagcatcttgtgaaaagtactggcagccgtggttgcagcaaataatagggcaaaaaaaataataatagggtggtcggttccctttcatctccctcttctgaaaggaaaaaattgaattggaacgttcaagtccagtttgtgttcagtcataaaactgggccagttgttaaccttacagaatgagtcatgtggccagaccttcaagtccaaggccttcagacactaaggatgggaaaatgggtatttttctttggagaaaagctggaaatataaacatggcatttttaggtaaagtttcttccactagttgaattttcatgcagatatttttccttaacgttggtgccagtcaagcaaagagtattatgatggaaaagaccagtccaagccccatcgctccggagtgggagccagtgttcttgctaattgtttctttctgcactaaccactcagatgtctaatttaattgttttgcagtcaaatactggatttgtaaccttca

SEQ ID NO: 199190 - DNA, 766 bp, Homo sapiens
  Payload ID: 19296
  Gene Name: vitelline membrane outer layer 1 homolog (chicken)
  Uniprot ID: Q7Z5L0
  ENST ID: ENST00000328739
  CDS Start-End: 81-689
gcccttccgcaatcggagccctcacagaggccaaactgatataaatctgcttaggaggcctgattcacagacgctacaggatggagcggggcgcaggagccaagctgctgccgctgctgctgcttctgcgggcgactggtttcacatgtgcacagacagatggccggaacggctacacggcggtcatcgaagtgaccagcgggggtccctggggcgactgggcctggcctgagatgtgtcccgatggattcttcgccagcgggttctcgctcaaggtggagcctccccaaggcattcctggcgacgacactgcactgaatgggatcaggctgcactgcgcgcgcgggaacgtcctaggcaatacgcacgtggtagagtcccagtctggaagctggggcgaatggagtgagccgctgtggtgtcgcggcggcgcctacctagtggctttctcgcttcgcgtggaggcacccacgaccctcggtgacaacacagcagcgaacaacgtgcgcttccgctgttcagacggcgaggaactgcaggggcctgggctgagctggggagactttggagactggagtgaccattgccccaagggcgcgtgcggcctgcagaccaagatccagggacctagaggcctcggcgatgacactgcgctgaacgacgcgcgcttattctgctgccgcagttgaacggcgccgccgccgccgctctctcccgggccaggaggctagtcccacctcttgctattaaagcttctctgagttga

SEQ ID NO: 199191 - DNA, 651 bp, Homo sapiens
  Payload ID: 19296
  Gene Name: vitelline membrane outer layer 1 homolog (chicken)
  Uniprot ID: Q7Z5L0
  ENST ID: ENST00000354194
  CDS Start-End: 82-294
ggcccttccgcaatcggagccctcacagaggccaaactgatataaatctgcttaggaggcctgattcacagacgctacaggatggagcggggcgcaggagccaagctgctgccgctgctgctgcttctgcgggcgactggtttcacatgtgcacagacagatggccggaacggctacacggcggtcatcgaagtgaccagcgggggtccctggggcgactgggcctggcctgagatgtgtcccgatggattcttcgccagcgggttctcgctcaagctggggcgaatggagtgagccgctgtggtgtcgcggcggcgcctacctagtggctttctcgcttcgcgtggaggcacccacgaccctcggtgacaacacagcagcgaacaacgtgcgcttccgctgttcagacggcgaggaactgcaggggcctgggctgagctggggagactttggagactggagtgaccattgccccaagggcgcgtgcggcctgcagaccaagatccagggacctagaggcctcggcgatgacactgcgctgaacgacgcgcgcttattctgctgccgcagttgaacggcgccgccgccgccgctctctcccgggccaggaggctagtcccacctcttgctattaaagcttctctgagttga

SEQ ID NO: 199192 - DNA, 712 bp, Homo sapiens
  Payload ID: 19296
  Gene Name: vitelline membrane outer layer 1 homolog (chicken)
  Uniprot ID: Q7Z5L0
  ENST ID: ENST00000416307
  CDS Start-End: 47-355
actgatataaatctgcttaggaggcctgattcacagacgctacaggatggagcggggcgcaggagccaagctgctgccgctgctgctgcttctgcgggcgactggtttcacatgtgcacagacagatggccggaacggctacacggcggtcatcgaagtgaccagcgggggtccctggggcgactgggcctggcctgagatgtgtcccgatggattcttcgccagcgggttctcgctcaaggtggagcctccccaaggcattcctggcgacgacactgcactgaatgggatcaggctgcactgcgcgcgcgggaacgtcctaggcaatacgcacgtgctggggcgaatggagtgagccgctgtggtgtcgcggcggcgcctacctagtggctttctcgcttcgcgtggaggcacccacgaccctcggtgacaacacagcagcgaacaacgtgcgcttccgctgttcagacggcgaggaactgcaggggcctgggctgagctggggagactttggagactggagtgaccattgccccaagggcgcgtgcggcctgcagaccaagatccagggacctagaggcctcggcgatgacactgcgctgaacgacgcgcgcttattctgctgccgcagttgaacggcgccgccgccgccgctctctcccgggccaggaggctagtcccacctcttgctattaaagcttctctgagttga

SEQ ID NO: 199193 - DNA, 741 bp, Homo sapiens
  Payload ID: 19296
  Gene Name: vitelline membrane outer layer 1 homolog (chicken)
  Uniprot ID: Q7Z5L0
  ENST ID: ENST00000441199
  CDS Start-End: 20-364
gattcacagacgctacaggatggagcggggcgcaggagccaagctgctgccgctgctgctgcttctgcgggcgactggtttcacatgtgcacagacagatggccggaacggctacacggcggtcatcgaagtgaccagcgggggtccctggggcgactgggcctggcctgagatgtgtcccgatggattcttcgccagcgggttctcgctcaaggtggagcctccccaaggcattcctggcgacgacactgcactgaatgggatcaggctgcactgcgcgcgcgggaacgtcctaggcaatacgcacgtggtagagtcccagtctggaaggtggggcgcaggggtcgaggatcccttggggtgatgctggggcgaatggagtgagccgctgtggtgtcgcggcggcgcctacctagtggctttctcgcttcgcgtggaggcacccacgaccctcggtgacaacacagcagcgaacaacgtgcgcttccgctgttcagacggcgaggaactgcaggggcctgggctgagctggggagactttggagactggagtgaccattgccccaagggcgcgtgcggcctgcagaccaagatccagggacctagaggcctcggcgatgacactgcgctgaacgacgcgcgcttattctgctgccgcagttgaacggcgccgccgccgccgctctctcccgggccaggaggctagtcccacctcttgctattaaagcttctctgagttga

SEQ ID NO: 199194 - DNA, 2525 bp, Homo sapiens
  Payload ID: 19297
  Gene Name: vitrin
  Uniprot ID: Q6UXI7
  ENST ID: ENST00000379241
  CDS Start-End: 127-2097
tagaataatttggatgggatttgtgatgcaggaaagcctaagggaaaaagaatattcattctgtgtggtgaaaattttttgaaaaaaaaattgccttcttcaaacaagggtgtcattctgatatttatgaggactgttgttctcactatgaaggcatctgttattgaaatgttccttgttttgctggtgactggagtacattcaaacaaagaaacggcaaagaagattaaaaggcccaagttcactgtgcctcagatcaactgcgatgtcaaagccggaaagatcatcgatcctgagttcattgtgaaatgtccagcaggatgccaagaccccaaataccatgtttatggcactgacgtgtatgcatcctactccagtgtgtgtggcgctgccgtacacagtggtgtgcttgataattcaggagggaaaatacttgttcggaaggttgctggacagtctggttacaaagggagttattccaacggtgtccaatcgttatccctaccacgatggagagaatcctttatcgtcttagaaagtaaacccaaaaagggtgtaacctacccatcagctcttacatactcatcatcgaaaagtccagctgcccaagcaggtgagaccacaaaagcctatcagaggccacctattccagggacaactgcacagccggtcactctgatgcagcttctggctgtcactgtagctgtggccacccccaccaccttgccaaggccatccccttctgctgcttctaccaccagcatccccagaccacaatcagtgggccacaggagccaggagatggatctctggtccactgccacctacacaagcagccaaaacaggcccagagctgatccaggacttgttccaaaagaagaattgagcacacagtctttggagccagtatccctgggagatccaaactgcaaaattgacttgtcgtttttaattgatgggagcaccagcattggcaaacggcgattccgaatccagaagcagctcctggctgatgttgcccaagctcttgacattggccctgccggtccactgatgggtgttgtccagtatggagacaaccctgctactcactttaacctcaagacacacacgaattctcgagatctgaagacagccatagagaaaattactcagagaggaggactttctaatgtaggtcgggccatctcctttgtgaccaagaacttcttttccaaagccaatggaaacagaagcggggctcccaatgtggtggtggtgatggtggatggctggcccacggacaaagtggaggaggcttcaagacttgcgagagagtcaggaatcaacattttcttcatcaccattgaaggtgctgctgaaaatgagaagcagtatgtggtggagcccaactttgcaaacaaggccgtgtgcagaacaaacggcttctactcgctccacgtgcagagctggtttggcctccacaagaccctgcagcctctggtgaagcgggtctgcgacactgaccgcctggcctgcagcaagacctgcttgaactcggctgacattggcttcgtcatcgacggctccagcagtgtggggacgggcaacttccgcaccgtcctccagtttgtgaccaacctcaccaaagagtttgagatttccgacacggacacgcgcatcggggccgtgcagtacacctacgaacagcggctggagtttgggttcgacaagtacagcagcaagcctgacatcctcaacgccatcaagagggtgggctactggagtggtggcaccagcacgggggctgccatcaacttcgccctggagcagctcttcaagaagtccaagcccaacaagaggaagttaatgatcctcatcaccgacgggaggtcctacgacgacgtccggatcccagccatggctgcccatctgaagggagtgatcacctatgcgataggcgttgcctgggctgcccaagaggagctagaagtcattgccactcaccccgccagagaccactccttctttgtggacgagtttgacaacctccatcagtatgtccccaggatcatccagaacatttgtacagagttcaactcacagcctcggaactgaattcagagcaggcagagcaccagcaagtgctgctttactaactgacgtgttggaccaccccaccgcttaatggggcacgcacggtgcatcaagtcttgggcagggcatggagaaacaaatgtcttgttattattctttgccatcatgctttttcatattccaaaacttggagttacaaagatgatcacaaacgtatagaatgagccaaaaggctacatcatgttgagggtgctggagattttacattttgacaattgttttcaaaataaatgttcggaatacagtgcagcccttacgacaggcttacgtagagcttttgtgagatttttaagttgttatttctgattagaactctgtaaccctcagcaagtttcatttttgtcatgacaatgtaggaattgctgaattaaatgtttagaaggatgaca

SEQ ID NO: 199195 - DNA, 2810 bp, Homo sapiens
  Payload ID: 19297
  Gene Name: vitrin
  Uniprot ID: Q6UXI7
  ENST ID: ENST00000379242
  CDS Start-End: 303-2384
aattcagcactaaaaccagtgtgagaagcagtatgtgtgagcatgtgtgtgtgtgtatgtgtgtgggggggggtgtaaaatgtgtttttcaaagtactgagaggttgatgggactgttcgattagctcctctgagaagaagagaaaaggttcttggacctctccctgtttcttccttagaataatttggatgggatttgtgatgcaggaaagcctaagggaaaaagaatattcattctgtgtggtgaaaattttttgaaaaaaaaattgccttcttcaaacaagggtgtcattctgatatttatgaggactgttgttctcactatgaaggcatctgttattgaaatgttccttgttttgctggtgactggagtacattcaaacaaagaaacggcaaagaagattaaaaggcccaagttcactgtgcctcagatcaactgcgatgtcaaagccggaaagatcatcgatcctgagttcattgtgaaatgtccagcaggatgccaagaccccaaataccatgtttatggcactgacgtgtatgcatcctactccagtgtgtgtggcgctgccgtacacagtggtgtgcttgataattcaggagggaaaatacttgttcggaaggttgctggacagtctggttacaaagggagttattccaacggtgtccaatcgttatccctaccacgatggagagaatcctttatcgtcttagaaagtaaacccaaaaagggtgtaacctacccatcagctcttacatactcatcatcgaaaagtccagctgcccaagcaggtgagaccacaaaagcctatcagaggccacctattccagggacaactgcacagccggtcactctgatgcagcttctggctgtcactgtagctgtggccacccccaccaccttgccaaggccatccccttctgctgcttctaccaccagcatccccagaccacaatcagtgggccacaggagccaggagatggatctctggtccactgccacctacacaagcagccaaaacaggcccagagctgatccaggtatccaaaggcaagatccttcaggagctgccttccagaaacctgttggagcggatgtcagcctgggagagatggactcatggaaacctggatcggtccttttagatgaaggacttgttccaaaagaagaattgagcacacagtctttggagccagtatccctgggagatccaaactgcaaaattgacttgtcgtttttaattgatgggagcaccagcattggcaaacggcgattccgaatccagaagcagctcctggctgatgttgcccaagctcttgacattggccctgccggtccactgatgggtgttgtccagtatggagacaaccctgctactcactttaacctcaagacacacacgaattctcgagatctgaagacagccatagagaaaattactcagagaggaggactttctaatgtaggtcgggccatctcctttgtgaccaagaacttcttttccaaagccaatggaaacagaagcggggctcccaatgtggtggtggtgatggtggatggctggcccacggacaaagtggaggaggcttcaagacttgcgagagagtcaggaatcaacattttcttcatcaccattgaaggtgctgctgaaaatgagaagcagtatgtggtggagcccaactttgcaaacaaggccgtgtgcagaacaaacggcttctactcgctccacgtgcagagctggtttggcctccacaagaccctgcagcctctggtgaagcgggtctgcgacactgaccgcctggcctgcagcaagacctgcttgaactcggctgacattggcttcgtcatcgacggctccagcagtgtggggacgggcaacttccgcaccgtcctccagtttgtgaccaacctcaccaaagagtttgagatttccgacacggacacgcgcatcggggccgtgcagtacacctacgaacagcggctggagtttgggttcgacaagtacagcagcaagcctgacatcctcaacgccatcaagagggtgggctactggagtggtggcaccagcacgggggctgccatcaacttcgccctggagcagctcttcaagaagtccaagcccaacaagaggaagttaatgatcctcatcaccgacgggaggtcctacgacgacgtccggatcccagccatggctgcccatctgaagggagtgatcacctatgcgataggcgttgcctgggctgcccaagaggagctagaagtcattgccactcaccccgccagagaccactccttctttgtggacgagtttgacaacctccatcagtatgtccccaggatcatccagaacatttgtacagagttcaactcacagcctcggaactgaattcagagcaggcagagcaccagcaagtgctgctttactaactgacgtgttggaccaccccaccgcttaatggggcacgcacggtgcatcaagtcttgggcagggcatggagaaacaaatgtcttgttattattctttgccatcatgctttttcatattccaaaacttggagttacaaagatgatcacaaacgtatagaatgagccaaaaggctacatcatgttgagggtgctggagattttacattttgacaattgttttcaaaataaatgttcggaatacagtgcagcccttacgacaggcttacgtagagcttttgtgagatttttaagttgttatttctgattagaactctgtaaccctcagcaagtttcatttttgtcatgacaatgtaggaattgctgaattaaatgtttagaaggatga

SEQ ID NO: 199196 - DNA, 2770 bp, Homo sapiens
  Payload ID: 19297
  Gene Name: vitrin
  Uniprot ID: Q6UXI7
  ENST ID: ENST00000389975
  CDS Start-End: 303-2339
aattcagcactaaaaccagtgtgagaagcagtatgtgtgagcatgtgtgtgtgtgtatgtgtgtgggggggggtgtaaaatgtgtttttcaaagtactgagaggttgatgggactgttcgattagctcctctgagaagaagagaaaaggttcttggacctctccctgtttcttccttagaataatttggatgggatttgtgatgcaggaaagcctaagggaaaaagaatattcattctgtgtggtgaaaattttttgaaaaaaaaattgccttcttcaaacaagggtgtcattctgatatttatgaggactgttgttctcactatgaaggcatctgttattgaaatgttccttgttttgctggtgactggagtacattcaaacaaagaaacggcaaagaagattaaaaggcccaagttcactgtgcctcagatcaactgcgatgtcaaagccggaaagatcatcgatcctgagttcattgtgaaatgtccagcaggatgccaagaccccaaataccatgtttatggcactgacgtgtatgcatcctactccagtgtgtgtggcgctgccgtacacagtggtgtgcttgataattcaggagggaaaatacttgttcggaaggttgctggacagtctggttacaaagggagttattccaacggtgtccaatcgttatccctaccacgatggagagaatcctttatcgtcttagaaagtaaacccaaaaagggtgtaacctacccatcagctcttacatactcatcatcgaaaagtccagctgcccaagcaggtgagaccacaaaagcctatcagaggccacctattccagggacaactgcacagccggtcactctgatgcagcttctggctgtcactgtagctgtggccacccccaccaccttgccaaggccatccccttctgctgcttctaccaccagcatccccagaccacaatcagtgggccacaggagccaggagatggatctctggtccactgccacctacacaagcagccaaaacaggcccagagctgatccaggtatccaaaggcaagatccttcaggagctgccttccagaaacctgttggagcggatgtcagcctgggacttgttccaaaagaagaattgagcacacagtctttggagccagtatccctgggagatccaaactgcaaaattgacttgtcgtttttaattgatgggagcaccagcattggcaaacggcgattccgaatccagaagcagctcctggctgatgttgcccaagctcttgacattggccctgccggtccactgatgggtgttgtccagtatggagacaaccctgctactcactttaacctcaagacacacacgaattctcgagatctgaagacagccatagagaaaattactcagagaggaggactttctaatgtaggtcgggccatctcctttgtgaccaagaacttcttttccaaagccaatggaaacagaagcggggctcccaatgtggtggtggtgatggtggatggctggcccacggacaaagtggaggaggcttcaagacttgcgagagagtcaggaatcaacattttcttcatcaccattgaaggtgctgctgaaaatgagaagcagtatgtggtggagcccaactttgcaaacaaggccgtgtgcagaacaaacggcttctactcgctccacgtgcagagctggtttggcctccacaagaccctgcagcctctggtgaagcgggtctgcgacactgaccgcctggcctgcagcaagacctgcttgaactcggctgacattggcttcgtcatcgacggctccagcagtgtggggacgggcaacttccgcaccgtcctccagtttgtgaccaacctcaccaaagagtttgagatttccgacacggacacgcgcatcggggccgtgcagtacacctacgaacagcggctggagtttgggttcgacaagtacagcagcaagcctgacatcctcaacgccatcaagagggtgggctactggagtggtggcaccagcacgggggctgccatcaacttcgccctggagcagctcttcaagaagtccaagcccaacaagaggaagttaatgatcctcatcaccgacgggaggtcctacgacgacgtccggatcccagccatggctgcccatctgaagggagtgatcacctatgcgataggcgttgcctgggctgcccaagaggagctagaagtcattgccactcaccccgccagagaccactccttctttgtggacgagtttgacaacctccatcagtatgtccccaggatcatccagaacatttgtacagagttcaactcacagcctcggaactgaattcagagcaggcagagcaccagcaagtgctgctttactaactgacgtgttggaccaccccaccgcttaatggggcacgcacggtgcatcaagtcttgggcagggcatggagaaacaaatgtcttgttattattctttgccatcatgctttttcatattccaaaacttggagttacaaagatgatcacaaacgtatagaatgagccaaaaggctacatcatgttgagggtgctggagattttacattttgacaattgttttcaaaataaatgttcggaatacagtgcagcccttacgacaggcttacgtagagcttttgtgagatttttaagttgttatttctgattagaactctgtaaccctcagcaagtttcatttttgtcatgacaatgtaggaattgctgaattaaatgtttagaaggatgacatgc

SEQ ID NO: 199197 - DNA, 2438 bp, Homo sapiens
  Payload ID: 19297
  Gene Name: vitrin
  ENST ID: ENST00000404084
  CDS Start-End: 167-2059
agaagagaaaaggttcttggacctctccctgtttcttccttagaataatttggatgggatttgtgatgcaggaaagcctaagggaaaaagaatattcattctgtgtggtgaaaattttttgaaaaaaaaattgccttcttcaaacaagggtgtcattctgatatttatgaggactgttgttctcactatgaaggcatctgttattgaaatgttccttgctgtgcctcagatcaactgcgatgtcaaagccggaaagatcatcgatcctgagttcattgtgaaatgtccagcaggatgccaagaccccaaataccatgtttatggcactgacgtgtatgcatcctactccagtgtgtgtggcgctgccgtacacagtggtgtgcttgataattcaggagggaaaatacttgttcggaaggttgctggacagtctggttacaaagggagttattccaacggtgtccaatcgttatccctaccacgatggagagaatcctttatcgtcttagaaagtaaacccaaaaagggtgtaacctacccatcagctcttacatactcatcatcgaaaagtccagctgcccaagcaggtgagaccacaaaagcctatcagaggccacctattccagggacaactgcacagccggtcactctgatgcagcttctggctgtcactgtagctgtggccacccccaccaccttgccaaggccatccccttctgctgcttctaccaccagcatccccagaccacaatcagtgggccacaggagccaggagatgggagagatggactcatggaaacctggatcggtccttttagatgaaggacttgttccaaaagaagaattgagcacacagtctttggagccagtatccctgggagatccaaactgcaaaattgacttgtcgtttttaattgatgggagcaccagcattggcaaacggcgattccgaatccagaagcagctcctggctgatgttgcccaagctcttgacattggccctgccggtccactgatgggtgttgtccagtatggagacaaccctgctactcactttaacctcaagacacacacgaattctcgagatctgaagacagccatagagaaaattactcagagaggaggactttctaatgtaggtcgggccatctcctttgtgaccaagaacttcttttccaaagccaatggaaacagaagcggggctcccaatgtggtggtggtgatggtggatggctggcccacggacaaagtggaggaggcttcaagacttgcgagagagtcaggaatcaacattttcttcatcaccattgaaggtgctgctgaaaatgagaagcagtatgtggtggagcccaactttgcaaacaaggccgtgtgcagaacaaacggcttctactcgctccacgtgcagagctggtttggcctccacaagaccctgcagcctctggtgaagcgggtctgcgacactgaccgcctggcctgcagcaagacctgcttgaactcggctgacattggcttcgtcatcgacggctccagcagtgtggggacgggcaacttccgcaccgtcctccagtttgtgaccaacctcaccaaagagtttgagatttccgacacggacacgcgcatcggggccgtgcagtacacctacgaacagcggctggagtttgggttcgacaagtacagcagcaagcctgacatcctcaacgccatcaagagggtgggctactggagtggtggcaccagcacgggggctgccatcaacttcgccctggagcagctcttcaagaagtccaagcccaacaagaggaagttaatgatcctcatcaccgacgggaggtcctacgacgacgtccggatcccagccatggctgcccatctgaagggagtgatcacctatgcgataggcgttgcctgggctgcccaagaggagctagaagtcattgccactcaccccgccagagaccactccttctttgtggacgagtttgacaacctccatcagtatgtccccaggatcatccagaacatttgtacagagttcaactcacagcctcggaactgaattcagagcaggcagagcaccagcaagtgctgctttactaactgacgtgttggaccaccccaccgcttaatggggcacgcacggtgcatcaagtcttgggcagggcatggagaaacaaatgtcttgttattattctttgccatcatgctttttcatattccaaaacttggagttacaaagatgatcacaaacgtatagaatgagccaaaaggctacatcatgttgagggtgctggagattttacattttgacaattgttttcaaaataaatgttcggaatacagtgcagcccttacgacaggcttacgtagagcttttgtgagatttttaagttgttatttctgattagaactctgtaaccctcagcaagtttcatttt

SEQ ID NO: 199198 - DNA, 2161 bp, Homo sapiens
  Payload ID: 19297
  Gene Name: vitrin
  Uniprot ID: Q6UXI7
  ENST ID: ENST00000401530
  CDS Start-End: 116-2089
ggatgggatttgtgatgcaggaaagcctaagggaaaaagaatattcattctgtgtggtgaaaattttttgaaaaaaaaattgccttcttcaaacaagggtgtcattctgatatttatgaggactgttgttctcactatgaaggcatctgttattgaaatgttccttgttttgctggtgactggagtacattcaaacaaagaaacggcaaagaagattaaaaggcccaagttcactgtgcctcagatcaactgcgatgtcaaagccggaaagatcatcgatcctgagttcattgtgaaatgtccagcaggatgccaagaccccaaataccatgtttatggcactgacgtgtatgcatcctactccagtgtgtgtggcgctgccgtacacagtggtgtgcttgataattcaggagggaaaatacttgttcggaaggttgctggacagtctggttacaaagggagttattccaacggtgtccaatcgttatccctaccacgatggagagaatcctttatcgtcttagaaagtaaacccaaaaagggtgtaacctacccatcagctcttacatactcatcatcgaaaagtccagctgcccaagcaggtgagaccacaaaagcctatcagaggccacctattccagggacaactgcacagccggtcactctgatgcagcttctggctgtcactgtagctgtggccacccccaccaccttgccaaggccatccccttctgctgcttctaccaccagcatccccagaccacaatcagtgggccacaggagccaggagatggatctctggtccactgccacctacacaagcagccaaaacaggcccagagctgatccaggtatccaaaggcaagatccttcaggagctgccttccagaaacctgttggagcggatgtcagcctggactgcaaaattgacttgtcgtttttaattgatgggagcaccagcattggcaaacggcgattccgaatccagaagcagctcctggctgatgttgcccaagctcttgacattggccctgccggtccactgatgggtgttgtccagtatggagacaaccctgctactcactttaacctcaagacacacacgaattctcgagatctgaagacagccatagagaaaattactcagagaggaggactttctaatgtaggtcgggccatctcctttgtgaccaagaacttcttttccaaagccaatggaaacagaagcggggctcccaatgtggtggtggtgatggtggatggctggcccacggacaaagtggaggaggcttcaagacttgcgagagagtcaggaatcaacattttcttcatcaccattgaaggtgctgctgaaaatgagaagcagtatgtggtggagcccaactttgcaaacaaggccgtgtgcagaacaaacggcttctactcgctccacgtgcagagctggtttggcctccacaagaccctgcagcctctggtgaagcgggtctgcgacactgaccgcctggcctgcagcaagacctgcttgaactcggctgacattggcttcgtcatcgacggctccagcagtgtggggacgggcaacttccgcaccgtcctccagtttgtgaccaacctcaccaaagagtttgagatttccgacacggacacgcgcatcggggccgtgcagtacacctacgaacagcggctggagtttgggttcgacaagtacagcagcaagcctgacatcctcaacgccatcaagagggtgggctactggagtggtggcaccagcacgggggctgccatcaacttcgccctggagcagctcttcaagaagtccaagcccaacaagaggaagttaatgatcctcatcaccgacgggaggtcctacgacgacgtccggatcccagccatggctgcccatctgaagggagtgatcacctatgcgataggcgttgcctgggctgcccaagaggagctagaagtcattgccactcaccccgccagagaccactccttctttgtggacgagtttgacaacctccatcagtatgtccccaggatcatccagaacatttgtacagagttcaactcacagcctcggaactgaattcagagcaggcagagcaccagcaagtgctgctttactaactgacgtgttggaccaccccaccgcttaatg

SEQ ID NO: 199199 - DNA, 1344 bp, Homo sapiens
  Payload ID: 19297
  Gene Name: vitrin
  Uniprot ID: Q6UXI7
  ENST ID: ENST00000457137
  CDS Start-End: 229-840
gtaaaatgtgtttttcaaagtactgagaggttgatgggactgttcgattagctcctctgagaagaagagaaaaggttcttggacctctccctgtttcttccttagaataatttggatgggatttgtgatgcaggaaagcctaagggaaaaagaatattcattctgtgtggtgaaaattttttgaaaaaaaaattgccttcttcaaacaagggtgtcattctgatatttatgaggactgttgttctcactatgaaggcatctgttattgaaatgttccttgttttgctggtgactggagtacattcaaacaaagaaacggcaaagaagattaaaaggcccaagttcactgtgcctcagatcaactgcgatgtcaaagccggaaagatcatcgatcctgagttcattgtgaaatgtccagcaggatgccaagaccccaaataccatgtttatggcactgacgtgtatgcatcctactccagtgtgtgtggcgctgccgtacacagtggtgtgcttgataattcaggagggaaaatacttgttcggaaggttgctggacagtctggttacaaagggagttattccaacggtgtccaatcgttatccctaccacgatggagagaatcctttatcgtcttagaaagtaaacccaaaaagggtgtaacctacccatcagctcttacatactcatcatcgaaaagtccagctgcccaagcaggcaagtgctcacgtgtgattgaatctaaaccttctgagtccatgaacacgcgacgtgttttgggagatagcggagaaattaacatcttaaccggtcaagctccactggctctggcaatattttaacagatgccaggaacatgggcacagaaatcaatgagatcagatggctggggctgaagaatgaaagctttattttttgtttttgcaattccgagattgtgtctctatatttgtgtcattttcattcagattgactgttgccttgagttttaatgtattgttgctttagaaaatgacatgacattctgtccggaaatgtttcctggcagctaaaaggaaaaagctgtatctacttagatatgaaatgaagagaagcaaagagaacgaggtggtttatgtgataacagcaagctgctcatccaaataacccaggccaaaaatacactgtctacaaggttgtgccaactcagctttcatgtgaaccacaaaagggagtatcggtagacctcaggccaagaaaatacctttttccaggtttctgtgttaaatcaagaactgtactatgcattattgtatctccagaggtgttttgatttcccacacaaagagaaactgtgagtcgcttta

SEQ ID NO: 199200 - DNA, 2650 bp, Homo sapiens
  Payload ID: 19297
  Gene Name: vitrin
  ENST ID: ENST00000497382
  CDS Start-End: 1181-2224
gttcgattagctcctctgagaagaagagaaaaggttcttggacctctccctgtttcttccttagaataatttggatgggatttgtgatgcaggaaagcctaagggaaaaagaatattcattctgtgtggtgaaaattttttgaaaaaaaaattgccttcttcaaacaagggtgtcattctgatatttatgaggactgttgttctcactatgaaggcatctgttattgaaatgttccttgttttgctggtgactggagtacattcaaacaaagaaacggcaaagaagattaaaaggcccaagttcactgtgcctcagatcaactgcgatgtcaaagccggaaagatcatcgatcctgagttcattgtgaaatgtccagcaggatgccaagaccccaaataccatgtttatggcactgacgtgtatgcatcctactccagtgtgtgtggcgctgccgtacacagtggtgtgcttgataattcaggagggaaaatacttgttcggaaggttgctggacagtctggttacaaagggagttattccaacggtgtccaatcgttatccctaccacgatggagagaatcctttatcgtcttagaaagtaaacccaaaaagggtgtaacctacccatcagctcttacatactcatcatcgaaaagtccagctgcccaagcaggtgagaccacaaaagcctatcagaggccacctattccagggacaactgcacagccggtcactctgatgcagcttctggctgtcactgtagctgtggccacccccaccaccttgccaaggccatccccttctgctgcttctaccaccagcatccccagaccacaatcagtgggccacaggagccaggagatggatctctggtccactgccacctacacaagcagccaaaacaggcccagagctgatccaggtatccaaaggcaagatccttcaggagctgccttccagaaacctgttggagcggatgtcagcctgggacttgttccaaaagaagaattgagcacacagtctttggagccagtatccctgggagatccaaactgcaaaattgacttgtcgtttttaattgatgggagcaccagcattggcaaacggcgattccgaatccagaagcagctcctggctgatgttgcccaagctcttgacattggccctgccggtccactgatgggtgttgtccagtatggagacaaccctgctactcactttaacctcaagacacacacgaattctcgagatctgaagacagccatagagaaaattactcagagaggaggactttctaatgtaggtcgggccatctcctttgtgaccaagaacttcttttccaaagccaatggaaacagaagcggggctcccaatgtggtggtggtgatggtggatggctggcccacggacaaagtggaggaggcttcaagacttgcgagagagtcaggaatcaacattttcttcatcaccattgaaggtgctgctgaaaatgagaagcagtatgtggtggagcccaactttgcaaacaaggccgtgtgcagaacaaacggcttctactcgctccacgtgcagagctggtttggcctccacaagaccctgcagcctctggtgaagcgggtctgcgacactgaccgcctggcctgcagcaagacctgcttgaactcggctgacattggcttcgtcatcgacggctccagcagtgtggggacgggcaacttccgcaccgtcctccagtttgtgaccaacctcaccaaagagtttgagatttccgacacggacacgcgcatcggggccgtgcagtacacctacgaacagcggctggagtttgggttcgacaagtacagcagcaagcctgacatcctcaacgccatcaagagggtgggctactggagtggtggcaccagcacgggggctgccatcaacttcgccctggagcagctcttcaagaagtccaagcccaacaagaggaagttaatgatcctcatcaccgacgggaggtcctacgacgacgtccggatcccagccatggctgcccatctgaagggagtgatcacctatgcgataggcgttgcctgggctgcccaagaggagctagaagtcattgccactcaccccgccagagaccactccttctttgtggacgagtttgacaacctccatcagtatgtccccaggatcatccagaacatttgtacagagttcaactcacagcctcggaactgaattcagagcaggcagagcaccagcaagtgctgctttactaactgacgtgttggaccaccccaccgcttaatggggcacgcacggtgcatcaagtcttgggcagggcatggagaaacaaatgtcttgttattattctttgccatcatgctttttcatattccaaaacttggagttacaaagatgatcacaaacgtatagaatgagccaaaaggctacatcatgttgagggtgctggagattttacattttgacaattgttttcaaaataaatgttcggaatacagtgcagcccttacgacaggcttacgtagagcttttgtgagatttttaagttgttatttctgattagaactctgtaaccctcagcaagtttcatttttgtcatgacaatgtaggaattgctgaattaaatgtttagaaggatga

SEQ ID NO: 199201 - DNA, 579 bp, Homo sapiens
  Payload ID: 19297
  Gene Name: vitrin
  ENST ID: ENST00000464309
  CDS Start-End: 1-404
acacaagcagccaaaacaggcccagagctgatccaggtatccaaaggcaagatccttcaggagctgccttccagaaacctgttggagcggatgtcagcctgggacttgttccaaaagaagaattgagcacacagtctttggagccagtatccctgggagatccaaactgcaaaattgacttgtcgtttttaattgatgggagcaccagcattggcaaacggcgattccgaatccagaagcagctcctggctgatgttgcccaagctcttgacattggccctgccggtccactgatgggtgttgtccagtatgggcccctgcactggtactggaaaaactcaccaggcaatggagaagaatgggtgggaagagagacggcccccatcagtcagctgagcacctagatgactttcgccaacctgctctattattatacttaggatagaaatggagggctcgtgttgacatccagtctcaatctttcatttggcggtaataaatcactcttatttcagatatgaataggtttctcactgaaacagatacatagatattgataataaacaatcaaaagaacaa

SEQ ID NO: 199202 - DNA, 2149 bp, Homo sapiens
  Payload ID: 19298
  Gene Name: vitronectin
  Uniprot ID: P04004
  ENST ID: ENST00000226218
  CDS Start-End: 620-2056
ctttgttcttttatgctaaaaaataaaattccccagagtgcttacaatctctcctcccactccctttttcctgccctaaataaataatggcgaatgagcacccagccagggatgtgtctgatcaaacaatcatggatcaatagctatgtttggagaaggaatttgtggctgctccagctactgggcattttgtctggtccagttcatgtaatctcccaacaccccatgaagcaaggctttgttaatcctattttactgaaaatgaactaagactcagagagataaagctgttgcccaatgagccttctttctgccctccagatccacggtgctaattccccttccgatgacctaatgattctgagcttggcaaaggtcttatctcccagctcgcccaggcccagtgttccaggaatgtgacctttgctgcagcagccgctggagggggcagaggggatgggctggaggttgagcaaacagagcagcagaaaaggcagttcctcttctccagtgccctccttccctgtctctgcctctccctcccttcctcaggcatcagagcggagacttcagggagaccagagcccagcttgccaggcactgagctagaagccctgccatggcacccctgagaccccttctcatactggccctgctggcatgggttgctctggctgaccaagagtcatgcaagggccgctgcactgagggcttcaacgtggacaagaagtgccagtgtgacgagctctgctcttactaccagagctgctgcacagactatacggctgagtgcaagccccaagtgactcgcggggatgtgttcactatgccggaggatgagtacacggtctatgacgatggcgaggagaaaaacaatgccactgtccatgaacaggtggggggcccctccctgacctctgacctccaggcccagtccaaagggaatcctgagcagacacctgttctgaaacctgaggaagaggcccctgcgcctgaggtgggcgcctctaagcctgaggggatagactcaaggcctgagacccttcatccagggagacctcagcccccagcagaggaggagctgtgcagtgggaagcccttcgacgccttcaccgacctcaagaacggttccctctttgccttccgagggcagtactgctatgaactggacgaaaaggcagtgaggcctgggtaccccaagctcatccgagatgtctggggcatcgagggccccatcgatgccgccttcacccgcatcaactgtcaggggaagacctacctcttcaagggtagtcagtactggcgctttgaggatggtgtcctggaccctgattacccccgaaatatctctgacggcttcgatggcatcccggacaacgtggatgcagccttggccctccctgcccatagctacagtggccgggagcgggtctacttcttcaaggggaaacagtactgggagtaccagttccagcaccagcccagtcaggaggagtgtgaaggcagctccctgtcggctgtgtttgaacactttgccatgatgcagcgggacagctgggaggacatcttcgagcttctcttctggggcagaacctctgctggtaccagacagccccagttcattagccgggactggcacggtgtgccagggcaagtggacgcagccatggctggccgcatctacatctcaggcatggcaccccgcccctccttggccaagaaacaaaggtttaggcatcgcaaccgcaaaggctaccgttcacaacgaggccacagccgtggccgcaaccagaactcccgccggccatcccgcgccacgtggctgtccttgttctccagtgaggagagcaacttgggagccaacaactatgatgactacaggatggactggcttgtgcctgccacctgtgaacccatccagagtgtcttcttcttctctggagacaagtactaccgagtcaatcttcgcacacggcgagtggacactgtggaccctccctacccacgctccatcgctcagtactggctgggctgcccagctcctggccatctgtaggagtcagagcccacatggccgggccctctgtagctccctcctcccatctccttcccccagcccaataaaggtcccttagccccgagtttaaaa

SEQ ID NO: 199203 - DNA, 501 bp, Homo sapiens
  Payload ID: 19298
  Gene Name: vitronectin
  ENST ID: ENST00000542029
  CDS Start-End: 148-501
agaatgagatcatgtctggcctgttgcaagaaccagaatgaaggatggagcagaagttggattggggcggcaagaagggagcatcagagcggagacttcagggagaccagagcccagcttgccaggcactgagctagaagccctgccatggcacccctgagaccccttctcatactggccctgctggcatgggttgctctggctgaccaagagtcatgcaagggccgctgcactgagggcttcaacgtggacaagaagtgccagtgtgacgagctctgctcttactaccagagctgctgcacagactatacggctgagtgcaagccccaagtgactcgcggggatgtgttcactatgccggaggatgagtacacggtctatgacgatggcgaggagaaaaacaatgccactgtccatgaacaggtggggggcccctccctgacctctgacctccaggcccagtccaaagggaatcctgagcagacacctgttctgaaacct

SEQ ID NO: 199204 - DNA, 5186 bp, Homo sapiens
  Payload ID: 19299
  Gene Name: v-kit Hardy-Zuckerman 4 feline sarcoma viral oncogene homolog
  Uniprot ID: P10721
  ENST ID: ENST00000288135
  CDS Start-End: 98-3028
cgctcgcggctctgggggctcggctttgccgcgctcgctgcacttgggcgagagctggaacgtggaccagagctcggatcccatcgcagctaccgcgatgagaggcgctcgcggcgcctgggattttctctgcgttctgctcctactgcttcgcgtccagacaggctcttctcaaccatctgtgagtccaggggaaccgtctccaccatccatccatccaggaaaatcagacttaatagtccgcgtgggcgacgagattaggctgttatgcactgatccgggctttgtcaaatggacttttgagatcctggatgaaacgaatgagaataagcagaatgaatggatcacggaaaaggcagaagccaccaacaccggcaaatacacgtgcaccaacaaacacggcttaagcaattccatttatgtgtttgttagagatcctgccaagcttttccttgttgaccgctccttgtatgggaaagaagacaacgacacgctggtccgctgtcctctcacagacccagaagtgaccaattattccctcaaggggtgccaggggaagcctcttcccaaggacttgaggtttattcctgaccccaaggcgggcatcatgatcaaaagtgtgaaacgcgcctaccatcggctctgtctgcattgttctgtggaccaggagggcaagtcagtgctgtcggaaaaattcatcctgaaagtgaggccagccttcaaagctgtgcctgttgtgtctgtgtccaaagcaagctatcttcttagggaaggggaagaattcacagtgacgtgcacaataaaagatgtgtctagttctgtgtactcaacgtggaaaagagaaaacagtcagactaaactacaggagaaatataatagctggcatcacggtgacttcaattatgaacgtcaggcaacgttgactatcagttcagcgagagttaatgattctggagtgttcatgtgttatgccaataatacttttggatcagcaaatgtcacaacaaccttggaagtagtagataaaggattcattaatatcttccccatgataaacactacagtatttgtaaacgatggagaaaatgtagatttgattgttgaatatgaagcattccccaaacctgaacaccagcagtggatctatatgaacagaaccttcactgataaatgggaagattatcccaagtctgagaatgaaagtaatatcagatacgtaagtgaacttcatctaacgagattaaaaggcaccgaaggaggcacttacacattcctagtgtccaattctgacgtcaatgctgccatagcatttaatgtttatgtgaatacaaaaccagaaatcctgacttacgacaggctcgtgaatggcatgctccaatgtgtggcagcaggattcccagagcccacaatagattggtatttttgtccaggaactgagcagagatgctctgcttctgtactgccagtggatgtgcagacactaaactcatctgggccaccgtttggaaagctagtggttcagagttctatagattctagtgcattcaagcacaatggcacggttgaatgtaaggcttacaacgatgtgggcaagacttctgcctattttaactttgcatttaaaggtaacaacaaagagcaaatccatccccacaccctgttcactcctttgctgattggtttcgtaatcgtagctggcatgatgtgcattattgtgatgattctgacctacaaatatttacagaaacccatgtatgaagtacagtggaaggttgttgaggagataaatggaaacaattatgtttacatagacccaacacaacttccttatgatcacaaatgggagtttcccagaaacaggctgagttttgggaaaaccctgggtgctggagctttcgggaaggttgttgaggcaactgcttatggcttaattaagtcagatgcggccatgactgtcgctgtaaagatgctcaagccgagtgcccatttgacagaacgggaagccctcatgtctgaactcaaagtcctgagttaccttggtaatcacatgaatattgtgaatctacttggagcctgcaccattggagggcccaccctggtcattacagaatattgttgctatggtgatcttttgaattttttgagaagaaaacgtgattcatttatttgttcaaagcaggaagatcatgcagaagctgcactttataagaatcttctgcattcaaaggagtcttcctgcagcgatagtactaatgagtacatggacatgaaacctggagtttcttatgttgtcccaaccaaggccgacaaaaggagatctgtgagaataggctcatacatagaaagagatgtgactcccgccatcatggaggatgacgagttggccctagacttagaagacttgctgagcttttcttaccaggtggcaaagggcatggctttcctcgcctccaagaattgtattcacagagacttggcagccagaaatatcctccttactcatggtcggatcacaaagatttgtgattttggtctagccagagacatcaagaatgattctaattatgtggttaaaggaaacgctcgactacctgtgaagtggatggcacctgaaagcattttcaactgtgtatacacgtttgaaagtgacgtctggtcctatgggatttttctttgggagctgttctctttaggaagcagcccctatcctggaatgccggtcgattctaagttctacaagatgatcaaggaaggcttccggatgctcagccctgaacacgcacctgctgaaatgtatgacataatgaagacttgctgggatgcagatcccctaaaaagaccaacattcaagcaaattgttcagctaattgagaagcagatttcagagagcaccaatcatatttactccaacttagcaaactgcagccccaaccgacagaagcccgtggtagaccattctgtgcggatcaattctgtcggcagcaccgcttcctcctcccagcctctgcttgtgcacgacgatgtctgagcagaatcagtgtttgggtcacccctccaggaatgatctcttcttttggcttccatgatggttattttcttttctttcaacttgcatccaactccaggatagtgggcaccccactgcaatcctgtctttctgagcacactttagtggccgatgatttttgtcatcagccaccatcctattgcaaaggttccaactgtatatattcccaatagcaacgtagcttctaccatgaacagaaaacattctgatttggaaaaagagagggaggtatggactgggggccagagtcctttccaaggcttctccaattctgcccaaaaatatggttgatagtttacctgaataaatggtagtaatcacagttggccttcagaaccatccatagtagtatgatgatacaagattagaagctgaaaacctaagtcctttatgtggaaaacagaacatcattagaacaaaggacagagtatgaacacctgggcttaagaaatctagtatttcatgctgggaatgagacataggccatgaaaaaaatgatccccaagtgtgaacaaaagatgctcttctgtggaccactgcatgagcttttatactaccgacctggtttttaaatagagtttgctattagagcattgaattggagagaaggcctccctagccagcacttgtatatacgcatctataaattgtccgtgttcatacatttgaggggaaaacaccataaggtttcgtttctgtatacaaccctggcattatgtccactgtgtatagaagtagattaagagccatataagtttgaaggaaacagttaataccattttttaaggaaacaatataaccacaaagcacagtttgaacaaaatctcctcttttagctgatgaacttattctgtagattctgtggaacaagcctatcagcttcagaatggcattgtactcaatggatttgatgctgtttgacaaagttactgattcactgcatggctcccacaggagtgggaaaacactgccatcttagtttggattcttatgtagcaggaaataaagtataggtttagcctccttcgcaggcatgtcctggacaccgggccagtatctatatatgtgtatgtacgtttgtatgtgtgtagacaaatatttggaggggtatttttgccctgagtccaagagggtcctttagtacctgaaaagtaacttggctttcattattagtactgctcttgtttcttttcacatagctgtctagagtagcttaccagaagcttccatagtggtgcagaggaagtggaaggcatcagtccctatgtatttgcagttcacctgcacttaaggcactctgttatttagactcatcttactgtacctgttccttagaccttccataatgctactgtctcactgaaacatttaaattttaccctttagactgtagcctggatattattcttgtagtttacctctttaaaaacaaaacaaaacaaaacaaaaaactccccttcctcactgcccaatataaaaggcaaatgtgtacatggcagagtttgtgtgttgtcttgaaagattcaggtatgttgcctttatggtttcccccttctacatttcttagactacatttagagaactgtggccgttatctggaagtaaccatttgcactggagttctatgctctcgcacctttccaaagttaacagattttggggttgtgttgtcacccaagagattgttgtttgccatactttgtctgaaaaattcctttgtgtttctattgacttcaatgatagtaagaaaagtggttgttagttatagatgtctaggtacttcaggggcacttcattgagagttttgtcttggatattcttgaaagtttatatttttataattttttcttacatcagatgtttctttgcagtggcttaatgtttgaaattattttgtggctttttttgtaaatattgaaatgtagcaataatgtcttttgaatattcccaagcccatgagtccttgaaaatattttttatatatacagtaactttatgtgtaaatacataagcggcgtaagtttaaaggatgttggtgttccacgtgttttattcctgtatgttgtccaattgttgacagttctgaagaattctaataaaatgtacatatataaatcaa

SEQ ID NO: 199205 - DNA, 3470 bp, Homo sapiens
  Payload ID: 19299
  Gene Name: v-kit Hardy-Zuckerman 4 feline sarcoma viral oncogene homolog
  Uniprot ID: P10721
  ENST ID: ENST00000412167
  CDS Start-End: 98-3016
cgctcgcggctctgggggctcggctttgccgcgctcgctgcacttgggcgagagctggaacgtggaccagagctcggatcccatcgcagctaccgcgatgagaggcgctcgcggcgcctgggattttctctgcgttctgctcctactgcttcgcgtccagacaggctcttctcaaccatctgtgagtccaggggaaccgtctccaccatccatccatccaggaaaatcagacttaatagtccgcgtgggcgacgagattaggctgttatgcactgatccgggctttgtcaaatggacttttgagatcctggatgaaacgaatgagaataagcagaatgaatggatcacggaaaaggcagaagccaccaacaccggcaaatacacgtgcaccaacaaacacggcttaagcaattccatttatgtgtttgttagagatcctgccaagcttttccttgttgaccgctccttgtatgggaaagaagacaacgacacgctggtccgctgtcctctcacagacccagaagtgaccaattattccctcaaggggtgccaggggaagcctcttcccaaggacttgaggtttattcctgaccccaaggcgggcatcatgatcaaaagtgtgaaacgcgcctaccatcggctctgtctgcattgttctgtggaccaggagggcaagtcagtgctgtcggaaaaattcatcctgaaagtgaggccagccttcaaagctgtgcctgttgtgtctgtgtccaaagcaagctatcttcttagggaaggggaagaattcacagtgacgtgcacaataaaagatgtgtctagttctgtgtactcaacgtggaaaagagaaaacagtcagactaaactacaggagaaatataatagctggcatcacggtgacttcaattatgaacgtcaggcaacgttgactatcagttcagcgagagttaatgattctggagtgttcatgtgttatgccaataatacttttggatcagcaaatgtcacaacaaccttggaagtagtagataaaggattcattaatatcttccccatgataaacactacagtatttgtaaacgatggagaaaatgtagatttgattgttgaatatgaagcattccccaaacctgaacaccagcagtggatctatatgaacagaaccttcactgataaatgggaagattatcccaagtctgagaatgaaagtaatatcagatacgtaagtgaacttcatctaacgagattaaaaggcaccgaaggaggcacttacacattcctagtgtccaattctgacgtcaatgctgccatagcatttaatgtttatgtgaatacaaaaccagaaatcctgacttacgacaggctcgtgaatggcatgctccaatgtgtggcagcaggattcccagagcccacaatagattggtatttttgtccaggaactgagcagagatgctctgcttctgtactgccagtggatgtgcagacactaaactcatctgggccaccgtttggaaagctagtggttcagagttctatagattctagtgcattcaagcacaatggcacggttgaatgtaaggcttacaacgatgtgggcaagacttctgcctattttaactttgcatttaaagagcaaatccatccccacaccctgttcactcctttgctgattggtttcgtaatcgtagctggcatgatgtgcattattgtgatgattctgacctacaaatatttacagaaacccatgtatgaagtacagtggaaggttgttgaggagataaatggaaacaattatgtttacatagacccaacacaacttccttatgatcacaaatgggagtttcccagaaacaggctgagttttgggaaaaccctgggtgctggagctttcgggaaggttgttgaggcaactgcttatggcttaattaagtcagatgcggccatgactgtcgctgtaaagatgctcaagccgagtgcccatttgacagaacgggaagccctcatgtctgaactcaaagtcctgagttaccttggtaatcacatgaatattgtgaatctacttggagcctgcaccattggagggcccaccctggtcattacagaatattgttgctatggtgatcttttgaattttttgagaagaaaacgtgattcatttatttgttcaaagcaggaagatcatgcagaagctgcactttataagaatcttctgcattcaaaggagtcttcctgcagcgatagtactaatgagtacatggacatgaaacctggagtttcttatgttgtcccaaccaaggccgacaaaaggagatctgtgagaataggctcatacatagaaagagatgtgactcccgccatcatggaggatgacgagttggccctagacttagaagacttgctgagcttttcttaccaggtggcaaagggcatggctttcctcgcctccaagaattgtattcacagagacttggcagccagaaatatcctccttactcatggtcggatcacaaagatttgtgattttggtctagccagagacatcaagaatgattctaattatgtggttaaaggaaacgctcgactacctgtgaagtggatggcacctgaaagcattttcaactgtgtatacacgtttgaaagtgacgtctggtcctatgggatttttctttgggagctgttctctttaggaagcagcccctatcctggaatgccggtcgattctaagttctacaagatgatcaaggaaggcttccggatgctcagccctgaacacgcacctgctgaaatgtatgacataatgaagacttgctgggatgcagatcccctaaaaagaccaacattcaagcaaattgttcagctaattgagaagcagatttcagagagcaccaatcatatttactccaacttagcaaactgcagccccaaccgacagaagcccgtggtagaccattctgtgcggatcaattctgtcggcagcaccgcttcctcctcccagcctctgcttgtgcacgacgatgtctgagcagaatcagtgtttgggtcacccctccaggaatgatctcttcttttggcttccatgatggttattttcttttctttcaacttgcatccaactccaggatagtgggcaccccactgcaatcctgtctttctgagcacactttagtggccgatgatttttgtcatcagccaccatcctattgcaaaggttccaactgtatatattcccaatagcaacgtagcttctaccatgaacagaaaacattctgatttggaaaaagagagggaggtatggactgggggccagagtcctttccaaggcttctccaattctgcccaaaaatatggttgatagtttacctgaataaatggtagtaatcacagttggccttcagaaccatccatagtagtatgatgatacaagattagaagctgaaaacctaagtcctttatgtggaaaacagaacatcattaga

SEQ ID NO: 199206 - DNA, 4717 bp, Homo sapiens
  Payload ID: 19300
  Gene Name: VMA21 vacuolar H+-ATPase homolog (S. cerevisiae)
  Uniprot ID: Q3ZAQ7
  ENST ID: ENST00000330374
  CDS Start-End: 106-411
ctacttccggtgcgaaccgcctcggccgttccctcgcggagcttactgagcgcggccgccgagcccagctccgccgccgagcgcctgtgccggcacggctacaccatggagcgcccggataaggcggcgctgaacgcactgcagcctcctgagttcagaaatgaaagctcattagcatctacactgaagacgctcctgttcttcacagctttaatgatcactgttcctattgggttatatttcacaactaaatcttacatatttgaaggcgcccttgggatgtccaatagggacagctatttttacgctgctattgttgcagtggtcgccgtccatgtggtgctggccctctttgtgtatgtggcctggaatgaaggctcacgacagtggcgtgaaggcaaacaggattaaagtgaacatcacctttttatagcattaaattcattttttaaaatgataaatgctggagggggccatctgatttgaataaagttgaaagaacatgttaaagtcagtcttaaggagtcacgtttgagtatgtaaattttgatctttctaatatgttggtttgtatattcagttttaactgtatgaatctgatttgcaaatgagaatttggaaaagttagttacaaagaaatatgttaatttaattagacaatactctggaaggaattttatcttctttcaacaaaacatgttttatagtattctgacttacggttgcttttgagttttactcatttggatatattaagatgcacacagtgaagcaaattaaactccactttacgctggaatgctttctttagcatgaaaataccaggtccttggatttgggattttaatttcctatggaaagttgcttaaattgtggacactggaattaatctgaatgtcactgaggaatttcacatgaagtgtaatccctagtcaataagaattatccattacattattttatgggaaaactaggctaaattacatccattcaggtaaaaggaccttagcttactgaaggatctaaagagcaaagcaaagatctcactactcaaacactcagcctgcttccttcaagtccccttgcaggccagctttgtgctttgcagaccaactttttaatgagatactttgcttcctcattcaacattgaagctaggcttcaattaaaaggttcgaggaagctccatttaaaattgttttttttactattttttaaaattgtagtgtatatgataggaatttgcatttaaatatgttcatttttgcatatgttaggagtggaaacaatctggaaaacatttttttttcatccaaaaagtattctccttgggcatatctgatggaaaaaaaccttgattttattttcgtatctttagtctgtgttctttctagttatttggtactaattatgtgcaatctaaaaacactcccacaagtatttgttttttaattataaaatcatagtatatgttctttgtagaaaactggaaaaatacatattcaaacaggaaaaaaaatcaaaattccccataatgttgccatctaaaaataacctctattttagttgatatcccgtattcatttttgaaagccattccttaatgctagtttgatacacactaaaagtttagcttacaagttcaaattctgccagcttttcctgacagctatttgcatttttttcagatgagtgattattggccattttctttttctttttctttattttatttatttatttttttgagacagagttttgctctgttgcccaggctggagtgcagtggtgcaatctcggctcactgcaacctctgcctcctgggttcaagtgattctccacctcagcctcccaagtagctgggactacggatgcctgccaccacgcctggctaatttttttttgtatttttttgtagagacggggtttcaccatgttgtccaggctaatcttgaacttgtgacctcaggtgatccacccgcctcggcctccgaaagtgctgggattacaggcgtgagctaccacgcccggccttattgaccattttctaaataagcacattctatctttattctcttaaaattcaaattttctgttactgataatcctaatactaggattcttgcttaagtatgtgaaaccattaccgatttgttgttcacatttattttttatgttgtgaaactggactaaaggaatagagggatgattagtcataaaagtcaaatagcatttgtgtttaactgttgagaaaagtgaaagatcagtatgattattatggaactgtttttaattcttgcttaaagactacaattttagtataatgacatttgagtctagggtagtatgtggtagatttctagatggtccctaattaagaagtattgttgtatttagaattgtccacctaatttctttttatataatgccaaggtatttcttgtgcttttgggatcttatgctgtttgtaaaatgttactgtccaatgttggattattgttttggtttcaggcatttgctgaataggtgatgatacatgggtatttttctgcaagtatttaaaccaggggcatatgcaaaggcagttgtaatttcctcttggaaaaagcgccaaatgtttgaaggttaaaatcaaatgctagggttgatatttaggcttataacaaaataggcttgttttcaaagcagttttttcctagagttttaactgttaactcactagtttgctgctgtttttaactatgttaaataacatatggtatttggcaaatagatttatttttcaaaatgtctcactagtttccttttacacaatgtatatacttcaagatgtatagaaaggaaagctacagttgagcccttatacatgttttaaggtagaaatatgttccctattgtttgaaaactgattgtaagaataacctcagttaggagatataacttgaagtgtcagtccaaactactgatttaaccctatttacggtaacacattaccttcctcacctcctgtttggccctggagaatgtagtcctttttctcatttgtgttgagaaatgaaaagtctgctgtagaatgtatctgatgtcattagttcttcaaatggataccattgtacatataacagtagaatttggtttggggttgttagtgaaaaaaaatttaaacctgccattaaaaatccccatgtttcatggaaatctaacagaaatacattgtaataattagaacattttgttttcttttttctttttttttttttcgagacggagttttgcccttcttgcccaggctggagtgcaagggcgcaatctcggctcgctgcaacctccgcctcccgggttcaagcagttctcctgcctcagccccctgagtacctcagatgacaggtgcgtgccaccacacccggctaatttttgtatttttagtagagacggggtttcaccatgttagccaggctagtctcgaactcctgacctcaggtgatccacccgcctccgcctcccaaagtgctgggattacaggtatcagccaccgtgcctggcctaataattggaacattttcatcatgaaaatgtcatcagctttgccaaaagaaacaaccaattgacttgtttggcgtttgttttccattttcatgtcaattttatgtatacagttagaatacccaaggagaccactaaaatcagttaaacaagtagggtatatacaaagaaagatgaaacccgaaagtacataaaaaggatttaaatccgattttagatgtacctagtgtgtatttcttatctctagacaagttcatgtttattgtttaatttatgcccaagtgaagttgtaaacttatggttcaactctgacacagaatttgtcacttgtctgaggtcagtggcaggtttctctgctgtcaagcactctgtgtcacccaccagattagtataactattaattcagactgtactcctatgtttaagataatttttacaagagctggctgaagcagcacattagtaacctgacaagatttctttttcccttttcagggggaaagggtcaccttaaaaataaattattttcagggactttgggaatctaatgataaatattacacataatctatgaatagcttaatcctttatatattccttaaaataggaattcctcgacatcactcctggccacactttccttgcctgtgttgttgctatgtgtatttgaaagtaatatctgcattccttttaagatgttctgtaagtcatatttgtcagttatacagagtagtcttccttttccccacgttcagtgtaatctcactgaacagtaataatagcaatagctaacaacatctgcacagcaccttacagtttgcaaagaacgttcacacattctcatttgagttttgcatagtgaacctgttacgagatgtctcttgacgtcgatgctaaaagtgttagaatctttacatcactagagtcattgaatatgctgtagtattgaatagtgccctgactagggggaggatttggatgtgctgcatttcaagccgtgtataatcatcaaaatggggggcttgagttctttagctacttgaatccgatttacttctgttaagtgatgcttttctaaccgttttctggatggattttgtattcactatattgtagcttgtaatttgtataaatgtaccatctgatgtcattaaaaaaagtgtttgtagtgcta

SEQ ID NO: 199207 - DNA, 693 bp, Homo sapiens
  Payload ID: 19300
  Gene Name: VMA21 vacuolar H+-ATPase homolog (S. cerevisiae)
  Uniprot ID: Q3ZAQ7
  ENST ID: ENST00000370361
  CDS Start-End: 124-594
gggtcactggcatcgagtctggaacagtcattctcagcaagagctctttgaactctgacattctctagttttacggactcggcaccacagccctctggctggtagtccctcttcgcggctcatatgctcgggtctccttgcggcccccagctcagcgaccgagacgcagacgaggaccagtgttcacgcgagttcagggggcggcgtagccgccgcccgcccaggaggaccatgttgcgcggcaagtcccggctcaacgtggagtggctgggctactcgccaggcctgctcctcgagcacaggcccctcctggcagggcgcacgccgcggagccaccgccgaaatgaaagctcattagcatctacactgaagacgctcctgttcttcacagctttaatgatcactgttcctattgggttatatttcacaactaaatcttacatatttgaaggcgcccttgggatgtccaatagggacagctatttttacgctgctattgttgcagtggtcgccgtccatgtggtgctggccctctttgtgtatgtggcctggaatgaaggctcacgacagtggcgtgaaggcaaacaggattaaagtgaacatcacctttttatagcattaaattcattttttaaaatgataaatgctggagggggccatctgatttgaataaagttgaaagaacatgttaaa

SEQ ID NO: 199208 - DNA, 2646 bp, Homo sapiens
  Payload ID: 19301
  Gene Name: v-maf avian musculoaponeurotic fibrosarcoma oncogene homolog
  Uniprot ID: O75444
  ENST ID: ENST00000326043
  CDS Start-End: 813-2024
atcttttttcatcttctagctgtagctcgggctgcttgtcggcttggcctccccctcccccctttgctctctgcctcgtctttccccaggacttcgctattttgcttttttaaaaaaaggcaagaaagaactaaactcccccctccctctcctccagtcgggctgcacctctgccttgcactttgcacagaggtagagagcgcgcgagggagagagaggaaagaaaaaaaataataaagagagccaagcagaagaggaggcgagaagcatgaagtgttaactcccccgtgccaaggcccgcgccgcccggacagacgcccgccgcgcctccagccccgagcggacgccgcgcgcgccctgcctgcagcccgggccggcgaggcgagcccttccttatgcaaagcgcgcagcggagcggcgagcgggggacgccgcgcaccgggccgggctcctccagcttcgccgccgcagccaccaccgccgccaccgcagctcgcggaggatcttcccgagcctgaagccgccggctcggcgcgcaaggaggcgagcgagcaaggaggggccggggcgagcgagggagcacattggcgtgagcaggggggagggagggcgggcgcggggggcgcgggcagggcgggggggtgtgtgtgtgagcgcgctcggaggtttcgggccagccaccgccgcgcaagctagaagcgccccagcccggcaagctggctcacccgctggccacccagcacagcccgctggcccctctcctgcagcccatctggcggagcggcggcggcggcggcggcggcggcaggagaatggcatcagaactggcaatgagcaactccgacctgcccaccagtcccctggccatggaatatgttaatgacttcgatctgatgaagtttgaagtgaaaaaggaaccggtggagaccgaccgcatcatcagccagtgcggccgtctcatcgccgggggctcgctgtcctccacccccatgagcacgccgtgcagctcggtgcccccttcccccagcttctcggcgcccagcccgggctcgggcagcgagcagaaggcgcacctggaagactactactggatgaccggctacccgcagcagctgaaccccgaggcgctgggcttcagccccgaggacgcggtcgaggcgctcatcagcaacagccaccagctccagggcggcttcgatggctacgcgcgcggggcgcagcagctggccgcggcggccggggccggtgccggcgcctccttgggcggcagcggcgaggagatgggccccgccgccgccgtggtgtccgccgtgatcgccgcggccgccgcgcagagcggcgcgggcccgcactaccaccaccaccaccaccacgccgccggccaccaccaccacccgacggccggcgcgcccggcgccgcgggcagcgcggccgcctcggccggtggcgctgggggcgcgggcggcggtggcccggccagcgctgggggcggcggcggcggcggcggcggcggaggcggcgggggcgcggcgggggcggggggcgccctgcacccgcaccacgccgccggcggcctgcacttcgacgaccgcttctccgacgagcagctggtgaccatgtctgtgcgcgagctgaaccggcagctgcgcggggtcagcaaggaggaggtgatccggctgaagcagaagaggcggaccctgaaaaaccgcggctatgcccagtcctgccgcttcaagagggtgcagcagagacacgtcctggagtcggagaagaaccagctgctgcagcaagtcgaccacctcaagcaggagatctccaggctggtgcgcgagagggacgcgtacaaggagaaatacgagaagttggtgagcagcggcttccgagaaaacggctcgagcagcgacaacccgtcctctcccgagtttttcataactgagcccactcgcaagttggagccatcagtgggatacgccacattttggaagccccagcatcgtgtacttaccagtgtgttcacaaaatgaaatttgtgtgagagctgtacattaaaaaaaatcatcattattattattatttgcagtcatggagaaccacctacccctgacttctgtttagtctcctttttaaataaaaattactgtgttagagaagaaggctattaaatgtagtagttaactatgcctcttgtctgggggtttcatagagaccggtaggaaagcgcactcctgcttttcgatttatggtgtgtgcaagtaaacaggtgcattgctttcaacctgccatactagttttaaaaattcactgaaattacaaagatacatatatatgcatatatataatggaaagtttcccggaatgcaacaattagcattttaaaatcatatataggcatgcacattctaaatagtactttttcatgcttcattgtttctctggcagataattttactaagaagaaaaatagatattcgactccccttccctaaacaaatccacgggcagaggctccagcggagccgagccccctggttttctcgtaggccctagacggtgttgcatttatcagtgatgtcaaacgtgctcatttgtcagacatagctgtaaatgaaaacaatgtgtggcaaaatacaaagttagttaaataca

SEQ ID NO: 199209 - DNA, 6384 bp, Homo sapiens
  Payload ID: 19301
  Gene Name: v-maf avian musculoaponeurotic fibrosarcoma oncogene homolog
  Uniprot ID: O75444
  ENST ID: ENST00000393350
  CDS Start-End: 813-1934
atcttttttcatcttctagctgtagctcgggctgcttgtcggcttggcctccccctcccccctttgctctctgcctcgtctttccccaggacttcgctattttgcttttttaaaaaaaggcaagaaagaactaaactcccccctccctctcctccagtcgggctgcacctctgccttgcactttgcacagaggtagagagcgcgcgagggagagagaggaaagaaaaaaaataataaagagagccaagcagaagaggaggcgagaagcatgaagtgttaactcccccgtgccaaggcccgcgccgcccggacagacgcccgccgcgcctccagccccgagcggacgccgcgcgcgccctgcctgcagcccgggccggcgaggcgagcccttccttatgcaaagcgcgcagcggagcggcgagcgggggacgccgcgcaccgggccgggctcctccagcttcgccgccgcagccaccaccgccgccaccgcagctcgcggaggatcttcccgagcctgaagccgccggctcggcgcgcaaggaggcgagcgagcaaggaggggccggggcgagcgagggagcacattggcgtgagcaggggggagggagggcgggcgcggggggcgcgggcagggcgggggggtgtgtgtgtgagcgcgctcggaggtttcgggccagccaccgccgcgcaagctagaagcgccccagcccggcaagctggctcacccgctggccacccagcacagcccgctggcccctctcctgcagcccatctggcggagcggcggcggcggcggcggcggcggcaggagaatggcatcagaactggcaatgagcaactccgacctgcccaccagtcccctggccatggaatatgttaatgacttcgatctgatgaagtttgaagtgaaaaaggaaccggtggagaccgaccgcatcatcagccagtgcggccgtctcatcgccgggggctcgctgtcctccacccccatgagcacgccgtgcagctcggtgcccccttcccccagcttctcggcgcccagcccgggctcgggcagcgagcagaaggcgcacctggaagactactactggatgaccggctacccgcagcagctgaaccccgaggcgctgggcttcagccccgaggacgcggtcgaggcgctcatcagcaacagccaccagctccagggcggcttcgatggctacgcgcgcggggcgcagcagctggccgcggcggccggggccggtgccggcgcctccttgggcggcagcggcgaggagatgggccccgccgccgccgtggtgtccgccgtgatcgccgcggccgccgcgcagagcggcgcgggcccgcactaccaccaccaccaccaccacgccgccggccaccaccaccacccgacggccggcgcgcccggcgccgcgggcagcgcggccgcctcggccggtggcgctgggggcgcgggcggcggtggcccggccagcgctgggggcggcggcggcggcggcggcggcggaggcggcgggggcgcggcgggggcggggggcgccctgcacccgcaccacgccgccggcggcctgcacttcgacgaccgcttctccgacgagcagctggtgaccatgtctgtgcgcgagctgaaccggcagctgcgcggggtcagcaaggaggaggtgatccggctgaagcagaagaggcggaccctgaaaaaccgcggctatgcccagtcctgccgcttcaagagggtgcagcagagacacgtcctggagtcggagaagaaccagctgctgcagcaagtcgaccacctcaagcaggagatctccaggctggtgcgcgagagggacgcgtacaaggagaaatacgagaagttggtgagcagcggcttccgagaaaacggctcgagcagcgacaacccgtcctctcccgagtttttcatgtgagtctgacacgcgattccagctagccaccctgataagtgctccgcgggggtccggctcgggtgtgggcttgctagttctagagccatgctcgccaccacctcaccacccccacccccaccgagtttggcccccttggccccctacacacacacaaacccgcacgcacacaccacacacacacacacacacacacacacaccccacaccctgctcgagtttgtggtggtggtggctgttttaaactggggagggaatgggtgtctggctcatggattgccaatctgaaattctccataacttgctagcttgttttttttttttttttacacccccccgccccacccccggacttgcacaatgttcaatgatctcagcagagttcttcatgtgaaacgttgatcacctttgaagcctgcatcattcacatattttttcttcttcttccccttcagttcatgaactggtgttcattttctgtgtgtgtgtgtgttttattttgtttggatttttttttttaattttacttttagagcttgctgtgttgcccaccttttttccaacctccaccctcactccttctcaacccatctcttccgagatgaaagaaaaaaaaaagcaaagtttttttttcttctcctgagttcttcatgtgagattgagcttgcaaaggaaaaaaaaatgtgaaatgttatagacttgcagcgtgccgagttccatcgggttttttttttagcattgttatgctaaaatagagaaaaaaatcctcatgaaccttccacaatcaagcctgcatcaaccttctgggtgtgacttgtgagttttggccttgtgatgccaaatctgagagtttagtctgccattaaaaaaactcattctcatctcatgcattattatgcttgctactttgtcttagcaacaatgaactataactgtttcaaagactttatggaaaagagacattatattaataaaaaaaaaaagcctgcatgctggacatgtatggtataattattttttcctttttttttccttttggcttggaaatggacgttcgaagacttatagcatggcattcatacttttgttttattgcctcatgacttttttgagtttagaacaaaacagtgcaaccgtagagccttcttcccatgaaattttgcatctgctccaaaactgctttgagttactcagaacttcaacctcccaatgcactgaaggcattccttgtcaaagataccagaatgggttacacatttaacctggcaaacattgaagaactcttaatgttttctttttaataagaatgacgccccactttggggactaaaattgtgctattgccgagaagcagtctaaaatttattttttaaaaagagaaactgccccattatttttggtttgttttatttttattttatattttttggcttttggtcattgtcaaatgtggaatgctctgggtttctagtatataatttaattctagtttttataatctgttagcccagttaaaatgtatgctacagataaaggaatgttatagataaatttgaaagagttaggtctgtttagctgtagattttttaaacgattgatgcactaaattgtttactattgtgatgttaaggggggtagagtttgcaaggggactgtttaaaaaaagtagcttatacagcatgtgcttgcaacttaaatataagttgggtatgtgtagtctttgctataccactgactgtattgaaaaccaaagtattaagaggggaaacgcccctgtttatatctgtaggggtattttacattcaaaaatgtatgtttttttttcttttcaaaattaaagtatttgggactgaattgcactaagatataacctgcaagcatataatacaaaaaaaaattgcaaaactgtttagaacgctaataaaatttatgcagttataaaaatggcattactgcacagttttaagatgatgcagatttttttacagttgtattgtggtgcagaactggattttctgtaacttaaaaaaaaatccacagttttaaaggcaataatcagtaaatgttattttcagggactgacatcctgtctttaaaaagaaatgaaaagtaaatcttaccacaataaatataaaaaaatcttgtcagttacttttcttttacatattttgctgtgcaaaattgttttatatcttgagttactaactaaccacgcgtgttgttcctatgtgcttttctttcattttcaattctggttatatcaagaaaagaataatctacaataataaacggcatttttttttgattctgtactcagtttcttagtgtacagtttaactgggcccaacaacctcgttaaaagtgtaaaatgcatccttttctccagtggaaggattcctggaggaatagggagacagtaattcagggtgaaattataggctgttttttgaagtgaggaggctggccccatatactgattagcaatatttaatatagatgtaaattatgacctcatttttttctccccaaagttttcagttttcaaatgagttgagccataattgcccttggtaggaaaaacaaaacaaaacagtggaactaggcttcctgagcatggccctacacttctgatcaggagcaaagccatccatagacagaggagccggacaaatatggcgcatcagaggtggcttgcgcacatatgcattgaacggtaaagagaaacagcgcttgccttttcactaaagttgactatttttccttcttctcttacacaccgagattttcttgttagcaaggcctgacaagatttaacataaacatgacaaatcatagttgtttgttttgttttgcttttctctttaacactgaagatcatttgtcttaaataggaaaaagaaaatccactccttacttccatatttccaagtacatatctggtttaaactatgttatcaaatcatatttcaccgtgaatattcagtggagaacttctctacctggatgagctagtaatgatttcagatcatgctatccccagaaataaaagcaaaaaataatacctgtgtggaatataggctgtgctttgatttactggtatttaccccaaaataggctgtgtatgggggctgacttaaagatcccttggaaagactcaaaactaccttcactagtaggactcctaagcgctgacctatttttaaatgacacaaattcatgaaactaatgttacaaattcatgcagtttgcactcttagtcatcttcccctagcacaccaatagaatgttagacaaagccagcactgttttgaaaatacagccaaacacgatgacttttgttttgttttctgccgttcttaaaagaaaaaaagataatattgcaactctgactgaaagacttatttttaagaaaacaggttgtgtttggtgctgctaagttctggccagtttatcatctggccttcctgcctattttttacaaaacacgaagacagtgtgtaacctcgacattttgaccttcctttatgtgctagtttagacaggctcctgaatccacacttaattttgcttaacaaaagtcttaatagtaaacctcccctcatgagcttgaagtcaagtgttcttgacttcagatatttctttcctttttttttttttttcctcatcacaactaagagatacacaaactctgaagaagcagaaatggagagaatgcttttaacaaaaaagcatctgatgaaagattttaggcaaacattctcaaaataagagtgatattctggatgtagttattgcagttatctcatgacaaatgaggcctggattggaaggaaaatatagttgtgtagaattaagcattttgataggaatctacaaggtagttgaatataataagcaggtttgggcccccaaactttagaaaatcaaatgcaaaggtgctggcaaaaatgaggtttgagtggctggctgtaagagaaggttaactcctagtaaaaggcatttttagaaataacaattactgaaaactttgaagtatagtgggagtagcaaacaaatacatgttttttttttcttacaaagaactcctaaatcctgagtaagtgccattcattacaataagtctctaaatttaaaaaaaaaaaaatcatatgaggaaatctagctttcccctttacgctgcgtttgatctttgtctaaatagtgttaaaattcctttcattccaattacagaactgagcccactcgcaagttggagccatcagtgggatacgccacattttggaagccccagcatcgtgtacttaccagtgtgttcacaaaatgaaatttgtgtgagagctgtacattaaaaaaaatcatcattattattattatttgcagtcatggagaaccacctacccctgacttctgtttagtctcctttttaaataaaaattactgtgttagagaagaa

SEQ ID NO: 199210 - DNA, 1217 bp, Homo sapiens
  Payload ID: 19301
  Gene Name: v-maf avian musculoaponeurotic fibrosarcoma oncogene homolog
  ENST ID: ENST00000569649
  CDS Start-End: 1-1152
atggcatcagaactggcaatgagcaactccgacctgcccaccagtcccctggccatggaatatgttaatgacttcgatctgatgaagtttgaagtgaaaaaggaaccggtggagaccgaccgcatcatcagccagtgcggccgtctcatcgccgggggctcgctgtcctccacccccatgagcacgccgtgcagctcggtgcccccttcccccagcttctcggcgcccagcccgggctcgggcagcgagcagaaggcgcacctggaagactactactggatgaccggctacccgcagcagctgaaccccgaggcgctgggcttcagccccgaggacgcggtcgaggcgctcatcagcaacagccaccagctccagggcggcttcgatggctacgcgcgcggggcgcagcagctggccgcggcggccggggccggtgccggcgcctccttgggcggcagcggcgaggagatgggccccgccgccgccgtggtgtccgccgtgatcgccgcggccgccgcgcagagcggcgcgggcccgcactaccaccaccaccaccaccacgccgccggccaccaccaccacccgacggccggcgcgcccggcgccgcgggcagcgcggccgcctcggccggtggcgctgggggcgcgggcggcggtggcccggccagcgctgggggcggcggcggcggcggcggcggcggaggcggcgggggcgcggcgggggcggggggcgccctgcacccgcaccacgccgccggcggcctgcacttcgacgaccgcttctccgacgagcagctggtgaccatgtctgtgcgcgagctgaaccggcagctgcgcggggtcagcaaggaggaggtgatccggctgaagcagaagaggcggaccctgaaaaaccgcggctatgcccagtcctgccgcttcaagagggtgcagcagagacacgtcctggagtcggagaagaaccagctgctgcagcaagtcgaccacctcaagcaggagatctccaggctggtgcgcgagagggacgcgtacaaggagaaatacgagaagttggtgagcagcggcttccgagaaaacggctcgagcagcgacaacccgtcctctcccgagtttttcatgtacccaagggaatcctctacatcagtgatgtgaaaaaatccagttgcctgaagtcaaagaggtacatcttgatttttgatttgcatgtgcttgagttt

SEQ ID NO: 199211 - DNA, 2347 bp, Homo sapiens
  Payload ID: 19302
  Gene Name: v-maf avian musculoaponeurotic fibrosarcoma oncogene homolog A
  Uniprot ID: Q8NHW3
  ENST ID: ENST00000333480
  CDS Start-End: 1-1062
atggccgcggagctggcgatgggcgccgagctgcccagcagcccgctggccatcgagtacgtcaacgacttcgacctgatgaagttcgaggtgaagaaggagcctcccgaggccgagcgcttctgccaccgcctgccgccaggctcgctgtcctcgacgccgctcagcacgccctgctcctccgtgccctcctcgcccagcttctgcgcgcccagcccgggcaccggcggcggcggcggcgcggggggcggcggcggctcgtctcaggccgggggcgcccccgggccgccgagcgggggccccggcgccgtcgggggcacctcggggaagccggcgctggaggatctgtactggatgagcggctaccagcatcacctcaaccccgaggcgctcaacctgacgcccgaggacgcggtggaggcgctcatcggcagcggccaccacggcgcgcaccacggcgcgcaccacccggcggccgccgcagcctacgaggctttccgcggcccgggcttcgcgggcggcggcggagcggacgacatgggcgccggccaccaccacggcgcgcaccacgccgcccaccatcaccacgccgcccaccaccaccaccaccaccaccaccaccatggcggcgcgggacacggcggtggcgcgggccaccacgtgcgcctggaggagcgcttctccgacgaccagctggtgtccatgtcggtgcgcgagctgaaccggcagctccgcggcttcagcaaggaggaggtcatccggctcaagcagaagcggcgcacgctcaagaaccgcggctacgcgcagtcctgccgcttcaagcgggtgcagcagcggcacattctggagagcgagaagtgccaactccagagccaggtggagcagctgaagctggaggtggggcgcctggccaaagagcgggacctgtacaaggagaaatacgagaagctggcgggccggggcggccccgggagcgcgggcggggccggtttcccgcgggagccttcgccgccgcaggccggtcccggcggggccaagggcacggccgacttcttcctgtaggcgccggaccccgagcccgcgccgccgtcgccggggacaagttcgcgcaggcctctcggggcctcggctcggactccgcggtacaggacgtggacaccaggcccggcccggccgtgctggccccggtgccaagtctgcgggcgcggggctggaggccccttcgctcccggtccccgttcgcgcgcgtcggcccgggtcgccgtcctgaggttgagcggagaacggtgatttctaaggaaacttgagccaggtctaacttctttccaagcgtccgcttgtacatacgttgaacgtggttctccgttcccaccttcgccctgccagcctagagggaccgcgctgccgtcccttcccgggtggcccctgcctgcccccgccctccttcgttctcttctcagcctccctttccttgccttttttaacttcccctccccgttttaaaatcggtcttattttcgaagtatttataattattatgcttggtgattagaaaagaaaaccttggaggaagccccttctttccccagccggggtccgccctcagtcgcgagtcacagcatgagtcgctcgccaggaggggcccggcccctgcctgccccctccccgcttgcccccgaccctgctaccggcgttccttggaggtcgaagccagggacgtcacccgtgctgtgtccaggcctgctgtcctactatgctcaaccgggggtggggggaggggggtgagtcctgtgctcagtcgggtgggggctggcccggatcccgagctgctgtctctctatgcaccagaacatatctgtaactcctggggaaatacatcttgttttaaccttcaagagaagtgaaagaaaaaagtaatgcacagtatttctagcagaaaatttttttttttaagaggaggcttgggccagagccttctggcatggggcgggtggagaaagtgtttttattttaatttaaattgtgtttcgttttgtttgtggaatctttctttaatgcttcgtcgctctttggactagccgggagagagggcgaggaggcgggtgctccaggccctgtaggctgggccaggcgcctgggggatctgcccgttttcggaggccctcaggggccatcagtgggattccagccgctccacacccctcccctgagcactcggagtggaaggcgcgccgactcgttgaaagttttgttgtgtagttggttttcgttgagttcttttttcatttgctacgaaactgagaaaaagaaaaaaatacacaaaataaatctgttcagatccaagtca

SEQ ID NO: 199212 - DNA, 3393 bp, Homo sapiens
  Payload ID: 19303
  Gene Name: v-maf avian musculoaponeurotic fibrosarcoma oncogene homolog B
  Uniprot ID: Q9Y5Q3
  ENST ID: ENST00000373313
  CDS Start-End: 391-1362
cagcacagctgcaccgccgagctgcgagcggctgcgagcgagagagcgtaagagcaagagagctagagagcgagcaacgggcactcgccccacgcctcccctcagccccaccgcgcgctccgcttgcctctccaccccgcccgactctacccggcccggtccctgcgcgggcacagcccagagctctggggcggtgcaggcagcctcgggactctccggcgcgccgccgcgtccccagacaaaggcttggccggcggccccggcccgctgcgccctcgctccccgcctccccagctcttctccgctcttcccccccgcgcttggctcggcgcgctccggccggccgcaaagtttcccgggcggcagcggcggctgcgcctcgcttcagcgatggccgcggagctgagcatggggccagagctgcccaccagcccgctggccatggagtatgtcaacgacttcgacctgctcaagttcgacgtgaagaaggagccactggggcgcgcggagcgtccgggcaggccctgcacacgcctgcagccagccggctcggtgtcctccacaccgctcagcactccgtgtagctccgtgccctcgtcgcccagcttcagcccgaccgaacagaagacacacctcgaggatctgtactggatggcgagcaactaccagcagatgaaccccgaggcgctcaacctgacgcccgaggacgcggtggaagcgctcatcggctcgcacccagtgccacagccgctgcaaagcttcgacagctttcgcggcgctcaccaccaccaccatcaccaccaccctcacccgcaccacgcgtacccgggcgccggcgtggcccacgacgagctgggcccgcacgctcacccgcaccatcaccatcatcaccaagcgtcgccgccgccgtccagcgccgctagcccggcgcaacagctgcccactagccaccccgggcccgggccgcacgcgacggcctcggcgacggcggcgggcggcaacggcagcgtggaggaccgcttctccgacgaccagctcgtgtccatgtccgtgcgcgagctgaaccgccacctgcggggcttcaccaaggacgaggtgatccgcctgaagcagaagcggcggaccctgaagaaccggggctacgcccagtcttgcaggtataaacgcgtccagcagaagcaccacctggagaatgagaagacgcagctcattcagcaggtggagcagcttaagcaggaggtgtcccggctggcccgcgagagagacgcctacaaggtcaagtgcgagaaactcgccaactccggcttcagggaggcgggctccaccagcgacagcccctcctctcccgagttctttctgtgagtcgtggccggtcctggcccccgcccttgccccggcccggactccctgtcccacgtccctagtcccagactaccccggaccctgtccctgccgcggccccagccttgacctgtttgacttgagcgagagggaggaagggcgcgcgggccgcgggcgacgggcgggtgcgcgggcgggcaggggaccttggctaaggcgagagtagcgcacgccagcgccgcctcctagactcgagcagagccggagagagagacgagagggtgggaggtcccggagtaacttctctccaggctgaagggcggcgaggcatagtcccgagaagtcaccaaggccatctggagactcctggctttctgaactttgcgcgttaagccgggacagctgctttgctgcccggagagtagtccgcgccaggaagagagcaacgaggaaaggagagggactctggcgtcccggcaggcgagaggcgaggctgagcgaaagaaggaaggacagacggacctgtctgtcagagttcggagaacactggctctcagccctgagacacaggcctcagttaggacgctcggcgcccaaatctcatcagttttattgcctgctcgattatatagaaaaatacaaaaaatctgcattaaaaatattaatcctgcatgctggacatgtatggtaataatttctattttgtaccattttcttgtttaactttagcatgttgttgatcatggatcatactccccttgtttctttgggtgagaagggatcgcagtttggaaactccggcggctgcgtgcggggtttcagtcccagctgtaggcttgtaaatacccgccccgccaaaccgcatagagaacgtggcagcaagctgagggtctttgtttgggtttattattacggtatttttgtttgtaagttaaaaagaaaaaaaaaaagaaaaagttccgggcattttgcatcagaaaacaactttgtcttggggcacacttggaagttgcatgttttctttccttcccttatccccattcggtcctctttttcctctctcgctttagttttcaaccttgttggtgctgagagagagaaccgagaggtcccagtacaagggcagggcagggcagggaagctgccaagctccgcaccccagaggagtgttctggactacagccttgtcttatggtcaaattgatacccttaataagaaaggaaaggaaaggaaaacagatcctcccctctgctttttattgtaaccagaatcaccctgaggtcccttctgaaccctctgggcctgcgctaattgtaggagccacagcgctcctagggtgagaggcttagccatccctgaccctggcagtgcactggtaagcagacactgcactgaaccaactgctatgctcagaatgtaccagaaacccaaacattggcaagtaattttgcaactttcaagtgcgttctttagaccaatgcattgcgtttctttccctgcttttgagatagtaggaagagttcttggtggtgtccccccccttcaattcttcagttgtatagtagttatagggaagatatgggtgtttttctttattattacttttttttttctgcaggtcagtaaaaggatttaagttgcactgacaaaaataccaaaataaaagtgtatttttaagttcccatttgaaattgctggcgctgctggccggatgcatttttgagtttgtattagttgataaattaacagtaataacaagattgtatgaaccgcatggtgcttgcagttttaaatattgtggatatttgtcctgcatcagaaacgagctttggtttttacagattcaactgtgttgaaatcaaacctgccgcaacagaaattgtttttatttcatgtaaaataagggatcaatttcaaaccctgcttatgatatgaaaatattaaaacctagtctattgtagttttattcagactggtttctgttttttggttattaaaatggtttcctattttgcttattaaaaccatggaaatggtgtttatttagagga

SEQ ID NO: 199213 - DNA, 2490 bp, Homo sapiens
  Payload ID: 19304
  Gene Name: v-maf avian musculoaponeurotic fibrosarcoma oncogene homolog F
  Uniprot ID: Q9ULX9
  ENST ID: ENST00000338483
  CDS Start-End: 363-857
acgggggcggggccgagggaccaagcggccgctcctggccggagggcggccgggtcggtgacgtcaccgcatgactgggtttttatgaatgaaaggaatcctgtgagtgagtaattccgggaagctcgccttacaactccgcgcggcctcggccccctgcgccgcccgccccacaacaaaactcagcgcagcgctcccgggcgcccggttcagagcgacctgcggctcagagcggaggggagactgaccggagcgcggatcgggacagcggccgggacagcggcgagacgcgcgtgtgtgagcgcgccggaccaagcgggcccagaagcgggtctgcagcccagagggcaccttctgcaaacatgtctgtggatcccctatccagcaaagctctaaagatcaagcgagagctgagcgagaacacgccgcacctgtcggacgaggcgctgatggggctgtcggtgcgcgagctgaaccggcatctgcgcgggctctccgccgaggaggtgacacggctcaagcagcggcgccgcacactcaaaaaccgtggctacgccgccagctgccgcgtgaagcgcgtgtgccagaaggaggagctgcagaagcagaagtcggagctggagcgcgaggtggacaagctggcgcgcgagaacgccgccatgcgcctggagctcgacgcgctgcgcggcaagtgcgaggcgctgcagggcttcgcgcgctccgtggccgccgcccgcgggcccgccacgctcgtggcgccggccagcgtcatcaccatcgtcaagtccaccccgggctcggggtctggccccgcccacggcccggaccccgcccacggcccggcctcctgctcctagtgcccgcccccgccatgcctcagccacgcccctccggcctcagctccctccccaaagtgcctgagcgccgcctctgtgcccaggtcccatttctctgcagcactggccccttggtgcacacacattcccttcgtgggccctgtcttcctcttgcagccccccaaactgggaccgaatgaccctgggaaggggaacttgggtaggttggggatggggcagaggtctggatctgggatcgcccttggctgaaagtttagcctttttagattgagagatacagagccggcttagagaacagctgttgggggagaagagggcacccctcatcttggaaactgctcttattgtgccaatatgccctccaaaccctcccaggattcaaagctaggtttggctgtctgtgacttacgggaccgtcctgctgagaaattgcactgaagagatgcccccacctctggttgggcctgggggtgcctggccttccgaaactaaaagagtgggtgggaagactagtgaaacccagttcacggatggggaaacaggcctgaggtcacatttcacttagtggttgtgttgggaccaaaacctgggtgtcctcactgctgccctgagtccagccatggttttcagggggacagtggacagggactcagaaatgtggtgggagggcctccctggcttgggagaccgctctctgcaagggagggggagagaagcagagggagagagaaggtgacacggatggaagagtgggaaggagctggcctggctcagccctaggctgtccctgcagccagggtgtccgggggctggccagtcagagaaagggggccatggactgctgtggcaaatagggagacaaggagacagaccctgcagtcctactacagtctggagtggggtcctaagaagaagggtcccacctcaacccctgtcagtgtccactgtggggtgggggctgacccctgcctttgattgtcattctcctgggaagcccagtctcagtccctcccccaacactgtccacactgcccctccccactgtttatttattgcacggatctaagttattctccccagccagagcccgagctcctgctccctgggaaaagtggcgtatggccctgagctgggctttatattttatatctgcaaataaatcacattttatcttatatttagggaaagccggagagcaacaacaaaaaatgtttaagccgggcgcggtggctcacatctgtaatcccagcactttgggagtccaaggagggggatcgcttgagtccaggagtttgagaccagcctggacaacatggtgaaaccccatctctacaaaaaatacaaaaattagccatgcatggtggctcatgcctgtagtcccagctacttgggaggctgaggcaggaggatcacttaagcccagaaggcagaggttgtagtgagctgagatcgcaccactgcactccagcctgggcaacatagcaaaatcctgtctcaaaaaaaaagttaaaaaatattgcccggctcctagaatttatttatttcctgacttacagcaagcgagttatcgtcttctgtattttgtagactttctaaataaagtcaaattctttctttttccacagagaataaa

SEQ ID NO: 199214 - DNA, 2325 bp, Homo sapiens
  Payload ID: 19304
  Gene Name: v-maf avian musculoaponeurotic fibrosarcoma oncogene homolog F
  Uniprot ID: Q9ULX9
  ENST ID: ENST00000407965
  CDS Start-End: 204-698
cagaatggtcaaagaggacctcctgaggaggtgacattgggcaaagacctaaatgatgaggagtcaccatggggctagaacagtaaagagcacagcctgtgcacagctcccgcggctggaaggagccattcaaggaggcctgtggaccaatgtggagagaggaaggtggcaggtctgcagcccagagggcaccttctgcaaacatgtctgtggatcccctatccagcaaagctctaaagatcaagcgagagctgagcgagaacacgccgcacctgtcggacgaggcgctgatggggctgtcggtgcgcgagctgaaccggcatctgcgcgggctctccgccgaggaggtgacacggctcaagcagcggcgccgcacactcaaaaaccgtggctacgccgccagctgccgcgtgaagcgcgtgtgccagaaggaggagctgcagaagcagaagtcggagctggagcgcgaggtggacaagctggcgcgcgagaacgccgccatgcgcctggagctcgacgcgctgcgcggcaagtgcgaggcgctgcagggcttcgcgcgctccgtggccgccgcccgcgggcccgccacgctcgtggcgccggccagcgtcatcaccatcgtcaagtccaccccgggctcggggtctggccccgcccacggcccggaccccgcccacggcccggcctcctgctcctagtgcccgcccccgccatgcctcagccacgcccctccggcctcagctccctccccaaagtgcctgagcgccgcctctgtgcccaggtcccatttctctgcagcactggccccttggtgcacacacattcccttcgtgggccctgtcttcctcttgcagccccccaaactgggaccgaatgaccctgggaaggggaacttgggtaggttggggatggggcagaggtctggatctgggatcgcccttggctgaaagtttagcctttttagattgagagatacagagccggcttagagaacagctgttgggggagaagagggcacccctcatcttggaaactgctcttattgtgccaatatgccctccaaaccctcccaggattcaaagctaggtttggctgtctgtgacttacgggaccgtcctgctgagaaattgcactgaagagatgcccccacctctggttgggcctgggggtgcctggccttccgaaactaaaagagtgggtgggaagactagtgaaacccagttcacggatggggaaacaggcctgaggtcacatttcacttagtggttgtgttgggaccaaaacctgggtgtcctcactgctgccctgagtccagccatggttttcagggggacagtggacagggactcagaaatgtggtgggagggcctccctggcttgggagaccgctctctgcaagggagggggagagaagcagagggagagagaaggtgacacggatggaagagtgggaaggagctggcctggctcagccctaggctgtccctgcagccagggtgtccgggggctggccagtcagagaaagggggccatggactgctgtggcaaatagggagacaaggagacagaccctgcagtcctactacagtctggagtggggtcctaagaagaagggtcccacctcaacccctgtcagtgtccactgtggggtgggggctgacccctgcctttgattgtcattctcctgggaagcccagtctcagtccctcccccaacactgtccacactgcccctccccactgtttatttattgcacggatctaagttattctccccagccagagcccgagctcctgctccctgggaaaagtggcgtatggccctgagctgggctttatattttatatctgcaaataaatcacattttatcttatatttagggaaagccggagagcaacaacaaaaaatgtttaagccgggcgcggtggctcacatctgtaatcccagcactttgggagtccaaggagggggatcgcttgagtccaggagtttgagaccagcctggacaacatggtgaaaccccatctctacaaaaaatacaaaaattagccatgcatggtggctcatgcctgtagtcccagctacttgggaggctgaggcaggaggatcacttaagcccagaaggcagaggttgtagtgagctgagatcgcaccactgcactccagcctgggcaacatagcaaaatcctgtctcaaaaaaaaagttaaaaaatattgcccggctcctagaatttatttatttcctgacttacagcaagcgagttatcgtcttctgtattttgtagactttctaaataaagtcaaattctttctttttccacagag

SEQ ID NO: 199215 - DNA, 2216 bp, Homo sapiens
  Payload ID: 19304
  Gene Name: v-maf avian musculoaponeurotic fibrosarcoma oncogene homolog F
  Uniprot ID: Q9ULX9
  ENST ID: ENST00000426621
  CDS Start-End: 97-591
agctgagctaggagtgagggatgtgagccacccccgcttggcaccccggtggatctggtaacaaagtctgcagcccagagggcaccttctgcaaacatgtctgtggatcccctatccagcaaagctctaaagatcaagcgagagctgagcgagaacacgccgcacctgtcggacgaggcgctgatggggctgtcggtgcgcgagctgaaccggcatctgcgcgggctctccgccgaggaggtgacacggctcaagcagcggcgccgcacactcaaaaaccgtggctacgccgccagctgccgcgtgaagcgcgtgtgccagaaggaggagctgcagaagcagaagtcggagctggagcgcgaggtggacaagctggcgcgcgagaacgccgccatgcgcctggagctcgacgcgctgcgcggcaagtgcgaggcgctgcagggcttcgcgcgctccgtggccgccgcccgcgggcccgccacgctcgtggcgccggccagcgtcatcaccatcgtcaagtccaccccgggctcggggtctggccccgcccacggcccggaccccgcccacggcccggcctcctgctcctagtgcccgcccccgccatgcctcagccacgcccctccggcctcagctccctccccaaagtgcctgagcgccgcctctgtgcccaggtcccatttctctgcagcactggccccttggtgcacacacattcccttcgtgggccctgtcttcctcttgcagccccccaaactgggaccgaatgaccctgggaaggggaacttgggtaggttggggatggggcagaggtctggatctgggatcgcccttggctgaaagtttagcctttttagattgagagatacagagccggcttagagaacagctgttgggggagaagagggcacccctcatcttggaaactgctcttattgtgccaatatgccctccaaaccctcccaggattcaaagctaggtttggctgtctgtgacttacgggaccgtcctgctgagaaattgcactgaagagatgcccccacctctggttgggcctgggggtgcctggccttccgaaactaaaagagtgggtgggaagactagtgaaacccagttcacggatggggaaacaggcctgaggtcacatttcacttagtggttgtgttgggaccaaaacctgggtgtcctcactgctgccctgagtccagccatggttttcagggggacagtggacagggactcagaaatgtggtgggagggcctccctggcttgggagaccgctctctgcaagggagggggagagaagcagagggagagagaaggtgacacggatggaagagtgggaaggagctggcctggctcagccctaggctgtccctgcagccagggtgtccgggggctggccagtcagagaaagggggccatggactgctgtggcaaatagggagacaaggagacagaccctgcagtcctactacagtctggagtggggtcctaagaagaagggtcccacctcaacccctgtcagtgtccactgtggggtgggggctgacccctgcctttgattgtcattctcctgggaagcccagtctcagtccctcccccaacactgtccacactgcccctccccactgtttatttattgcacggatctaagttattctccccagccagagcccgagctcctgctccctgggaaaagtggcgtatggccctgagctgggctttatattttatatctgcaaataaatcacattttatcttatatttagggaaagccggagagcaacaacaaaaaatgtttaagccgggcgcggtggctcacatctgtaatcccagcactttgggagtccaaggagggggatcgcttgagtccaggagtttgagaccagcctggacaacatggtgaaaccccatctctacaaaaaatacaaaaattagccatgcatggtggctcatgcctgtagtcccagctacttgggaggctgaggcaggaggatcacttaagcccagaaggcagaggttgtagtgagctgagatcgcaccactgcactccagcctgggcaacatagcaaaatcctgtctcaaaaaaaaagttaaaaaatattgcccggctcctagaatttatttatttcctgacttacagcaagcgagttatcgtcttctgtattttgtagactttctaaataaagtcaaattctttctttttccacag

SEQ ID NO: 199216 - DNA, 548 bp, Homo sapiens
  Payload ID: 19304
  Gene Name: v-maf avian musculoaponeurotic fibrosarcoma oncogene homolog F
  ENST ID: ENST00000441709
  CDS Start-End: 269-548
ttccgggaagctcgccttacaactccgcgcggcctcggccccctgcgccgcccgccccacaacaaaactcagcgcagcgctcccgggcgcccggttcagagcgacctgcggctcagagcggaggggagactgaccggagcgcggatcgggacagcggccgggacagcggcgagacgcgcgtgtgtgagcgcgccggaccaagcgggcccagaagcggatcaagcgagagctgagcgagaacacgccgcacctgtcggacgaggcgctgatggggctgtcggtgcgcgagctgaaccggcatctgcgcgggctctccgccgaggaggtgacacggctcaagcagcggcgccgcacactcaaaaaccgtggctacgccgccagctgccgcgtgaagcgcgtgtgccagaaggaggagctgcagaagcagaagtcggagctggagcgcgaggtggacaagctggcgcgcgagaacgccgccatgcgcctggagctcgacgcgctgcgcggcaagtgcgaggcgctgcagggcttcgcgcgctccgtggccg

SEQ ID NO: 199217 - DNA, 697 bp, Homo sapiens
  Payload ID: 19304
  Gene Name: v-maf avian musculoaponeurotic fibrosarcoma oncogene homolog F
  ENST ID: ENST00000417948
  CDS Start-End: 321-697
aaacgcggaacaaggacccgagcgaaggaagcggacccgtgcgtcttcgcacggggtctgggaattctggcccgggccgccccagtcctactacccggggctgtccgtccccggctctccccggagtttcccagggcctccgccacgtgaccccagtgtttgtctcccgcccagagcccgcgcccgcagccacagggtggggcaaggtatcaaagaccccacccagctgagctaggagtgagggatgtgagccacccccgcttggcaccccggtggatctggtaacaaagtctgcagcccagagggcaccttctgcaaacatgtctgtggatcccctatccagcaaagctctaaagatcaagcgagagctgagcgagaacacgccgcacctgtcggacgaggcgctgatggggctgtcggtgcgcgagctgaaccggcatctgcgcgggctctccgccgaggaggtgacacggctcaagcagcggcgccgcacactcaaaaaccgtggctacgccgccagctgccgcgtgaagcgcgtgtgccagaaggaggagctgcagaagcagaagtcggagctggagcgcgaggtggacaagctggcgcgcgagaacgccgccatgcgcctggagctcgacgcgctgcgcggcaagtgcgaggcgctgcagggcttcgcgcgctccgtggccgccgcccgcgg

SEQ ID NO: 199218 - DNA, 2365 bp, Homo sapiens
  Payload ID: 19304
  Gene Name: v-maf avian musculoaponeurotic fibrosarcoma oncogene homolog F
  Uniprot ID: Q9ULX9
  ENST ID: ENST00000538999
  CDS Start-End: 333-740
cgggtcggtgacgtcaccgcatgactgggtttttatgaatgaaaggaatcctgtgagtgagtaattccgggaagctcgccttacaactccgcgcggcctcggccccctgcgccgcccgccccacaacaaaactcagcgcagcgctcccgggcgcccggttcagagcgacctgcggctcagagcggaggggagactgaccggagcgcggatcgggacagcggccgggacagcggcgagacgcgcgtgtgtgagcgcgccggaccaagcgggcccagaagcggatcaagcgagagctgagcgagaacacgccgcacctgtcggacgaggcgctgatggggctgtcggtgcgcgagctgaaccggcatctgcgcgggctctccgccgaggaggtgacacggctcaagcagcggcgccgcacactcaaaaaccgtggctacgccgccagctgccgcgtgaagcgcgtgtgccagaaggaggagctgcagaagcagaagtcggagctggagcgcgaggtggacaagctggcgcgcgagaacgccgccatgcgcctggagctcgacgcgctgcgcggcaagtgcgaggcgctgcagggcttcgcgcgctccgtggccgccgcccgcgggcccgccacgctcgtggcgccggccagcgtcatcaccatcgtcaagtccaccccgggctcggggtctggccccgcccacggcccggaccccgcccacggcccggcctcctgctcctagtgcccgcccccgccatgcctcagccacgcccctccggcctcagctccctccccaaagtgcctgagcgccgcctctgtgcccaggtcccatttctctgcagcactggccccttggtgcacacacattcccttcgtgggccctgtcttcctcttgcagccccccaaactgggaccgaatgaccctgggaaggggaacttgggtaggttggggatggggcagaggtctggatctgggatcgcccttggctgaaagtttagcctttttagattgagagatacagagccggcttagagaacagctgttgggggagaagagggcacccctcatcttggaaactgctcttattgtgccaatatgccctccaaaccctcccaggattcaaagctaggtttggctgtctgtgacttacgggaccgtcctgctgagaaattgcactgaagagatgcccccacctctggttgggcctgggggtgcctggccttccgaaactaaaagagtgggtgggaagactagtgaaacccagttcacggatggggaaacaggcctgaggtcacatttcacttagtggttgtgttgggaccaaaacctgggtgtcctcactgctgccctgagtccagccatggttttcagggggacagtggacagggactcagaaatgtggtgggagggcctccctggcttgggagaccgctctctgcaagggagggggagagaagcagagggagagagaaggtgacacggatggaagagtgggaaggagctggcctggctcagccctaggctgtccctgcagccagggtgtccgggggctggccagtcagagaaagggggccatggactgctgtggcaaatagggagacaaggagacagaccctgcagtcctactacagtctggagtggggtcctaagaagaagggtcccacctcaacccctgtcagtgtccactgtggggtgggggctgacccctgcctttgattgtcattctcctgggaagcccagtctcagtccctcccccaacactgtccacactgcccctccccactgtttatttattgcacggatctaagttattctccccagccagagcccgagctcctgctccctgggaaaagtggcgtatggccctgagctgggctttatattttatatctgcaaataaatcacattttatcttatatttagggaaagccggagagcaacaacaaaaaatgtttaagccgggcgcggtggctcacatctgtaatcccagcactttgggagtccaaggagggggatcgcttgagtccaggagtttgagaccagcctggacaacatggtgaaaccccatctctacaaaaaatacaaaaattagccatgcatggtggctcatgcctgtagtcccagctacttgggaggctgaggcaggaggatcacttaagcccagaaggcagaggttgtagtgagctgagatcgcaccactgcactccagcctgggcaacatagcaaaatcctgtctcaaaaaaaaagttaaaaaatattgcccggctcctagaatttatttatttcctgacttacagcaagcgagttatcgtcttctgtattttgtagactttctaaataaagtcaaattctttctttttccacag

SEQ ID NO: 199219 - DNA, 2458 bp, Homo sapiens
  Payload ID: 19304
  Gene Name: v-maf avian musculoaponeurotic fibrosarcoma oncogene homolog F
  Uniprot ID: Q9ULX9
  ENST ID: ENST00000538320
  CDS Start-End: 339-833
cgggtcggtgacgtcaccgcatgactgggtttttatgaatgaaaggaatcctgtgagtgagtaattccgggaagctcgccttacaactccgcgcggcctcggccccctgcgccgcccgccccacaacaaaactcagcgcagcgctcccgggcgcccggttcagagcgacctgcggctcagagcggaggggagactgaccggagcgcggatcgggacagcggccgggacagcggcgagacgcgcgtgtgtgagcgcgccggaccaagcgggcccagaagcgggtgaggaacgcgggaccaggaggacggtctgcagcccagagggcaccttctgcaaacatgtctgtggatcccctatccagcaaagctctaaagatcaagcgagagctgagcgagaacacgccgcacctgtcggacgaggcgctgatggggctgtcggtgcgcgagctgaaccggcatctgcgcgggctctccgccgaggaggtgacacggctcaagcagcggcgccgcacactcaaaaaccgtggctacgccgccagctgccgcgtgaagcgcgtgtgccagaaggaggagctgcagaagcagaagtcggagctggagcgcgaggtggacaagctggcgcgcgagaacgccgccatgcgcctggagctcgacgcgctgcgcggcaagtgcgaggcgctgcagggcttcgcgcgctccgtggccgccgcccgcgggcccgccacgctcgtggcgccggccagcgtcatcaccatcgtcaagtccaccccgggctcggggtctggccccgcccacggcccggaccccgcccacggcccggcctcctgctcctagtgcccgcccccgccatgcctcagccacgcccctccggcctcagctccctccccaaagtgcctgagcgccgcctctgtgcccaggtcccatttctctgcagcactggccccttggtgcacacacattcccttcgtgggccctgtcttcctcttgcagccccccaaactgggaccgaatgaccctgggaaggggaacttgggtaggttggggatggggcagaggtctggatctgggatcgcccttggctgaaagtttagcctttttagattgagagatacagagccggcttagagaacagctgttgggggagaagagggcacccctcatcttggaaactgctcttattgtgccaatatgccctccaaaccctcccaggattcaaagctaggtttggctgtctgtgacttacgggaccgtcctgctgagaaattgcactgaagagatgcccccacctctggttgggcctgggggtgcctggccttccgaaactaaaagagtgggtgggaagactagtgaaacccagttcacggatggggaaacaggcctgaggtcacatttcacttagtggttgtgttgggaccaaaacctgggtgtcctcactgctgccctgagtccagccatggttttcagggggacagtggacagggactcagaaatgtggtgggagggcctccctggcttgggagaccgctctctgcaagggagggggagagaagcagagggagagagaaggtgacacggatggaagagtgggaaggagctggcctggctcagccctaggctgtccctgcagccagggtgtccgggggctggccagtcagagaaagggggccatggactgctgtggcaaatagggagacaaggagacagaccctgcagtcctactacagtctggagtggggtcctaagaagaagggtcccacctcaacccctgtcagtgtccactgtggggtgggggctgacccctgcctttgattgtcattctcctgggaagcccagtctcagtccctcccccaacactgtccacactgcccctccccactgtttatttattgcacggatctaagttattctccccagccagagcccgagctcctgctccctgggaaaagtggcgtatggccctgagctgggctttatattttatatctgcaaataaatcacattttatcttatatttagggaaagccggagagcaacaacaaaaaatgtttaagccgggcgcggtggctcacatctgtaatcccagcactttgggagtccaaggagggggatcgcttgagtccaggagtttgagaccagcctggacaacatggtgaaaccccatctctacaaaaaatacaaaaattagccatgcatggtggctcatgcctgtagtcccagctacttgggaggctgaggcaggaggatcacttaagcccagaaggcagaggttgtagtgagctgagatcgcaccactgcactccagcctgggcaacatagcaaaatcctgtctcaaaaaaaaagttaaaaaatattgcccggctcctagaatttatttatttcctgacttacagcaagcgagttatcgtcttctgtattttgtagactttctaaataaagtcaaattctttctttttccacag

SEQ ID NO: 199220 - DNA, 5040 bp, Homo sapiens
  Payload ID: 19305
  Gene Name: v-maf avian musculoaponeurotic fibrosarcoma oncogene homolog G
  Uniprot ID: O15525
  ENST ID: ENST00000357736
  CDS Start-End: 217-705
ggcggcggcggcggatcccgagcctggtccggcccggccttcccagtgcgctcggcccggcccgcgcaggcggcgagtcctccgagccccgggcccggacccctcgcgccggtccctgccccgcgcggcctcggagcgcgcgcggccccgccccgccccggcctcggcccgccgggcccgcagtgtgagagcgcctgctcgctgtgcccccgggttatgacgacccccaataaaggaaacaaggccttgaaggtgaagcgggagccgggtgagaatggcaccagcctgacggatgaggagctggtgaccatgtcggtgcgggagctgaaccagcacctgcggggcctgtccaaggaggagatcgtccagctgaagcagcgccggcgcacgctcaagaaccgcggctacgctgccagctgccgcgtgaagcgggtgacgcagaaggaggagctggagaagcagaaggcggagctgcagcaggaggtggagaagctggcctcagagaacgccagcatgaagctggagctcgacgcgctgcgctccaagtacgaggcgctgcagaccttcgcccggacggtggcccgcagccccgtggcgccagcccggggcccccttgccgccggcctggggcccctcgtcccaggcaaggtggccgccaccagcgtcatcacaatagtaaagtccaagacggatgcccgatcgtagggacgcgcgtctgcccaggcgggtctttgcggggccactaggcacatggcgaatttggctgccctgtccctctgtttccttctcttctctttcctccctctcttccccacccttctctcttccctgcaaagcacaacctgtaccccaggggcgccgggctgagcccctttgatctcgtcattgtcgtcgtgtgttttgtatgttgggattggtcagttcggcggtgacgtggggtcgccccaaccccttttgtaccagggccatgcaggcttggagtccagagttggtgctgtgggaacggactagagagagttgcgggagagagaaggagcaggcacgctgggcctcgcgtgtccccgagcagtgagggtcccagtgttccctccactcccgagtggccacaggctcgcgggctgggaaggattcactctctttagccccaggggagcagctcagcttagcccagcatgaagagatgggctctgctctgagagtagggcgggcttgaaggccctgatgggtggaccaccagcctgggcgcagtggtgctgggggcgtgcagctgggcccaggggctgtgcactcaggcctgacccgttgcactgaacaagaccaaatctctggttgtgcgcttaacgtgagggtgggtccagtgtgccctgcgatgggtcccgtgtcactgtttacatgacctatttgtgtggttatatagccctttatttaaaagagagaagttccttttacaaagttattaaattaattatatgtttaaaagttaaagaaaaaagagctgcagagtatttataaaactgtcttttagaaaaaaaacaagcaagaagaccatttgaccatatgaatggaaaagggaagaaagtataatagaaactttgctagttaaaaaaaaaagaaaaaaaaagaaaaaaaatccctttcttgtaaacttacggacacctctttgtggctgttggagtttagtttttatatacacagagttatcagacattatttataaaacttagtttaaaaaaaagacaaaaaaaaaaaagccaagccgtgagccgaccagaaggccgtcctctttgatatcttttgcaattgtaccgaaagtgacttactcctctgcccttcctgcttccgtctcttgccggtgccgtggtgtcgtccgtgcctggtgaggttttgtgcagcggtaaagtgctggtgcttctggtgacctttgacctgtgggtgtcacttcttgtgtctgttttcccgtgttcgttttttgggtttagttgtgcttttgcttctgctggcttgctggacctgggctggggtgccaagtggcgcctgctgcgtcagagctcaaggaatctgtgcccaccaccagctcctggtccgtaggaggtgagacatggggttctgtcatgcccccctccactgagccttggctacatctgtgtctagggcttgggctgatctagtggcggggtaggtgaaactggggtcccttggggcgccccacgctgcttccacacccaccacctctggccttgggtggtggcattacagggatgagggagtcactgtgggtggccacagggctatggccaagcgttccctggccgtcttcctctggcctcagctttgttcctataggctgcccgcgccgtgggctgcaggtctcgccgcccgcttgatccctgaggtgtttccatgctgcgggtggtgcttccaggcagagtgggtgggggcccaccgggcaccgccctttcttccttgtccctgcctcactctgagagccttgggggtctccaccagtgcagacaagggctacagtctccagggccgggtcttgtccctcttctccgctggtccacgctggcagctcttggcttcgggcctgccttctgcctccctttgggatctgtgtcttccagggatcagctgcttggcttctgctggaggtgcctccctgtgggggcgcagcctgcctcctgctctcagttcctcgccagaggctgctgcccttcctggctgggctcaggaggctccttgtaggcatatgatggggagggggtgcccctacccacctccaagaggctacagccctgtgtctggccatgtgagccctggcctttcaccgggttgctggtttcttttctgtggggcccagacttctgtaaagcacacagatgtgggtaagatgaaaaactgtggcccaacagggcttaaccctatggatggtgggatttttatccaatagtttggcctggtgtgcccacaggatgggaacagggaggcaccatcaacacttgtcatgttaatgagcttttctttgctcgaggtgttcagagacaagtcctgtgtctacctgcgtcagcctgaaaatggaaatattggctgttgactcttgtcatttagtgacttcatccccctcccctcagtctgatcttgtctaagtagaatccaggcgttagttggaatcatatcataagtatccatgaagaaaacgtcatgatctgcctcggagtggggagaaacaggccctccttgtccttgtgcagcccccacttttgtcctggctgtgggtggccatccattttgagcacctctgccaggctgcagacctggaggcgaagggagtgtggaagaggagggtgtaagggtcgacgcgtgctgaatgggaggtgcaggtcctcggtgcgttggcagaagaggcttctggagtttcgaggccatacctcctttcaagagctttggatttggggcgacttccctgggtctaggggagtgttcctgtcccctgtcaggtcagccctgcggagccactccacccctcttccccttcccctggatttcctgacatagatggtgtgttcatgtgcaggtgtgagtgtgctgtccttctgatctctgttgatcccgctttcctactgagagggtggtggagagggtggtggtctcttctcacctcagtttttctgacacagcgaatcgagggctttggccaaggccaggtctctcaaacttgtccgccaagtaaaccatgatatatgtcttcccttccaccttaactttgccccaactcctcttttatcctaacatggacgctcagatttcagaggaatacccagcagggacaggtcagctctcaccaggagagtgaggcccctggctgctgctcggggtggcactggtgttgctggctcagctcttggtgcatgtttcagatatgtgtgtacacttctgactggtgatcagggcccggcccacggccctgagcggctgcagcctgctttgggacgatggtcaggtcccatgttgtccctgctgcctccctctggagtggccacttggccaaagcgcccatccacatctggaaagtcggagccgcagcctgctgcaccgtttccgctctgggatcttgtgagttacttttttaggctgtggtttggtgaaaggaaccaacacattaacgatttttcccccagaagccactgaataattctttttggtgtatttttgccttcctgttggctgtctggccttggagcaggtcgggagagtagagtacataatcagtgccacacagaggcagggcgtgtctgagagactaatgcctgtcctgcctctggcctgtgtcctgggtgtgtaccatacctgctgggccagtcccacacatttccaccctgcccctggagcagcagctttgataccatgggtgtcccttgagtctgagctagagtgtgtccccgataaactgtgagacctccctgttcttggtgaccccagttgggctttggcccctccagcaaccttgtgtcccagccctgcccttcttcccaccccctcaatctgctagtccctgaagcctttaaccaaacgggagtgggcacagaaagccttctcctggcaacaggacaagggctgcccgcgtgtccagccctgttgctctcctggcgctgagaggtgggtccaagcagagttgatcagtccctgcctgccctgcctaggtctagccaggggaggttgtgtgtgtgggagaagaccccgggatctgctggggtgggatggaggttattaaagatctaagtgaggaggggctggggtttggatgcggggtgaggcccgagcgctcacacttcgtgtagggcgggcaggggcctgacctcttgcagggcagtggccttggtgccctacccctgccctgcgcagtatttattgctaaattattgtccaggaggggcagcactgggcctggccccccgggtatttattgctgtacatagtgtatgtttgtgatatataaggttttctttattttgtatatgatcaataaaccttttaaagaga

SEQ ID NO: 199221 - DNA, 1743 bp, Homo sapiens
  Payload ID: 19305
  Gene Name: v-maf avian musculoaponeurotic fibrosarcoma oncogene homolog G
  Uniprot ID: O15525
  ENST ID: ENST00000392366
  CDS Start-End: 210-698
ccgcgtcttattccttctaatctctcccctgccccttgtcttgcgcctgccttcctaacagccttcagttccccttctcccgtcagaccttcctgacctcccacctggttctctaggggcagggtggacaggaagcagctcagcccagcctgggagaggccaagggctgcctcctatcagagagcgcctgctcgctgtgcccccgggttatgacgacccccaataaaggaaacaaggccttgaaggtgaagcgggagccgggtgagaatggcaccagcctgacggatgaggagctggtgaccatgtcggtgcgggagctgaaccagcacctgcggggcctgtccaaggaggagatcgtccagctgaagcagcgccggcgcacgctcaagaaccgcggctacgctgccagctgccgcgtgaagcgggtgacgcagaaggaggagctggagaagcagaaggcggagctgcagcaggaggtggagaagctggcctcagagaacgccagcatgaagctggagctcgacgcgctgcgctccaagtacgaggcgctgcagaccttcgcccggacggtggcccgcagccccgtggcgccagcccggggcccccttgccgccggcctggggcccctcgtcccaggcaaggtggccgccaccagcgtcatcacaatagtaaagtccaagacggatgcccgatcgtagggacgcgcgtctgcccaggcgggtctttgcggggccactaggcacatggcgaatttggctgccctgtccctctgtttccttctcttctctttcctccctctcttccccacccttctctcttccctgcaaagcacaacctgtaccccaggggcgccgggctgagcccctttgatctcgtcattgtcgtcgtgtgttttgtatgttgggattggtcagttcggcggtgacgtggggtcgccccaaccccttttgtaccagggccatgcaggcttggagtccagagttggtgctgtgggaacggactagagagagttgcgggagagagaaggagcaggcacgctgggcctcgcgtgtccccgagcagtgagggtcccagtgttccctccactcccgagtggccacaggctcgcgggctgggaaggattcactctctttagccccaggggagcagctcagcttagcccagcatgaagagatgggctctgctctgagagtagggcgggcttgaaggccctgatgggtggaccaccagcctgggcgcagtggtgctgggggcgtgcagctgggcccaggggctgtgcactcaggcctgacccgttgcactgaacaagaccaaatctctggttgtgcgcttaacgtgagggtgggtccagtgtgccctgcgatgggtcccgtgtcactgtttacatgacctatttgtgtggttatatagccctttatttaaaagagagaagttccttttacaaagttattaaattaattatatgtttaaaagttaaagaaaaaagagctgcagagtatttataaaactgtcttttagaaaaaaaacaagcaagaagaccatttgaccatatgaatggaaaagggaagaaagtataatagaaactttgctagttaaaaaaaaaagaaaaaaaaagaaaaaaaatccctttcttgtaaacttacggacacctctttgtggctgttggagtttagtttttatatacacagagttatcagacattatttataaaacttagtttaaaaaaaagacaaaaaaaaaaaa

SEQ ID NO: 199222 - DNA, 570 bp, Homo sapiens
  Payload ID: 19305
  Gene Name: v-maf avian musculoaponeurotic fibrosarcoma oncogene homolog G
  ENST ID: ENST00000574686
  CDS Start-End: 275-570
ggcggcggatcccgagcctggtccggcccggccttcccagtgcgctcggcccggcccgcgcaggcggcgagtcctccgagccccgggcccggacccctcgcgccggtccctgccccgcgcggcctcggagcgcgcgcggccccgccccgccccggcctcggcccgccgggcccgcagtgtggggcagggtggacaggaagcagctcagcccagcctgggagaggccaagggctgcctcctatcagagagcgcctgctcgctgtgcccccgggttatgacgacccccaataaaggaaacaaggccttgaaggtgaagcgggagccgggtgagaatggcaccagcctgacggatgaggagctggtgaccatgtcggtgcgggagctgaaccagcacctgcggggcctgtccaaggaggagatcgtccagctgaagcagcgccggcgcacgctcaagaaccgcggctacgctgccagctgccgcgtgaagcgggtgacgcagaaggaggagctggagaagcagaaggcggagctgcagcaggaggtggagaagctggcctcagagaacgccag

SEQ ID NO: 199223 - DNA, 3368 bp, Homo sapiens
  Payload ID: 19306
  Gene Name: v-maf avian musculoaponeurotic fibrosarcoma oncogene homolog K
  Uniprot ID: O60675
  ENST ID: ENST00000343242
  CDS Start-End: 230-700
ggagccgggcgggcgggtgcggtggcggcgggcggcgcgggggcacttgttgttcttcgcgaagtcggagcccgagcgccaggcggcggcggcggccgaggggagcgcgacagtgagcgccggcgcgaggacagcgcgtgcccgcgaggagccgccgcgcgcccgcgccctccgcgcgacgccagctacgagttccagggagctctgtcctggtgaccgtgcccgggttatgacgactaatcccaaaccgaataaggcattaaaggtcaagaaggaggcgggcgagaacgccccggtgctcagcgatgatgagctggtgtccatgtcggtgcgggagctgaaccagcacctgcggggtctcaccaaggaggaggtgacccgcctgaagcagcgtcggcgcacactcaagaaccgcggctacgcggccagctgccgcatcaagcgggtgacgcagaaggaggagctggagcggcagcgcgtggagctgcagcaggaggtggagaagctggcgcgtgagaacagcagcatgcggctggagctggacgccctgcgctccaagtacgaggcgctgcagaccttcgcgcgcaccgtggcccggggacctgtggcgccctccaaggtggccaccaccagcgtcatcaccatcgtcaagtccaccgagctctcctccacctccgtgcccttctcggctgcatcctagtgccggccgggggcggggggtggcgggcggcgggcggcgggcaggcgggtgggggcacacccctcgtacctgtcactgggatgcagactctcgacatccgagtccaagcgcaggcccctcgggcgcaggcagctcacaccaggaagagactgtattgcagggtgaagagtgggctcccgtgggcccagagctgcacgccggtccacagacacactcacgcccgccacctgctccccgcaggatgtgtctgtgtgtgggaattggtatcttgcacccgtgggagtcgggacatataatggaaaggccctcgggaagttccgcgtcctctgtgggggctgccggaagacacggccccaggagtcaggcccctgtggtcaggtctagcatggggcttgttttccactcctgctgtaagcagccttcgacacctgtcctgccacggcctcccagccggtgcgggagcccctcactgccctgaccgactccgcagtccccggggaggagcatggatggtgtgtcggcagctccgtccttccagctgtcccgttgcagtgcccgtgatccgcgtctgccttagcaggggcctgcgtgagtgggcacggtgtgggaggtcgcctgcgtggggtggtgtctgtgtgtgtgcacgcacgcctgccatcaaagcagcagggctgagggggtgcagcttgctggtgttcactgggggagggcctgtgggcacacatggcagagagagtggctcacacgtcgtgaggtctcccctgtgctctggtgacccgaggaggtcgtgcagcacagcgcagaagcccctgcccacgggatccggccccccagacaccgaccccacaggccgtcccggatctcagcggacacaggcaggagcgccccatcatttgacggtgagcaggactcaggctgtgtgtcctggagctacttctcaccaactgtggtcagtgcagggggaacgaggaggtcttttgggggcctggcgaggggaagggctgctgcagtctagggagagggggtgcagcctgggggatgttggtggacatggatgtggaggtggaaggaggaggacgttgcgtggagtggtgggaggaggcgggagccgtgtgcgagagcaggtggaaagccttgaggggcaggaccaggatgcagctggcttgtagaagagctcaggagtgagcctggcactccagagggcgcggcgggtggggaggcagcaggcaccagtccaggagagcttcgtggacgtggctcctgcgcgcacacccccaggagcacagccacgggctgcaggtgtggctggcctcagcactcagtcctcacccggagcctttgcctgctcctccttccaagagcactgaggcaccagtgggcttggcactccaccttgggcttccttttcctggagagccgccttgagggtccctcctgtgactggggtctctgcagcgagagccgcgggggttgcggagcccctgcctgggggagctggcggaatgtgagccgccggccgggggccgccacataagacctgcaaggtggtgcctggggccctggctccttctcggctgcccctgcccacccagtaacagcccccaccagctacagagcccaggcgggtgccagccacgctgggagggcagaggacagacagccccggggctgcgacttggttctgtgtctactgttagaagttgagtgggaagctgcaggcccgccaggaccactgggtccctacagagcaaaggcctgcgtgttcccaaacagccgttgcccccgtggccgtggtaggtaatccatattggatgtcataaggaccagggggatatttaaagagagaaacagaaaatatatagagatataaaattatattcacagtttatctacagatttttcgtaacaatctttcttttccagtttgatactgtaaatctatcagagcagagccgggggcacgggcacaggtgggagttgggagcaaagcggaggcccgggctgcccgccgtcccccttcatctccccacggactgtaccaggcagctgggccccgcaggacaggccgcagcgggtggccggttctgtcccgtcttggggttcttggtgtccacgtcttgtgggccgtgggcttctacctgcccttggcctgcagtgctttgctggagaagggactccctggtccccagggtggacggagccgctgtcaccgcccagagctgggccggggaagcacggtgtgttctgcttttcttttcagattgttgaaatttcattgtcatgatttaatatatggatttttttatttaagaaaaagacgagggactctttgtcacgtgggtttgttttctgtctccgtgcctccggcttcccaaagagatccaggtctttgcgtttccagggcgtggggaccccggccccctatgccgccacgccgccacaccgcctcaccctggcttctgtgctacttggcagttccatttcattatttattttttgtgctgctttttatcatgatataaattattgaaaacagatcacatgtgggcccgtgtctggccgccgccgccctgccccgtccctgcggccaccacctaatttattgccgtgcgtcctgctgctgtgactgcttttgtacctttgcaataaagaattttctggtttcaga

SEQ ID NO: 199224 - DNA, 632 bp, Homo sapiens
  Payload ID: 19306
  Gene Name: v-maf avian musculoaponeurotic fibrosarcoma oncogene homolog K
  Uniprot ID: O60675
  ENST ID: ENST00000406174
  CDS Start-End: 164-632
ggggcaccttgtgctgtgcaggtgcagacgtcttctctgacctcagggagagtcagaacaggaagcagccactgccggcgcctgctggtcaccccacagtgccggcggctgcagcccagctacgagttccagggagctctgtcctggtgaccgtgcccgggttatgacgactaatcccaaaccgaataaggcattaaaggtcaagaaggaggcgggcgagaacgccccggtgctcagcgatgatgagctggtgtccatgtcggtgcgggagctgaaccagcacctgcggggtctcaccaaggaggaggtgacccgcctgaagcagcgtcggcgcacactcaagaaccgcggctacgcggccagctgccgcatcaagcgggtgacgcagaaggaggagctggagcggcagcgcgtggagctgcagcaggaggtggagaagctggcgcgtgagaacagcagcatgcggctggagctggacgccctgcgctccaagtacgaggcgctgcagaccttcgcgcgcaccgtggcccggggacctgtggcgccctccaaggtggccaccaccagcgtcatcaccatcgtcaagtccaccgagctctcctccacctccgtgcccttctcggctgcatcct

SEQ ID NO: 199225 - DNA, 2773 bp, Homo sapiens
  Payload ID: 19306
  Gene Name: v-maf avian musculoaponeurotic fibrosarcoma oncogene homolog K
  Uniprot ID: O60675
  ENST ID: ENST00000403150
  CDS Start-End: 1016-1486
tttgcaggtccccacggtggcggaggcagctgggccccagcctctccactgtcaccctcaccccaggacgtggtgcgaaggagcctggagcccacctggccgtccccgggaccggctggtgccatcctgtgccatctacgtcagcgccctgagatcagctggccttggcaggggcagcggactcggcagcctggcgcaggaccctgtctcacctgtgcggccctcttgttgtgggggtttgtgggttgcgggggtggggcccccatcggaggcagggctggagggtggagggatttgggcccgagggctccctggcccagggtgtggggagggtcctgggctggcagggaggacgggatgcggtcacccgcccccatgatgcccatgtccagtggaggtgctgaccaaggacaccccccaccgccgtgtgctgctctgatgttcctgtgggaacctgtgtctggtatttggggtatgggagtgggtgctgtgaacccctgtcccgcgagctgcccggcgccttctgcccgcccgtcccggccgccgggtgcaaatgggtttgttgactgcctgccggcctcgtgatgtctgtgcaacctgacctgaagtcaggatcgcgtttgggcttctcggtttccatgacaaccgtgggggctggctcggtcccaaggtcgccatggcaactatcggagggctcatgccggggatgctttggctgggtttttcatgaatgattagaatgtgtgacacaatgcagacgtgaggacggcgggggcggcggcggggacgactcccgccagacggtcaaatgctcggcagggcggcggctcccccacctccctggtctctggctgcggcccccggacctgccgcccctcaggaaccccacacccccttgggccgcagggtcctcgctcgggggcagcttaggtggaggtggtgatgtcacagccgcagcggccagggccgtgctacgagttccagggagctctgtcctggtgaccgtgcccgggttatgacgactaatcccaaaccgaataaggcattaaaggtcaagaaggaggcgggcgagaacgccccggtgctcagcgatgatgagctggtgtccatgtcggtgcgggagctgaaccagcacctgcggggtctcaccaaggaggaggtgacccgcctgaagcagcgtcggcgcacactcaagaaccgcggctacgcggccagctgccgcatcaagcgggtgacgcagaaggaggagctggagcggcagcgcgtggagctgcagcaggaggtggagaagctggcgcgtgagaacagcagcatgcggctggagctggacgccctgcgctccaagtacgaggcgctgcagaccttcgcgcgcaccgtggcccggggacctgtggcgccctccaaggtggccaccaccagcgtcatcaccatcgtcaagtccaccgagctctcctccacctccgtgcccttctcggctgcatcctagtgccggccgggggcggggggtggcgggcggcgggcggcgggcaggcgggtgggggcacacccctcgtacctgtcactgggatgcagactctcgacatccgagtccaagcgcaggcccctcgggcgcaggcagctcacaccaggaagagactgtattgcagggtgaagagtgggctcccgtgggcccagagctgcacgccggtccacagacacactcacgcccgccacctgctccccgcaggatgtgtctgtgtgtgggaattggtatcttgcacccgtgggagtcgggacatataatggaaaggccctcgggaagttccgcgtcctctgtgggggctgccggaagacacggccccaggagtcaggcccctgtggtcaggtctagcatggggcttgttttccactcctgctgtaagcagccttcgacacctgtcctgccacggcctcccagccggtgcgggagcccctcactgccctgaccgactccgcagtccccggggaggagcatggatggtgtgtcggcagctccgtccttccagctgtcccgttgcagtgcccgtgatccgcgtctgccttagcaggggcctgcgtgagtgggcacggtgtgggaggtcgcctgcgtggggtggtgtctgtgtgtgtgcacgcacgcctgccatcaaagcagcagggctgagggggtgcagcttgctggtgttcactgggggagggcctgtgggcacacatggcagagagagtggctcacacgtcgtgaggtctcccctgtgctctggtgacccgaggaggtcgtgcagcacagcgcagaagcccctgcccacgggatccggccccccagacaccgaccccacaggccgtcccggatctcagcggacacaggcaggagcgccccatcatttgacgtttgatactgtaaatctatcagagcagagccgggggcacgggcacaggtgggagttgggagcaaagcggaggcccgggctgcccgccgtcccccttcatctccccacggactgtaccaggcagctgggccccgcaggacaggccgcagcgggtggccggttctgtcccgtcttggggttcttggtgtccacgtcttgtgggccgtgggcttctacctgcccttggcctgcagtgctttgctggagaagggactccctggtccccagggtggacggagccgctgtcaccgcccagagctgggccggggaagcacggtgtgttctgcttttcttttcagattgttgaaatttcattgtcatgatttaatatatggatttttttatttaag

SEQ ID NO: 199226 - DNA, 1041 bp, Homo sapiens
  Payload ID: 19307
  Gene Name: v-mos Moloney murine sarcoma viral oncogene homolog
  Uniprot ID: P00540
  ENST ID: ENST00000311923
  CDS Start-End: 1-1041
atgccctcgcccctggccctacgcccctacctccggagcgagttttccccatcggtggacgcgcggccctgcagcagtccctcagagctacctgcgaagctgcttctgggggccactcttcctcgggccccgcggctgccgcgccggctggcctggtgctccattgactgggagcaggtgtgcttgctgcagaggctgggagctggagggtttggctcggtgtacaaggcgacttaccgcggtgttcctgtggccataaagcaagtgaacaagtgcaccaagaaccgactagcatctcggcggagtttctgggctgagctcaacgtagcaaggctgcgccacgataacatcgtgcgcgtggtggctgccagcacgcgcacgcccgcagggtccaatagcctagggaccatcatcatggagttcggtggcaacgtcactttacaccaagtcatctatggcgccgccggccaccctgagggggacgcaggggagcctcactgccgcactggaggacagttaagtttgggaaagtgtctcaagtactcactagatgttgtgaacggcctgctcttcctccactcgcaaagcattgtgcacttggacctgaagcccgcgaacatcttgatcagtgagcaggatgtctgtaaaattagtgacttcggttgctctgagaagttggaagatctgctgtgcttccagacaccctcttaccctctaggaggcacatacacccaccgcgccccggagctcctgaaaggagagggcgtgacgcctaaagccgacatttattcctttgccatcactctctggcaaatgactaccaagcaggcgccgtattcgggggagcggcagcacatactgtacgcggtggtggcctacgacctgcgcccgtccctctccgctgccgtcttcgaggactcgctccccgggcagcgccttggggacgtcatccagcgctgctggagacccagcgcggcgcagaggccgagcgcgcggctgcttttggtggatctcacctctttgaaagctgaactcggctga

SEQ ID NO: 199227 - DNA, 3571 bp, Homo sapiens
  Payload ID: 19308
  Gene Name: v-myb avian myeloblastosis viral oncogene homolog
  ENST ID: ENST00000316528
  CDS Start-End: 200-2380
aatatcaacctgtttcctcctcctccttctcctcctcctccgtgacctcctcctcctctttctcctgagaaacttcgccccagcggtgcggagcgccgctgcgcagccggggagggacgcaggcaggcggcgggcagcgggaggcggcagcccggtgcggtccccgcggctctcggcggagccccgcgcccgccgcgccatggcccgaagaccccggcacagcatatatagcagtgacgaggatgatgaggactttgagatgtgtgaccatgactatgatgggctgcttcccaagtctggaaagcgtcacttggggaaaacaaggtggacccgggaagaggatgaaaaactgaagaagctggtggaacagaatggaacagatgactggaaagttattgccaattatctcccgaatcgaacagatgtgcagtgccagcaccgatggcagaaagtactaaaccctgagctcatcaagggtccttggaccaaagaagaagatcagagagtgatagagcttgtacagaaatacggtccgaaacgttggtctgttattgccaagcacttaaaggggagaattggaaaacaatgtagggagaggtggcataaccacttgaatccagaagttaagaaaacctcctggacagaagaggaagacagaattatttaccaggcacacaagagactggggaacagatgggcagaaatcgcaaagctactgcctggacgaactgataatgctatcaagaaccactggaattctacaatgcgtcggaaggtcgaacaggaaggttatctgcaggagtcttcaaaagccagccagccagcagtggccacaagcttccagaagaacagtcatttgatgggttttgctcaggctccgcctacagctcaactccctgccactggccagcccactgttaacaacgactattcctattaccacatttctgaagcacaaaatgtctccagtcatgttccataccctgtagcgttacatgtaaatatagtcaatgtccctcagccagctgccgcagccattcagagacactataatgatgaagaccctgagaaggaaaagcgaataaaggaattagaattgctcctaatgtcaaccgagaatgagctaaaaggacagcaggtgctaccaacacagaaccacacatgcagctaccccgggtggcacagcaccaccattgccgaccacaccagacctcatggagacagtgcacctgtttcctgtttgggagaacaccactccactccatctctgccagcggatcctggctccctacctgaagaaagcgcctcgccagcaaggtgcatgatcgtccaccagggcaccattctggataatgttaagaacctcttagaatttgcagaaacactccaatttatagattctttcttaaacacttccagtaaccatgaaaactcagacttggaaatgccttctttaacttccacccccctcattggtcacaaattgactgttacaacaccatttcatagagaccagactgtgaaaactcaaaaggaaaatactgtttttagaaccccagctatcaaaaggtcaatcttagaaagctctccaagaactcctacaccattcaaacatgcacttgcagctcaagaaattaaatacggtcccctgaagatgctacctcagacaccctctcatctagtagaagatctgcaggatgtgatcaaacaggaatctgatgaatctggaattgttgctgagtttcaagaaaatggaccacccttactgaagaaaatcaaacaagaggtggaatctccaactgataaatcaggaaacttcttctgctcacaccactgggaaggggacagtctgaatacccaactgttcacgcagacctcgcctgtggcagatgcaccgactggagtgcaatggcacgatttcggctcactgcaacctctgcctcccgggttcaagcgattctcctgcctcagtctcccgagaagctgggattacaggcacccgccaccacgcccagctaattttgaatttttagtagagacggggtttctccatgttggtcaggctggtcttgaactcctgacctcaggtgatctacccgcctcggcctcccaaagtgctaggattacaggcgtgagccaccgcgcccggccagataatattcttacaagctccgttttaatggcaccagcatcagaagatgaagacaatgttctcaaagcatttacagtacctaaaaacaggtccctggcgagccccttgcagccttgtagcagtacctgggaacctgcatcctgtggaaagatggaggagcagatgacatcttccagtcaagctcgtaaatacgtgaatgcattctcagcccggacgctggtcatgtgagacatttccagaaaagcattatggttttcagaacacttcaagttgacttgggatatatcattcctcaacatgaaacttttcatgaatgggagaagaacctatttttgttgtggtacaacagttgagagcagcaccaagtgcatttagttgaatgaagtcttcttggatttcacccaactaaaaggatttttaaaaataaataacagtcttacctaaattattaggtaatgaattgtagccagttgttaatatcttaatgcagatttttttaaaaaaaacataaaatgatttatctgtattttaaaggatccaacagatcagtattttttcctgtgatgggttttttgaaatttgacacattaaaaggtactccagtatttcacttttctcgatcactaaacatatgcatatatttttaaaaatcagtaaaagcattactctaagtgtagacttaataccatgtgacatttaatccagattgtaaatgctcatttatggttaatgacattgaaggtacatttattgtaccaaaccattttatgagttttctgttagcttgctttaaaaattattactgtaagaaatagttttataaaaaattatatttttattcagtaatttaattttgtaaatgccaaatgaaaaacgttttttgctgctatggtcttagcctgtagacatgctgctagtatcagaggggcagtagagcttggacagaaagaaaagaaacttggtgttaggtaattgactatgcactagtatttcagactttttaattttatatatatatacattttttttccttctgcaatacatttgaaaacttgtttgggagactctgcattttttattgtggtttttttgttattgttggtttatacaagcatgcgttgcacttcttttttgggagatgtgtgttgttgatgttctatgttttgttttgagtgtagcctgactgttttataatttgggagttctgcatttgatccgcatcccctgtggtttctaagtgtatggtctcagaactgttgcatggatcctgtgtttgcaactggggagacagaaactgtggttgatagccagtcactgccttaagaacatttgatgcaagatggccagcactgaacttttgagatatgacggtgtacttactgccttgtagcaaaataaagatgtgcccttattttacct

SEQ ID NO: 199228 - DNA, 3672 bp, Homo sapiens
  Payload ID: 19308
  Gene Name: v-myb avian myeloblastosis viral oncogene homolog
  Uniprot ID: P10242
  ENST ID: ENST00000341911
  CDS Start-End: 200-2485
aatatcaacctgtttcctcctcctccttctcctcctcctccgtgacctcctcctcctctttctcctgagaaacttcgccccagcggtgcggagcgccgctgcgcagccggggagggacgcaggcaggcggcgggcagcgggaggcggcagcccggtgcggtccccgcggctctcggcggagccccgcgcccgccgcgccatggcccgaagaccccggcacagcatatatagcagtgacgaggatgatgaggactttgagatgtgtgaccatgactatgatgggctgcttcccaagtctggaaagcgtcacttggggaaaacaaggtggacccgggaagaggatgaaaaactgaagaagctggtggaacagaatggaacagatgactggaaagttattgccaattatctcccgaatcgaacagatgtgcagtgccagcaccgatggcagaaagtactaaaccctgagctcatcaagggtccttggaccaaagaagaagatcagagagtgatagagcttgtacagaaatacggtccgaaacgttggtctgttattgccaagcacttaaaggggagaattggaaaacaatgtagggagaggtggcataaccacttgaatccagaagttaagaaaacctcctggacagaagaggaagacagaattatttaccaggcacacaagagactggggaacagatgggcagaaatcgcaaagctactgcctggacgaactgataatgctatcaagaaccactggaattctacaatgcgtcggaaggtcgaacaggaaggttatctgcaggagtcttcaaaagccagccagccagcagtggccacaagcttccagaagaacagtcatttgatgggttttgctcaggctccgcctacagctcaactccctgccactggccagcccactgttaacaacgactattcctattaccacatttctgaagcacaaaatgtctccagtcatgttccataccctgtagcgttacatgtaaatatagtcaatgtccctcagccagctgccgcagccattcagagacactataatgatgaagaccctgagaaggaaaagcgaataaaggaattagaattgctcctaatgtcaaccgagaatgagctaaaaggacagcaggtgctaccaacacagaaccacacatgcagctaccccgggtggcacagcaccaccattgccgaccacaccagacctcatggagacagtgcacctgtttcctgtttgggagaacaccactccactccatctctgccagcggatcctggctccctacctgaagaaagcgcctcgccagcaaggtgcatgatcgtccaccagggcaccattctggataatgttaagaacctcttagaatttgcagaaacactccaatttatagattctgattcttcatcatggtgtgatctcagcagttttgaattctttgaagaagcagatttttcacctagccaacatcacacaggcaaagccctacagcttcagcaaagagagggcaatgggactaaacctgcaggagaacctagcccaagggtgaacaaacgtatgttgagtgagagttcacttgacccacccaaggtcttacctcctgcaaggcacagcacaattccactggtcatccttcgaaaaaaacggggccaggccagccccttagccactggagactgtagctccttcatatttgctgacgtcagcagttcaactcccaagcgttcccctgtcaaaagcctacccttctctccctcgcagttcttaaacacttccagtaaccatgaaaactcagacttggaaatgccttctttaacttccacccccctcattggtcacaaattgactgttacaacaccatttcatagagaccagactgtgaaaactcaaaaggaaaatactgtttttagaaccccagctatcaaaaggtcaatcttagaaagctctccaagaactcctacaccattcaaacatgcacttgcagctcaagaaattaaatacggtcccctgaagatgctacctcagacaccctctcatctagtagaagatctgcaggatgtgatcaaacaggaatctgatgaatctggaattgttgctgagtttcaagaaaatggaccacccttactgaagaaaatcaaacaagaggtggaatctccaactgataaatcaggaaacttcttctgctcacaccactgggaaggggacagtctgaatacccaactgttcacgcagacctcgcctgtggcagatgcaccgaatattcttacaagctccgttttaatggcaccagcatcagaagatgaagacaatgttctcaaagcatttacagtacctaaaaacaggtccctggcgagccccttgcagccttgtagcagtacctgggaacctgcatcctgtggaaagatggaggagcagatgacatcttccagtcaagctcgtaaatacgtgaatgcattctcagcccggacgctggtcatgtgagacatttccagaaaagcattatggttttcagaacacttcaagttgacttgggatatatcattcctcaacatgaaacttttcatgaatgggagaagaacctatttttgttgtggtacaacagttgagagcagcaccaagtgcatttagttgaatgaagtcttcttggatttcacccaactaaaaggatttttaaaaataaataacagtcttacctaaattattaggtaatgaattgtagccagttgttaatatcttaatgcagatttttttaaaaaaaacataaaatgatttatctgtattttaaaggatccaacagatcagtattttttcctgtgatgggttttttgaaatttgacacattaaaaggtactccagtatttcacttttctcgatcactaaacatatgcatatatttttaaaaatcagtaaaagcattactctaagtgtagacttaataccatgtgacatttaatccagattgtaaatgctcatttatggttaatgacattgaaggtacatttattgtaccaaaccattttatgagttttctgttagcttgctttaaaaattattactgtaagaaatagttttataaaaaattatatttttattcagtaatttaattttgtaaatgccaaatgaaaaacgttttttgctgctatggtcttagcctgtagacatgctgctagtatcagaggggcagtagagcttggacagaaagaaaagaaacttggtgttaggtaattgactatgcactagtatttcagactttttaattttatatatatatacattttttttccttctgcaatacatttgaaaacttgtttgggagactctgcattttttattgtggtttttttgttattgttggtttatacaagcatgcgttgcacttcttttttgggagatgtgtgttgttgatgttctatgttttgttttgagtgtagcctgactgttttataatttgggagttctgcatttgatccgcatcccctgtggtttctaagtgtatggtctcagaactgttgcatggatcctgtgtttgcaactggggagacagaaactgtggttgatagccagtcactgccttaagaacatttgatgcaagatggccagcactgaacttttgagatatgacggtgtacttactgccttgtagcaaaataaagatgtgcccttatttt

SEQ ID NO: 199229 - DNA, 3365 bp, Homo sapiens
  Payload ID: 19308
  Gene Name: v-myb avian myeloblastosis viral oncogene homolog
  ENST ID: ENST00000339290
  CDS Start-End: 200-1549
aatatcaacctgtttcctcctcctccttctcctcctcctccgtgacctcctcctcctctttctcctgagaaacttcgccccagcggtgcggagcgccgctgcgcagccggggagggacgcaggcaggcggcgggcagcgggaggcggcagcccggtgcggtccccgcggctctcggcggagccccgcgcccgccgcgccatggcccgaagaccccggcacagcatatatagcagtgacgaggatgatgaggactttgagatgtgtgaccatgactatgatgggctgcttcccaagtctggaaagcgtcacttggggaaaacaaggtggacccgggaagaggatgaaaaactgaagaagctggtggaacagaatggaacagatgactggaaagttattgccaattatctcccgaatcgaacagatgtgcagtgccagcaccgatggcagaaagtactaaaccctgagctcatcaagggtccttggaccaaagaagaagatcagagagtgatagagcttgtacagaaatacggtccgaaacgttggtctgttattgccaagcacttaaaggggagaattggaaaacaatgtagggagaggtggcataaccacttgaatccagaagttaagaaaacctcctggacagaagaggaagacagaattatttaccaggcacacaagagactggggaacagatgggcagaaatcgcaaagctactgcctggacgaactgataatgctatcaagaaccactggaattctacaatgcgtcggaaggtcgaacaggaaggttatctgcaggagtcttcaaaagccagccagccagcagtggccacaagcttccagaagaacagtcatttgatgggttttgctcaggctccgcctacagctcaactccctgccactggccagcccactgttaacaacgactattcctattaccacatttctgaagcacaaaatgtctccagtcatgttccataccctgtagcgttacatgtaaatatagtcaatgtccctcagccagctgccgcagccattcagagacactataatgatgaagaccctgagaaggaaaagcgaataaaggaattagaattgctcctaatgtcaaccgagaatgagctaaaaggacagcaggtgctaccaacacagaaccacacatgcagctaccccgggtggcacagcaccaccattgccgaccacaccagacctcatggagacagtgcacctgtttcctgtttgggagaacaccactccactccatctctgccagcggatcctggctccctacctgaagaaagcgcctcgccagcaaggtgcatgatcgtccaccagggcaccattctggataatgttaagaacctcttagaatttgcagaaacactccaatttatagattctttcttaaacacttccagtaaccatgaaaactcagacttggaaatgccttctttaacttccacccccctcattggtcacaaattgactgttacaacaccatttcatagagaccagactgtgaaaactcaaaaggaaaatactgtataggacctcttctgacatccccaggaatattatatgattagaagccaagggatgattttagaaccccagctatcaaaaggtcaatcttagaaagctctccaagaactcctacaccattcaaacatgcacttgcagctcaagaaattaaatacggtcccctgaagatgctacctcagacaccctctcatctagtagaagatctgcaggatgtgatcaaacaggaatctgatgaatctggaattgttgctgagtttcaagaaaatggaccacccttactgaagaaaatcaaacaagaggtggaatctccaactgataaatcaggaaacttcttctgctcacaccactgggaaggggacagtctgaatacccaactgttcacgcagacctcgcctgtggcagatgcaccgaatattcttacaagctccgttttaatggcaccagcatcagaagatgaagacaatgttctcaaagcatttacagtacctaaaaacaggtccctggcgagccccttgcagccttgtagcagtacctgggaacctgcatcctgtggaaagatggaggagcagatgacatcttccagtcaagctcgtaaatacgtgaatgcattctcagcccggacgctggtcatgtgagacatttccagaaaagcattatggttttcagaacacttcaagttgacttgggatatatcattcctcaacatgaaacttttcatgaatgggagaagaacctatttttgttgtggtacaacagttgagagcagcaccaagtgcatttagttgaatgaagtcttcttggatttcacccaactaaaaggatttttaaaaataaataacagtcttacctaaattattaggtaatgaattgtagccagttgttaatatcttaatgcagatttttttaaaaaaaacataaaatgatttatctgtattttaaaggatccaacagatcagtattttttcctgtgatgggttttttgaaatttgacacattaaaaggtactccagtatttcacttttctcgatcactaaacatatgcatatatttttaaaaatcagtaaaagcattactctaagtgtagacttaataccatgtgacatttaatccagattgtaaatgctcatttatggttaatgacattgaaggtacatttattgtaccaaaccattttatgagttttctgttagcttgctttaaaaattattactgtaagaaatagttttataaaaaattatatttttattcagtaatttaattttgtaaatgccaaatgaaaaacgttttttgctgctatggtcttagcctgtagacatgctgctagtatcagaggggcagtagagcttggacagaaagaaaagaaacttggtgttaggtaattgactatgcactagtatttcagactttttaattttatatatatatacattttttttccttctgcaatacatttgaaaacttgtttgggagactctgcattttttattgtggtttttttgttattgttggtttatacaagcatgcgttgcacttcttttttgggagatgtgtgttgttgatgttctatgttttgttttgagtgtagcctgactgttttataatttgggagttctgcatttgatccgcatcccctgtggtttctaagtgtatggtctcagaactgttgcatggatcctgtgtttgcaactggggagacagaaactgtggttgatagccagtcactgccttaagaacatttgatgcaagatggccagcactgaacttttgagatatgacggtgtacttactgccttgtagcaaaataaagatgtgcccttatttt

SEQ ID NO: 199230 - DNA, 3565 bp, Homo sapiens
  Payload ID: 19308
  Gene Name: v-myb avian myeloblastosis viral oncogene homolog
  Uniprot ID: P10242
  ENST ID: ENST00000367812
  CDS Start-End: 200-2200
aatatcaacctgtttcctcctcctccttctcctcctcctccgtgacctcctcctcctctttctcctgagaaacttcgccccagcggtgcggagcgccgctgcgcagccggggagggacgcaggcaggcggcgggcagcgggaggcggcagcccggtgcggtccccgcggctctcggcggagccccgcgcccgccgcgccatggcccgaagaccccggcacagcatatatagcagtgacgaggatgatgaggactttgagatgtgtgaccatgactatgatgggctgcttcccaagtctggaaagcgtcacttggggaaaacaaggtggacccgggaagaggatgaaaaactgaagaagctggtggaacagaatggaacagatgactggaaagttattgccaattatctcccgaatcgaacagatgtgcagtgccagcaccgatggcagaaagtactaaaccctgagctcatcaagggtccttggaccaaagaagaagatcagagagtgatagagcttgtacagaaatacggtccgaaacgttggtctgttattgccaagcacttaaaggggagaattggaaaacaatgtagggagaggtggcataaccacttgaatccagaagttaagaaaacctcctggacagaagaggaagacagaattatttaccaggcacacaagagactggggaacagatgggcagaaatcgcaaagctactgcctggacgaactgataatgctatcaagaaccactggaattctacaatgcgtcggaaggtcgaacaggaaggttatctgcaggagtcttcaaaagccagccagccagcagtggccacaagcttccagaagaacagtcatttgatgggttttgctcaggctccgcctacagctcaactccctgccactggccagcccactgttaacaacgactattcctattaccacatttctgaagcacaaaatgtctccagtcatgttccataccctgtagcgttacatgtaaatatagtcaatgtccctcagccagctgccgcagccattcagagacactataatgatgaagaccctgagaaggaaaagcgaataaaggaattagaattgctcctaatgtcaaccgagaatgagctaaaaggacagcaggtgctaccaacacagaaccacacatgcagctaccccgggtggcacagcaccaccattgccgaccacaccagacctcatggagacagtgcacctgtttcctgtttgggagaacaccactccactccatctctgccagcggatcctggctccctacctgaagaaagcgcctcgccagcaaggtgcatgatcgtccaccagggcaccattctggataatgttaagaacctcttagaatttgcagaaacactccaatttatagattctttcttaaacacttccagtaaccatgaaaactcagacttggaaatgccttctttaacttccacccccctcattggtcacaaattgactgttacaacaccatttcatagagaccagactgtgaaaactcaaaaggaaaatactgtttttagaaccccagctatcaaaaggtcaatcttagaaagctctccaagaactcctacaccattcaaacatgcacttgcagctcaagaaattaaatacggtcccctgaagatgctacctcagacaccctctcatctagtagaagatctgcaggatgtgatcaaacaggaatctgatgaatctggaattgttgctgagtttcaagaaaatggaccacccttactgaagaaaatcaaacaagaggtggaatctccaactgataaatcaggaaacttcttctgctcacaccactgggaaggggacagtctgaatacccaactgttcacgcagacctcgcctgtggcagatgcaccgactggagtgcaatggcacgatttcggctcactgcaacctctgcctcccgggttcaagcgattctcctgcctcagtctcccgagaagctgggattacaggcacccgccaccacgcccagctaattttgaatttttagtagagacggggtttctccatgttggtcaggctggtcttgaactcctgacctcaggtgatctacccgcctcggcctcccaaagtgctaggattacaggcgtgagccaccgcgcccggccagaatattcttacaagctccgttttaatggcaccagcatcagaagatgaagacaatgttctcaaagcatttacagtacctaaaaacaggtccctggcgagccccttgcagccttgtagcagtacctgggaacctgcatcctgtggaaagatggaggagcagatgacatcttccagtcaagctcgtaaatacgtgaatgcattctcagcccggacgctggtcatgtgagacatttccagaaaagcattatggttttcagaacacttcaagttgacttgggatatatcattcctcaacatgaaacttttcatgaatgggagaagaacctatttttgttgtggtacaacagttgagagcagcaccaagtgcatttagttgaatgaagtcttcttggatttcacccaactaaaaggatttttaaaaataaataacagtcttacctaaattattaggtaatgaattgtagccagttgttaatatcttaatgcagatttttttaaaaaaaacataaaatgatttatctgtattttaaaggatccaacagatcagtattttttcctgtgatgggttttttgaaatttgacacattaaaaggtactccagtatttcacttttctcgatcactaaacatatgcatatatttttaaaaatcagtaaaagcattactctaagtgtagacttaataccatgtgacatttaatccagattgtaaatgctcatttatggttaatgacattgaaggtacatttattgtaccaaaccattttatgagttttctgttagcttgctttaaaaattattactgtaagaaatagttttataaaaaattatatttttattcagtaatttaattttgtaaatgccaaatgaaaaacgttttttgctgctatggtcttagcctgtagacatgctgctagtatcagaggggcagtagagcttggacagaaagaaaagaaacttggtgttaggtaattgactatgcactagtatttcagactttttaattttatatatatatacattttttttccttctgcaatacatttgaaaacttgtttgggagactctgcattttttattgtggtttttttgttattgttggtttatacaagcatgcgttgcacttcttttttgggagatgtgtgttgttgatgttctatgttttgttttgagtgtagcctgactgttttataatttgggagttctgcatttgatccgcatcccctgtggtttctaagtgtatggtctcagaactgttgcatggatcctgtgtttgcaactggggagacagaaactgtggttgatagccagtcactgccttaagaacatttgatgcaagatggccagcactgaacttttgagatatgacggtgtacttactgccttgtagcaaaataaagatgtgcccttatttt

SEQ ID NO: 199231 - DNA, 3302 bp, Homo sapiens
  Payload ID: 19308
  Gene Name: v-myb avian myeloblastosis viral oncogene homolog
  Uniprot ID: P10242
  ENST ID: ENST00000367814
  CDS Start-End: 187-2109
ttcctcctcctccttctcctcctcctccgtgacctcctcctcctctttctcctgagaaacttcgccccagcggtgcggagcgccgctgcgcagccggggagggacgcaggcaggcggcgggcagcgggaggcggcagcccggtgcggtccccgcggctctcggcggagccccgcgcccgccgcgccatggcccgaagaccccggcacagcatatatagcagtgacgaggatgatgaggactttgagatgtgtgaccatgactatgatgggctgcttcccaagtctggaaagcgtcacttggggaaaacaaggtggacccgggaagaggatgaaaaactgaagaagctggtggaacagaatggaacagatgactggaaagttattgccaattatctcccgaatcgaacagatgtgcagtgccagcaccgatggcagaaagtactaaaccctgagctcatcaagggtccttggaccaaagaagaagatcagagagtgatagagcttgtacagaaatacggtccgaaacgttggtctgttattgccaagcacttaaaggggagaattggaaaacaatgtagggagaggtggcataaccacttgaatccagaagttaagaaaacctcctggacagaagaggaagacagaattatttaccaggcacacaagagactggggaacagatgggcagaaatcgcaaagctactgcctggacgaactgataatgctatcaagaaccactggaattctacaatgcgtcggaaggtcgaacaggaaggttatctgcaggagtcttcaaaagccagccagccagcagtggccacaagcttccagaagaacagtcatttgatgggttttgctcaggctccgcctacagctcaactccctgccactggccagcccactgttaacaacgactattcctattaccacatttctgaagcacaaaatgtctccagtcatgttccataccctgtagcgttacatgtaaatatagtcaatgtccctcagccagctgccgcagccattcagagacactataatgatgaagaccctgagaaggaaaagcgaataaaggaattagaattgctcctaatgtcaaccgagaatgagctaaaaggacagcaggtgctaccaacacagaaccacacatgcagctaccccgggtggcacagcaccaccattgccgaccacaccagacctcatggagacagtgcacctgtttcctgtttgggagaacaccactccactccatctctgccagcggatcctggctccctacctgaagaaagcgcctcgccagcaaggtgcatgatcgtccaccagggcaccattctggataatgttaagaacctcttagaatttgcagaaacactccaatttatagattctttcttaaacacttccagtaaccatgaaaactcagacttggaaatgccttctttaacttccacccccctcattggtcacaaattgactgttacaacaccatttcatagagaccagactgtgaaaactcaaaaggaaaatactgtttttagaaccccagctatcaaaaggtcaatcttagaaagctctccaagaactcctacaccattcaaacatgcacttgcagctcaagaaattaaatacggtcccctgaagatgctacctcagacaccctctcatctagtagaagatctgcaggatgtgatcaaacaggaatctgatgaatctggaattgttgctgagtttcaagaaaatggaccacccttactgaagaaaatcaaacaagaggtggaatctccaactgataaatcaggaaacttcttctgctcacaccactgggaaggggacagtctgaatacccaactgttcacgcagacctcgcctgtggcagatgcaccgaatattcttacaagctccgttttaatggcaccagcatcagaagatgaagacaatgttctcaaagcatttacagtacctaaaaacaggtccctggcgagccccttgcagccttgtagcagtacctgggaacctgcatcctgtggaaagatggaggagcagatgacatcttccagtcaagctcgtaaatacgtgaatgcattctcagcccggacgctggtcatgtgagacatttccagaaaagcattatggttttcagaacacttcaagttgacttgggatatatcattcctcaacatgaaacttttcatgaatgggagaagaacctatttttgttgtggtacaacagttgagagcagcaccaagtgcatttagttgaatgaagtcttcttggatttcacccaactaaaaggatttttaaaaataaataacagtcttacctaaattattaggtaatgaattgtagccagttgttaatatcttaatgcagatttttttaaaaaaaacataaaatgatttatctgtattttaaaggatccaacagatcagtattttttcctgtgatgggttttttgaaatttgacacattaaaaggtactccagtatttcacttttctcgatcactaaacatatgcatatatttttaaaaatcagtaaaagcattactctaagtgtagacttaataccatgtgacatttaatccagattgtaaatgctcatttatggttaatgacattgaaggtacatttattgtaccaaaccattttatgagttttctgttagcttgctttaaaaattattactgtaagaaatagttttataaaaaattatatttttattcagtaatttaattttgtaaatgccaaatgaaaaacgttttttgctgctatggtcttagcctgtagacatgctgctagtatcagaggggcagtagagcttggacagaaagaaaagaaacttggtgttaggtaattgactatgcactagtatttcagactttttaattttatatatatatacattttttttccttctgcaatacatttgaaaacttgtttgggagactctgcattttttattgtggtttttttgttattgttggtttatacaagcatgcgttgcacttcttttttgggagatgtgtgttgttgatgttctatgttttgttttgagtgtagcctgactgttttataatttgggagttctgcatttgatccgcatcccctgtggtttctaagtgtatggtctcagaactgttgcatggatcctgtgtttgcaactggggagacagaaactgtggttgatagccagtcactgccttaagaacatttgatgcaagatggccagcactgaacttttgagatatgacggtgtacttactgccttgtagcaaaataaagatgtgcccttattttacctac

SEQ ID NO: 199232 - DNA, 1036 bp, Homo sapiens
  Payload ID: 19308
  Gene Name: v-myb avian myeloblastosis viral oncogene homolog
  ENST ID: ENST00000430686
  CDS Start-End: 1-834
gaggatgaaaaactgaagaagctggtggaacagaatggaacagatgactggaaagttattgccaattatctcccgaatcgaacagatgtgcagtgccagcaccgatggcagaaagtactaaaccctgagctcatcaagggtccttggaccaaagaagaagatcagagagtgatagagcttgtacagaaatacggtccgaaacgttggtctgttattgccaagcacttaaaggggagaattggaaaacaatgtagggagaggtggcataaccacttgaatccagaagttaagaaaacctcctggacagaagaggaagacagaattatttaccaggcacacaagagactggggaacagatgggcagaaatcgcaaagctactgcctggacgaactgataatgctatcaagaaccactggaattctacaatgcgtcggaaggtcgaacaggaaggttatctgcaggagtcttcaaaagccagccagccagcagtggccacaagcttccagaagaacagtcatttgatgggttttgctcaggctccgcctacagctcaactccctgccactggccagcccactgttaacaacgactattcctattaccacatttctgaagcacaaaatgtctccagtcatgttccataccctgtagcgttacatgtaaatatagtcaatgtccctcagccagctgccgcagccattcagagacactataatgatgaagaccctgagaaggaaaagcgaataaaggaattagaattgctcctaatgtcaaccgagaatgagctaaaaggacagcaggtgctaccagtaagactgtcatcatgtgcttgaatgaggggatagcagctttgcctcagtttacctaagcgctcttctcttctaaatattacacttagcaaggctccatatatccattcagaatgtctcaacacaagaagttgcttgtagtaaaatgtagttggtatcagattatatgctgattaaattggaagcagtctttttgtaattgcaataaaaatgcaatatccactta

SEQ ID NO: 199233 - DNA, 1051 bp, Homo sapiens
  Payload ID: 19308
  Gene Name: v-myb avian myeloblastosis viral oncogene homolog
  ENST ID: ENST00000420123
  CDS Start-End: 94-993
ccggggagggacgcaggcaggcggcgggcagcgggaggcggcagcccggtgcggtccccgcggctctcggcggagccccgcgcccgccgcgccatggcccgaagaccccggcacagcatatatagcagtgacgaggatgatgaggactttgagatgtgtgaccatgactatgatgggctgcttcccaagtctggaaagcgtcacttggggaaaacaaggtggacccgggaagagaatcgaacagatgtgcagtgccagcaccgatggcagaaagtactaaaccctgagctcatcaagggtccttggaccaaagaagaagatcagagagtgatagagcttgtacagaaatacggtccgaaacgttggtctgttattgccaagcacttaaaggggagaattggaaaacaatgtagggagaggtggcataaccacttgaatccagaagttaagaaaacctcctggacagaagaggaagacagaattatttaccaggcacacaagagactggggaacagatgggcagaaatcgcaaagctactgcctggacgaactgataatgctatcaagaaccactggaattctacaatgcgtcggaaggtcgaacaggaaggttatctgcaggagtcttcaaaagccagccagccagcagtggccacaagcttccagaagaacagtcatttgatgggttttgctcaggctccgcctacagctcaactccctgccactggccagcccactgttaacaacgactattcctattaccacatttctgaagcacaaaatgtctccagtcatgttccataccctgtagcgttacatgtaaatatagtcaatgtccctcagccagctgccgcagccattcagagacactataatgatgaagaccctgagaaggaaaagcgaataaaggaattagaattgctcctaatgtcaaccgagaatgagctaaaaggacagcaggtgctaccagtaagactgtcatcatgtgcttgaatgaggggatagcagctttgcctcagtttacctaagcgctcttctcttctaaatatta

SEQ ID NO: 199234 - DNA, 3304 bp, Homo sapiens
  Payload ID: 19308
  Gene Name: v-myb avian myeloblastosis viral oncogene homolog
  Uniprot ID: P10242
  ENST ID: ENST00000442647
  CDS Start-End: 200-2113
aatatcaacctgtttcctcctcctccttctcctcctcctccgtgacctcctcctcctctttctcctgagaaacttcgccccagcggtgcggagcgccgctgcgcagccggggagggacgcaggcaggcggcgggcagcgggaggcggcagcccggtgcggtccccgcggctctcggcggagccccgcgcccgccgcgccatggcccgaagaccccggcacagcatatatagcagtgacgaggatgatgaggactttgagatgtgtgaccatgactatgatgggctgcttcccaagtctggaaagcgtcacttggggaaaacaaggtggacccgggaagaggatgaaaaactgaagaagctggtggaacagaatggaacagatgactggaaagttattgccaattatctcccgaatcgaacagatgtgcagtgccagcaccgatggcagaaagtactaaaccctgagctcatcaagggtccttggaccaaagaagaagatcagagagtgatagagcttgtacagaaatacggtccgaaacgttggtctgttattgccaagcacttaaaggggagaattggaaaacaatgtagggagaggtggcataaccacttgaatccagaagttaagaaaacctcctggacagaagaggaagacagaattatttaccaggcacacaagagactggggaacagatgggcagaaatcgcaaagctactgcctggacgaactgataatgctatcaagaaccactggaattctacaatgcgtcggaaggtcgaacaggaaggttatctgcaggagtcttcaaaagccagccagccagcagtggccacaagcttccagaagaacagtcatttgatgggttttgctcaggctccgcctacagctcaactccctgccactggccagcccactgttaacaacgactattcctattaccacatttctgaagcacaaaatgtctccagtcatgttccataccctgtagcgttacatgtaaatatagtcaatgtccctcagccagctgccgcagccattcagagacactataatgatgaagaccctgagaaggaaaagcgaataaaggaattagaattgctcctaatgtcaaccgagaatgagctaaaaggacagcagacacagaaccacacatgcagctaccccgggtggcacagcaccaccattgccgaccacaccagacctcatggagacagtgcacctgtttcctgtttgggagaacaccactccactccatctctgccagcggatcctggctccctacctgaagaaagcgcctcgccagcaaggtgcatgatcgtccaccagggcaccattctggataatgttaagaacctcttagaatttgcagaaacactccaatttatagattctttcttaaacacttccagtaaccatgaaaactcagacttggaaatgccttctttaacttccacccccctcattggtcacaaattgactgttacaacaccatttcatagagaccagactgtgaaaactcaaaaggaaaatactgtttttagaaccccagctatcaaaaggtcaatcttagaaagctctccaagaactcctacaccattcaaacatgcacttgcagctcaagaaattaaatacggtcccctgaagatgctacctcagacaccctctcatctagtagaagatctgcaggatgtgatcaaacaggaatctgatgaatctggaattgttgctgagtttcaagaaaatggaccacccttactgaagaaaatcaaacaagaggtggaatctccaactgataaatcaggaaacttcttctgctcacaccactgggaaggggacagtctgaatacccaactgttcacgcagacctcgcctgtggcagatgcaccgaatattcttacaagctccgttttaatggcaccagcatcagaagatgaagacaatgttctcaaagcatttacagtacctaaaaacaggtccctggcgagccccttgcagccttgtagcagtacctgggaacctgcatcctgtggaaagatggaggagcagatgacatcttccagtcaagctcgtaaatacgtgaatgcattctcagcccggacgctggtcatgtgagacatttccagaaaagcattatggttttcagaacacttcaagttgacttgggatatatcattcctcaacatgaaacttttcatgaatgggagaagaacctatttttgttgtggtacaacagttgagagcagcaccaagtgcatttagttgaatgaagtcttcttggatttcacccaactaaaaggatttttaaaaataaataacagtcttacctaaattattaggtaatgaattgtagccagttgttaatatcttaatgcagatttttttaaaaaaaacataaaatgatttatctgtattttaaaggatccaacagatcagtattttttcctgtgatgggttttttgaaatttgacacattaaaaggtactccagtatttcacttttctcgatcactaaacatatgcatatatttttaaaaatcagtaaaagcattactctaagtgtagacttaataccatgtgacatttaatccagattgtaaatgctcatttatggttaatgacattgaaggtacatttattgtaccaaaccattttatgagttttctgttagcttgctttaaaaattattactgtaagaaatagttttataaaaaattatatttttattcagtaatttaattttgtaaatgccaaatgaaaaacgttttttgctgctatggtcttagcctgtagacatgctgctagtatcagaggggcagtagagcttggacagaaagaaaagaaacttggtgttaggtaattgactatgcactagtatttcagactttttaattttatatatatatacattttttttccttctgcaatacatttgaaaacttgtttgggagactctgcattttttattgtggtttttttgttattgttggtttatacaagcatgcgttgcacttcttttttgggagatgtgtgttgttgatgttctatgttttgttttgagtgtagcctgactgttttataatttgggagttctgcatttgatccgcatcccctgtggtttctaagtgtatggtctcagaactgttgcatggatcctgtgtttgcaactggggagacagaaactgtggttgatagccagtcactgccttaagaacatttgatgcaagatggccagcactgaacttttgagatatgacggtgtacttactgccttgtagcaaaataaagatgtgcccttattttacct

SEQ ID NO: 199235 - DNA, 3481 bp, Homo sapiens
  Payload ID: 19308
  Gene Name: v-myb avian myeloblastosis viral oncogene homolog
  ENST ID: ENST00000438901
  CDS Start-End: 1-1665
atggcccgaagaccccggcacagcatatatagcagtgacgaggatgatgaggactttgagatgtgtgaccatgactatgatgggctgcttcccaagtctggaaagcgtcacttggggaaaacaaggtggacccgggaagaggatgaaaaactgaagaagctggtggaacagaatggaacagatgactggaaagttattgccaattatctcccgaatcgaacagatgtgcagtgccagcaccgatggcagaaagtactaaaccctgagctcatcaagggtccttggaccaaagaagaagatcagagagtgatagagcttgtacagaaatacggtccgaaacgttggtctgttattgccaagcacttaaaggggagaattggaaaacaatgtagggagaggtggcataaccacttgaatccagaagttaagaaaacctcctggacagaagaggaagacagaattatttaccaggcacacaagagactggggaacagatgggcagaaatcgcaaagctactgcctggacgaactgataatgctatcaagaaccactggaattctacaatgcgtcggaaggtcgaacaggaaggttatctgcaggagtcttcaaaagccagccagccagcagtggccacaagcttccagaagaacagtcatttgatgggttttgctcaggctccgcctacagctcaactccctgccactggccagcccactgttaacaacgactattcctattaccacatttctgaagcacaaaatgtctccagtcatgttccataccctgtagcgttacatgtaaatatagtcaatgtccctcagccagctgccgcagccattcagagacactataatgatgaagaccctgagaaggaaaagcgaataaaggaattagaattgctcctaatgtcaaccgagaatgagctaaaaggacagcaggtgctaccaacacagaaccacacatgcagctaccccgggtggcacagcaccaccattgccgaccacaccagacctcatggagacagtgcacctgtttcctgtttgggagaacaccactccactccatctctgccagcggatcctggctccctacctgaagaaagcgcctcgccagcaaggtgcatgatcgtccaccagggcaccattctggataatgattcttcatcatggtgtgatctcagcagttttgaattctttgaagaagcagatttttcacctagccaacatcacacaggcaaagccctacagcttcagcaaagagagggcaatgggactaaacctgcaggagaacctagcccaagggtgaacaaacgtatgttgagtgagagttcacttgacccacccaaggtcttacctcctgcaaggcacagcacaattccactggtcatccttcgaaaaaaacggggccaggccagccccttagccactggagactgtagctccttcatatttgctgacgtcagcagttcaactcccaagcgttcccctgtcaaaagcctacccttctctccctcgcagttcttaaacacttccagtaaccatgaaaactcagacttggaaatgccttctttaacttccacccccctcattggtcacaaattgactgttacaacaccatttcatagagaccagactgtgaaaactcaaaaggaaaatactgtataggacctcttctgacatccccaggaatattatatgattagaagccaagggatgattttagaaccccagctatcaaaaggtcaatcttagaaagctctccaagaactcctacaccattcaaacatgcacttgcagctcaagaaattaaatacggtcccctgaagatgctacctcagacaccctctcatctagtagaagatctgcaggatgtgatcaaacaggaatctgatgaatctggaattgttgctgagtttcaagaaaatggaccacccttactgaagaaaatcaaacaagaggtggaatctccaactgataaatcaggaaacttcttctgctcacaccactgggaaggggacagtctgaatacccaactgttcacgcagacctcgcctgtggcagatgcaccgaatattcttacaagctccgttttaatggcaccagcatcagaagatgaagacaatgttctcaaagcatttacagtacctaaaaacaggtccctggcgagccccttgcagccttgtagcagtacctgggaacctgcatcctgtggaaagatggaggagcagatgacatcttccagtcaagctcgtaaatacgtgaatgcattctcagcccggacgctggtcatgtgagacatttccagaaaagcattatggttttcagaacacttcaagttgacttgggatatatcattcctcaacatgaaacttttcatgaatgggagaagaacctatttttgttgtggtacaacagttgagagcagcaccaagtgcatttagttgaatgaagtcttcttggatttcacccaactaaaaggatttttaaaaataaataacagtcttacctaaattattaggtaatgaattgtagccagttgttaatatcttaatgcagatttttttaaaaaaaacataaaatgatttatctgtattttaaaggatccaacagatcagtattttttcctgtgatgggttttttgaaatttgacacattaaaaggtactccagtatttcacttttctcgatcactaaacatatgcatatatttttaaaaatcagtaaaagcattactctaagtgtagacttaataccatgtgacatttaatccagattgtaaatgctcatttatggttaatgacattgaaggtacatttattgtaccaaaccattttatgagttttctgttagcttgctttaaaaattattactgtaagaaatagttttataaaaaattatatttttattcagtaatttaattttgtaaatgccaaatgaaaaacgttttttgctgctatggtcttagcctgtagacatgctgctagtatcagaggggcagtagagcttggacagaaagaaaagaaacttggtgttaggtaattgactatgcactagtatttcagactttttaattttatatatatatacattttttttccttctgcaatacatttgaaaacttgtttgggagactctgcattttttattgtggtttttttgttattgttggtttatacaagcatgcgttgcacttcttttttgggagatgtgtgttgttgatgttctatgttttgttttgagtgtagcctgactgttttataatttgggagttctgcatttgatccgcatcccctgtggtttctaagtgtatggtctcagaactgttgcatggatcctgtgtttgcaactggggagacagaaactgtggttgatagccagtcactgccttaagaacatttgatgcaagatggccagcactgaacttttgagatatgacggtgtacttactgccttgtagcaaaataaagatgtgcccttatttt

SEQ ID NO: 199236 - DNA, 801 bp, Homo sapiens
  Payload ID: 19308
  Gene Name: v-myb avian myeloblastosis viral oncogene homolog
  ENST ID: ENST00000534736
  CDS Start-End: 1-261
acacagaaccacacatgcagctaccccgggtggcacagcaccaccattgccgaccacaccagacctcatggagacagtgcacctgtttcctgtttgggagaacaccactccactccatctctgccagcggatcctggctccctacctgaagaaagcgcctcgccagcaaggtgcatgatcgtccaccagggcaccattctggataatgttaagaacctcttagaatttgcagaaacactccaatttatagattctatgtagagtgtcgggaggtccctgcagcacatcagagggccagccttgaggcagcccactagaccctgctctactgcagtataatagagcaactgctcatcttgaagctgttgctcaagaagccaaaccaacgggcctagtgtttgctttgcgttgagcatctctctctcagtgctgtttcaggattcttcatcatggtgtgatctcagcagttttgaattctttgaagaagcagatttttcacctagccaacatcacacaggcaaagccctacagcttcagcaaagagagggcaatgggactaaacctgcaggagaacctagcccaagggtgaacaaacgtatgttgagtgagagttcacttgacccacccaaggtcttacctcctgcaaggcacagcacaattccactggtcatccttcgaaaaaaacggggccaggccagccccttagccactggagactgtagctccttcatatttgctgacgtcagcagttcaactcccaagcgttcccctgtcaaaagcctacccttctctccctcgcag

SEQ ID NO: 199237 - DNA, 2436 bp, Homo sapiens
  Payload ID: 19308
  Gene Name: v-myb avian myeloblastosis viral oncogene homolog
  ENST ID: ENST00000531737
  CDS Start-End: 1-1167
atggcccgaagaccccggcacagcatatatagcagtgacgaggatgatgaggactttgagatgtgtgaccatgactatgatgggctgcttcccaagtctggaaagcgtcacttggggaaaacaaggtggacccgggaagaggatgaaaaactgaagaagctggtggaacagaatggaacagatgactggaaagttattgccaattatctcccgaatcgaacagatgtgcagtgccagcaccgatggcagaaagtactaaaccctgagctcatcaagggtccttggaccaaagaagaagatcagagagtgatagagcttgtacagaaatacggtccgaaacgttggtctgttattgccaagcacttaaaggggagaattggaaaacaatgtagggagaggtggcataaccacttgaatccagaagttaagaaaacctcctggacagaagaggaagacagaattatttaccaggcacacaagagactggggaacagatgggcagaaatcgcaaagctactgcctggacgaactgataatgctatcaagaaccactggaattctacaatgcgtcggaaggtcgaacaggaaggttatctgcaggagtcttcaaaagccagccagccagcagtggccacaagcttccagaagaacagtcatttgatgggttttgctcaggctccgcctacagctcaactccctgccactggccagcccactgttaacaacgactattcctattaccacatttctgaagcacaaaatgtctccagtcatgttccataccctgtagcgttacatgtaaatatagtcaatgtccctcagccagctgccgcagccattcagagacactataatgatgaagaccctgagaaggaaaagcgaataaaggaattagaattgctcctaatgtcaaccgagaatgagctaaaaggacagcaggtgctaccaacacagaaccacacatgcagctaccccgggtggcacagcaccaccattgccgaccacaccagacctcatggagacagtgcacctgtttcctgtttgggagaacaccactccactccatctctgccagcggatcctggctccctacctgaagaaagcgcctcgccagcaagatgtagagtgtcgggaggtccctgcagcacatcagagggccagccttgaggcagcccactagaccctgctctactgcagtataatagagcaactgctcatcttgaagctgttgctcaagaagccaaaccaacgggcctagtgtttgctttgcgttgagcatctctctctcagtgctgtttcaggtgatgatggcacacactatctcaaagttctgtgcctcccacattgtttcaggattcttcatcatggtgtgatctcagcagttttgaattctttgaagaagcagatttttcacctagccaacatcacacaggcaaagccctacagcttcagcaaagagagggcaatgggactaaacctgcaggagaacctagcccaagggtgaacaaacgtatgttgagtgagagttcacttgacccacccaaggtcttacctcctgcaaggcacagcacaattccactggtcatccttcgaaaaaaacggggccaggccagccccttagccactggagactgtagctccttcatatttgctgacgtcagcagttcaactcccaagcgttcccctgtcaaaagcctacccttctctccctcgcagttcttaaacacttccagtaaccatgaaaactcagacttggaaatgccttctttaacttccacccccctcattggtcacaaattgactgttacaacaccatttcatagagaccagactgtgaaaactcaaaaggaaaatactgtttttagaaccccagctatcaaaaggtcaatcttagaaagctctccaagaactcctacaccattcaaacatgcacttgcagctcaagaaattaaatacggtcccctgaagatgctacctcagacaccctctcatctagtagaagatctgcaggatgtgatcaaacaggaatctgatgaatctggaattgttgctgagtttcaagaaaatggaccacccttactgaagaaaatcaaacaagaggtggaatctccaactgataaatcaggaaacttcttctgctcacaccactgggaaggggacagtctgaatacccaactgttcacgcagacctcgcctgtggcagatgcaccgaatattcttacaagctccgttttaatggcaccagcatcagaagatgaagacaatgttctcaaagcatttacagtacctaaaaacaggtccctggcgagccccttgcagccttgtagcagtacctgggaacctgcatcctgtggaaagatggaggagcagatgacatcttccagtcaagctcgtaaatacgtgaatgcattctcagcccggacgctggtcatgtga

SEQ ID NO: 199238 - DNA, 2521 bp, Homo sapiens
  Payload ID: 19308
  Gene Name: v-myb avian myeloblastosis viral oncogene homolog
  Uniprot ID: P10242
  ENST ID: ENST00000533384
  CDS Start-End: 1-1209
atggcccgaagaccccggcacagcatatatagcagtgacgaggatgatgaggactttgagatgtgtgaccatgactatgatgggctgcttcccaagtctggaaagcgtcacttggggaaaacaaggtggacccgggaagaggatgaaaaactgaagaagctggtggaacagaatggaacagatgactggaaagttattgccaattatctcccgaatcgaacagatgtgcagtgccagcaccgatggcagaaagtactaaaccctgagctcatcaagggtccttggaccaaagaagaagatcagagagtgatagagcttgtacagaaatacggtccgaaacgttggtctgttattgccaagcacttaaaggggagaattggaaaacaatgtagggagaggtggcataaccacttgaatccagaagttaagaaaacctcctggacagaagaggaagacagaattatttaccaggcacacaagagactggggaacagatgggcagaaatcgcaaagctactgcctggacgaactgataatgctatcaagaaccactggaattctacaatgcgtcggaaggtcgaacaggaaggttatctgcaggagtcttcaaaagccagccagccagcagtggccacaagcttccagaagaacagtcatttgatgggttttgctcaggctccgcctacagctcaactccctgccactggccagcccactgttaacaacgactattcctattaccacatttctgaagcacaaaatgtctccagtcatgttccataccctgtagcgttacatgtaaatatagtcaatgtccctcagccagctgccgcagccattcagagacactataatgatgaagaccctgagaaggaaaagcgaataaaggaattagaattgctcctaatgtcaaccgagaatgagctaaaaggacagcaggtgctaccaacacagaaccacacatgcagctaccccgggtggcacagcaccaccattgccgaccacaccagacctcatggagacagtgcacctgtttcctgtttgggagaacaccactccactccatctctgccagcggatcctggctccctacctgaagaaagcgcctcgccagcaaggtgcatgatcgtccaccagggcaccattctggataatgttaagaacctcttagaatttgcagaaacactccaatttatagattctatgtagagtgtcgggaggtccctgcagcacatcagagggccagccttgaggcagcccactagaccctgctctactgcagtataatagagcaactgctcatcttgaagctgttgctcaagaagccaaaccaacgggcctagtgtttgctttgcgttgagcatctctctctcagtgctgtttcaggtgatgatggcacacactatctcaaagttctgtgcctcccacattgtttcaggattcttcatcatggtgtgatctcagcagttttgaattctttgaagaagcagatttttcacctagccaacatcacacaggcaaagccctacagcttcagcaaagagagggcaatgggactaaacctgcaggagaacctagcccaagggtgaacaaacgtatgttgagtgagagttcacttgacccacccaaggtcttacctcctgcaaggcacagcacaattccactggtcatccttcgaaaaaaacggggccaggccagccccttagccactggagactgtagctccttcatatttgctgacgtcagcagttcaactcccaagcgttcccctgtcaaaagcctacccttctctccctcgcagttcttaaacacttccagtaaccatgaaaactcagacttggaaatgccttctttaacttccacccccctcattggtcacaaattgactgttacaacaccatttcatagagaccagactgtgaaaactcaaaaggaaaatactgtttttagaaccccagctatcaaaaggtcaatcttagaaagctctccaagaactcctacaccattcaaacatgcacttgcagctcaagaaattaaatacggtcccctgaagatgctacctcagacaccctctcatctagtagaagatctgcaggatgtgatcaaacaggaatctgatgaatctggaattgttgctgagtttcaagaaaatggaccacccttactgaagaaaatcaaacaagaggtggaatctccaactgataaatcaggaaacttcttctgctcacaccactgggaaggggacagtctgaatacccaactgttcacgcagacctcgcctgtggcagatgcaccgaatattcttacaagctccgttttaatggcaccagcatcagaagatgaagacaatgttctcaaagcatttacagtacctaaaaacaggtccctggcgagccccttgcagccttgtagcagtacctgggaacctgcatcctgtggaaagatggaggagcagatgacatcttccagtcaagctcgtaaatacgtgaatgcattctcagcccggacgctggtcatgtga

SEQ ID NO: 199239 - DNA, 2238 bp, Homo sapiens
  Payload ID: 19308
  Gene Name: v-myb avian myeloblastosis viral oncogene homolog
  Uniprot ID: P10242
  ENST ID: ENST00000534121
  CDS Start-End: 1-2238
atggcccgaagaccccggcacagcatatatagcagtgacgaggatgatgaggactttgagatgtgtgaccatgactatgatgggctgcttcccaagtctggaaagcgtcacttggggaaaacaaggtggacccgggaagaggatgaaaaactgaagaagctggtggaacagaatggaacagatgactggaaagttattgccaattatctcccgaatcgaacagatgtgcagtgccagcaccgatggcagaaagtactaaaccctgagctcatcaagggtccttggaccaaagaagaagatcagagagtgatagagcttgtacagaaatacggtccgaaacgttggtctgttattgccaagcacttaaaggggagaattggaaaacaatgtagggagaggtggcataaccacttgaatccagaagttaagaaaacctcctggacagaagaggaagacagaattatttaccaggcacacaagagactggggaacagatgggcagaaatcgcaaagctactgcctggacgaactgataatgctatcaagaaccactggaattctacaatgcgtcggaaggtcgaacaggaaggttatctgcaggagtcttcaaaagccagccagccagcagtggccacaagcttccagaagaacagtcatttgatgggttttgctcaggctccgcctacagctcaactccctgccactggccagcccactgttaacaacgactattcctattaccacatttctgaagcacaaaatgtctccagtcatgttccataccctgtagcgttacatgtaaatatagtcaatgtccctcagccagctgccgcagccattcagagacactataatgatgaagaccctgagaaggaaaagcgaataaaggaattagaattgctcctaatgtcaaccgagaatgagctaaaaggacagcaggtgctaccaacacagaaccacacatgcagctaccccgggtggcacagcaccaccattgccgaccacaccagacctcatggagacagtgcacctgtttcctgtttgggagaacaccactccactccatctctgccagcggatcctggctccctacctgaagaaagcgcctcgccagcaaggtgcatgatcgtccaccagggcaccattctggataatgattcttcatcatggtgtgatctcagcagttttgaattctttgaagaagcagatttttcacctagccaacatcacacaggcaaagccctacagcttcagcaaagagagggcaatgggactaaacctgcaggagaacctagcccaagggtgaacaaacgtatgttgagtgagagttcacttgacccacccaaggtcttacctcctgcaaggcacagcacaattccactggtcatccttcgaaaaaaacggggccaggccagccccttagccactggagactgtagctccttcatatttgctgacgtcagcagttcaactcccaagcgttcccctgtcaaaagcctacccttctctccctcgcagttcttaaacacttccagtaaccatgaaaactcagacttggaaatgccttctttaacttccacccccctcattggtcacaaattgactgttacaacaccatttcatagagaccagactgtgaaaactcaaaaggaaaatactgtttttagaaccccagctatcaaaaggtcaatcttagaaagctctccaagaactcctacaccattcaaacatgcacttgcagctcaagaaattaaatacggtcccctgaagatgctacctcagacaccctctcatctagtagaagatctgcaggatgtgatcaaacaggaatctgatgaatctggaattgttgctgagtttcaagaaaatggaccacccttactgaagaaaatcaaacaagaggtggaatctccaactgataaatcaggaaacttcttctgctcacaccactgggaaggggacagtctgaatacccaactgttcacgcagacctcgcctgtggcagatgcaccgaatattcttacaagctccgttttaatggcaccagcatcagaagatgaagacaatgttctcaaagcatttacagtacctaaaaacaggtccctggcgagccccttgcagccttgtagcagtacctgggaacctgcatcctgtggaaagatggaggagcagatgacatcttccagtcaagctcgtaaatacgtgaatgcattctcagcccggacgctggtcatgtga

SEQ ID NO: 199240 - DNA, 2021 bp, Homo sapiens
  Payload ID: 19308
  Gene Name: v-myb avian myeloblastosis viral oncogene homolog
  ENST ID: ENST00000528140
  CDS Start-End: 1-1167
atggcccgaagaccccggcacagcatatatagcagtgacgaggatgatgaggactttgagatgtgtgaccatgactatgatgggctgcttcccaagtctggaaagcgtcacttggggaaaacaaggtggacccgggaagaggatgaaaaactgaagaagctggtggaacagaatggaacagatgactggaaagttattgccaattatctcccgaatcgaacagatgtgcagtgccagcaccgatggcagaaagtactaaaccctgagctcatcaagggtccttggaccaaagaagaagatcagagagtgatagagcttgtacagaaatacggtccgaaacgttggtctgttattgccaagcacttaaaggggagaattggaaaacaatgtagggagaggtggcataaccacttgaatccagaagttaagaaaacctcctggacagaagaggaagacagaattatttaccaggcacacaagagactggggaacagatgggcagaaatcgcaaagctactgcctggacgaactgataatgctatcaagaaccactggaattctacaatgcgtcggaaggtcgaacaggaaggttatctgcaggagtcttcaaaagccagccagccagcagtggccacaagcttccagaagaacagtcatttgatgggttttgctcaggctccgcctacagctcaactccctgccactggccagcccactgttaacaacgactattcctattaccacatttctgaagcacaaaatgtctccagtcatgttccataccctgtagcgttacatgtaaatatagtcaatgtccctcagccagctgccgcagccattcagagacactataatgatgaagaccctgagaaggaaaagcgaataaaggaattagaattgctcctaatgtcaaccgagaatgagctaaaaggacagcaggtgctaccaacacagaaccacacatgcagctaccccgggtggcacagcaccaccattgccgaccacaccagacctcatggagacagtgcacctgtttcctgtttgggagaacaccactccactccatctctgccagcggatcctggctccctacctgaagaaagcgcctcgccagcaagatgtagagtgtcgggaggtccctgcagcacatcagagggccagccttgaggcagcccactagaccctgctctactgcagtataatagagcaactgctcatcttgaagctgttgctcaagaagccaaaccaacgggcctagtgtttgctttgcgttgagcatctctctctcagtgctgtttcagttcttaaacacttccagtaaccatgaaaactcagacttggaaatgccttctttaacttccacccccctcattggtcacaaattgactgttacaacaccatttcatagagaccagactgtgaaaactcaaaaggaaaatactgtttttagaaccccagctatcaaaaggtcaatcttagaaagctctccaagaactcctacaccattcaaacatgcacttgcagctcaagaaattaaatacggtcccctgaagatgctacctcagacaccctctcatctagtagaagatctgcaggatgtgatcaaacaggaatctgatgaatctggaattgttgctgagtttcaagaaaatggaccacccttactgaagaaaatcaaacaagaggtggaatctccaactgataaatcaggaaacttcttctgctcacaccactgggaaggggacagtctgaatacccaactgttcacgcagacctcgcctgtggcagatgcaccgaatattcttacaagctccgttttaatggcaccagcatcagaagatgaagacaatgttctcaaagcatttacagtacctaaaaacaggtccctggcgagccccttgcagccttgtagcagtacctgggaacctgcatcctgtggaaagatggaggagcagatgacatcttccagtcaagctcgtaaatacgtgaatgcattctcagcccggacgctggtcatgtga

SEQ ID NO: 199241 - DNA, 1838 bp, Homo sapiens
  Payload ID: 19308
  Gene Name: v-myb avian myeloblastosis viral oncogene homolog
  ENST ID: ENST00000525940
  CDS Start-End: 1-1125
atggcccgaagaccccggcacagcatatatagcagtgacgaggatgatgaggactttgagatgtgtgaccatgactatgatgggctgcttcccaagtctggaaagcgtcacttggggaaaacaaggtggacccgggaagaggatgaaaaactgaagaagctggtggaacagaatggaacagatgactggaaagttattgccaattatctcccgaatcgaacagatgtgcagtgccagcaccgatggcagaaagtactaaaccctgagctcatcaagggtccttggaccaaagaagaagatcagagagtgatagagcttgtacagaaatacggtccgaaacgttggtctgttattgccaagcacttaaaggggagaattggaaaacaatgtagggagaggtggcataaccacttgaatccagaagttaagaaaacctcctggacagaagaggaagacagaattatttaccaggcacacaagagactggggaacagatgggcagaaatcgcaaagctactgcctggacgaactgataatgctatcaagaaccactggaattctacaatgcgtcggaaggtcgaacaggaaggttatctgcaggagtcttcaaaagccagccagccagcagtggccacaagcttccagaagaacagtcatttgatgggttttgctcaggctccgcctacagctcaactccctgccactggccagcccactgttaacaacgactattcctattaccacatttctgaagcacaaaatgtctccagtcatgttccataccctgtagcgttacatgtaaatatagtcaatgtccctcagccagctgccgcagccattcagagacactataatgatgaagaccctgagaaggaaaagcgaataaaggaattagaattgctcctaatgtcaaccgagaatgagctaaaaggacagcaggtgctaccaacacagaaccacacatgcagctaccccgggtggcacagcaccaccattgccgaccacaccagacctcatggagacagtgcacctgtttcctgtttgggagaacaccactccactccatctctgccagcggatcctggctccctacctgaagaaagcgcctcgccagcaagttcttaaacacttccagtaaccatgaaaactcagacttggaaatgccttctttaacttccacccccctcattggtcacaaattgactgttacaacaccatttcatagagaccagactgtgaaaactcaaaaggaaaatactgtttttagaaccccagctatcaaaaggtcaatcttagaaagctctccaagaactcctacaccattcaaacatgcacttgcagctcaagaaattaaatacggtcccctgaagatgctacctcagacaccctctcatctagtagaagatctgcaggatgtgatcaaacaggaatctgatgaatctggaattgttgctgagtttcaagaaaatggaccacccttactgaagaaaatcaaacaagaggtggaatctccaactgataaatcaggaaacttcttctgctcacaccactgggaaggggacagtctgaatacccaactgttcacgcagacctcgcctgtggcagatgcaccgaatattcttacaagctccgttttaatggcaccagcatcagaagatgaagacaatgttctcaaagcatttacagtacctaaaaacaggtccctggcgagccccttgcagccttgtagcagtacctgggaacctgcatcctgtggaaagatggaggagcagatgacatcttccagtcaagctcgtaaatacgtgaatgcattctcagcccggacgctggtcatgtga

SEQ ID NO: 199242 - DNA, 2381 bp, Homo sapiens
  Payload ID: 19308
  Gene Name: v-myb avian myeloblastosis viral oncogene homolog
  ENST ID: ENST00000527615
  CDS Start-End: 134-1969
gagaaacttcgccccagcggtgcggagcgccgctgcgcagccggggagggacgcaggcaggcggcgggcagcgggaggcggcagcccggtgcggtccccgcggctctcggcggagccccgcgcccgccgcgccatggcccgaagaccccggcacagcatatatagcagtgacgaggatgatgaggactttgagatgtgtgaccatgactatgatgggctgcttcccaagtctggaaagcgtcacttggggaaaacaaggtggacccgggaagaggatgaaaaactgaagaagctggtggaacagaatggaacagatgactggaaagttattgccaattatctcccgaatcgaacagatgtgcagtgccagcaccgatggcagaaagtactaaaccctgagctcatcaagggtccttggaccaaagaagaagatcagagagtgatagagcttgtacagaaatacggtccgaaacgttggtctgttattgccaagcacttaaaggggagaattggaaaacaatgtagggagaggtggcataaccacttgaatccagaagttaagaaaacctcctggacagaagaggaagacagaattatttaccaggcacacaagagactggggaacagatgggcagaaatcgcaaagctactgcctggacgaactgataatgctatcaagaaccactggaattctacaatgcgtcggaaggtcgaacaggaaggttatctgcaggagtcttcaaaagccagccagccagcagtggccacaagcttccagaagaacagtcatttgatgggttttgctcaggctccgcctacagctcaactccctgccactggccagcccactgttaacaacgactattcctattaccacatttctgaagcacaaaatgtctccagtcatgttccataccctgtagcgttacatgtaaatatagtcaatgtccctcagccagctgccgcagccattcagagacactataatgatgaagaccctgagaaggaaaagcgaataaaggaattagaattgctcctaatgtcaaccgagaatgagctaaaaggacagcaggtgctaccaacacagaaccacacatgcagctaccccgggtggcacagcaccaccattgccgaccacaccagacctcatggagacagtgcacctgtttcctgtttgggagaacaccactccactccatctctgccagcggatcctggctccctacctgaagaaagcgcctcgccagcaaggtgcatgatcgtccaccagggcaccattctggataatgttaagaacctcttagaatttgcagaaacactccaatttatagattctttcttaaacacttccagtaaccatgaaaactcagacttggaaatgccttctttaacttccacccccctcattggtcacaaattgactgttacaacaccatttcatagagaccagactgtgaaaactcaaaaggaaaatactgtttttagaaccccagctatcaaaaggtcaatcttagaaagctctccaagaactcctacaccattcaaacatgcacttgcagctcaagaaattaaatacggtcccctgaagatgctacctcagacaccctctcatctagtagaagatctgcaggatgtgatcaaacaggaatctgatgaatctggaattgttgctgagtttcaagaaaatggaccacccttactgaagaaaatcaaacaagaggtggaatctccaactgataaatcaggaaacttcttctgctcacaccactgggaaggggacagtctgaatacccaactgttcacgcagacctcgcctgtggcagatgcaccgaatattcttacaagctccgttttaatggcaccagcatcagaagatgaagacaatgttctcaaagcatttacagtacctaaaaacaggtccctggcgagccccttgcaggtaattactattccaacattggtattttaaaattcattcactgaaaaactgtcatctttggtggtggtggtggtggtggtgatggtagtgctggtggtctgtttttcgttttcaacattttagacataggggagtaatgcttttatacaattcttgatgtctagaaaaatccaataattcctttttgctactcatatgagacatgctagaaatttttatcagtgcagattccccaaagcatgatgaaatgaaacatttcttactgtgactgagactaagatgtattacacgtgtgtcactatcttcttctgccctcaaatgttttataaaaatatatcaatatagtttactttatgttccaaattttttattttttatgctgtatccctaggcaaccaaagctcagagactgttccaattttaaatgaagtctgaaattagt

SEQ ID NO: 199243 - DNA, 3157 bp, Homo sapiens
  Payload ID: 19308
  Gene Name: v-myb avian myeloblastosis viral oncogene homolog
  ENST ID: ENST00000526889
  CDS Start-End: 1-1341
atggcccgaagaccccggcacagcatatatagcagtgacgaggatgatgaggactttgagatgtgtgaccatgactatgatgggctgcttcccaagtctggaaagcgtcacttggggaaaacaaggtggacccgggaagaggatgaaaaactgaagaagctggtggaacagaatggaacagatgactggaaagttattgccaattatctcccgaatcgaacagatgtgcagtgccagcaccgatggcagaaagtactaaaccctgagctcatcaagggtccttggaccaaagaagaagatcagagagtgatagagcttgtacagaaatacggtccgaaacgttggtctgttattgccaagcacttaaaggggagaattggaaaacaatgtagggagaggtggcataaccacttgaatccagaagttaagaaaacctcctggacagaagaggaagacagaattatttaccaggcacacaagagactggggaacagatgggcagaaatcgcaaagctactgcctggacgaactgataatgctatcaagaaccactggaattctacaatgcgtcggaaggtcgaacaggaaggttatctgcaggagtcttcaaaagccagccagccagcagtggccacaagcttccagaagaacagtcatttgatgggttttgctcaggctccgcctacagctcaactccctgccactggccagcccactgttaacaacgactattcctattaccacatttctgaagcacaaaatgtctccagtcatgttccataccctgtagcgttacatgtaaatatagtcaatgtccctcagccagctgccgcagccattcagagacactataatgatgaagaccctgagaaggaaaagcgaataaaggaattagaattgctcctaatgtcaaccgagaatgagctaaaaggacagcagacacagaaccacacatgcagctaccccgggtggcacagcaccaccattgccgaccacaccagacctcatggagacagtgcacctgtttcctgtttgggagaacaccactccactccatctctgccagcggatcctggctccctacctgaagaaagcgcctcgccagcaaggtgcatgatcgtccaccagggcaccattctggataatgttaagaacctcttagaatttgcagaaacactccaatttatagattctttcttaaacacttccagtaaccatgaaaactcagacttggaaatgccttctttaacttccacccccctcattggtcacaaattgactgttacaacaccatttcatagagaccagactgtgaaaactcaaaaggaaaatactgtataggacctcttctgacatccccaggaatattatatgattagaagccaagggatgattttagaaccccagctatcaaaaggtcaatcttagaaagctctccaagaactcctacaccattcaaacatgcacttgcagctcaagaaattaaatacggtcccctgaagatgctacctcagacaccctctcatctagtagaagatctgcaggatgtgatcaaacaggaatctgatgaatctggaattgttgctgagtttcaagaaaatggaccacccttactgaagaaaatcaaacaagaggtggaatctccaactgataaatcaggaaacttcttctgctcacaccactgggaaggggacagtctgaatacccaactgttcacgcagacctcgcctgtggcagatgcaccgaatattcttacaagctccgttttaatggcaccagcatcagaagatgaagacaatgttctcaaagcatttacagtacctaaaaacaggtccctggcgagccccttgcagccttgtagcagtacctgggaacctgcatcctgtggaaagatggaggagcagatgacatcttccagtcaagctcgtaaatacgtgaatgcattctcagcccggacgctggtcatgtgagacatttccagaaaagcattatggttttcagaacacttcaagttgacttgggatatatcattcctcaacatgaaacttttcatgaatgggagaagaacctatttttgttgtggtacaacagttgagagcagcaccaagtgcatttagttgaatgaagtcttcttggatttcacccaactaaaaggatttttaaaaataaataacagtcttacctaaattattaggtaatgaattgtagccagttgttaatatcttaatgcagatttttttaaaaaaaacataaaatgatttatctgtattttaaaggatccaacagatcagtattttttcctgtgatgggttttttgaaatttgacacattaaaaggtactccagtatttcacttttctcgatcactaaacatatgcatatatttttaaaaatcagtaaaagcattactctaagtgtagacttaataccatgtgacatttaatccagattgtaaatgctcatttatggttaatgacattgaaggtacatttattgtaccaaaccattttatgagttttctgttagcttgctttaaaaattattactgtaagaaatagttttataaaaaattatatttttattcagtaatttaattttgtaaatgccaaatgaaaaacgttttttgctgctatggtcttagcctgtagacatgctgctagtatcagaggggcagtagagcttggacagaaagaaaagaaacttggtgttaggtaattgactatgcactagtatttcagactttttaattttatatatatatacattttttttccttctgcaatacatttgaaaacttgtttgggagactctgcattttttattgtggtttttttgttattgttggtttatacaagcatgcgttgcacttcttttttgggagatgtgtgttgttgatgttctatgttttgttttgagtgtagcctgactgttttataatttgggagttctgcatttgatccgcatcccctgtggtttctaagtgtatggtctcagaactgttgcatggatcctgtgtttgcaactggggagacagaaactgtggttgatagccagtcactgccttaagaacatttgatgcaagatggccagcactgaacttttgagatatgacggtgtacttactgccttgtagcaaaataaagatgtgcccttatttt

SEQ ID NO: 199244 - DNA, 2182 bp, Homo sapiens
  Payload ID: 19308
  Gene Name: v-myb avian myeloblastosis viral oncogene homolog
  ENST ID: ENST00000525002
  CDS Start-End: 1-1746
atggcccgaagaccccggcacagcatatatagcagtgacgaggatgatgaggactttgagatgtgtgaccatgactatgatgggctgcttcccaagtctggaaagcgtcacttggggaaaacaaggtggacccgggaagaggatgaaaaactgaagaagctggtggaacagaatggaacagatgactggaaagttattgccaattatctcccgaatcgaacagatgtgcagtgccagcaccgatggcagaaagtactaaaccctgagctcatcaagggtccttggaccaaagaagaagatcagagagtgatagagcttgtacagaaatacggtccgaaacgttggtctgttattgccaagcacttaaaggggagaattggaaaacaatgtagggagaggtggcataaccacttgaatccagaagttaagaaaacctcctggacagaagaggaagacagaattatttaccaggcacacaagagactggggaacagatgggcagaaatcgcaaagctactgcctggacgaactgataatgctatcaagaaccactggaattctacaatgcgtcggaaggtcgaacaggaaggttatctgcaggagtcttcaaaagccagccagccagcagtggccacaagcttccagaagaacagtcatttgatgggttttgctcaggctccgcctacagctcaactccctgccactggccagcccactgttaacaacgactattcctattaccacatttctgaagcacaaaatgtctccagtcatgttccataccctgtagcgttacatgtaaatatagtcaatgtccctcagccagctgccgcagccattcagagacactataatgatgaagaccctgagaaggaaaagcgaataaaggaattagaattgctcctaatgtcaaccgagaatgagctaaaaggacagcaggtgctaccaacacagaaccacacatgcagctaccccgggtggcacagcaccaccattgccgaccacaccagacctcatggagacagtgcacctgtttcctgtttgggagaacaccactccactccatctctgccagcggatcctggctccctacctgaagaaagcgcctcgccagcaaggtgcatgatcgtccaccagggcaccattctggataatgttaagaacctcttagaatttgcagaaacactccaatttatagattctttcttaaacacttccagtaaccatgaaaactcagacttggaaatgccttctttaacttccacccccctcattggtcacaaattgactgttacaacaccatttcatagagaccagactgtgaaaactcaaaaggaaaatactgtttttagaaccccagctatcaaaaggtcaatcttagaaagctctccaagaactcctacaccattcaaacatgcacttgcagctcaagaaattaaatacggtcccctgaagatgctacctcagacaccctctcatctagtagaagatctgcaggatgtgatcaaacaggaatctgatgaatctggaattgttgctgagtttcaagaaaatggaccacccttactgaagaaaatcaaacaagaggtaaacacgcaaccctttggaagcaacaagctgagaatcctgccccctttattccttgtgtgcagcttgatgtgtctgccattggcactgtgcaacaccacgacttttcgtgcaagattttcatacaaggtgcagcgaaaaggtactgccagactgtaggcatcatcaacctttcctttgggaagccaagccatctctatctacttcatgtttggacagaaaacatactagagagtatcaagaaaagggagggaaagaggtggaatctccaactgataaatcaggaaacttcttctgctcacaccactgggaaggggacagtctgaatacccaactgttcacgcagacctcgcctgtggcagatgcaccgaatattcttacaagctccgttttaatggcaccagcatcagaagatgaagacaatgttctcaaagcatttacagtacctaaaaacaggtccctggcgagccccttgcagccttgtagcagtacctgggaacctgcatcctgtggaaagatggaggagcagatgacatcttccagtcaagctcgtaaatacgtgaatgcattctcagcccggacgctggtcatgtga

SEQ ID NO: 199245 - DNA, 2427 bp, Homo sapiens
  Payload ID: 19308
  Gene Name: v-myb avian myeloblastosis viral oncogene homolog
  ENST ID: ENST00000529262
  CDS Start-End: 1-1158
atggcccgaagaccccggcacagcatatatagcagtgacgaggatgatgaggactttgagatgtgtgaccatgactatgatgggctgcttcccaagtctggaaagcgtcacttggggaaaacaaggtggacccgggaagaggatgaaaaactgaagaagctggtggaacagaatggaacagatgactggaaagttattgccaattatctcccgaatcgaacagatgtgcagtgccagcaccgatggcagaaagtactaaaccctgagctcatcaagggtccttggaccaaagaagaagatcagagagtgatagagcttgtacagaaatacggtccgaaacgttggtctgttattgccaagcacttaaaggggagaattggaaaacaatgtagggagaggtggcataaccacttgaatccagaagttaagaaaacctcctggacagaagaggaagacagaattatttaccaggcacacaagagactggggaacagatgggcagaaatcgcaaagctactgcctggacgaactgataatgctatcaagaaccactggaattctacaatgcgtcggaaggtcgaacaggaaggttatctgcaggagtcttcaaaagccagccagccagcagtggccacaagcttccagaagaacagtcatttgatgggttttgctcaggctccgcctacagctcaactccctgccactggccagcccactgttaacaacgactattcctattaccacatttctgaagcacaaaatgtctccagtcatgttccataccctgtagcgttacatgtaaatatagtcaatgtccctcagccagctgccgcagccattcagagacactataatgatgaagaccctgagaaggaaaagcgaataaaggaattagaattgctcctaatgtcaaccgagaatgagctaaaaggacagcagacacagaaccacacatgcagctaccccgggtggcacagcaccaccattgccgaccacaccagacctcatggagacagtgcacctgtttcctgtttgggagaacaccactccactccatctctgccagcggatcctggctccctacctgaagaaagcgcctcgccagcaagatgtagagtgtcgggaggtccctgcagcacatcagagggccagccttgaggcagcccactagaccctgctctactgcagtataatagagcaactgctcatcttgaagctgttgctcaagaagccaaaccaacgggcctagtgtttgctttgcgttgagcatctctctctcagtgctgtttcaggtgatgatggcacacactatctcaaagttctgtgcctcccacattgtttcaggattcttcatcatggtgtgatctcagcagttttgaattctttgaagaagcagatttttcacctagccaacatcacacaggcaaagccctacagcttcagcaaagagagggcaatgggactaaacctgcaggagaacctagcccaagggtgaacaaacgtatgttgagtgagagttcacttgacccacccaaggtcttacctcctgcaaggcacagcacaattccactggtcatccttcgaaaaaaacggggccaggccagccccttagccactggagactgtagctccttcatatttgctgacgtcagcagttcaactcccaagcgttcccctgtcaaaagcctacccttctctccctcgcagttcttaaacacttccagtaaccatgaaaactcagacttggaaatgccttctttaacttccacccccctcattggtcacaaattgactgttacaacaccatttcatagagaccagactgtgaaaactcaaaaggaaaatactgtttttagaaccccagctatcaaaaggtcaatcttagaaagctctccaagaactcctacaccattcaaacatgcacttgcagctcaagaaattaaatacggtcccctgaagatgctacctcagacaccctctcatctagtagaagatctgcaggatgtgatcaaacaggaatctgatgaatctggaattgttgctgagtttcaagaaaatggaccacccttactgaagaaaatcaaacaagaggtggaatctccaactgataaatcaggaaacttcttctgctcacaccactgggaaggggacagtctgaatacccaactgttcacgcagacctcgcctgtggcagatgcaccgaatattcttacaagctccgttttaatggcaccagcatcagaagatgaagacaatgttctcaaagcatttacagtacctaaaaacaggtccctggcgagccccttgcagccttgtagcagtacctgggaacctgcatcctgtggaaagatggaggagcagatgacatcttccagtcaagctcgtaaatacgtgaatgcattctcagcccggacgctggtcatgtga

SEQ ID NO: 199246 - DNA, 2091 bp, Homo sapiens
  Payload ID: 19308
  Gene Name: v-myb avian myeloblastosis viral oncogene homolog
  ENST ID: ENST00000528343
  CDS Start-End: 1-1746
atggcccgaagaccccggcacagcatatatagcagtgacgaggatgatgaggactttgagatgtgtgaccatgactatgatgggctgcttcccaagtctggaaagcgtcacttggggaaaacaaggtggacccgggaagaggatgaaaaactgaagaagctggtggaacagaatggaacagatgactggaaagttattgccaattatctcccgaatcgaacagatgtgcagtgccagcaccgatggcagaaagtactaaaccctgagctcatcaagggtccttggaccaaagaagaagatcagagagtgatagagcttgtacagaaatacggtccgaaacgttggtctgttattgccaagcacttaaaggggagaattggaaaacaatgtagggagaggtggcataaccacttgaatccagaagttaagaaaacctcctggacagaagaggaagacagaattatttaccaggcacacaagagactggggaacagatgggcagaaatcgcaaagctactgcctggacgaactgataatgctatcaagaaccactggaattctacaatgcgtcggaaggtcgaacaggaaggttatctgcaggagtcttcaaaagccagccagccagcagtggccacaagcttccagaagaacagtcatttgatgggttttgctcaggctccgcctacagctcaactccctgccactggccagcccactgttaacaacgactattcctattaccacatttctgaagcacaaaatgtctccagtcatgttccataccctgtagcgttacatgtaaatatagtcaatgtccctcagccagctgccgcagccattcagagacactataatgatgaagaccctgagaaggaaaagcgaataaaggaattagaattgctcctaatgtcaaccgagaatgagctaaaaggacagcaggtgctaccaacacagaaccacacatgcagctaccccgggtggcacagcaccaccattgccgaccacaccagacctcatggagacagtgcacctgtttcctgtttgggagaacaccactccactccatctctgccagcggatcctggctccctacctgaagaaagcgcctcgccagcaaggtgcatgatcgtccaccagggcaccattctggataatgttaagaacctcttagaatttgcagaaacactccaatttatagattctttcttaaacacttccagtaaccatgaaaactcagacttggaaatgccttctttaacttccacccccctcattggtcacaaattgactgttacaacaccatttcatagagaccagactgtgaaaactcaaaaggaaaatactgtttttagaaccccagctatcaaaaggtcaatcttagaaagctctccaagaactcctacaccattcaaacatgcacttgcagctcaagaaattaaatacggtcccctgaagatgctacctcagacaccctctcatctagtagaagatctgcaggatgtgatcaaacaggaatctgatgaatctggaattgttgctgagtttcaagaaaatggaccacccttactgaagaaaatcaaacaagaggtaaacacgcaaccctttggaagcaacaagctgagaatcctgccccctttattccttgtgtgcagcttgatgtgtctgccattggcactgtgcaacaccacgacttttcgtgcaagattttcatacaaggtgcagcgaaaaggtggaatctccaactgataaatcaggaaacttcttctgctcacaccactgggaaggggacagtctgaatacccaactgttcacgcagacctcgcctgtggcagatgcaccgaatattcttacaagctccgttttaatggcaccagcatcagaagatgaagacaatgttctcaaagcatttacagtacctaaaaacaggtccctggcgagccccttgcagccttgtagcagtacctgggaacctgcatcctgtggaaagatggaggagcagatgacatcttccagtcaagctcgtaaatacgtgaatgcattctcagcccggacgctggtcatgtgagacatttccagaaaagcattatggtt

SEQ ID NO: 199247 - DNA, 3492 bp, Homo sapiens
  Payload ID: 19308
  Gene Name: v-myb avian myeloblastosis viral oncogene homolog
  Uniprot ID: P10242
  ENST ID: ENST00000533837
  CDS Start-End: 200-1408
aatatcaacctgtttcctcctcctccttctcctcctcctccgtgacctcctcctcctctttctcctgagaaacttcgccccagcggtgcggagcgccgctgcgcagccggggagggacgcaggcaggcggcgggcagcgggaggcggcagcccggtgcggtccccgcggctctcggcggagccccgcgcccgccgcgccatggcccgaagaccccggcacagcatatatagcagtgacgaggatgatgaggactttgagatgtgtgaccatgactatgatgggctgcttcccaagtctggaaagcgtcacttggggaaaacaaggtggacccgggaagaggatgaaaaactgaagaagctggtggaacagaatggaacagatgactggaaagttattgccaattatctcccgaatcgaacagatgtgcagtgccagcaccgatggcagaaagtactaaaccctgagctcatcaagggtccttggaccaaagaagaagatcagagagtgatagagcttgtacagaaatacggtccgaaacgttggtctgttattgccaagcacttaaaggggagaattggaaaacaatgtagggagaggtggcataaccacttgaatccagaagttaagaaaacctcctggacagaagaggaagacagaattatttaccaggcacacaagagactggggaacagatgggcagaaatcgcaaagctactgcctggacgaactgataatgctatcaagaaccactggaattctacaatgcgtcggaaggtcgaacaggaaggttatctgcaggagtcttcaaaagccagccagccagcagtggccacaagcttccagaagaacagtcatttgatgggttttgctcaggctccgcctacagctcaactccctgccactggccagcccactgttaacaacgactattcctattaccacatttctgaagcacaaaatgtctccagtcatgttccataccctgtagcgttacatgtaaatatagtcaatgtccctcagccagctgccgcagccattcagagacactataatgatgaagaccctgagaaggaaaagcgaataaaggaattagaattgctcctaatgtcaaccgagaatgagctaaaaggacagcaggtgctaccaacacagaaccacacatgcagctaccccgggtggcacagcaccaccattgccgaccacaccagacctcatggagacagtgcacctgtttcctgtttgggagaacaccactccactccatctctgccagcggatcctggctccctacctgaagaaagcgcctcgccagcaaggtgcatgatcgtccaccagggcaccattctggataatgttaagaacctcttagaatttgcagaaacactccaatttatagattctatgtagagtgtcgggaggtccctgcagcacatcagagggccagccttgaggcagcccactagaccctgctctactgcagtataatagagcaactgctcatcttgaagctgttgctcaagaagccaaaccaacgggcctagtgtttgctttgcgttgagcatctctctctcagtgctgtttcagttcttaaacacttccagtaaccatgaaaactcagacttggaaatgccttctttaacttccacccccctcattggtcacaaattgactgttacaacaccatttcatagagaccagactgtgaaaactcaaaaggaaaatactgtttttagaaccccagctatcaaaaggtcaatcttagaaagctctccaagaactcctacaccattcaaacatgcacttgcagctcaagaaattaaatacggtcccctgaagatgctacctcagacaccctctcatctagtagaagatctgcaggatgtgatcaaacaggaatctgatgaatctggaattgttgctgagtttcaagaaaatggaccacccttactgaagaaaatcaaacaagaggtggaatctccaactgataaatcaggaaacttcttctgctcacaccactgggaaggggacagtctgaatacccaactgttcacgcagacctcgcctgtggcagatgcaccgaatattcttacaagctccgttttaatggcaccagcatcagaagatgaagacaatgttctcaaagcatttacagtacctaaaaacaggtccctggcgagccccttgcagccttgtagcagtacctgggaacctgcatcctgtggaaagatggaggagcagatgacatcttccagtcaagctcgtaaatacgtgaatgcattctcagcccggacgctggtcatgtgagacatttccagaaaagcattatggttttcagaacacttcaagttgacttgggatatatcattcctcaacatgaaacttttcatgaatgggagaagaacctatttttgttgtggtacaacagttgagagcagcaccaagtgcatttagttgaatgaagtcttcttggatttcacccaactaaaaggatttttaaaaataaataacagtcttacctaaattattaggtaatgaattgtagccagttgttaatatcttaatgcagatttttttaaaaaaaacataaaatgatttatctgtattttaaaggatccaacagatcagtattttttcctgtgatgggttttttgaaatttgacacattaaaaggtactccagtatttcacttttctcgatcactaaacatatgcatatatttttaaaaatcagtaaaagcattactctaagtgtagacttaataccatgtgacatttaatccagattgtaaatgctcatttatggttaatgacattgaaggtacatttattgtaccaaaccattttatgagttttctgttagcttgctttaaaaattattactgtaagaaatagttttataaaaaattatatttttattcagtaatttaattttgtaaatgccaaatgaaaaacgttttttgctgctatggtcttagcctgtagacatgctgctagtatcagaggggcagtagagcttggacagaaagaaaagaaacttggtgttaggtaattgactatgcactagtatttcagactttttaattttatatatatatacattttttttccttctgcaatacatttgaaaacttgtttgggagactctgcattttttattgtggtttttttgttattgttggtttatacaagcatgcgttgcacttcttttttgggagatgtgtgttgttgatgttctatgttttgttttgagtgtagcctgactgttttataatttgggagttctgcatttgatccgcatcccctgtggtttctaagtgtatggtctcagaactgttgcatggatcctgtgtttgcaactggggagacagaaactgtggttgatagccagtcactgccttaagaacatttgatgcaagatggccagcactgaacttttgagatatgacggtgtacttactgccttgtagcaaaataaagatgtgcccttatttt

SEQ ID NO: 199248 - DNA, 1630 bp, Homo sapiens
  Payload ID: 19308
  Gene Name: v-myb avian myeloblastosis viral oncogene homolog
  ENST ID: ENST00000524588
  CDS Start-End: 1-240
atggcccgaagaccccggcacagcatatatagcagtgacgaggatgatgaggactttgagatgtgtgaccatgactatgatgggctgcttcccaagtctggaaagcgtcacttggggaaaacaaggtggacccgggaagagaatcgaacagatgtgcagtgccagcaccgatggcagaaagtactaaaccctgagctcatcaagggtccttggaccaaagaagaagatcagagaaactgataatgctatcaagaaccactggaattctacaatgcgtcggaaggtcgaacaggaaggttatctgcaggagtcttcaaaagccagccagccagcagtggccacaagcttccagaagaacagtcatttgatgggttttgctcaggctccgcctacagctcaactccctgccactggccagcccactgttaacaacgactattcctattaccacatttctgaagcacaaaatgtctccagtcatgttccataccctgtagcgttacatgtaaatatagtcaatgtccctcagccagctgccgcagccattcagagacactataatgatgaagaccctgagaaggaaaagcgaataaaggaattagaattgctcctaatgtcaaccgagaatgagctaaaaggacagcaggtgctaccaacacagaaccacacatgcagctaccccgggtggcacagcaccaccattgccgaccacaccagacctcatggagacagtgcacctgtttcctgtttgggagaacaccactccactccatctctgccagcggatcctggctccctacctgaagaaagcgcctcgccagcaaggtgcatgatcgtccaccagggcaccattctggataatgttaagaacctcttagaatttgcagaaacactccaatttatagattctttcttaaacacttccagtaaccatgaaaactcagacttggaaatgccttctttaacttccacccccctcattggtcacaaattgactgttacaacaccatttcatagagaccagactgtgaaaactcaaaaggaaaatactgtttttagaaccccagctatcaaaaggtcaatcttagaaagctctccaagaactcctacaccattcaaacatgcacttgcagctcaagaaattaaatacggtcccctgaagatgctacctcagacaccctctcatctagtagaagatctgcaggatgtgatcaaacaggaatctgatgaatctggaattgttgctgagtttcaagaaaatggaccacccttactgaagaaaatcaaacaagaggtggaatctccaactgataaatcaggaaacttcttctgctcacaccactgggaaggggacagtctgaatacccaactgttcacgcagacctcgcctgtggcagatgcaccgaatattcttacaagctccgttttaatggcaccagcatcagaagatgaagacaatgttctcaaagcatttacagtacctaaaaacaggtccctggcgagccccttgcagccttgtagcagtacctgggaacctgcatcctgtggaaagatggaggagcagatgacatcttccagtcaagctcgtaaatacgtgaatgcattctcagcccggacgctggtcatgtga

SEQ ID NO: 199249 - DNA, 2277 bp, Homo sapiens
  Payload ID: 19308
  Gene Name: v-myb avian myeloblastosis viral oncogene homolog
  Uniprot ID: P10242
  ENST ID: ENST00000528774
  CDS Start-End: 1-2277
atggcccgaagaccccggcacagcatatatagcagtgacgaggatgatgaggactttgagatgtgtgaccatgactatgatgggctgcttcccaagtctggaaagcgtcacttggggaaaacaaggtggacccgggaagaggatgaaaaactgaagaagctggtggaacagaatggaacagatgactggaaagttattgccaattatctcccgaatcgaacagatgtgcagtgccagcaccgatggcagaaagtactaaaccctgagctcatcaagggtccttggaccaaagaagaagatcagagagtgatagagcttgtacagaaatacggtccgaaacgttggtctgttattgccaagcacttaaaggggagaattggaaaacaatgtagggagaggtggcataaccacttgaatccagaagttaagaaaacctcctggacagaagaggaagacagaattatttaccaggcacacaagagactggggaacagatgggcagaaatcgcaaagctactgcctggacgaactgataatgctatcaagaaccactggaattctacaatgcgtcggaaggtcgaacaggaaggttatctgcaggagtcttcaaaagccagccagccagcagtggccacaagcttccagaagaacagtcatttgatgggttttgctcaggctccgcctacagctcaactccctgccactggccagcccactgttaacaacgactattcctattaccacatttctgaagcacaaaatgtctccagtcatgttccataccctgtagcgttacatgtaaatatagtcaatgtccctcagccagctgccgcagccattcagagacactataatgatgaagaccctgagaaggaaaagcgaataaaggaattagaattgctcctaatgtcaaccgagaatgagctaaaaggacagcagacacagaaccacacatgcagctaccccgggtggcacagcaccaccattgccgaccacaccagacctcatggagacagtgcacctgtttcctgtttgggagaacaccactccactccatctctgccagcggatcctggctccctacctgaagaaagcgcctcgccagcaaggtgcatgatcgtccaccagggcaccattctggataatgttaagaacctcttagaatttgcagaaacactccaatttatagattctgattcttcatcatggtgtgatctcagcagttttgaattctttgaagaagcagatttttcacctagccaacatcacacaggcaaagccctacagcttcagcaaagagagggcaatgggactaaacctgcaggagaacctagcccaagggtgaacaaacgtatgttgagtgagagttcacttgacccacccaaggtcttacctcctgcaaggcacagcacaattccactggtcatccttcgaaaaaaacggggccaggccagccccttagccactggagactgtagctccttcatatttgctgacgtcagcagttcaactcccaagcgttcccctgtcaaaagcctacccttctctccctcgcagttcttaaacacttccagtaaccatgaaaactcagacttggaaatgccttctttaacttccacccccctcattggtcacaaattgactgttacaacaccatttcatagagaccagactgtgaaaactcaaaaggaaaatactgtttttagaaccccagctatcaaaaggtcaatcttagaaagctctccaagaactcctacaccattcaaacatgcacttgcagctcaagaaattaaatacggtcccctgaagatgctacctcagacaccctctcatctagtagaagatctgcaggatgtgatcaaacaggaatctgatgaatctggaattgttgctgagtttcaagaaaatggaccacccttactgaagaaaatcaaacaagaggtggaatctccaactgataaatcaggaaacttcttctgctcacaccactgggaaggggacagtctgaatacccaactgttcacgcagacctcgcctgtggcagatgcaccgaatattcttacaagctccgttttaatggcaccagcatcagaagatgaagacaatgttctcaaagcatttacagtacctaaaaacaggtccctggcgagccccttgcagccttgtagcagtacctgggaacctgcatcctgtggaaagatggaggagcagatgacatcttccagtcaagctcgtaaatacgtgaatgcattctcagcccggacgctggtcatgtga

SEQ ID NO: 199250 - DNA, 2192 bp, Homo sapiens
  Payload ID: 19308
  Gene Name: v-myb avian myeloblastosis viral oncogene homolog
  ENST ID: ENST00000526187
  CDS Start-End: 1-1260
atggcccgaagaccccggcacagcatatatagcagtgacgaggatgatgaggactttgagatgtgtgaccatgactatgatgggctgcttcccaagtctggaaagcgtcacttggggaaaacaaggtggacccgggaagaggatgaaaaactgaagaagctggtggaacagaatggaacagatgactggaaagttattgccaattatctcccgaatcgaacagatgtgcagtgccagcaccgatggcagaaagtactaaaccctgagctcatcaagggtccttggaccaaagaagaagatcagagagtgatagagcttgtacagaaatacggtccgaaacgttggtctgttattgccaagcacttaaaggggagaattggaaaacaatgtagggagaggtggcataaccacttgaatccagaagttaagaaaacctcctggacagaagaggaagacagaattatttaccaggcacacaagagactggggaacagatgggcagaaatcgcaaagctactgcctggacgaactgataatgctatcaagaaccactggaattctacaatgcgtcggaaggtcgaacaggaaggttatctgcaggagtcttcaaaagccagccagccagcagtggccacaagcttccagaagaacagtcatttgatgggttttgctcaggctccgcctacagctcaactccctgccactggccagcccactgttaacaacgactattcctattaccacatttctgaagcacaaaatgtctccagtcatgttccataccctgtagcgttacatgtaaatatagtcaatgtccctcagccagctgccgcagccattcagagacactataatgatgaagaccctgagaaggaaaagcgaataaaggaattagaattgctcctaatgtcaaccgagaatgagctaaaaggacagcagacacagaaccacacatgcagctaccccgggtggcacagcaccaccattgccgaccacaccagacctcatggagacagtgcacctgtttcctgtttgggagaacaccactccactccatctctgccagcggatcctggctccctacctgaagaaagcgcctcgccagcaaggattcttcatcatggtgtgatctcagcagttttgaattctttgaagaagcagatttttcacctagccaacatcacacaggcaaagccctacagcttcagcaaagagagggcaatgggactaaacctgcaggagaacctagcccaagggtgaacaaacgtatgttgagtgagagttcacttgacccacccaaggtcttacctcctgcaaggcacagcacaattccactggtcatccttcgaaaaaaacggggccaggccagccccttagccactggagactgtagctccttcatatttgctgacgtcagcagttcaactcccaagcgttcccctgtcaaaagcctacccttctctccctcgcagttcttaaacacttccagtaaccatgaaaactcagacttggaaatgccttctttaacttccacccccctcattggtcacaaattgactgttacaacaccatttcatagagaccagactgtgaaaactcaaaaggaaaatactgtttttagaaccccagctatcaaaaggtcaatcttagaaagctctccaagaactcctacaccattcaaacatgcacttgcagctcaagaaattaaatacggtcccctgaagatgctacctcagacaccctctcatctagtagaagatctgcaggatgtgatcaaacaggaatctgatgaatctggaattgttgctgagtttcaagaaaatggaccacccttactgaagaaaatcaaacaagaggtggaatctccaactgataaatcaggaaacttcttctgctcacaccactgggaaggggacagtctgaatacccaactgttcacgcagacctcgcctgtggcagatgcaccgaatattcttacaagctccgttttaatggcaccagcatcagaagatgaagacaatgttctcaaagcatttacagtacctaaaaacaggtccctggcgagccccttgcagccttgtagcagtacctgggaacctgcatcctgtggaaagatggaggagcagatgacatcttccagtcaagctcgtaaatacgtgaatgcattctcagcccggacgctggtcatgtga

SEQ ID NO: 199251 - DNA, 2201 bp, Homo sapiens
  Payload ID: 19308
  Gene Name: v-myb avian myeloblastosis viral oncogene homolog
  ENST ID: ENST00000528015
  CDS Start-End: 1-1269
atggcccgaagaccccggcacagcatatatagcagtgacgaggatgatgaggactttgagatgtgtgaccatgactatgatgggctgcttcccaagtctggaaagcgtcacttggggaaaacaaggtggacccgggaagaggatgaaaaactgaagaagctggtggaacagaatggaacagatgactggaaagttattgccaattatctcccgaatcgaacagatgtgcagtgccagcaccgatggcagaaagtactaaaccctgagctcatcaagggtccttggaccaaagaagaagatcagagagtgatagagcttgtacagaaatacggtccgaaacgttggtctgttattgccaagcacttaaaggggagaattggaaaacaatgtagggagaggtggcataaccacttgaatccagaagttaagaaaacctcctggacagaagaggaagacagaattatttaccaggcacacaagagactggggaacagatgggcagaaatcgcaaagctactgcctggacgaactgataatgctatcaagaaccactggaattctacaatgcgtcggaaggtcgaacaggaaggttatctgcaggagtcttcaaaagccagccagccagcagtggccacaagcttccagaagaacagtcatttgatgggttttgctcaggctccgcctacagctcaactccctgccactggccagcccactgttaacaacgactattcctattaccacatttctgaagcacaaaatgtctccagtcatgttccataccctgtagcgttacatgtaaatatagtcaatgtccctcagccagctgccgcagccattcagagacactataatgatgaagaccctgagaaggaaaagcgaataaaggaattagaattgctcctaatgtcaaccgagaatgagctaaaaggacagcaggtgctaccaacacagaaccacacatgcagctaccccgggtggcacagcaccaccattgccgaccacaccagacctcatggagacagtgcacctgtttcctgtttgggagaacaccactccactccatctctgccagcggatcctggctccctacctgaagaaagcgcctcgccagcaaggattcttcatcatggtgtgatctcagcagttttgaattctttgaagaagcagatttttcacctagccaacatcacacaggcaaagccctacagcttcagcaaagagagggcaatgggactaaacctgcaggagaacctagcccaagggtgaacaaacgtatgttgagtgagagttcacttgacccacccaaggtcttacctcctgcaaggcacagcacaattccactggtcatccttcgaaaaaaacggggccaggccagccccttagccactggagactgtagctccttcatatttgctgacgtcagcagttcaactcccaagcgttcccctgtcaaaagcctacccttctctccctcgcagttcttaaacacttccagtaaccatgaaaactcagacttggaaatgccttctttaacttccacccccctcattggtcacaaattgactgttacaacaccatttcatagagaccagactgtgaaaactcaaaaggaaaatactgtttttagaaccccagctatcaaaaggtcaatcttagaaagctctccaagaactcctacaccattcaaacatgcacttgcagctcaagaaattaaatacggtcccctgaagatgctacctcagacaccctctcatctagtagaagatctgcaggatgtgatcaaacaggaatctgatgaatctggaattgttgctgagtttcaagaaaatggaccacccttactgaagaaaatcaaacaagaggtggaatctccaactgataaatcaggaaacttcttctgctcacaccactgggaaggggacagtctgaatacccaactgttcacgcagacctcgcctgtggcagatgcaccgaatattcttacaagctccgttttaatggcaccagcatcagaagatgaagacaatgttctcaaagcatttacagtacctaaaaacaggtccctggcgagccccttgcagccttgtagcagtacctgggaacctgcatcctgtggaaagatggaggagcagatgacatcttccagtcaagctcgtaaatacgtgaatgcattctcagcccggacgctggtcatgtga

SEQ ID NO: 199252 - DNA, 3081 bp, Homo sapiens
  Payload ID: 19308
  Gene Name: v-myb avian myeloblastosis viral oncogene homolog
  ENST ID: ENST00000526320
  CDS Start-End: 1-1125
atggcccgaagaccccggcacagcatatatagcagtgacgaggatgatgaggactttgagatgtgtgaccatgactatgatgggctgcttcccaagtctggaaagcgtcacttggggaaaacaaggtggacccgggaagaggatgaaaaactgaagaagctggtggaacagaatggaacagatgactggaaagttattgccaattatctcccgaatcgaacagatgtgcagtgccagcaccgatggcagaaagtactaaaccctgagctcatcaagggtccttggaccaaagaagaagatcagagagtgatagagcttgtacagaaatacggtccgaaacgttggtctgttattgccaagcacttaaaggggagaattggaaaacaatgtagggagaggtggcataaccacttgaatccagaagttaagaaaacctcctggacagaagaggaagacagaattatttaccaggcacacaagagactggggaacagatgggcagaaatcgcaaagctactgcctggacgaactgataatgctatcaagaaccactggaattctacaatgcgtcggaaggtcgaacaggaaggttatctgcaggagtcttcaaaagccagccagccagcagtggccacaagcttccagaagaacagtcatttgatgggttttgctcaggctccgcctacagctcaactccctgccactggccagcccactgttaacaacgactattcctattaccacatttctgaagcacaaaatgtctccagtcatgttccataccctgtagcgttacatgtaaatatagtcaatgtccctcagccagctgccgcagccattcagagacactataatgatgaagaccctgagaaggaaaagcgaataaaggaattagaattgctcctaatgtcaaccgagaatgagctaaaaggacagcaggtgctaccaacacagaaccacacatgcagctaccccgggtggcacagcaccaccattgccgaccacaccagacctcatggagacagtgcacctgtttcctgtttgggagaacaccactccactccatctctgccagcggatcctggctccctacctgaagaaagcgcctcgccagcaagttcttaaacacttccagtaaccatgaaaactcagacttggaaatgccttctttaacttccacccccctcattggtcacaaattgactgttacaacaccatttcatagagaccagactgtgaaaactcaaaaggaaaatactgtataggacctcttctgacatccccaggaatattatatgattagaagccaagggatgattttagaaccccagctatcaaaaggtcaatcttagaaagctctccaagaactcctacaccattcaaacatgcacttgcagctcaagaaattaaatacggtcccctgaagatgctacctcagacaccctctcatctagtagaagatctgcaggatgtgatcaaacaggaatctgatgaatctggaattgttgctgagtttcaagaaaatggaccacccttactgaagaaaatcaaacaagaggtggaatctccaactgataaatcaggaaacttcttctgctcacaccactgggaaggggacagtctgaatacccaactgttcacgcagacctcgcctgtggcagatgcaccgaatattcttacaagctccgttttaatggcaccagcatcagaagatgaagacaatgttctcaaagcatttacagtacctaaaaacaggtccctggcgagccccttgcagccttgtagcagtacctgggaacctgcatcctgtggaaagatggaggagcagatgacatcttccagtcaagctcgtaaatacgtgaatgcattctcagcccggacgctggtcatgtgagacatttccagaaaagcattatggttttcagaacacttcaagttgacttgggatatatcattcctcaacatgaaacttttcatgaatgggagaagaacctatttttgttgtggtacaacagttgagagcagcaccaagtgcatttagttgaatgaagtcttcttggatttcacccaactaaaaggatttttaaaaataaataacagtcttacctaaattattaggtaatgaattgtagccagttgttaatatcttaatgcagatttttttaaaaaaaacataaaatgatttatctgtattttaaaggatccaacagatcagtattttttcctgtgatgggttttttgaaatttgacacattaaaaggtactccagtatttcacttttctcgatcactaaacatatgcatatatttttaaaaatcagtaaaagcattactctaagtgtagacttaataccatgtgacatttaatccagattgtaaatgctcatttatggttaatgacattgaaggtacatttattgtaccaaaccattttatgagttttctgttagcttgctttaaaaattattactgtaagaaatagttttataaaaaattatatttttattcagtaatttaattttgtaaatgccaaatgaaaaacgttttttgctgctatggtcttagcctgtagacatgctgctagtatcagaggggcagtagagcttggacagaaagaaaagaaacttggtgttaggtaattgactatgcactagtatttcagactttttaattttatatatatatacattttttttccttctgcaatacatttgaaaacttgtttgggagactctgcattttttattgtggtttttttgttattgttggtttatacaagcatgcgttgcacttcttttttgggagatgtgtgttgttgatgttctatgttttgttttgagtgtagcctgactgttttataatttgggagttctgcatttgatccgcatcccctgtggtttctaagtgtatggtctcagaactgttgcatggatcctgtgtttgcaactggggagacagaaactgtggttgatagccagtcactgccttaagaacatttgatgcaagatggccagcactgaacttttgagatatgacggtgtacttactgccttgtagcaaaataaagatgtgcccttatttt

SEQ ID NO: 199253 - DNA, 1812 bp, Homo sapiens
  Payload ID: 19308
  Gene Name: v-myb avian myeloblastosis viral oncogene homolog
  Uniprot ID: P10242
  ENST ID: ENST00000534044
  CDS Start-End: 1-1812
atggcccgaagaccccggcacagcatatatagcagtgacgaggatgatgaggactttgagatgtgtgaccatgactatgatgggctgcttcccaagtctggaaagcgtcacttggggaaaacaaggtggacccgggaagaggatgaaaaactgaagaagctggtggaacagaatggaacagatgactggaaagttattgccaattatctcccgaatcgaacagatgtgcagtgccagcaccgatggcagaaagtactaaaccctgagctcatcaagggtccttggaccaaagaagaagatcagagagtgatagagcttgtacagaaatacggtccgaaacgttggtctgttattgccaagcacttaaaggggagaattggaaaacaatgtagggagaggtggcataaccacttgaatccagaagttaagaaaacctcctggacagaagaggaagacagaattatttaccaggcacacaagagactggggaacagatgggcagaaatcgcaaagctactgcctggacgaactgataatgctatcaagaaccactggaattctacaatgcgtcggaaggtcgaacaggaaggttatctgcaggagtcttcaaaagccagccagccagcagtggccacaagcttccagaagaacagtcatttgatgggttttgctcaggctccgcctacagctcaactccctgccactggccagcccactgttaacaacgactattcctattaccacatttctgaagcacaaaatgtctccagtcatgttccataccctgtagcgttacatgtaaatatagtcaatgtccctcagccagctgccgcagccattcagagacactataatgatgaagaccctgagaaggaaaagcgaataaaggaattagaattgctcctaatgtcaaccgagaatgagctaaaaggacagcaggtgctaccaacacagaaccacacatgcagctaccccgggtggcacagcaccaccattgccgaccacaccagacctcatggagacagtgcacctgtttcctgtttgggagaacaccactccactccatctctgccagcggatcctggctccctacctgaagaaagcgcctcgccagcaaggtgcatgatcgtccaccagggcaccattctggataatgttaagaacctcttagaatttgcagaaacactccaatttatagattctttcttaaacacttccagtaaccatgaaaactcagacttggaaatgccttctttaacttccacccccctcattggtcacaaattgactgttacaacaccatttcatagagaccagactgtgaaaactcaaaaggaaaatactgtttttagaaccccagctatcaaaaggtcaatcttagaaagctctccaagaactcctacaccattcaaacatgcacttgcagctcaagaaattaaatacggtcccctgaagatgctacctcagacaccctctcatctagtagaagatctgcaggatgtgatcaaacaggaatctgatgaatctggaattgttgctgagtttcaagaaaatggaccacccttactgaagaaaatcaaacaagagaatattcttacaagctccgttttaatggcaccagcatcagaagatgaagacaatgttctcaaagcatttacagtacctaaaaacaggtccctggcgagccccttgcagccttgtagcagtacctgggaacctgcatcctgtggaaagatggaggagcagatgacatcttccagtcaagctcgtaaatacgtgaatgcattctcagcccggacgctggtcatgtga

SEQ ID NO: 199254 - DNA, 3349 bp, Homo sapiens
  Payload ID: 19308
  Gene Name: v-myb avian myeloblastosis viral oncogene homolog
  Uniprot ID: P10242
  ENST ID: ENST00000533808
  CDS Start-End: 1-1209
atggcccgaagaccccggcacagcatatatagcagtgacgaggatgatgaggactttgagatgtgtgaccatgactatgatgggctgcttcccaagtctggaaagcgtcacttggggaaaacaaggtggacccgggaagaggatgaaaaactgaagaagctggtggaacagaatggaacagatgactggaaagttattgccaattatctcccgaatcgaacagatgtgcagtgccagcaccgatggcagaaagtactaaaccctgagctcatcaagggtccttggaccaaagaagaagatcagagagtgatagagcttgtacagaaatacggtccgaaacgttggtctgttattgccaagcacttaaaggggagaattggaaaacaatgtagggagaggtggcataaccacttgaatccagaagttaagaaaacctcctggacagaagaggaagacagaattatttaccaggcacacaagagactggggaacagatgggcagaaatcgcaaagctactgcctggacgaactgataatgctatcaagaaccactggaattctacaatgcgtcggaaggtcgaacaggaaggttatctgcaggagtcttcaaaagccagccagccagcagtggccacaagcttccagaagaacagtcatttgatgggttttgctcaggctccgcctacagctcaactccctgccactggccagcccactgttaacaacgactattcctattaccacatttctgaagcacaaaatgtctccagtcatgttccataccctgtagcgttacatgtaaatatagtcaatgtccctcagccagctgccgcagccattcagagacactataatgatgaagaccctgagaaggaaaagcgaataaaggaattagaattgctcctaatgtcaaccgagaatgagctaaaaggacagcaggtgctaccaacacagaaccacacatgcagctaccccgggtggcacagcaccaccattgccgaccacaccagacctcatggagacagtgcacctgtttcctgtttgggagaacaccactccactccatctctgccagcggatcctggctccctacctgaagaaagcgcctcgccagcaaggtgcatgatcgtccaccagggcaccattctggataatgttaagaacctcttagaatttgcagaaacactccaatttatagattctatgtagagtgtcgggaggtccctgcagcacatcagagggccagccttgaggcagcccactagaccctgctctactgcagtataatagagcaactgctcatcttgaagctgttgctcaagaagccaaaccaacgggcctagtgtttgctttgcgttgagcatctctctctcagtgctgtttcagttcttaaacacttccagtaaccatgaaaactcagacttggaaatgccttctttaacttccacccccctcattggtcacaaattgactgttacaacaccatttcatagagaccagactgtgaaaactcaaaaggaaaatactgtataggacctcttctgacatccccaggaatattatatgattagaagccaagggatgattttagaaccccagctatcaaaaggtcaatcttagaaagctctccaagaactcctacaccattcaaacatgcacttgcagctcaagaaattaaatacggtcccctgaagatgctacctcagacaccctctcatctagtagaagatctgcaggatgtgatcaaacaggaatctgatgaatctggaattgttgctgagtttcaagaaaatggaccacccttactgaagaaaatcaaacaagaggtggaatctccaactgataaatcaggaaacttcttctgctcacaccactgggaaggggacagtctgaatacccaactgttcacgcagacctcgcctgtggcagatgcaccgaatattcttacaagctccgttttaatggcaccagcatcagaagatgaagacaatgttctcaaagcatttacagtacctaaaaacaggtccctggcgagccccttgcagccttgtagcagtacctgggaacctgcatcctgtggaaagatggaggagcagatgacatcttccagtcaagctcgtaaatacgtgaatgcattctcagcccggacgctggtcatgtgagacatttccagaaaagcattatggttttcagaacacttcaagttgacttgggatatatcattcctcaacatgaaacttttcatgaatgggagaagaacctatttttgttgtggtacaacagttgagagcagcaccaagtgcatttagttgaatgaagtcttcttggatttcacccaactaaaaggatttttaaaaataaataacagtcttacctaaattattaggtaatgaattgtagccagttgttaatatcttaatgcagatttttttaaaaaaaacataaaatgatttatctgtattttaaaggatccaacagatcagtattttttcctgtgatgggttttttgaaatttgacacattaaaaggtactccagtatttcacttttctcgatcactaaacatatgcatatatttttaaaaatcagtaaaagcattactctaagtgtagacttaataccatgtgacatttaatccagattgtaaatgctcatttatggttaatgacattgaaggtacatttattgtaccaaaccattttatgagttttctgttagcttgctttaaaaattattactgtaagaaatagttttataaaaaattatatttttattcagtaatttaattttgtaaatgccaaatgaaaaacgttttttgctgctatggtcttagcctgtagacatgctgctagtatcagaggggcagtagagcttggacagaaagaaaagaaacttggtgttaggtaattgactatgcactagtatttcagactttttaattttatatatatatacattttttttccttctgcaatacatttgaaaacttgtttgggagactctgcattttttattgtggtttttttgttattgttggtttatacaagcatgcgttgcacttcttttttgggagatgtgtgttgttgatgttctatgttttgttttgagtgtagcctgactgttttataatttgggagttctgcatttgatccgcatcccctgtggtttctaagtgtatggtctcagaactgttgcatggatcctgtgtttgcaactggggagacagaaactgtggttgatagccagtcactgccttaagaacatttgatgcaagatggccagcactgaacttttgagatatgacggtgtacttactgccttgtagcaaaataaagatgtgcccttatttt

SEQ ID NO: 199255 - DNA, 1973 bp, Homo sapiens
  Payload ID: 19308
  Gene Name: v-myb avian myeloblastosis viral oncogene homolog
  ENST ID: ENST00000528345
  CDS Start-End: 1-981
atggcccgaagaccccggcacagcatatatagcagtgacgaggatgatgaggactttgagatgtgtgaccatgactatgatgggctgcttcccaagtctggaaagcgtcacttggggaaaacaaggtggacccgggaagagaatcgaacagatgtgcagtgccagcaccgatggcagaaagtactaaaccctgagctcatcaagggtccttggaccaaagaagaagatcagagagtgatagagcttgtacagaaatacggtccgaaacgttggtctgttattgccaagcacttaaaggggagaattggaaaacaatgtagggagaggtggcataaccacttgaatccagaagttaagaaaacctcctggacagaagaggaagacagaattatttaccaggcacacaagagactggggaacagatgggcagaaatcgcaaagctactgcctggacgaactgataatgctatcaagaaccactggaattctacaatgcgtcggaaggtcgaacaggaaggttatctgcaggagtcttcaaaagccagccagccagcagtggccacaagcttccagaagaacagtcatttgatgggttttgctcaggctccgcctacagctcaactccctgccactggccagcccactgttaacaacgactattcctattaccacatttctgaagcacaaaatgtctccagtcatgttccataccctgtagcgttacatgtaaatatagtcaatgtccctcagccagctgccgcagccattcagagacactataatgatgaagaccctgagaaggaaaagcgaataaaggaattagaattgctcctaatgtcaaccgagaatgagctaaaaggacagcaggtgctaccattatgtgggccattactgaattctgacatctttagcgactgggcagccaactgggatggctccttgtgctttgcaacatacatagttaaccaacaaagacaataaaagagaagtgatgcccaacacagaaccacacatgcagctaccccgggtggcacagcaccaccattgccgaccacaccagacctcatggagacagtgcacctgtttcctgtttgggagaacaccactccactccatctctgccagcggatcctggctccctacctgaagaaagcgcctcgccagcaaggtgcatgatcgtccaccagggcaccattctggataatgttaagaacctcttagaatttgcagaaacactccaatttatagattctttcttaaacacttccagtaaccatgaaaactcagacttggaaatgccttctttaacttccacccccctcattggtcacaaattgactgttacaacaccatttcatagagaccagactgtgaaaactcaaaaggaaaatactgtttttagaaccccagctatcaaaaggtcaatcttagaaagctctccaagaactcctacaccattcaaacatgcacttgcagctcaagaaattaaatacggtcccctgaagatgctacctcagacaccctctcatctagtagaagatctgcaggatgtgatcaaacaggaatctgatgaatctggaattgttgctgagtttcaagaaaatggaccacccttactgaagaaaatcaaacaagaggtggaatctccaactgataaatcaggaaacttcttctgctcacaccactgggaaggggacagtctgaatacccaactgttcacgcagacctcgcctgtggcagatgcaccgaatattcttacaagctccgttttaatggcaccagcatcagaagatgaagacaatgttctcaaagcatttacagtacctaaaaacaggtccctggcgagccccttgcagccttgtagcagtacctgggaacctgcatcctgtggaaagatggaggagcagatgacatcttccagtcaagctcgtaaatacgtgaatgcattctcagcccggacgctggtcatgtga

SEQ ID NO: 199256 - DNA, 3288 bp, Homo sapiens
  Payload ID: 19308
  Gene Name: v-myb avian myeloblastosis viral oncogene homolog
  Uniprot ID: P10242
  ENST ID: ENST00000525514
  CDS Start-End: 1-1053
atggcccgaagaccccggcacagcatatatagcagtgacgaggatgatgaggactttgagatgtgtgaccatgactatgatgggctgcttcccaagtctggaaagcgtcacttggggaaaacaaggtggacccgggaagaggatgaaaaactgaagaagctggtggaacagaatggaacagatgactggaaagttattgccaattatctcccgaatcgaacagatgtgcagtgccagcaccgatggcagaaagtactaaaccctgagctcatcaagggtccttggaccaaagaagaagatcagagagtgatagagcttgtacagaaatacggtccgaaacgttggtctgttattgccaagcacttaaaggggagaattggaaaacaatgtagggagaggtggcataaccacttgaatccagaagttaagaaaacctcctggacagaagaggaagacagaattatttaccaggcacacaagagactggggaacagatgggcagaaatcgcaaagctactgcctggacgaactgataatgctatcaagaaccactggaattctacaatgcgtcggaaggtcgaacaggaaggttatctgcaggagtcttcaaaagccagccagccagcagtggccacaagcttccagaagaacagtcatttgatgggttttgctcaggctccgcctacagctcaactccctgccactggccagcccactgttaacaacgactattcctattaccacatttctgaagcacaaaatgtctccagtcatgttccataccctgtagcgttacatgtaaatatagtcaatgtccctcagccagctgccgcagccattcagagacactataatgatgaagaccctgagaaggaaaagcgaataaaggaattagaattgctcctaatgtcaaccgagaatgagctaaaaggacagcaggtgctaccattatgtgggccattactgaattctgacatctttagcgactgggcagccaactgggatggctccttgtgctttgcaacatacatagttaaccaacaaagacaataaaagagaagtgatgcccaacacagaaccacacatgcagctaccccgggtggcacagcaccaccattgccgaccacaccagacctcatggagacagtgcacctgtttcctgtttgggagaacaccactccactccatctctgccagcggatcctggctccctacctgaagaaagcgcctcgccagcaaggtgcatgatcgtccaccagggcaccattctggataatgttaagaacctcttagaatttgcagaaacactccaatttatagattctttcttaaacacttccagtaaccatgaaaactcagacttggaaatgccttctttaacttccacccccctcattggtcacaaattgactgttacaacaccatttcatagagaccagactgtgaaaactcaaaaggaaaatactgtataggacctcttctgacatccccaggaatattatatgattagaagccaagggatgattttagaaccccagctatcaaaaggtcaatcttagaaagctctccaagaactcctacaccattcaaacatgcacttgcagctcaagaaattaaatacggtcccctgaagatgctacctcagacaccctctcatctagtagaagatctgcaggatgtgatcaaacaggaatctgatgaatctggaattgttgctgagtttcaagaaaatggaccacccttactgaagaaaatcaaacaagaggtggaatctccaactgataaatcaggaaacttcttctgctcacaccactgggaaggggacagtctgaatacccaactgttcacgcagacctcgcctgtggcagatgcaccgaatattcttacaagctccgttttaatggcaccagcatcagaagatgaagacaatgttctcaaagcatttacagtacctaaaaacaggtccctggcgagccccttgcagccttgtagcagtacctgggaacctgcatcctgtggaaagatggaggagcagatgacatcttccagtcaagctcgtaaatacgtgaatgcattctcagcccggacgctggtcatgtgagacatttccagaaaagcattatggttttcagaacacttcaagttgacttgggatatatcattcctcaacatgaaacttttcatgaatgggagaagaacctatttttgttgtggtacaacagttgagagcagcaccaagtgcatttagttgaatgaagtcttcttggatttcacccaactaaaaggatttttaaaaataaataacagtcttacctaaattattaggtaatgaattgtagccagttgttaatatcttaatgcagatttttttaaaaaaaacataaaatgatttatctgtattttaaaggatccaacagatcagtattttttcctgtgatgggttttttgaaatttgacacattaaaaggtactccagtatttcacttttctcgatcactaaacatatgcatatatttttaaaaatcagtaaaagcattactctaagtgtagacttaataccatgtgacatttaatccagattgtaaatgctcatttatggttaatgacattgaaggtacatttattgtaccaaaccattttatgagttttctgttagcttgctttaaaaattattactgtaagaaatagttttataaaaaattatatttttattcagtaatttaattttgtaaatgccaaatgaaaaacgttttttgctgctatggtcttagcctgtagacatgctgctagtatcagaggggcagtagagcttggacagaaagaaaagaaacttggtgttaggtaattgactatgcactagtatttcagactttttaattttatatatatatacattttttttccttctgcaatacatttgaaaacttgtttgggagactctgcattttttattgtggtttttttgttattgttggtttatacaagcatgcgttgcacttcttttttgggagatgtgtgttgttgatgttctatgttttgttttgagtgtagcctgactgttttataatttgggagttctgcatttgatccgcatcccctgtggtttctaagtgtatggtctcagaactgttgcatggatcctgtgtttgcaactggggagacagaaactgtggttgatagccagtcactgccttaagaacatttgatgcaagatggccagcactgaacttttgagatatgacggtgtacttactgccttgtagcaaaataaagatgtgcccttatttt

SEQ ID NO: 199257 - DNA, 2911 bp, Homo sapiens
  Payload ID: 19308
  Gene Name: v-myb avian myeloblastosis viral oncogene homolog
  ENST ID: ENST00000531519
  CDS Start-End: 1-1095
atggcccgaagaccccggcacagcatatatagcagtgacgaggatgatgaggactttgagatgtgtgaccatgactatgatgggctgcttcccaagtctggaaagcgtcacttggggaaaacaaggtggacccgggaagaggatgaaaaactgaagaagctggtggaacagaatggaacagatgactggaaagttattgccaattatctcccgaatcgaacagatgtgcagtgccagcaccgatggcagaaagtactaaaccctgagctcatcaagggtccttggaccaaagaagaagatcagagagtgatagagcttgtacagaaatacggtccgaaacgttggtctgttattgccaagcacttaaaggggagaattggaaaacaatgtagggagaggtggcataaccacttgaatccagaagttaagaaaacctcctggacagaagaggaagacagaattatttaccaggcacacaagagactggggaacagatgggcagaaatcgcaaagctactgcctggacgaactgataatgctatcaagaaccactggaattctacaatgcgtcggaaggtcgaacaggaaggttatctgcaggagtcttcaaaagccagccagccagcagtggccacaagcttccagaagaacagtcatttgatgggttttgctcaggctccgcctacagctcaactccctgccactggccagcccactgttaacaacgactattcctattaccacatttctgaagcacaaaatgtctccagtcatgttccataccctgtagcgttacatgtaaatatagtcaatgtccctcagccagctgccgcagccattcagagacactataatgatgaagaccctgagaaggaaaagcgaataaaggaattagaattgctcctaatgtcaaccgagaatgagctaaaaggacagcaggtgctaccattcttaaacacttccagtaaccatgaaaactcagacttggaaatgccttctttaacttccacccccctcattggtcacaaattgactgttacaacaccatttcatagagaccagactgtgaaaactcaaaaggaaaatactgtataggacctcttctgacatccccaggaatattatatgattagaagccaagggatgattttagaaccccagctatcaaaaggtcaatcttagaaagctctccaagaactcctacaccattcaaacatgcacttgcagctcaagaaattaaatacggtcccctgaagatgctacctcagacaccctctcatctagtagaagatctgcaggatgtgatcaaacaggaatctgatgaatctggaattgttgctgagtttcaagaaaatggaccacccttactgaagaaaatcaaacaagaggtggaatctccaactgataaatcaggaaacttcttctgctcacaccactgggaaggggacagtctgaatacccaactgttcacgcagacctcgcctgtggcagatgcaccgaatattcttacaagctccgttttaatggcaccagcatcagaagatgaagacaatgttctcaaagcatttacagtacctaaaaacaggtccctggcgagccccttgcagccttgtagcagtacctgggaacctgcatcctgtggaaagatggaggagcagatgacatcttccagtcaagctcgtaaatacgtgaatgcattctcagcccggacgctggtcatgtgagacatttccagaaaagcattatggttttcagaacacttcaagttgacttgggatatatcattcctcaacatgaaacttttcatgaatgggagaagaacctatttttgttgtggtacaacagttgagagcagcaccaagtgcatttagttgaatgaagtcttcttggatttcacccaactaaaaggatttttaaaaataaataacagtcttacctaaattattaggtaatgaattgtagccagttgttaatatcttaatgcagatttttttaaaaaaaacataaaatgatttatctgtattttaaaggatccaacagatcagtattttttcctgtgatgggttttttgaaatttgacacattaaaaggtactccagtatttcacttttctcgatcactaaacatatgcatatatttttaaaaatcagtaaaagcattactctaagtgtagacttaataccatgtgacatttaatccagattgtaaatgctcatttatggttaatgacattgaaggtacatttattgtaccaaaccattttatgagttttctgttagcttgctttaaaaattattactgtaagaaatagttttataaaaaattatatttttattcagtaatttaattttgtaaatgccaaatgaaaaacgttttttgctgctatggtcttagcctgtagacatgctgctagtatcagaggggcagtagagcttggacagaaagaaaagaaacttggtgttaggtaattgactatgcactagtatttcagactttttaattttatatatatatacattttttttccttctgcaatacatttgaaaacttgtttgggagactctgcattttttattgtggtttttttgttattgttggtttatacaagcatgcgttgcacttcttttttgggagatgtgtgttgttgatgttctatgttttgttttgagtgtagcctgactgttttataatttgggagttctgcatttgatccgcatcccctgtggtttctaagtgtatggtctcagaactgttgcatggatcctgtgtttgcaactggggagacagaaactgtggttgatagccagtcactgccttaagaacatttgatgcaagatggccagcactgaacttttgagatatgacggtgtacttactgccttgtagcaaaataaagatgtgcccttatttt

SEQ ID NO: 199258 - DNA, 2866 bp, Homo sapiens
  Payload ID: 19308
  Gene Name: v-myb avian myeloblastosis viral oncogene homolog
  Uniprot ID: P10242
  ENST ID: ENST00000525369
  CDS Start-End: 7-1674
cgcgccatggcccgaagaccccggcacagcatatatagcagtgacgaggatgatgaggactttgagatgtgtgaccatgactatgatgggctgcttcccaagtctggaaagcgtcacttggggaaaacaaggtggacccgggaagaggatgaaaaactgaagaagctggtggaacagaatggaacagatgactggaaagttattgccaattatctcccgaatcgaacagatgtgcagtgccagcaccgatggcagaaagtactaaaccctgagctcatcaagggtccttggaccaaagaagaagatcagagagtgatagagcttgtacagaaatacggtccgaaacgttggtctgttattgccaagcacttaaaggggagaattggaaaacaatgtagggagaggtggcataaccacttgaatccagaagttaagaaaacctcctggacagaagaggaagacagaattatttaccaggcacacaagagactggggaacagatgggcagaaatcgcaaagctactgcctggacgaactgataatgctatcaagaaccactggaattctacaatgcgtcggaaggtcgaacaggaaggttatctgcaggagtcttcaaaagccagccagccagcagtggccacaagcttccagaagaacagtcatttgatgggttttgctcaggctccgcctacagctcaactccctgccactggccagcccactgttaacaacgactattcctattaccacatttctgaagcacaaaatgtctccagtcatgttccataccctgtagcgttacatgtaaatatagtcaatgtccctcagccagctgccgcagccattcagagacactataatgatgaagaccctgagaaggaaaagcgaataaaggaattagaattgctcctaatgtcaaccgagaatgagctaaaaggacagcaggtgctaccattcttaaacacttccagtaaccatgaaaactcagacttggaaatgccttctttaacttccacccccctcattggtcacaaattgactgttacaacaccatttcatagagaccagactgtgaaaactcaaaaggaaaatactgtttttagaaccccagctatcaaaaggtcaatcttagaaagctctccaagaactcctacaccattcaaacatgcacttgcagctcaagaaattaaatacggtcccctgaagatgctacctcagacaccctctcatctagtagaagatctgcaggatgtgatcaaacaggaatctgatgaatctggaattgttgctgagtttcaagaaaatggaccacccttactgaagaaaatcaaacaagaggtggaatctccaactgataaatcaggaaacttcttctgctcacaccactgggaaggggacagtctgaatacccaactgttcacgcagacctcgcctgtggcagatgcaccgaatattcttacaagctccgttttaatggcaccagcatcagaagatgaagacaatgttctcaaagcatttacagtacctaaaaacaggtccctggcgagccccttgcagccttgtagcagtacctgggaacctgcatcctgtggaaagatggaggagcagatgacatcttccagtcaagctcgtaaatacgtgaatgcattctcagcccggacgctggtcatgtgagacatttccagaaaagcattatggttttcagaacacttcaagttgacttgggatatatcattcctcaacatgaaacttttcatgaatgggagaagaacctatttttgttgtggtacaacagttgagagcagcaccaagtgcatttagttgaatgaagtcttcttggatttcacccaactaaaaggatttttaaaaataaataacagtcttacctaaattattaggtaatgaattgtagccagttgttaatatcttaatgcagatttttttaaaaaaaacataaaatgatttatctgtattttaaaggatccaacagatcagtattttttcctgtgatgggttttttgaaatttgacacattaaaaggtactccagtatttcacttttctcgatcactaaacatatgcatatatttttaaaaatcagtaaaagcattactctaagtgtagacttaataccatgtgacatttaatccagattgtaaatgctcatttatggttaatgacattgaaggtacatttattgtaccaaaccattttatgagttttctgttagcttgctttaaaaattattactgtaagaaatagttttataaaaaattatatttttattcagtaatttaattttgtaaatgccaaatgaaaaacgttttttgctgctatggtcttagcctgtagacatgctgctagtatcagaggggcagtagagcttggacagaaagaaaagaaacttggtgttaggtaattgactatgcactagtatttcagactttttaattttatatatatatacattttttttccttctgcaatacatttgaaaacttgtttgggagactctgcattttttattgtggtttttttgttattgttggtttatacaagcatgcgttgcacttcttttttgggagatgtgtgttgttgatgttctatgttttgttttgagtgtagcctgactgttttataatttgggagttctgcatttgatccgcatcccctgtggtttctaagtgtatggtctcagaactgttgcatggatcctgtgtttgcaactggggagacagaaactgtggttgatagccagtcactgccttaagaacatttgatgcaagatggccagcactgaacttttgagatatgacggtgtacttactgccttgtagcaaaataaagatgtgcccttattttaccta

SEQ ID NO: 199259 - DNA, 2399 bp, Homo sapiens
  Payload ID: 19308
  Gene Name: v-myb avian myeloblastosis viral oncogene homolog
  ENST ID: ENST00000526565
  CDS Start-End: 1-1044
atggcccgaagaccccggcacagcatatatagcagtgacgaggatgatgaggactttgagatgtgtgaccatgactatgatgggctgcttcccaagtctggaaagcgtcacttggggaaaacaaggtggacccgggaagaggatgaaaaactgaagaagctggtggaacagaatggaacagatgactggaaagttattgccaattatctcccgaatcgaacagatgtgcagtgccagcaccgatggcagaaagtactaaaccctgagctcatcaagggtccttggaccaaagaagaagatcagagagtgatagagcttgtacagaaatacggtccgaaacgttggtctgttattgccaagcacttaaaggggagaattggaaaacaatgtagggagaggtggcataaccacttgaatccagaagttaagaaaacctcctggacagaagaggaagacagaattatttaccaggcacacaagagactggggaacagatgggcagaaatcgcaaagctactgcctggacgaactgataatgctatcaagaaccactggaattctacaatgcgtcggaaggtcgaacaggaaggttatctgcaggagtcttcaaaagccagccagccagcagtggccacaagcttccagaagaacagtcatttgatgggttttgctcaggctccgcctacagctcaactccctgccactggccagcccactgttaacaacgactattcctattaccacatttctgaagcacaaaatgtctccagtcatgttccataccctgtagcgttacatgtaaatatagtcaatgtccctcagccagctgccgcagccattcagagacactataatgatgaagaccctgagaaggaaaagcgaataaaggaattagaattgctcctaatgtcaaccgagaatgagctaaaaggacagcagttatgtgggccattactgaattctgacatctttagcgactgggcagccaactgggatggctccttgtgctttgcaacatacatagttaaccaacaaagacaataaaagagaagtgatgcccaacacagaaccacacatgcagctaccccgggtggcacagcaccaccattgccgaccacaccagacctcatggagacagtgcacctgtttcctgtttgggagaacaccactccactccatctctgccagcggatcctggctccctacctgaagaaagcgcctcgccagcaaggtgcatgatcgtccaccagggcaccattctggataatgttaagaacctcttagaatttgcagaaacactccaatttatagattctgattcttcatcatggtgtgatctcagcagttttgaattctttgaagaagcagatttttcacctagccaacatcacacaggcaaagccctacagcttcagcaaagagagggcaatgggactaaacctgcaggagaacctagcccaagggtgaacaaacgtatgttgagtgagagttcacttgacccacccaaggtcttacctcctgcaaggcacagcacaattccactggtcatccttcgaaaaaaacggggccaggccagccccttagccactggagactgtagctccttcatatttgctgacgtcagcagttcaactcccaagcgttcccctgtcaaaagcctacccttctctccctcgcagttcttaaacacttccagtaaccatgaaaactcagacttggaaatgccttctttaacttccacccccctcattggtcacaaattgactgttacaacaccatttcatagagaccagactgtgaaaactcaaaaggaaaatactgtttttagaaccccagctatcaaaaggtcaatcttagaaagctctccaagaactcctacaccattcaaacatgcacttgcagctcaagaaattaaatacggtcccctgaagatgctacctcagacaccctctcatctagtagaagatctgcaggatgtgatcaaacaggaatctgatgaatctggaattgttgctgagtttcaagaaaatggaccacccttactgaagaaaatcaaacaagaggtggaatctccaactgataaatcaggaaacttcttctgctcacaccactgggaaggggacagtctgaatacccaactgttcacgcagacctcgcctgtggcagatgcaccgaatattcttacaagctccgttttaatggcaccagcatcagaagatgaagacaatgttctcaaagcatttacagtacctaaaaacaggtccctggcgagccccttgcagccttgtagcagtacctgggaacctgcatcctgtggaaagatggaggagcagatgacatcttccagtcaagctcgtaaatacgtgaatgcattctcagcccggacgctggtcatgtga

SEQ ID NO: 199260 - DNA, 3422 bp, Homo sapiens
  Payload ID: 19308
  Gene Name: v-myb avian myeloblastosis viral oncogene homolog
  ENST ID: ENST00000463282
  CDS Start-End: 200-1243
aatatcaacctgtttcctcctcctccttctcctcctcctccgtgacctcctcctcctctttctcctgagaaacttcgccccagcggtgcggagcgccgctgcgcagccggggagggacgcaggcaggcggcgggcagcgggaggcggcagcccggtgcggtccccgcggctctcggcggagccccgcgcccgccgcgccatggcccgaagaccccggcacagcatatatagcagtgacgaggatgatgaggactttgagatgtgtgaccatgactatgatgggctgcttcccaagtctggaaagcgtcacttggggaaaacaaggtggacccgggaagaggatgaaaaactgaagaagctggtggaacagaatggaacagatgactggaaagttattgccaattatctcccgaatcgaacagatgtgcagtgccagcaccgatggcagaaagtactaaaccctgagctcatcaagggtccttggaccaaagaagaagatcagagagtgatagagcttgtacagaaatacggtccgaaacgttggtctgttattgccaagcacttaaaggggagaattggaaaacaatgtagggagaggtggcataaccacttgaatccagaagttaagaaaacctcctggacagaagaggaagacagaattatttaccaggcacacaagagactggggaacagatgggcagaaatcgcaaagctactgcctggacgaactgataatgctatcaagaaccactggaattctacaatgcgtcggaaggtcgaacaggaaggttatctgcaggagtcttcaaaagccagccagccagcagtggccacaagcttccagaagaacagtcatttgatgggttttgctcaggctccgcctacagctcaactccctgccactggccagcccactgttaacaacgactattcctattaccacatttctgaagcacaaaatgtctccagtcatgttccataccctgtagcgttacatgtaaatatagtcaatgtccctcagccagctgccgcagccattcagagacactataatgatgaagaccctgagaaggaaaagcgaataaaggaattagaattgctcctaatgtcaaccgagaatgagctaaaaggacagcagttatgtgggccattactgaattctgacatctttagcgactgggcagccaactgggatggctccttgtgctttgcaacatacatagttaaccaacaaagacaataaaagagaagtgatgcccaacacagaaccacacatgcagctaccccgggtggcacagcaccaccattgccgaccacaccagacctcatggagacagtgcacctgtttcctgtttgggagaacaccactccactccatctctgccagcggatcctggctccctacctgaagaaagcgcctcgccagcaaggtgcatgatcgtccaccagggcaccattctggataatgttaagaacctcttagaatttgcagaaacactccaatttatagattctttcttaaacacttccagtaaccatgaaaactcagacttggaaatgccttctttaacttccacccccctcattggtcacaaattgactgttacaacaccatttcatagagaccagactgtgaaaactcaaaaggaaaatactgtttttagaaccccagctatcaaaaggtcaatcttagaaagctctccaagaactcctacaccattcaaacatgcacttgcagctcaagaaattaaatacggtcccctgaagatgctacctcagacaccctctcatctagtagaagatctgcaggatgtgatcaaacaggaatctgatgaatctggaattgttgctgagtttcaagaaaatggaccacccttactgaagaaaatcaaacaagaggtggaatctccaactgataaatcaggaaacttcttctgctcacaccactgggaaggggacagtctgaatacccaactgttcacgcagacctcgcctgtggcagatgcaccgaatattcttacaagctccgttttaatggcaccagcatcagaagatgaagacaatgttctcaaagcatttacagtacctaaaaacaggtccctggcgagccccttgcagccttgtagcagtacctgggaacctgcatcctgtggaaagatggaggagcagatgacatcttccagtcaagctcgtaaatacgtgaatgcattctcagcccggacgctggtcatgtgagacatttccagaaaagcattatggttttcagaacacttcaagttgacttgggatatatcattcctcaacatgaaacttttcatgaatgggagaagaacctatttttgttgtggtacaacagttgagagcagcaccaagtgcatttagttgaatgaagtcttcttggatttcacccaactaaaaggatttttaaaaataaataacagtcttacctaaattattaggtaatgaattgtagccagttgttaatatcttaatgcagatttttttaaaaaaaacataaaatgatttatctgtattttaaaggatccaacagatcagtattttttcctgtgatgggttttttgaaatttgacacattaaaaggtactccagtatttcacttttctcgatcactaaacatatgcatatatttttaaaaatcagtaaaagcattactctaagtgtagacttaataccatgtgacatttaatccagattgtaaatgctcatttatggttaatgacattgaaggtacatttattgtaccaaaccattttatgagttttctgttagcttgctttaaaaattattactgtaagaaatagttttataaaaaattatatttttattcagtaatttaattttgtaaatgccaaatgaaaaacgttttttgctgctatggtcttagcctgtagacatgctgctagtatcagaggggcagtagagcttggacagaaagaaaagaaacttggtgttaggtaattgactatgcactagtatttcagactttttaattttatatatatatacattttttttccttctgcaatacatttgaaaacttgtttgggagactctgcattttttattgtggtttttttgttattgttggtttatacaagcatgcgttgcacttcttttttgggagatgtgtgttgttgatgttctatgttttgttttgagtgtagcctgactgttttataatttgggagttctgcatttgatccgcatcccctgtggtttctaagtgtatggtctcagaactgttgcatggatcctgtgtttgcaactggggagacagaaactgtggttgatagccagtcactgccttaagaacatttgatgcaagatggccagcactgaacttttgagatatgacggtgtacttactgccttgtagcaaaataaagatgtgcccttatttt

SEQ ID NO: 199261 - DNA, 1818 bp, Homo sapiens
  Payload ID: 19308
  Gene Name: v-myb avian myeloblastosis viral oncogene homolog
  Uniprot ID: P10242
  ENST ID: ENST00000533624
  CDS Start-End: 1-1818
atggcccgaagaccccggcacagcatatatagcagtgacgaggatgatgaggactttgagatgtgtgaccatgactatgatgggctgcttcccaagtctggaaagcgtcacttggggaaaacaaggtggacccgggaagaggatgaaaaactgaagaagctggtggaacagaatggaacagatgactggaaagttattgccaattatctcccgaatcgaacagatgtgcagtgccagcaccgatggcagaaagtactaaaccctgagctcatcaagggtccttggaccaaagaagaagatcagagagtgatagagcttgtacagaaatacggtccgaaacgttggtctgttattgccaagcacttaaaggggagaattggaaaacaatgtagggagaggtggcataaccacttgaatccagaagttaagaaaacctcctggacagaagaggaagacagaattatttaccaggcacacaagagactggggaacagatgggcagaaatcgcaaagctactgcctggacgaactgataatgctatcaagaaccactggaattctacaatgcgtcggaaggtcgaacaggaaggttatctgcaggagtcttcaaaagccagccagccagcagtggccacaagcttccagaagaacagtcatttgatgggttttgctcaggctccgcctacagctcaactccctgccactggccagcccactgttaacaacgactattcctattaccacatttctgaagcacaaaatgtctccagtcatgttccataccctgtagcgttacatgtaaatatagtcaatgtccctcagccagctgccgcagccattcagacacagaaccacacatgcagctaccccgggtggcacagcaccaccattgccgaccacaccagacctcatggagacagtgcacctgtttcctgtttgggagaacaccactccactccatctctgccagcggatcctggctccctacctgaagaaagcgcctcgccagcaaggtgcatgatcgtccaccagggcaccattctggataatgttaagaacctcttagaatttgcagaaacactccaatttatagattctttcttaaacacttccagtaaccatgaaaactcagacttggaaatgccttctttaacttccacccccctcattggtcacaaattgactgttacaacaccatttcatagagaccagactgtgaaaactcaaaaggaaaatactgtttttagaaccccagctatcaaaaggtcaatcttagaaagctctccaagaactcctacaccattcaaacatgcacttgcagctcaagaaattaaatacggtcccctgaagatgctacctcagacaccctctcatctagtagaagatctgcaggatgtgatcaaacaggaatctgatgaatctggaattgttgctgagtttcaagaaaatggaccacccttactgaagaaaatcaaacaagaggtggaatctccaactgataaatcaggaaacttcttctgctcacaccactgggaaggggacagtctgaatacccaactgttcacgcagacctcgcctgtggcagatgcaccgaatattcttacaagctccgttttaatggcaccagcatcagaagatgaagacaatgttctcaaagcatttacagtacctaaaaacaggtccctggcgagccccttgcagccttgtagcagtacctgggaacctgcatcctgtggaaagatggaggagcagatgacatcttccagtcaagctcgtaaatacgtgaatgcattctcagcccggacgctggtcatgtga

SEQ ID NO: 199262 - DNA, 1824 bp, Homo sapiens
  Payload ID: 19308
  Gene Name: v-myb avian myeloblastosis viral oncogene homolog
  ENST ID: ENST00000531634
  CDS Start-End: 1-312
atggcccgaagaccccggcacagcatatatagcagtgacgaggatgatgaggactttgagatgtgtgaccatgactatgatgggctgcttcccaagtctggaaagcgtcacttggggaaaacaaggtggacccgggaagaggatgaaaaactgaagaagctggtggaacagaatggaacagatgactggaaagttattgccaattatctcccgaatcgaacagatgtgcagtgccagcaccgatggcagaaagtactaaaccctgagctcatcaagggtccttggaccaaagaagaagatcagagaaactgataatgctatcaagaaccactggaattctacaatgcgtcggaaggtcgaacaggaaggttatctgcaggagtcttcaaaagccagccagccagcagtggccacaagcttccagaagaacagtcatttgatgggttttgctcaggctccgcctacagctcaactccctgccactggccagcccactgttaacaacgactattcctattaccacatttctgaagcacaaaatgtctccagtcatgttccataccctgtagcgttacatgtaaatatagtcaatgtccctcagccagctgccgcagccattcagagacactataatgatgaagaccctgagaaggaaaagcgaataaaggaattagaattgctcctaatgtcaaccgagaatgagctaaaaggacagcaggtgctaccattatgtgggccattactgaattctgacatctttagcgactgggcagccaactgggatggctccttgtgctttgcaacatacatagttaaccaacaaagacaataaaagagaagtgatgcccaacacagaaccacacatgcagctaccccgggtggcacagcaccaccattgccgaccacaccagacctcatggagacagtgcacctgtttcctgtttgggagaacaccactccactccatctctgccagcggatcctggctccctacctgaagaaagcgcctcgccagcaaggtgcatgatcgtccaccagggcaccattctggataatgttaagaacctcttagaatttgcagaaacactccaatttatagattctttcttaaacacttccagtaaccatgaaaactcagacttggaaatgccttctttaacttccacccccctcattggtcacaaattgactgttacaacaccatttcatagagaccagactgtgaaaactcaaaaggaaaatactgtttttagaaccccagctatcaaaaggtcaatcttagaaagctctccaagaactcctacaccattcaaacatgcacttgcagctcaagaaattaaatacggtcccctgaagatgctacctcagacaccctctcatctagtagaagatctgcaggatgtgatcaaacaggaatctgatgaatctggaattgttgctgagtttcaagaaaatggaccacccttactgaagaaaatcaaacaagaggtggaatctccaactgataaatcaggaaacttcttctgctcacaccactgggaaggggacagtctgaatacccaactgttcacgcagacctcgcctgtggcagatgcaccgaatattcttacaagctccgttttaatggcaccagcatcagaagatgaagacaatgttctcaaagcatttacagtacctaaaaacaggtccctggcgagccccttgcagccttgtagcagtacctgggaacctgcatcctgtggaaagatggaggagcagatgacatcttccagtcaagctcgtaaatacgtgaatgcattctcagcccggacgctggtcatgtga

SEQ ID NO: 199263 - DNA, 3431 bp, Homo sapiens
  Payload ID: 19308
  Gene Name: v-myb avian myeloblastosis viral oncogene homolog
  Uniprot ID: P10242
  ENST ID: ENST00000525477
  CDS Start-End: 200-1252
aatatcaacctgtttcctcctcctccttctcctcctcctccgtgacctcctcctcctctttctcctgagaaacttcgccccagcggtgcggagcgccgctgcgcagccggggagggacgcaggcaggcggcgggcagcgggaggcggcagcccggtgcggtccccgcggctctcggcggagccccgcgcccgccgcgccatggcccgaagaccccggcacagcatatatagcagtgacgaggatgatgaggactttgagatgtgtgaccatgactatgatgggctgcttcccaagtctggaaagcgtcacttggggaaaacaaggtggacccgggaagaggatgaaaaactgaagaagctggtggaacagaatggaacagatgactggaaagttattgccaattatctcccgaatcgaacagatgtgcagtgccagcaccgatggcagaaagtactaaaccctgagctcatcaagggtccttggaccaaagaagaagatcagagagtgatagagcttgtacagaaatacggtccgaaacgttggtctgttattgccaagcacttaaaggggagaattggaaaacaatgtagggagaggtggcataaccacttgaatccagaagttaagaaaacctcctggacagaagaggaagacagaattatttaccaggcacacaagagactggggaacagatgggcagaaatcgcaaagctactgcctggacgaactgataatgctatcaagaaccactggaattctacaatgcgtcggaaggtcgaacaggaaggttatctgcaggagtcttcaaaagccagccagccagcagtggccacaagcttccagaagaacagtcatttgatgggttttgctcaggctccgcctacagctcaactccctgccactggccagcccactgttaacaacgactattcctattaccacatttctgaagcacaaaatgtctccagtcatgttccataccctgtagcgttacatgtaaatatagtcaatgtccctcagccagctgccgcagccattcagagacactataatgatgaagaccctgagaaggaaaagcgaataaaggaattagaattgctcctaatgtcaaccgagaatgagctaaaaggacagcaggtgctaccattatgtgggccattactgaattctgacatctttagcgactgggcagccaactgggatggctccttgtgctttgcaacatacatagttaaccaacaaagacaataaaagagaagtgatgcccaacacagaaccacacatgcagctaccccgggtggcacagcaccaccattgccgaccacaccagacctcatggagacagtgcacctgtttcctgtttgggagaacaccactccactccatctctgccagcggatcctggctccctacctgaagaaagcgcctcgccagcaaggtgcatgatcgtccaccagggcaccattctggataatgttaagaacctcttagaatttgcagaaacactccaatttatagattctttcttaaacacttccagtaaccatgaaaactcagacttggaaatgccttctttaacttccacccccctcattggtcacaaattgactgttacaacaccatttcatagagaccagactgtgaaaactcaaaaggaaaatactgtttttagaaccccagctatcaaaaggtcaatcttagaaagctctccaagaactcctacaccattcaaacatgcacttgcagctcaagaaattaaatacggtcccctgaagatgctacctcagacaccctctcatctagtagaagatctgcaggatgtgatcaaacaggaatctgatgaatctggaattgttgctgagtttcaagaaaatggaccacccttactgaagaaaatcaaacaagaggtggaatctccaactgataaatcaggaaacttcttctgctcacaccactgggaaggggacagtctgaatacccaactgttcacgcagacctcgcctgtggcagatgcaccgaatattcttacaagctccgttttaatggcaccagcatcagaagatgaagacaatgttctcaaagcatttacagtacctaaaaacaggtccctggcgagccccttgcagccttgtagcagtacctgggaacctgcatcctgtggaaagatggaggagcagatgacatcttccagtcaagctcgtaaatacgtgaatgcattctcagcccggacgctggtcatgtgagacatttccagaaaagcattatggttttcagaacacttcaagttgacttgggatatatcattcctcaacatgaaacttttcatgaatgggagaagaacctatttttgttgtggtacaacagttgagagcagcaccaagtgcatttagttgaatgaagtcttcttggatttcacccaactaaaaggatttttaaaaataaataacagtcttacctaaattattaggtaatgaattgtagccagttgttaatatcttaatgcagatttttttaaaaaaaacataaaatgatttatctgtattttaaaggatccaacagatcagtattttttcctgtgatgggttttttgaaatttgacacattaaaaggtactccagtatttcacttttctcgatcactaaacatatgcatatatttttaaaaatcagtaaaagcattactctaagtgtagacttaataccatgtgacatttaatccagattgtaaatgctcatttatggttaatgacattgaaggtacatttattgtaccaaaccattttatgagttttctgttagcttgctttaaaaattattactgtaagaaatagttttataaaaaattatatttttattcagtaatttaattttgtaaatgccaaatgaaaaacgttttttgctgctatggtcttagcctgtagacatgctgctagtatcagaggggcagtagagcttggacagaaagaaaagaaacttggtgttaggtaattgactatgcactagtatttcagactttttaattttatatatatatacattttttttccttctgcaatacatttgaaaacttgtttgggagactctgcattttttattgtggtttttttgttattgttggtttatacaagcatgcgttgcacttcttttttgggagatgtgtgttgttgatgttctatgttttgttttgagtgtagcctgactgttttataatttgggagttctgcatttgatccgcatcccctgtggtttctaagtgtatggtctcagaactgttgcatggatcctgtgtttgcaactggggagacagaaactgtggttgatagccagtcactgccttaagaacatttgatgcaagatggccagcactgaacttttgagatatgacggtgtacttactgccttgtagcaaaataaagatgtgcccttatttt

SEQ ID NO: 199264 - DNA, 3203 bp, Homo sapiens
  Payload ID: 19308
  Gene Name: v-myb avian myeloblastosis viral oncogene homolog
  Uniprot ID: P10242
  ENST ID: ENST00000529586
  CDS Start-End: 1-1053
atggcccgaagaccccggcacagcatatatagcagtgacgaggatgatgaggactttgagatgtgtgaccatgactatgatgggctgcttcccaagtctggaaagcgtcacttggggaaaacaaggtggacccgggaagaggatgaaaaactgaagaagctggtggaacagaatggaacagatgactggaaagttattgccaattatctcccgaatcgaacagatgtgcagtgccagcaccgatggcagaaagtactaaaccctgagctcatcaagggtccttggaccaaagaagaagatcagagagtgatagagcttgtacagaaatacggtccgaaacgttggtctgttattgccaagcacttaaaggggagaattggaaaacaatgtagggagaggtggcataaccacttgaatccagaagttaagaaaacctcctggacagaagaggaagacagaattatttaccaggcacacaagagactggggaacagatgggcagaaatcgcaaagctactgcctggacgaactgataatgctatcaagaaccactggaattctacaatgcgtcggaaggtcgaacaggaaggttatctgcaggagtcttcaaaagccagccagccagcagtggccacaagcttccagaagaacagtcatttgatgggttttgctcaggctccgcctacagctcaactccctgccactggccagcccactgttaacaacgactattcctattaccacatttctgaagcacaaaatgtctccagtcatgttccataccctgtagcgttacatgtaaatatagtcaatgtccctcagccagctgccgcagccattcagagacactataatgatgaagaccctgagaaggaaaagcgaataaaggaattagaattgctcctaatgtcaaccgagaatgagctaaaaggacagcaggtgctaccattatgtgggccattactgaattctgacatctttagcgactgggcagccaactgggatggctccttgtgctttgcaacatacatagttaaccaacaaagacaataaaagagaagtgatgcccaacacagaaccacacatgcagctaccccgggtggcacagcaccaccattgccgaccacaccagacctcatggagacagtgcacctgtttcctgtttgggagaacaccactccactccatctctgccagcggatcctggctccctacctgaagaaagcgcctcgccagcaagttcttaaacacttccagtaaccatgaaaactcagacttggaaatgccttctttaacttccacccccctcattggtcacaaattgactgttacaacaccatttcatagagaccagactgtgaaaactcaaaaggaaaatactgtataggacctcttctgacatccccaggaatattatatgattagaagccaagggatgattttagaaccccagctatcaaaaggtcaatcttagaaagctctccaagaactcctacaccattcaaacatgcacttgcagctcaagaaattaaatacggtcccctgaagatgctacctcagacaccctctcatctagtagaagatctgcaggatgtgatcaaacaggaatctgatgaatctggaattgttgctgagtttcaagaaaatggaccacccttactgaagaaaatcaaacaagaggtggaatctccaactgataaatcaggaaacttcttctgctcacaccactgggaaggggacagtctgaatacccaactgttcacgcagacctcgcctgtggcagatgcaccgaatattcttacaagctccgttttaatggcaccagcatcagaagatgaagacaatgttctcaaagcatttacagtacctaaaaacaggtccctggcgagccccttgcagccttgtagcagtacctgggaacctgcatcctgtggaaagatggaggagcagatgacatcttccagtcaagctcgtaaatacgtgaatgcattctcagcccggacgctggtcatgtgagacatttccagaaaagcattatggttttcagaacacttcaagttgacttgggatatatcattcctcaacatgaaacttttcatgaatgggagaagaacctatttttgttgtggtacaacagttgagagcagcaccaagtgcatttagttgaatgaagtcttcttggatttcacccaactaaaaggatttttaaaaataaataacagtcttacctaaattattaggtaatgaattgtagccagttgttaatatcttaatgcagatttttttaaaaaaaacataaaatgatttatctgtattttaaaggatccaacagatcagtattttttcctgtgatgggttttttgaaatttgacacattaaaaggtactccagtatttcacttttctcgatcactaaacatatgcatatatttttaaaaatcagtaaaagcattactctaagtgtagacttaataccatgtgacatttaatccagattgtaaatgctcatttatggttaatgacattgaaggtacatttattgtaccaaaccattttatgagttttctgttagcttgctttaaaaattattactgtaagaaatagttttataaaaaattatatttttattcagtaatttaattttgtaaatgccaaatgaaaaacgttttttgctgctatggtcttagcctgtagacatgctgctagtatcagaggggcagtagagcttggacagaaagaaaagaaacttggtgttaggtaattgactatgcactagtatttcagactttttaattttatatatatatacattttttttccttctgcaatacatttgaaaacttgtttgggagactctgcattttttattgtggtttttttgttattgttggtttatacaagcatgcgttgcacttcttttttgggagatgtgtgttgttgatgttctatgttttgttttgagtgtagcctgactgttttataatttgggagttctgcatttgatccgcatcccctgtggtttctaagtgtatggtctcagaactgttgcatggatcctgtgtttgcaactggggagacagaaactgtggttgatagccagtcactgccttaagaacatttgatgcaagatggccagcactgaacttttgagatatgacggtgtacttactgccttgtagcaaaataaagatgtgcccttatttt

SEQ ID NO: 199265 - DNA, 3573 bp, Homo sapiens
  Payload ID: 19308
  Gene Name: v-myb avian myeloblastosis viral oncogene homolog
  ENST ID: ENST00000616088
  CDS Start-End: 200-2182
aatatcaacctgtttcctcctcctccttctcctcctcctccgtgacctcctcctcctctttctcctgagaaacttcgccccagcggtgcggagcgccgctgcgcagccggggagggacgcaggcaggcggcgggcagcgggaggcggcagcccggtgcggtccccgcggctctcggcggagccccgcgcccgccgcgccatggcccgaagaccccggcacagcatatatagcagtgacgaggatgatgaggactttgagatgtgtgaccatgactatgatgggctgcttcccaagtctggaaagcgtcacttggggaaaacaaggtggacccgggaagaggatgaaaaactgaagaagctggtggaacagaatggaacagatgactggaaagttattgccaattatctcccgaatcgaacagatgtgcagtgccagcaccgatggcagaaagtactaaaccctgagctcatcaagggtccttggaccaaagaagaagatcagagagtgatagagcttgtacagaaatacggtccgaaacgttggtctgttattgccaagcacttaaaggggagaattggaaaacaatgtagggagaggtggcataaccacttgaatccagaagttaagaaaacctcctggacagaagaggaagacagaattatttaccaggcacacaagagactggggaacagatgggcagaaatcgcaaagctactgcctggacgaactgataatgctatcaagaaccactggaattctacaatgcgtcggaaggtcgaacaggaaggttatctgcaggagtcttcaaaagccagccagccagcagtggccacaagcttccagaagaacagtcatttgatgggttttgctcaggctccgcctacagctcaactccctgccactggccagcccactgttaacaacgactattcctattaccacatttctgaagcacaaaatgtctccagtcatgttccataccctgtagcgttacatgtaaatatagtcaatgtccctcagccagctgccgcagccattcagagacactataatgatgaagaccctgagaaggaaaagcgaataaaggaattagaattgctcctaatgtcaaccgagaatgagctaaaaggacagcaggtgctaccaacacagaaccacacatgcagctaccccgggtggcacagcaccaccattgccgaccacaccagacctcatggagacagtgcacctgtttcctgtttgggagaacaccactccactccatctctgccagcggatcctggctccctacctgaagaaagcgcctcgccagcaaggtgcatgatcgtccaccagggcaccattctggataatgttaagaacctcttagaatttgcagaaacactccaatttatagattctttcttaaacacttccagtaaccatgaaaactcagacttggaaatgccttctttaacttccacccccctcattggtcacaaattgactgttacaacaccatttcatagagaccagactgtgaaaactcaaaaggaaaatactgtttttagaaccccagctatcaaaaggtcaatcttagaaagctctccaagaactcctacaccattcaaacatgcacttgcagctcaagaaattaaatacggtcccctgaagatgctacctcagacaccctctcatctagtagaagatctgcaggatgtgatcaaacaggaatctgatgaatctggaattgttgctgagtttcaagaaaatggaccacccttactgaagaaaatcaaacaagaggtggaatctccaactgataaatcaggaaacttcttctgctcacaccactgggaaggggacagtctgaatacccaactgttcacgcagacctcgcctgtggcagatgcaccgactggagtgcaatggcacgatttcggctcactgcaacctctgcctcccgggttcaagcgattctcctgcctcagtctcccgagaagctgggattacaggcacccgccaccacgcccagctaattttgaatttttagtagagacggggtttctccatgttggtcaggctggtcttgaactcctgacctcaggtgatctacccgcctcggcctcccaaagtgctaggattacaggcgtgagccaccgcgcccggccaggtggaatattcttacaagctccgttttaatggcaccagcatcagaagatgaagacaatgttctcaaagcatttacagtacctaaaaacaggtccctggcgagccccttgcagccttgtagcagtacctgggaacctgcatcctgtggaaagatggaggagcagatgacatcttccagtcaagctcgtaaatacgtgaatgcattctcagcccggacgctggtcatgtgagacatttccagaaaagcattatggttttcagaacacttcaagttgacttgggatatatcattcctcaacatgaaacttttcatgaatgggagaagaacctatttttgttgtggtacaacagttgagagcagcaccaagtgcatttagttgaatgaagtcttcttggatttcacccaactaaaaggatttttaaaaataaataacagtcttacctaaattattaggtaatgaattgtagccagttgttaatatcttaatgcagatttttttaaaaaaaacataaaatgatttatctgtattttaaaggatccaacagatcagtattttttcctgtgatgggttttttgaaatttgacacattaaaaggtactccagtatttcacttttctcgatcactaaacatatgcatatatttttaaaaatcagtaaaagcattactctaagtgtagacttaataccatgtgacatttaatccagattgtaaatgctcatttatggttaatgacattgaaggtacatttattgtaccaaaccattttatgagttttctgttagcttgctttaaaaattattactgtaagaaatagttttataaaaaattatatttttattcagtaatttaattttgtaaatgccaaatgaaaaacgttttttgctgctatggtcttagcctgtagacatgctgctagtatcagaggggcagtagagcttggacagaaagaaaagaaacttggtgttaggtaattgactatgcactagtatttcagactttttaattttatatatatatacattttttttccttctgcaatacatttgaaaacttgtttgggagactctgcattttttattgtggtttttttgttattgttggtttatacaagcatgcgttgcacttcttttttgggagatgtgtgttgttgatgttctatgttttgttttgagtgtagcctgactgttttataatttgggagttctgcatttgatccgcatcccctgtggtttctaagtgtatggtctcagaactgttgcatggatcctgtgtttgcaactggggagacagaaactgtggttgatagccagtcactgccttaagaacatttgatgcaagatggccagcactgaacttttgagatatgacggtgtacttactgccttgtagcaaaataaagatgtgcccttattttacct

SEQ ID NO: 199266 - DNA, 3545 bp, Homo sapiens
  Payload ID: 19308
  Gene Name: v-myb avian myeloblastosis viral oncogene homolog
  ENST ID: ENST00000618728
  CDS Start-End: 200-2038
aatatcaacctgtttcctcctcctccttctcctcctcctccgtgacctcctcctcctctttctcctgagaaacttcgccccagcggtgcggagcgccgctgcgcagccggggagggacgcaggcaggcggcgggcagcgggaggcggcagcccggtgcggtccccgcggctctcggcggagccccgcgcccgccgcgccatggcccgaagaccccggcacagcatatatagcagtgacgaggatgatgaggactttgagatgtgtgaccatgactatgatgggctgcttcccaagtctggaaagcgtcacttggggaaaacaaggtggacccgggaagaggatgaaaaactgaagaagctggtggaacagaatggaacagatgactggaaagttattgccaattatctcccgaatcgaacagatgtgcagtgccagcaccgatggcagaaagtactaaaccctgagctcatcaagggtccttggaccaaagaagaagatcagagagtgatagagcttgtacagaaatacggtccgaaacgttggtctgttattgccaagcacttaaaggggagaattggaaaacaatgtagggagaggtggcataaccacttgaatccagaagttaagaaaacctcctggacagaagaggaagacagaattatttaccaggcacacaagagactggggaacagatgggcagaaatcgcaaagctactgcctggacgaactgataatgctatcaagaaccactggaattctacaatgcgtcggaaggtcgaacaggaaggttatctgcaggagtcttcaaaagccagccagccagcagtggccacaagcttccagaagaacagtcatttgatgggttttgctcaggctccgcctacagctcaactccctgccactggccagcccactgttaacaacgactattcctattaccacatttctgaagcacaaaatgtctccagtcatgttccataccctgtagcgttacatgtaaatatagtcaatgtccctcagccagctgccgcagccattcagagacactataatgatgaagaccctgagaaggaaaagcgaataaaggaattagaattgctcctaatgtcaaccgagaatgagctaaaaggacagcaggtgctaccaacacagaaccacacatgcagctaccccgggtggcacagcaccaccattgccgaccacaccagacctcatggagacagtgcacctgtttcctgtttgggagaacaccactccactccatctctgccagcggatcctggctccctacctgaagaaagcgcctcgccagcaaggtgcatgatcgtccaccagggcaccattctggataatgttaagaacctcttagaatttgcagaaacactccaatttatagattctttcttaaacacttccagtaaccatgaaaactcagacttggaaatgccttctttaacttccacccccctcattggtcacaaattgactgttacaacaccatttcatagagaccagactgtgaaaactcaaaaggaaaatactgtttttagaaccccagctatcaaaaggtcaatcttagaaagctctccaagaactcctacaccattcaaacatgcacttgcagctcaagaaattaaatacggtcccctgaagatgctacctcagacaccctctcatctagtagaagatctgcaggatgtgatcaaacaggaatctgatgaatctggaattgttgctgagtttcaagaaaatggaccacccttactgaagaaaatcaaacaagaggtggaatctccaactgataaatcaggaaacttcttctgctcacaccactgggaaggggacagtctgaatacccaactgttcacgcagacctcgcctgtggcagatgcaccgaatattcttacaagctccgttttaatggcaccagcatcagaagatgaagacaatgttctcaaagcatttacagtacctaaaaacaggtccctggcgagccccttgcaggcaaccaaagctcagagactgttccaattttaaatgaagtctgaaattagtcagacagaaaataattgcaatgtatttgactgtcagaataagaaagtcaactgtcaatgttgtgaggccgatctgaagttgaccatctgctgtcaggttttaatatcaaaagagatttcccttgtaaccctaaagtgggtgtgtgttgatgaaatataaccaattccaaattaatcctgagccagccttgtagcagtacctgggaacctgcatcctgtggaaagatggaggagcagatgacatcttccagtcaagctcgtaaatacgtgaatgcattctcagcccggacgctggtcatgtgagacatttccagaaaagcattatggttttcagaacacttcaagttgacttgggatatatcattcctcaacatgaaacttttcatgaatgggagaagaacctatttttgttgtggtacaacagttgagagcagcaccaagtgcatttagttgaatgaagtcttcttggatttcacccaactaaaaggatttttaaaaataaataacagtcttacctaaattattaggtaatgaattgtagccagttgttaatatcttaatgcagatttttttaaaaaaaacataaaatgatttatctgtattttaaaggatccaacagatcagtattttttcctgtgatgggttttttgaaatttgacacattaaaaggtactccagtatttcacttttctcgatcactaaacatatgcatatatttttaaaaatcagtaaaagcattactctaagtgtagacttaataccatgtgacatttaatccagattgtaaatgctcatttatggttaatgacattgaaggtacatttattgtaccaaaccattttatgagttttctgttagcttgctttaaaaattattactgtaagaaatagttttataaaaaattatatttttattcagtaatttaattttgtaaatgccaaatgaaaaacgttttttgctgctatggtcttagcctgtagacatgctgctagtatcagaggggcagtagagcttggacagaaagaaaagaaacttggtgttaggtaattgactatgcactagtatttcagactttttaattttatatatatatacattttttttccttctgcaatacatttgaaaacttgtttgggagactctgcattttttattgtggtttttttgttattgttggtttatacaagcatgcgttgcacttcttttttgggagatgtgtgttgttgatgttctatgttttgttttgagtgtagcctgactgttttataatttgggagttctgcatttgatccgcatcccctgtggtttctaagtgtatggtctcagaactgttgcatggatcctgtgtttgcaactggggagacagaaactgtggttgatagccagtcactgccttaagaacatttgatgcaagatggccagcactgaacttttgagatatgacggtgtacttactgccttgtagcaaaataaagatgtgcccttatttt

SEQ ID NO: 199267 - DNA, 2148 bp, Homo sapiens
  Payload ID: 19309
  Gene Name: v-myb avian myeloblastosis viral oncogene homolog-like 1
  Uniprot ID: P10243
  ENST ID: ENST00000524176
  CDS Start-End: 70-2148
cattcgccggaggctggaggaggctgacccgcgtccccgcccagcctgctcctatgcggtacttgaaggatggcgaagaggtcgcgcagtgaggatgaggatgatgaccttcagtatgccgatcatgattatgaagtaccacaacaaaaaggactgaagaaactctggaacagagtaaaatggacaagggacgaggatgataaattaaagaagttggttgaacaacatggaactgatgattggactctaattgctagtcatcttcaaaatcgctctgattttcagtgccagcatcgatggcagaaagttttaaatcctgaattgataaagggtccttggactaaagaagaagatcagagggttattgaattagttcagaaatatgggccaaaaagatggtctttaattgcaaaacatttaaaaggaagaataggcaagcagtgtagagaaagatggcataatcatctgaatcctgaggtaaagaaatcttcctggacagaagaggaggacaggatcatctatgaagcacataagcggttgggaaatcgttgggcagaaattgccaaactacttccaggaaggactgataattctatcaaaaatcattggaattctactatgcgaagaaaagtggaacaggagggctatttacaagatggaataaaatcagaacgatcttcatctaaacttcaacacaaaccttgtgcagctatggatcatatgcaaacccagaatcagttttacatacctgttcagatccctgggtatcagtatgtgtcacctgaaggcaattgtatagaacatgttcagcctacttctgcctttattcagcaacccttcattgatgaagatcctgataaggaaaagaaaataaaggaacttgagatgcttcttatgtcagctgagaatgaagttagaagaaagcgaattccatcacagcctggaagtttttctagctggtctggtagtttcctcatggatgataacatgtctaatactctaaatagccttgacgagcacactagtgagttttacagtatggatgaaaatcagcctgtgtctgctcagcagaattcacccacaaagttcctggccgtggaggcaaacgctgtgttatcctctttgcagaccatcccagaatttgcagagactctagaacttattgaatctgatcctgtagcatggagtgacgttaccagttttgatatttctgatgctgctgcttctcctatcaaatccaccccagttaaattaatgagaattcagcacaatgaaggagccatggaatgccaatttaacgtcagtcttgtacttgaagggaaaaaaaacacttgtaatggtggcaacagtgaagctgttcctttaacatccccaaatatagccaagtttagcactccaccagccatcctcagaaagaagagaaaaatgcgagtgggtcattccccaggcagcgaacttagggatggctcattgaacgatggtggtaatatggcgctaaaacatacaccactgaaaacactaccattttctccttcacagtttttcaacacatgtcctggtaatgaacaacttaatatagaaaatccttcatttacatcaacccctatttgtgggcagaaagctctcattacaactcctcttcataaggaaacaactcccaaagatcaaaaggaaaatgtagggtttagaacacctactattagaagatctatactgggtaccacaccaagaactcctactccttttaagaatgcgcttgctgctcaggagaaaaaatatggacctcttaaaattgtgtcccagccacttgctttcttggaagaagatattcgggaagttttaaaagaagaaactggaacagacctattcctcaaagaggaagatgaacctgcttacaaaagctgcaaacaagagaataccgcttctgggaagaaagtcagaaaatcactagtcttagataattgggaaaaagaagaatcaggcactcaactgttgactgaagacatttcagacatgcagtcaaattgtgaatgggaaacagtggtttatgggaagacagaagaccaacttattatgactgaacaagcaagaagatatctgagtacttacacagctaccagtagtacttcaagagctctcatactgtaa

SEQ ID NO: 199268 - DNA, 1714 bp, Homo sapiens
  Payload ID: 19309
  Gene Name: v-myb avian myeloblastosis viral oncogene homolog-like 1
  ENST ID: ENST00000517885
  CDS Start-End: 457-1689
aaacggcggctcttgagggaggctgggcgcgagattcggcggtgcggacaaaaccctgcaggagactgcgagccctgcagaactgctagctgcgggggagagggcaggggtcgggcgcctgtggcggagccgggctggggccagggcagggaggctgacaagcggcgggagaagccggcggagggcgggatcgcgcctcctgacatgttgggggtatccctggccgggccgggccggggctaagagcggcgctgcgggccggggtcggggtcgggtcgcggtccgcccccgctgtccctccgtcctgccctgtcgaggacgtgcgttccgcactcggccgcctccagagggagcgagggaagcggctagaggatcggggagaaggagcattcgccggaggctggaggaggctgacccgcgtccccgcccagcctgctcctatgcggtacttgaaggatggcgaagaggtcgcgcagtgaggatgaggatgatgaccttcagtatgccgatcatgattatgaagtaccacaacaaaaaggactgaagaaactctggaacagagtaaaatggacaagggacgaggatgataaattaaagaagttggttgaacaacatggaactgatgattggactctaattgctagtcatcttcaaaatcgctctgattttcagtgccagcatcgatggcagaaagttttaaatcctgaattgataaagggtccttggactaaagaagaagatcagagggttattgaattagttcagaaatatggaaagaagagaaaaatgcgagtgggtcattccccaggcagcgaacttagggatggctcattgaacgatggtggtaatatggcgctaaaacatacaccactgaaaacactaccattttctccttcacagtttttcaacacatgtcctggtaatgaacaacttaatatagaaaatccttcatttacatcaacccctatttgtgggcagaaagctctcattacaactcctcttcataaggaaacaactcccaaagatcaaaaggaaaatgtagggtttagaacacctactattagaagatctatactgggtaccacaccaagaactcctactccttttaagaatgcgcttgctgctcaggagaaaaaatatggacctcttaaaattgtgtcccagccacttgctttcttggaagaagatattcgggaagttttaaaagaagaaactggaacagacctattcctcaaagaggaagatgaacctgcttacaaaagctgcaaacaagagaataccgcttctgggaagaaagtcagaaaatcactagtcttagataattgggaaaaagaagaatcaggcactcaactgttgactgaagacatttcagacatgcagtcagaaaatagatttactacatccttattaatgataccattattggaaatacatgacaataggtgcaacttgattcctgaaaaacaagatataaattcaaccaacaaaacatatacacttactaaaaagaaaccaaaccctaacacttccaaagttgtcaaattggaaaagaatcttcagtcaaattgtgaatgggaaacagtggtttatgggaagacagaagaccaacttattatgactgaacaagcaagaagatatctgagtacttacacagctaccagtagtacttcaagagctctcatactgtaattgttattaaaattgatgaaatgcc

SEQ ID NO: 199269 - DNA, 5192 bp, Homo sapiens
  Payload ID: 19309
  Gene Name: v-myb avian myeloblastosis viral oncogene homolog-like 1
  Uniprot ID: P10243
  ENST ID: ENST00000522677
  CDS Start-End: 412-2670
ggacaaaaccctgcaggagactgcgagccctgcagaactgctagctgcgggggagagggcaggggtcgggcgcctgtggcggagccgggctggggccagggcagggaggctgacaagcggcgggagaagccggcggagggcgggatcgcgcctcctgacatgttgggggtatccctggccgggccgggccggggctaagagcggcgctgcgggccggggtcggggtcgggtcgcggtccgcccccgctgtccctccgtcctgccctgtcgaggacgtgcgttccgcactcggccgcctccagagggagcgagggaagcggctagaggatcggggagaaggagcattcgccggaggctggaggaggctgacccgcgtccccgcccagcctgctcctatgcggtacttgaaggatggcgaagaggtcgcgcagtgaggatgaggatgatgaccttcagtatgccgatcatgattatgaagtaccacaacaaaaaggactgaagaaactctggaacagagtaaaatggacaagggacgaggatgataaattaaagaagttggttgaacaacatggaactgatgattggactctaattgctagtcatcttcaaaatcgctctgattttcagtgccagcatcgatggcagaaagttttaaatcctgaattgataaagggtccttggactaaagaagaagatcagagggttattgaattagttcagaaatatgggccaaaaagatggtctttaattgcaaaacatttaaaaggaagaataggcaagcagtgtagagaaagatggcataatcatctgaatcctgaggtaaagaaatcttcctggacagaagaggaggacaggatcatctatgaagcacataagcggttgggaaatcgttgggcagaaattgccaaactacttccaggaaggactgataattctatcaaaaatcattggaattctactatgcgaagaaaagtggaacaggagggctatttacaagatggaataaaatcagaacgatcttcatctaaacttcaacacaaaccttgtgcagctatggatcatatgcaaacccagaatcagttttacatacctgttcagatccctgggtatcagtatgtgtcacctgaaggcaattgtatagaacatgttcagcctacttctgcctttattcagcaacccttcattgatgaagatcctgataaggaaaagaaaataaaggaacttgagatgcttcttatgtcagctgagaatgaagttagaagaaagcgaattccatcacagcctggaagtttttctagctggtctggtagtttcctcatggatgataacatgtctaatactctaaatagccttgacgagcacactagtgagttttacagtatggatgaaaatcagcctgtgtctgctcagcagaattcacccacaaagttcctggccgtggaggcaaacgctgtgttatcctctttgcagaccatcccagaatttgcagagactctagaacttattgaatctgatcctgtagcatggagtgacgttaccagttttgatatttctgatgctgctgcttctcctatcaaatccaccccagttaaattaatgagaattcagcacaatgaaggagccatggaatgccaatttaacgtcagtcttgtacttgaagggaaaaaaaacacttgtaatggtggcaacagtgaagctgttcctttaacatccccaaatatagccaagtttagcactccaccagccatcctcagaaagaagagaaaaatgcgagtgggtcattccccaggcagcgaacttagggatggctcattgaacgatggtggtaatatggcgctaaaacatacaccactgaaaacactaccattttctccttcacagtttttcaacacatgtcctggtaatgaacaacttaatatagaaaatccttcatttacatcaacccctatttgtgggcagaaagctctcattacaactcctcttcataaggaaacaactcccaaagatcaaaaggaaaatgtagggtttagaacacctactattagaagatctatactgggtaccacaccaagaactcctactccttttaagaatgcgcttgctgctcaggagaaaaaatatggacctcttaaaattgtgtcccagccacttgctttcttggaagaagatattcgggaagttttaaaagaagaaactggaacagacctattcctcaaagaggaagatgaacctgcttacaaaagctgcaaacaagagaataccgcttctgggaagaaagtcagaaaatcactagtcttagataattgggaaaaagaagaatcaggcactcaactgttgactgaagacatttcagacatgcagtcagaaaatagatttactacatccttattaatgataccattattggaaatacatgacaataggtgcaacttgattcctgaaaaacaagatataaattcaaccaacaaaacatatacacttactaaaaagaaaccaaaccctaacacttccaaagttgtcaaattggaaaagaatcttcagtcaaattgtgaatgggaaacagtggtttatgggaagacagaagaccaacttattatgactgaacaagcaagaagatatctgagtacttacacagctaccagtagtacttcaagagctctcatactgtaattgttattaaaattgatgaaatgccccactcccttactgcagtctctactaaattaggttgcagtgaaatttttctcaattagttgtttttaaagttgtaagatagcccttttaatacagcatcttttttctattctatatagtaggcagaaagctagtaagtcacttaaggggtagatagtttcatagtttattttttaagagatgagatttttaaaaattgtttttaaagaacaagatgggaaaataatagaatgttcatggatttctaaaagtaaattctcatatattttcttcacaagatatatgttgctactctcttgatgctgcagttttgttatagataggtgtatgagtatatatgatttctgaaattagtctatgtatggaaagcacacatgattttatgaagtacttttgcccatgtgctgatttacttaggctaccatttacaaagaaacacattgaaaaggaatttaaaggaaggatagaaagttgcactactaattttttgttttttttttcagaagcagtaaaattaactacagtgttaaatgtatttatttgagcatagtactgaaaacaaaaagcattcaaaaaagagttttttctttattagtaaatagtattttcttaatctcagaggagctgagagttttgttgaatgtattgtacagtatgtaggagcaggagaactttgtaaattggaaagaagtctgtttttataatttatttttatttttaaagcttaaatgtagatatttatacgtatacagggtgcctagaagccaatgttgtttcctgttattacagctaacacagtaaagaataattttgactttaagtatgaaacagtagtaagttatagctgcaaagaatacaatatctatactgtatgtcacatctacctaaatgttgcactatgccctttaaatcatgctggttataaagtagttctaaaaatgtactaaataataatttaatattttctttttaaattatatcgggggtggtcatatacattaatctggtgatttgtatatgtgtttgaaatttttgcattttgtttaaaaaataatatggtaccttggtccctaaaaacagtctgcacttagaagtttatatttactcagtgtttcagaagtggagaacattatcttttatttataaaaatattttgtccttttttaaatgttttgtgtttctctacaggttacaacagttgcttcagttgcctgttttaggtgtttgcacttattttatttcttcttgaaagaatttttatttgcttttgtggtagagattatatgtaattttttttcagtcatataatggtgtgctgtcaacttaaacactgacaggtaaatagaattgtacactgtagtttgaattatttataattgacacactctctccctctccactcctgaagtatgctgctatagaaaatagcagaatcggcttgctgctacgagagaaggaaagagcgaccaccacttgcactgtgtgaaaagataaaaaacaaatgatggcaagttctcaagttaactaaatggaatcaaccattaccaggcaaattcttgcaaataccaaaatactactatgccttataaaacaaaatgaaagcaggttaagattttctgctctgtttgtatgttaatagaaatggaaatactaagtattttaatgcttagctcttgaacagtagacctaaaagggttttaagctatttaaatctacttgctagtttttgcatattttatatatatatatatttatatatatatatagtgagaagtgaagaaaatgtatggtactaagattatgccttattgataaatagataaaccaatttgaatcctcttagcatgtttaagtatgttgattgctttctaattaatgaacttctcacagaaatttcacttagtgaaaccaatgattgtagcaaactcatactggatcatttcagttaccttgaactaatagcacataatggttttttgttgttgttgtttttaatgtagcccttacctggatatacatagtctgcaatcaccaaagtataatatcttgtaaggctatattttttaaagcatattttttcttgagcattaaattatcctaaatggtaatatattgtggataagtctgggcttattggacataatacatatttgggttggtactggttgaatccttcagttaactgctttgttgctttttgcaagattttttatcttaaacatgtcaggcatcttaagtcacctttatactgttttgttcctctgagtttctttcagtatgttatacaaatgccagacataacatgtagcagccatacttgcatggaaactgactacacatacataatactgcattttattgtaaggttttcacattaatacagcaattaccctgactaaattgagttttgtgatatatggaaaacttcattgtaagagaatcttgcatacaatgttgacatattaacatccaaaataaagcatctgtgtacaagctga

SEQ ID NO: 199270 - DNA, 2639 bp, Homo sapiens
  Payload ID: 19310
  Gene Name: v-myb avian myeloblastosis viral oncogene homolog-like 2
  Uniprot ID: P10244
  ENST ID: ENST00000217026
  CDS Start-End: 128-2230
gctgacgccttcgagcgcggcccggggcccggagcggccggagcagcccgggtcctgaccccggcccggctcccgctccgggctctgccggcgggcgggcgagcgcggcgcggtccgggccggggggatgtctcggcggacgcgctgcgaggatctggatgagctgcactaccaggacacagattcagatgtgccggagcagagggatagcaagtgcaaggtcaaatggacccatgaggaggacgagcagctgagggccctggtgaggcagtttggacagcaggactggaagttcctggccagccacttccctaaccgcactgaccagcaatgccagtacaggtggctgagagttttgaatccagaccttgtcaaggggccatggaccaaagaggaagaccaaaaagtcatcgagctggttaagaagtatggcacaaagcagtggacactgattgccaagcacctgaagggccggctggggaagcagtgccgtgaacgctggcacaaccacctcaaccctgaggtgaagaagtcttgctggaccgaggaggaggaccgcatcatctgcgaggcccacaaggtgctgggcaaccgctgggccgagatcgccaagatgttgccagggaggacagacaatgctgtgaagaatcactggaactctaccatcaaaaggaaggtggacacaggaggcttcttgagcgagtccaaagactgcaagcccccagtgtacttgctgctggagctcgaggacaaggacggcctccagagtgcccagcccacggaaggccagggaagtcttctgaccaactggccctccgtccctcctaccataaaggaggaggaaaacagtgaggaggaacttgcagcagccaccacatcgaaggaacaggagcccatcggtacagatctggacgcagtgcgaacaccagagcccttggaggaattcccgaagcgtgaggaccaggaaggctccccaccagaaacgagcctgccttacaagtgggtggtggaggcagctaacctcctcatccctgctgtgggttctagcctctctgaagccctggacttgatcgagtcggaccctgatgcttggtgtgacctgagtaaatttgacctccctgaggaaccatctgcagaggacagtatcaacaacagcctagtgcagctgcaagcgtcacatcagcagcaagtcctgccaccccgccagccttccgccctggtgcccagtgtgaccgagtaccgcctggatggccacaccatctcagacctgagccggagcagccggggcgagctgatccccatctcccccagcactgaagtcgggggctctggcattggcacaccgccctctgtgctcaagcggcagaggaagaggcgtgtggctctgtcccctgtcactgagaatagcaccagtctgtccttcctggattcctgtaacagcctcacgcccaagagcacacctgttaagaccctgcccttctcgccctcccagtttctgaacttctggaacaaacaggacacattggagctggagagcccctcgctgacatccaccccagtgtgcagccagaaggtggtggtcaccacaccactgcaccgggacaagacacccctgcaccagaaacatgctgcgtttgtaaccccagatcagaagtactccatggacaacactccccacacgccaaccccgttcaagaacgccctggagaagtacggacccctgaagcccctgccacagaccccgcacctggaggaggacttgaaggaggtgctgcgttctgaggctggcatcgaactcatcatcgaggacgacatcaggcccgagaagcagaagaggaagcctgggctgcggcggagccccatcaagaaagtccggaagtctctggctcttgacattgtggatgaggatgtgaagctgatgatgtccacactgcccaagtctctatccttgccgacaactgccccttcaaactcttccagcctcaccctgtcaggtatcaaagaagacaacagcttgctcaaccagggcttcttgcaggccaagcccgagaaggcagcagtggcccagaagccccgaagccacttcacgacacctgcccctatgtccagtgcctggaagacggtggcctgcggggggaccagggaccagcttttcatgcaggagaaagcccggcagctcctgggccgcctgaagcccagccacacatctcggaccctcatcttgtcctgaggtgttgagggtgtcacgagcccattctcatgtttacaggggttgtgggggcagagggggtctgtgaatctgagagtcattcaggtgacctcctgcagggagccttctgccaccagcccctccccagactctcaggtggaggcaacagggccatgtgctgccctgttgccgagcccagctgtgggcggctcctggtgctaacaacaaagttccacttccaggtctgcctggttccctccccaaggccacagggagctccgtcagcttctcccaagcccacgtcaggcctggcctcatctcagaccctgcttaggatgggggatgtggccaggggtgctcctgtgctcaccctctcttggtgcatttttttggaagaataaaattgcctctctctttgtgctggtctgga

SEQ ID NO: 199271 - DNA, 2704 bp, Homo sapiens
  Payload ID: 19310
  Gene Name: v-myb avian myeloblastosis viral oncogene homolog-like 2
  Uniprot ID: P10244
  ENST ID: ENST00000396863
  CDS Start-End: 266-2296
actcaggcccctcccccggcgcccgcgcgccaggactgggcggcgccgacgcgcttggcgggagatagaaaagtgcttcaacccgcgccggcggcgactgcagttcctgcgagcgaggagcgcgggacctgctgacacgctgacgccttcgagcgcggcccggggcccggagcggccggagcagcccgggtcctgaccccggcccggctcccgctccgggctctgccggcgggcgggcgagcgcggcgcggtccgggccggggggatgtctcggcggacgcgctgcgaggatctggatgagctgcactaccaggacacagattcagatgtgccggagcagagggatagcaagtgcaaggtcaaatggacccatgaggagaaccgcactgaccagcaatgccagtacaggtggctgagagttttgaatccagaccttgtcaaggggccatggaccaaagaggaagaccaaaaagtcatcgagctggttaagaagtatggcacaaagcagtggacactgattgccaagcacctgaagggccggctggggaagcagtgccgtgaacgctggcacaaccacctcaaccctgaggtgaagaagtcttgctggaccgaggaggaggaccgcatcatctgcgaggcccacaaggtgctgggcaaccgctgggccgagatcgccaagatgttgccagggaggacagacaatgctgtgaagaatcactggaactctaccatcaaaaggaaggtggacacaggaggcttcttgagcgagtccaaagactgcaagcccccagtgtacttgctgctggagctcgaggacaaggacggcctccagagtgcccagcccacggaaggccagggaagtcttctgaccaactggccctccgtccctcctaccataaaggaggaggaaaacagtgaggaggaacttgcagcagccaccacatcgaaggaacaggagcccatcggtacagatctggacgcagtgcgaacaccagagcccttggaggaattcccgaagcgtgaggaccaggaaggctccccaccagaaacgagcctgccttacaagtgggtggtggaggcagctaacctcctcatccctgctgtgggttctagcctctctgaagccctggacttgatcgagtcggaccctgatgcttggtgtgacctgagtaaatttgacctccctgaggaaccatctgcagaggacagtatcaacaacagcctagtgcagctgcaagcgtcacatcagcagcaagtcctgccaccccgccagccttccgccctggtgcccagtgtgaccgagtaccgcctggatggccacaccatctcagacctgagccggagcagccggggcgagctgatccccatctcccccagcactgaagtcgggggctctggcattggcacaccgccctctgtgctcaagcggcagaggaagaggcgtgtggctctgtcccctgtcactgagaatagcaccagtctgtccttcctggattcctgtaacagcctcacgcccaagagcacacctgttaagaccctgcccttctcgccctcccagtttctgaacttctggaacaaacaggacacattggagctggagagcccctcgctgacatccaccccagtgtgcagccagaaggtggtggtcaccacaccactgcaccgggacaagacacccctgcaccagaaacatgctgcgtttgtaaccccagatcagaagtactccatggacaacactccccacacgccaaccccgttcaagaacgccctggagaagtacggacccctgaagcccctgccacagaccccgcacctggaggaggacttgaaggaggtgctgcgttctgaggctggcatcgaactcatcatcgaggacgacatcaggcccgagaagcagaagaggaagcctgggctgcggcggagccccatcaagaaagtccggaagtctctggctcttgacattgtggatgaggatgtgaagctgatgatgtccacactgcccaagtctctatccttgccgacaactgccccttcaaactcttccagcctcaccctgtcaggtatcaaagaagacaacagcttgctcaaccagggcttcttgcaggccaagcccgagaaggcagcagtggcccagaagccccgaagccacttcacgacacctgcccctatgtccagtgcctggaagacggtggcctgcggggggaccagggaccagcttttcatgcaggagaaagcccggcagctcctgggccgcctgaagcccagccacacatctcggaccctcatcttgtcctgaggtgttgagggtgtcacgagcccattctcatgtttacaggggttgtgggggcagagggggtctgtgaatctgagagtcattcaggtgacctcctgcagggagccttctgccaccagcccctccccagactctcaggtggaggcaacagggccatgtgctgccctgttgccgagcccagctgtgggcggctcctggtgctaacaacaaagttccacttccaggtctgcctggttccctccccaaggccacagggagctccgtcagcttctcccaagcccacgtcaggcctggcctcatctcagaccctgcttaggatgggggatgtggccaggggtgctcctgtgctcaccctctcttggtgcatttttttggaagaataaaattgcctctctctttgtgctggtctgg

SEQ ID NO: 199272 - DNA, 2042 bp, Homo sapiens
  Payload ID: 19311
  Gene Name: v-myc avian myelocytomatosis viral oncogene homolog
  ENST ID: ENST00000259523
  CDS Start-End: 1206-1979
ggagtttattcataacgcgctctccaagtatacgtggcaatgcgttgctgggttattttaatcattctaggcatcgttttcctccttatgcctctatcattcctccctatctacactaacatcccacgctctgaacgcgcgcccattaatacccttctttcctccactctccctgggactcttgatcaaagcgcggccctttccccagccttagcgaggcgccctgcagcctggtacgcgcgtggcgtggcggtgggcgcgcagtgcgttctcggtgtggagggcagctgttccgcctgcgatgatttatactcacaggacaaggatgcggtttgtcaaacagtactgctacggaggagcagcagagaaagggagagggtttgagagggagcaaaagaaaatggtaggcgcgcgtagttaattcatgcggctctcttactctgtttacatcctagagctagagtgctcggctgcccggctgagtctcctccccaccttccccaccctccccaccctccccataagcgcccctcccgggttcccaaagcagagggcgtgggggaaaagaaaaaagatcctctctcgctaatctccgcccaccggccctttataatgcgagggtctggacggctgaggacccccgagctgtgctgctcgcggccgccaccgccgggccccggccgtccctggctcccctcctgcctcgagaagggcagggcttctcagaggcttggcgggaaaaagaacggagggagggatcgcgctgagtataaaagccggttttcggggctttatctaactcgctgtagtaattccagcgagaggcagagggagcgagcgggcggccggctagggtggaagagccgggcgagcagagctgcgctgcgggcgtcctgggaagggagatccggagcgaatagggggcttcgcctctggcccagccctcccgctgatcccccagccagcggtccgcaacccttgccgcatccacgaaactttgcccatagcagcgggcgggcactttgcactggaacttacaacacccgagcaaggacgcgactctcccgacgcggggaggctattctgcccatttggggacacttccccgccgctgccaggacccgcttctctgaaaggctctccttgcagctgcttagacgctggatttttttcgggtagtggaaaaccagcagcctcccgcgacgatgcccctcaacgttagcttcaccaacaggaactatgacctcgactacgactcggtgcagccgtatttctactgcgacgaggaggagaacttctaccagcagcagcagcagagcgagctgcagcccccggcgcccagcgaggatatctggaagaaattcgagctgctgcccaccccgcccctgtcccctagccgccgctccgggctctgctcgccctcctacgttgcggtcacacccttctcccttcggggagacaacgacggcggtggcgggagcttctccacggccgaccagctggagatggtgaccgagctgctgggaggagacatggtgaaccagagtttcatctgcgacccggacgacgagaccttcatcaaaaacatcatcatccaggactgtatgtggagcggcttctcggccgccgccaagctcgtctcagagaagctggcctcctaccaggctgcgcgcaaagacagcggcagcccgaaccccgcccgcggccacagcgtctgctccacctccagcttgtacctgcaggatctgagcgccgccgcctcagagtgcatcgacccctcggtggtcttcccctaccctctcaacgacagcagctcgcccaagtcctgcgcctcgcaagactccagcgccttctctccgtcctcggattctctgctctcctcgacggagtcctccccgcagggcagccccgagcccctggtgctccatgaggagacaccgcccaccaccagcagcgactctggaggaacaagaagatgaggaagaaatcgatgttgtttctgtggaaaagaggcaggctcctggcaaaaggtcagagtctgg

SEQ ID NO: 199273 - DNA, 2351 bp, Homo sapiens
  Payload ID: 19311
  Gene Name: v-myc avian myelocytomatosis viral oncogene homolog
  Uniprot ID: P01106
  ENST ID: ENST00000377970
  CDS Start-End: 556-1875
ctgctcgcggccgccaccgccgggccccggccgtccctggctcccctcctgcctcgagaagggcagggcttctcagaggcttggcgggaaaaagaacggagggagggatcgcgctgagtataaaagccggttttcggggctttatctaactcgctgtagtaattccagcgagaggcagagggagcgagcgggcggccggctagggtggaagagccgggcgagcagagctgcgctgcgggcgtcctgggaagggagatccggagcgaatagggggcttcgcctctggcccagccctcccgctgatcccccagccagcggtccgcaacccttgccgcatccacgaaactttgcccatagcagcgggcgggcactttgcactggaacttacaacacccgagcaaggacgcgactctcccgacgcggggaggctattctgcccatttggggacacttccccgccgctgccaggacccgcttctctgaaaggctctccttgcagctgcttagacgctggatttttttcgggtagtggaaaaccagcagcctcccgcgacgatgcccctcaacgttagcttcaccaacaggaactatgacctcgactacgactcggtgcagccgtatttctactgcgacgaggaggagaacttctaccagcagcagcagcagagcgagctgcagcccccggcgcccagcgaggatatctggaagaaattcgagctgctgcccaccccgcccctgtcccctagccgccgctccgggctctgctcgccctcctacgttgcggtcacacccttctcccttcggggagacaacgacggcggtggcgggagcttctccacggccgaccagctggagatggtgaccgagctgctgggaggagacatggtgaaccagagtttcatctgcgacccggacgacgagaccttcatcaaaaacatcatcatccaggactgtatgtggagcggcttctcggccgccgccaagctcgtctcagagaagctggcctcctaccaggctgcgcgcaaagacagcggcagcccgaaccccgcccgcggccacagcgtctgctccacctccagcttgtacctgcaggatctgagcgccgccgcctcagagtgcatcgacccctcggtggtcttcccctaccctctcaacgacagcagctcgcccaagtcctgcgcctcgcaagactccagcgccttctctccgtcctcggattctctgctctcctcgacggagtcctccccgcagggcagccccgagcccctggtgctccatgaggagacaccgcccaccaccagcagcgactctgaggaggaacaagaagatgaggaagaaatcgatgttgtttctgtggaaaagaggcaggctcctggcaaaaggtcagagtctggatcaccttctgctggaggccacagcaaacctcctcacagcccactggtcctcaagaggtgccacgtctccacacatcagcacaactacgcagcgcctccctccactcggaaggactatcctgctgccaagagggtcaagttggacagtgtcagagtcctgagacagatcagcaacaaccgaaaatgcaccagccccaggtcctcggacaccgaggagaatgtcaagaggcgaacacacaacgtcttggagcgccagaggaggaacgagctaaaacggagcttttttgccctgcgtgaccagatcccggagttggaaaacaatgaaaaggcccccaaggtagttatccttaaaaaagccacagcatacatcctgtccgtccaagcagaggagcaaaagctcatttctgaagaggacttgttgcggaaacgacgagaacagttgaaacacaaacttgaacagctacggaactcttgtgcgtaaggaaaagtaaggaaaacgattccttctaacagaaatgtcctgagcaatcacctatgaacttgtttcaaatgcatgatcaaatgcaacctcacaaccttggctgagtcttgagactgaaagatttagccataatgtaaactgcctcaaattggactttgggcataaaagaacttttttatgcttaccatcttttttttttctttaacagatttgtatttaagaattgtttttaaaaaattttaagatttacacaatgtttctctgtaaatattgccattaaatgtaaataactttaataaaacgtttatagcagttacacagaatttcaatcctagtatatagtacctagtattataggtactataaaccctaattttttttatttaagtacattttgctttttaaagttgatttttttctattgtttttagaaaaaataaaataactggcaaatatatcattgagccaaatcttaa

SEQ ID NO: 199274 - DNA, 1023 bp, Homo sapiens
  Payload ID: 19311
  Gene Name: v-myc avian myelocytomatosis viral oncogene homolog
  ENST ID: ENST00000517291
  CDS Start-End: 472-1023
ttatgcctctatcattcctccctatctacactaacatcccacgctctgaacgcgcgcccattaatacccttctttcctccactctccctgggactcttgatcaaagcgcggccctttccccagccttagcgaggcgccctgcagcctggtacgcgcgtggcgtggcggtgggcgcgcagtgcgttctcggtgtggagggcagctgttccgcctgcgatgatttatactcacaggacaaggatgcggtttgtcaaacagtactgctacggaggagcagcagagaaagggagagggtttgagagggagcaaaagaaaatgcagcgggcgggcactttgcactggaacttacaacacccgagcaaggacgcgactctcccgacgcggggaggctattctgcccatttggggacacttccccgccgctgccaggacccgcttctctgaaaggctctccttgcagctgcttagacgctggatttttttcgggtagtggaaaaccagcctcccgcgacgatgcccctcaacgttagcttcaccaacaggaactatgacctcgactacgactcggtgcagccgtatttctactgcgacgaggaggagaacttctaccagcagcagcagcagagcgagctgcagcccccggcgcccagcgaggatatctggaagaaattcgagctgctgcccaccccgcccctgtcccctagccgccgctccgggctctgctcgccctcctacgttgcggtcacacccttctcccttcggggagacaacgacggcggtggcgggagcttctccacggccgaccagctggagatggtgaccgagctgctgggaggagacatggtgaaccagagtttcatctgcgacccggacgacgagaccttcatcaaaaacatcatcatccaggactgtatgtggagcggcttctcggccgccgccaagctcgtctcagagaagctggcctcctaccaggctgcgcgcaaagacagcggcagcccgaaccccgcccgcggccacagcgtc

SEQ ID NO: 199275 - DNA, 577 bp, Homo sapiens
  Payload ID: 19311
  Gene Name: v-myc avian myelocytomatosis viral oncogene homolog
  ENST ID: ENST00000520751
  CDS Start-End: 399-577
aactcgctgtagtaattccagcgagaggcagagggagcgagcgggcggccggctagggtggaagagccgggcgagcagagctgcgctgcgggcgtcctgggaagggagatccggagcgaatagggggcttcgcctctggcccagccctcccgctgatcccccagccagcggtccgcaacccttgccgcatccacgaaactttgcccatagcagcgggcgggcactttgcactggaacttacaacacccgagcaaggacgcgactctcccgacgcggggaggctattctgcccatttggggacacttccccgccgctgccaggacccgcttctctgaaaggctctccttgcagctgcttagacgctggatttttttcgggtagtggaaaaccaggaactatgacctcgactacgactcggtgcagccgtatttctactgcgacgaggaggagaacttctaccagcagcagcagcagagcgagctgcagcccccggcgcccagcgaggatatctggaagaaattcgagctgctgcccaccccgcccctgtcccctagccgccgctccgggctctgctcg

SEQ ID NO: 199276 - DNA, 2150 bp, Homo sapiens
  Payload ID: 19311
  Gene Name: v-myc avian myelocytomatosis viral oncogene homolog
  ENST ID: ENST00000524013
  CDS Start-End: 375-1736
gggctttatctaactcgctgtagtaattccagcgagaggcagagggagcgagcgggcggccggctagggtggaagagccgggcgagcagagctgcgctgcgggcgtcctgggaagggagatccggagcgaatagggggcttcgcctctggcccagccctcccgctgatcccccagccagcggtccgcaacccttgccgcatccacgaaactttgcccatagcagcgggcgggcactttgcactggaacttacaacacccgagcaaggacgcgactctcccgacgcggggaggctattctgcccatttggggacacttccccgccgctgccaggacccgcttctctgaaaggctctccttgcagctgcttagacgctggatttttttcgggtagtggaaaaccagcctcccgcgacgatgcccctcaacgttagcttcaccaacaggaactatgacctcgactacgactcggtgcagccgtatttctactgcgacgaggaggagaacttctaccagcagcagcagcagagcgagctgcagcccccggcgcccagcgaggatatctggaagaaattcgagctgctgcccaccccgcccctgtcccctagccgccgctccgggctctgctcgccctcctacgttgcggtcacacccttctcccttcggggagacaacgacggcggtggcgggagcttctccacggccgaccagctggagatggtgaccgagctgctgggaggagacatggtgaaccagagtttcatctgcgacccggacgacgagaccttcatcaaaaacatcatcatccaggactgtatgtggagcggcttctcggccgccgccaagctcgtctcagagaagctggcctcctaccaggctgcgcgcaaagacagcggcagcccgaaccccgcccgcggccacagcgtctgctccacctccagcttgtacctgcaggatctgagcgccgccgcctcagagtgcatcgacccctcggtggtcttcccctaccctctcaacgacagcagctcgcccaagtcctgcgcctcgcaagactccagcgccttctctccgtcctcggattctctgctctcctcgacggagtcctccccgcagggcagccccgagcccctggtgctccatgaggagacaccgcccaccaccagcagcgactctgaggaggaacaagaagatgaggaagaaatcgatgttgtttctgtggaaaagaggcaggctcctggcaaaaggtcagagtctggatcaccttctgctggaggccacagcaaacctcctcacagcccactggtcctcaagaggtgccacgtctccacacatcagcacaactacgcagcgcctccctccactcggaaggactatcctgctgccaagagggtcaagttggacagtgtcagagtcctgagacagatcagcaacaaccgaaaatgcaccagccccaggtcctcggacaccgaggagaatgtcaagaggcgaacacacaacgtcttggagcgccagaggaggaacgagctaaaacggagcttttttgccctgcgtgaccagatcccggagttggaaaacaatgaaaaggcccccaaggtagttatccttaaaaaagccacagcatacatcctgtccgtccaagcagaggagcaaaagctcatttctgaagaggacttgttgcggaaacgacgagaacagttgaaacacaaacttgaacagctacggaactcttgtgcgtaaggaaaagtaaggaaaacgattccttctaacagaaatgtcctgagcaatcacctatgaacttgtttcaaatgcatgatcaaatgcaacctcacaaccttggctgagtcttgagactgaaagatttagccataatgtaaactgcctcaaattggactttgggcataaaagaacttttttatgcttaccatcttttttttttctttaacagatttgtatttaagaattgtttttaaaaaattttaagatttacacaatgtttctctgtaaatattgccattaaatgtaaataactttaataaaacgtttatagcagttacacagaatttcaatcctagtatatagtacctagtattataggtactataaaccctaattttttttatttaagtacattttgctttttaaagttgattt

SEQ ID NO: 199277 - DNA, 2366 bp, Homo sapiens
  Payload ID: 19311
  Gene Name: v-myc avian myelocytomatosis viral oncogene homolog
  ENST ID: ENST00000621592
  CDS Start-End: 526-1890
gacccccgagctgtgctgctcgcggccgccaccgccgggccccggccgtccctggctcccctcctgcctcgagaagggcagggcttctcagaggcttggcgggaaaaagaacggagggagggatcgcgctgagtataaaagccggttttcggggctttatctaactcgctgtagtaattccagcgagaggcagagggagcgagcgggcggccggctagggtggaagagccgggcgagcagagctgcgctgcgggcgtcctgggaagggagatccggagcgaatagggggcttcgcctctggcccagccctcccgctgatcccccagccagcggtccgcaacccttgccgcatccacgaaactttgcccatagcagcgggcgggcactttgcactggaacttacaacacccgagcaaggacgcgactctcccgacgcggggaggctattctgcccatttggggacacttccccgccgctgccaggacccgcttctctgaaaggctctccttgcagctgcttagacgctggatttttttcgggtagtggaaaaccagcagcctcccgcgacgatgcccctcaacgttagcttcaccaacaggaactatgacctcgactacgactcggtgcagccgtatttctactgcgacgaggaggagaacttctaccagcagcagcagcagagcgagctgcagcccccggcgcccagcgaggatatctggaagaaattcgagctgctgcccaccccgcccctgtcccctagccgccgctccgggctctgctcgccctcctacgttgcggtcacacccttctcccttcggggagacaacgacggcggtggcgggagcttctccacggccgaccagctggagatggtgaccgagctgctgggaggagacatggtgaaccagagtttcatctgcgacccggacgacgagaccttcatcaaaaacatcatcatccaggactgtatgtggagcggcttctcggccgccgccaagctcgtctcagagaagctggcctcctaccaggctgcgcgcaaagacagcggcagcccgaaccccgcccgcggccacagcgtctgctccacctccagcttgtacctgcaggatctgagcgccgccgcctcagagtgcatcgacccctcggtggtcttcccctaccctctcaacgacagcagctcgcccaagtcctgcgcctcgcaagactccagcgccttctctccgtcctcggattctctgctctcctcgacggagtcctccccgcagggcagccccgagcccctggtgctccatgaggagacaccgcccaccaccagcagcgactctgaggaggaacaagaagatgaggaagaaatcgatgttgtttctgtggaaaagaggcaggctcctggcaaaaggtcagagtctggatcaccttctgctggaggccacagcaaacctcctcacagcccactggtcctcaagaggtgccacgtctccacacatcagcacaactacgcagcgcctccctccactcggaaggactatcctgctgccaagagggtcaagttggacagtgtcagagtcctgagacagatcagcaacaaccgaaaatgcaccagccccaggtcctcggacaccgaggagaatgtcaagaggcgaacacacaacgtcttggagcgccagaggaggaacgagctaaaacggagcttttttgccctgcgtgaccagatcccggagttggaaaacaatgaaaaggcccccaaggtagttatccttaaaaaagccacagcatacatcctgtccgtccaagcagaggagcaaaagctcatttctgaagaggacttgttgcggaaacgacgagaacagttgaaacacaaacttgaacagctacggaactcttgtgcgtaaggaaaagtaaggaaaacgattccttctaacagaaatgtcctgagcaatcacctatgaacttgtttcaaatgcatgatcaaatgcaacctcacaaccttggctgagtcttgagactgaaagatttagccataatgtaaactgcctcaaattggactttgggcataaaagaacttttttatgcttaccatcttttttttttctttaacagatttgtatttaagaattgtttttaaaaaattttaagatttacacaatgtttctctgtaaatattgccattaaatgtaaataactttaataaaacgtttatagcagttacacagaatttcaatcctagtatatagtacctagtattataggtactataaaccctaattttttttatttaagtacattttgctttttaaagttgatttttttctattgtttttagaaaaaataaaataactggcaaatatatcattgagccaaatcttaa

SEQ ID NO: 199278 - DNA, 2364 bp, Homo sapiens
  Payload ID: 19311
  Gene Name: v-myc avian myelocytomatosis viral oncogene homolog
  ENST ID: ENST00000613283
  CDS Start-End: 526-1890
gacccccgagctgtgctgctcgcggccgccaccgccgggccccggccgtccctggctcccctcctgcctcgagaagggcagggcttctcagaggcttggcgggaaaaagaacggagggagggatcgcgctgagtataaaagccggttttcggggctttatctaactcgctgtagtaattccagcgagaggcagagggagcgagcgggcggccggctagggtggaagagccgggcgagcagagctgcgctgcgggcgtcctgggaagggagatccggagcgaatagggggcttcgcctctggcccagccctcccgctgatcccccagccagcggtccgcaacccttgccgcatccacgaaactttgcccatagcagcgggcgggcactttgcactggaacttacaacacccgagcaaggacgcgactctcccgacgcggggaggctattctgcccatttggggacacttccccgccgctgccaggacccgcttctctgaaaggctctccttgcagctgcttagacgctggatttttttcgggtagtggaaaaccagcagcctcccgcgacgatgcccctcaacgttagcttcaccaacaggaactatgacctcgactacgactcggtgcagccgtatttctactgcgacgaggaggagaacttctaccagcagcagcagcagagcgagctgcagcccccggcgcccagcgaggatatctggaagaaattcgagctgctgcccaccccgcccctgtcccctagccgccgctccgggctctgctcgccctcctacgttgcggtcacacccttctcccttcggggagacaacgacggcggtggcgggagcttctccacggccgaccagctggagatggtgaccgagctgctgggaggagacatggtgaaccagagtttcatctgcgacccggacgacgagaccttcatcaaaaacatcatcatccaggactgtatgtggagcggcttctcggccgccgccaagctcgtctcagagaagctggcctcctaccaggctgcgcgcaaagacagcggcagcccgaaccccgcccgcggccacagcgtctgctccacctccagcttgtacctgcaggatctgagcgccgccgcctcagagtgcatcgacccctcggtggtcttcccctaccctctcaacgacagcagctcgcccaagtcctgcgcctcgcaagactccagcgccttctctccgtcctcggattctctgctctcctcgacggagtcctccccgcagggcagccccgagcccctggtgctccatgaggagacaccgcccaccaccagcagcgactctgaggaggaacaagaagatgaggaagaaatcgatgttgtttctgtggaaaagaggcaggctcctggcaaaaggtcagagtctggatcaccttctgctggaggccacagcaaacctcctcacagcccactggtcctcaagaggtgccacgtctccacacatcagcacaactacgcagcgcctccctccactcggaaggactatcctgctgccaagagggtcaagttggacagtgtcagagtcctgagacagatcagcaacaaccgaaaatgcaccagccccaggtcctcggacaccgaggagaatgtcaagaggcgaacacacaacgtcttggagcgccagaggaggaacgagctaaaacggagcttttttgccctgcgtgaccagatcccggagttggaaaacaatgaaaaggcccccaaggtagttatccttaaaaaagccacagcatacatcctgtccgtccaagcagaggagcaaaagctcatttctgaagaggacttgttgcggaaacgacgagaacagttgaaacacaaacttgaacagctacggaactcttgtgcgtaaggaaaagtaaggaaaacgattccttctaacagaaatgtcctgagcaatcacctatgaacttgtttcaaatgcatgatcaaatgcaacctcacaaccttggctgagtcttgagactgaaagatttagccataatgtaaactgcctcaaattggactttgggcataaaagaacttttttatgcttaccatcttttttttttctttaacagatttgtatttaagaattgtttttaaaaaattttaagatttacacaatgtttctctgtaaatattgccattaaatgtaaataactttaataaaacgtttatagcagttacacagaatttcaatcctagtatatagtacctagtattataggtactataaaccctaattttttttatttaagtacattttgctttttaaagttgatttttttctattgtttttagaaaaaataaaataactggcaaatatatcattgagccaaatctt

SEQ ID NO: 199279 - DNA, 1944 bp, Homo sapiens
  Payload ID: 19312
  Gene Name: v-myc avian myelocytomatosis viral oncogene lung carcinoma derived homolog
  Uniprot ID: P12524
  ENST ID: ENST00000372815
  CDS Start-End: 32-742
gtgagtgcgggccgcgctctcggcggcgcgcatgtgcgtgtgtgctggctgccgggctgccccgagccggcggggagccggtccgctccaggtggcgggcggctggagcgagggagcggacatggactacgactcgtaccagcactatttctacgactatgactgcggggaggatttctaccgctccacggcgcccagcgaggacatctggaagaaattcgagctggtgccatcgccccccacgtcgccgccctggggcttgggtcccggcgcaggggacccggcccccgggattggtcccccggagccgtggcccggagggtgcaccggagacgaagcggaatcccggggccactcgaaaggctggggcaggaactacgcctccatcatacgccgtgactgcatgtggagcggcttctcggcccgggaacggctggagagagctgtgagcgaccggctcgctcctggcgcgccccgggggaacccgcccaaggcgtccgccgccccggactgcactcccagcctcgaagccggcaacccggcgcccgccgccccctgtccgctgggcgaacccaagacccaggcctgctccgggtccgagagcccaagcgactcgggtaaggacctccccgagccatccaagagggggccaccccatgggtggccaaagctctgcccctgcctgaggtcaggcattggctcttctcaagctcttgggccatctccgcctctctttggctgaagctgcccgtgtagtccccaaccgtgtctgtctggcacgtgggtgtgttggtaaacagtttggaaaagtggcgtgggagccagcctccctttgatgattattggagccccaggggacaagggatttgaggtgagggttggcgcttagagaggacaatactggggttggactgtaagggattgaagggggtaccttaagagacactccaaacctgaagtttttttgctgctgcctctttccctaggaaactcacactcccctagggggagaagaagccgagagccttttgtgcaaagccaaaaccttcgtccttttaaaaacctaggtctccagttggctttactttaaaatgccaataataaatgccctcttctcgtgcctccccaccaccacttaccactcgtgcatccctgagacagggagggaagaatgaacactccccattaacagatggaaaaactgaggcttagagatagacaatcactacaagtcagctccagctttctgccatctagccagcccctcttccccaatgctccatcccaaccaggcacctcttccttgatgtttggggtctttgtggtagcttatcttagaagcactacaccttgccttgctgtttgtcctgagatggaaaagtgtccttcttgctccccctcaatagatctccagcgtcagctgctccctggcattcaacaaatattcactggcccctactttgtggcaatctgtgggctacatgctggggtcaaggcagtagaactccaggccctcctctcccatccttgatgcaagtgcaacctcgctgagggcagactggggcatcctgtgccactaaactacattgttcttattctggcatcttagacctccacacccgtgagaaatcctggagagggtatttttgtagagtgtagactgtggctagtgacaaataaattaggaccaagaaagctcactgtagcttttaggaataacttttacacgaccatttgatagggaactggggaatggggtatggaagttttcctacacttgagagaaaaaataggataacaaaaattaaaagtcttttttttcctggtccactgtgttaaggtcatttttaaccagcttgctttctacaccaagagtttatgtttgtttaatggctggaaagagaatcttgagatcaaaaaaccaataaagatgtatctctacaa

SEQ ID NO: 199280 - DNA, 1688 bp, Homo sapiens
  Payload ID: 19312
  Gene Name: v-myc avian myelocytomatosis viral oncogene lung carcinoma derived homolog
  Uniprot ID: P12524
  ENST ID: ENST00000372816
  CDS Start-End: 449-1543
gtgtgtgctggctgccgggctgccccgagccggcggggagccggtccgctccaggtggcgggcggctggagcgaggtgaggctgcgggtggccagggcacgggcgcgggtcccgcggtgcgggctggctgcaggctgccttctgggcacggcgcgcccccgcccggccccgccgggccctgggagctgcgctccgggcggcgctggcaaagtttgctttgaactcgctgcccacagtcgggtccgcgcgctgcgattggcttcccctaccactctgacccggggcccggcttcccgggacgcgaggactgggcgcaggctgcaagctggtggggttggggaggaacgagagcccggcagccgactgtgccgagggacccggggacacctccttcgcccggccggcacccggtcagcacgtccccccttccctcccgcagggagcggacatggactacgactcgtaccagcactatttctacgactatgactgcggggaggatttctaccgctccacggcgcccagcgaggacatctggaagaaattcgagctggtgccatcgccccccacgtcgccgccctggggcttgggtcccggcgcaggggacccggcccccgggattggtcccccggagccgtggcccggagggtgcaccggagacgaagcggaatcccggggccactcgaaaggctggggcaggaactacgcctccatcatacgccgtgactgcatgtggagcggcttctcggcccgggaacggctggagagagctgtgagcgaccggctcgctcctggcgcgccccgggggaacccgcccaaggcgtccgccgccccggactgcactcccagcctcgaagccggcaacccggcgcccgccgccccctgtccgctgggcgaacccaagacccaggcctgctccgggtccgagagcccaagcgactcggagaatgaagaaattgatgttgtgacagtagagaagaggcagtctctgggtattcggaagccggtcaccatcacggtgcgagcagaccccctggatccctgcatgaagcatttccacatctccatccatcagcaacagcacaactatgctgcccgttttcctccagaaagctgctcccaagaagaggcttcagagaggggtccccaagaagaggttctggagagagatgctgcaggggaaaaggaagatgaggaggatgaagagattgtgagtcccccacctgtagaaagtgaggctgcccagtcctgccaccccaaacctgtcagttctgatactgaggatgtgaccaagaggaagaatcacaacttcctggagcgcaagaggcggaatgacctgcgttcgcgattcttggcgctgagggaccaggtgcccaccctggccagctgctccaaggcccccaaagtagtgatcctaagcaaggccttggaatacttgcaagccctggtgggggctgagaagaggatggctacagagaaaagacagctccgatgccggcagcagcagttgcagaaaagaattgcatacctcactggctactaactgaccaaaaagcctgacagttctgtcttacgaagacacaagtttattttttaacctccctctcccctttagtaatttgcacattttggttatggtgggacagtctggacagtagatcccagaatgcattgcagccggtgcacac

SEQ ID NO: 199281 - DNA, 3256 bp, Homo sapiens
  Payload ID: 19312
  Gene Name: v-myc avian myelocytomatosis viral oncogene lung carcinoma derived homolog
  Uniprot ID: P12524
  ENST ID: ENST00000397332
  CDS Start-End: 126-1310
tgcgcctgcagctcgcgctcccgcgccgatcccgagagcgtccgggccgccgtgcgcgagcgagggagggcgcgcgcgcggggggggcgcgcttgtgagtgcgggccgcgctctcggcggcgcgcatgtgcgtgtgtgctggctgccgggctgccccgagccggcggggagccggtccgctccaggtggcgggcggctggagcgagggagcggacatggactacgactcgtaccagcactatttctacgactatgactgcggggaggatttctaccgctccacggcgcccagcgaggacatctggaagaaattcgagctggtgccatcgccccccacgtcgccgccctggggcttgggtcccggcgcaggggacccggcccccgggattggtcccccggagccgtggcccggagggtgcaccggagacgaagcggaatcccggggccactcgaaaggctggggcaggaactacgcctccatcatacgccgtgactgcatgtggagcggcttctcggcccgggaacggctggagagagctgtgagcgaccggctcgctcctggcgcgccccgggggaacccgcccaaggcgtccgccgccccggactgcactcccagcctcgaagccggcaacccggcgcccgccgccccctgtccgctgggcgaacccaagacccaggcctgctccgggtccgagagcccaagcgactcggagaatgaagaaattgatgttgtgacagtagagaagaggcagtctctgggtattcggaagccggtcaccatcacggtgcgagcagaccccctggatccctgcatgaagcatttccacatctccatccatcagcaacagcacaactatgctgcccgttttcctccagaaagctgctcccaagaagaggcttcagagaggggtccccaagaagaggttctggagagagatgctgcaggggaaaaggaagatgaggaggatgaagagattgtgagtcccccacctgtagaaagtgaggctgcccagtcctgccaccccaaacctgtcagttctgatactgaggatgtgaccaagaggaagaatcacaacttcctggagcgcaagaggcggaatgacctgcgttcgcgattcttggcgctgagggaccaggtgcccaccctggccagctgctccaaggcccccaaagtagtgatcctaagcaaggccttggaatacttgcaagccctggtgggggctgagaagaggatggctacagagaaaagacagctccgatgccggcagcagcagttgcagaaaagaattgcatacctcactggctactaactgaccaaaaagcctgacagttctgtcttacgaagacacaagtttattttttaacctccctctcccctttagtaatttgcacattttggttatggtgggacagtctggacagtagatcccagaatgcattgcagccggtgcacacacaataaaggcttgcattcttggaaaccttgaaacccagctctccctcttccctgactcatgggagtgctgtatgttctctggcgcctttggcttcccagcaggcagctgactgaggagccttggggtctgcctagctcactagctctgaagaaaaggctgacagatgctatgcaacaggtggtggatgttgtcaggggctccagcctgcatgaaatctcacactctgcatgagctttaggctaggaaaggatgctcccaactggtgtctctggggtgatgcaaggacagctgggcctggatgctctccctgaggctcctttttccagaagacacacgagctgtcttgggtgaagacaagcttgcagacttgatcaacattgaccattacctcactgtcagacactttacagtagccaaggagttggaaacctttatatattatgatgttagctgacccccttcctcccactcccaatgctgcgaccctgggaacacttaaaaagcttggcctctagattctttgtctcagagccctctgggctctctcctctgagggagggacctttctttcctcacaagggacttttttgttccattatgccttgttatgcaatgggctctacagcaccctttcccacaggtcagaaatatttccccaagacacagggaaatcggtcctagcctggggcctggggatagcttggagtcctggcccatgaacttgatccctgcccaggtgttttccgaggggcacttgaggcccagtcttttctcaaggcaggtgtaagacacctcagagggagaactgtactgctgcctctttcccacctgcctcatctcaatccttgagcggcaagtttgaagttcttctggaaccatgcaaatctgtcctcctcatgcaattccaaggagcttgctggctctgcagccacccttgggccccttccagcctgccatgaatcagatatctttcccagaatctgggcgtttctgaagttttggggagagctgttgggactcatccagtgctccagaaggtggacttgcttctggtgggttttaaaggagcctccaggagatatgcttagccaaccatgatggattttaccccagctggactcggcagctccaagtggaatccacgtgcagcttctagtctgggaaagtcacccaacctagcagttgtcatgtgggtaacctcaggcacctctaagcctgtcctggaagaaggaccagcagcccctccagaactctgcccaggacagcaggtgcctgctggctctgggtttggaagttggggtgggtagggggtggtaagtactatatatggctctggaaaaccagctgctacttccaaatctattgtccataatggtttctttctgaggttgcttcttggcctcagaggaccccaggggatgtttggaaatagcctctctacccttctggagcatggtttacaaaagccagctgacttctggaattgtctatggaggacagtttgggtgtaggttactgatgtctcaactgaatagcttgtgttttataagctgctgttggctattatgctgggggagtcttttttttttatattgtatttttgtatgccttttgcaaagtggtgttaactgtttttgtacaaggaaaaaaactcttggggcaatttcctgttgcaagggtctgatttattttgaaaggcaagttcacctgaaattttgtatttagttgtgattactgattgcctgattttaaaatgttgccttctgggacatcttctaataaaagatttctcaaacatg

SEQ ID NO: 199282 - DNA, 426 bp, Homo sapiens
  Payload ID: 19312
  Gene Name: v-myc avian myelocytomatosis viral oncogene lung carcinoma derived homolog
  ENST ID: ENST00000450953
  CDS Start-End: 126-426
gcaccgccaagcggccgccgggccgcatcagccctcctcctgtttgcgctccccagcgtgcaatttatttggggggctaccggggattgaacggagcgggcgagcgctgccaggagggagcggacatggactacgactcgtaccagcactatttctacgactatgactgcggggaggatttctaccgctccacggcgcccagcgaggacatctggaagaaattcgagctggtgccatcgccccccacgtcgccgccctggggcttgggtcccggcgcaggggacccggcccccgggattggtcccccggagccgtggcccggagggtgcaccggagacgaagcggaatcccggggccactcgaaaggctggggcaggaactacgcctccatcatacgccgtgactgcatgtggagcggcttctcgg

SEQ ID NO: 199283 - DNA, 2602 bp, Homo sapiens
  Payload ID: 19313
  Gene Name: v-myc avian myelocytomatosis viral oncogene neuroblastoma derived homolog
  Uniprot ID: P04198
  ENST ID: ENST00000281043
  CDS Start-End: 298-1692
atctgtctggacgcgctgggtggatgcggggggctcctgggaactgtgttggagccgagcaagcgctagccaggcgcaagcgcgcacagactgtagccatccgaggacacccccgcccccccggcccacccggagacacccgcgcagaatcgcctccggatcccctgcagtcggcgggagtgttggaggtcggcgccggcccccgccttccgcgccccccacgggaaggaagcacccccggtattaaaacgaacggggcggaaagaagccctcagtcgccggccgggaggcgagccgatgccgagctgctccacgtccaccatgccgggcatgatctgcaagaacccagacctcgagtttgactcgctacagccctgcttctacccggacgaagatgacttctacttcggcggccccgactcgacccccccgggggaggacatctggaagaagtttgagctgctgcccacgcccccgctgtcgcccagccgtggcttcgcggagcacagctccgagcccccgagctgggtcacggagatgctgcttgagaacgagctgtggggcagcccggccgaggaggacgcgttcggcctggggggactgggtggcctcacccccaacccggtcatcctccaggactgcatgtggagcggcttctccgcccgcgagaagctggagcgcgccgtgagcgagaagctgcagcacggccgcgggccgccaaccgccggttccaccgcccagtccccgggagccggcgccgccagccctgcgggtcgcgggcacggcggggctgcgggagccggccgcgccggggccgccctgcccgccgagctcgcccacccggccgccgagtgcgtggatcccgccgtggtcttcccctttcccgtgaacaagcgcgagccagcgcccgtgcccgcagccccggccagtgccccggcggcgggccctgcggtcgcctcgggggcgggtattgccgccccagccggggccccgggggtcgcccctccgcgcccaggcggccgccagaccagcggcggcgaccacaaggccctcagtacctccggagaggacaccctgagcgattcagatgatgaagatgatgaagaggaagatgaagaggaagaaatcgacgtggtcactgtggagaagcggcgttcctcctccaacaccaaggctgtcaccacattcaccatcactgtgcgtcccaagaacgcagccctgggtcccgggagggctcagtccagcgagctgatcctcaaacgatgccttcccatccaccagcagcacaactatgccgccccctctccctacgtggagagtgaggatgcacccccacagaagaagataaagagcgaggcgtccccacgtccgctcaagagtgtcatccccccaaaggctaagagcttgagcccccgaaactctgactcggaggacagtgagcgtcgcagaaaccacaacatcctggagcgccagcgccgcaacgaccttcggtccagctttctcacgctcagggaccacgtgccggagttggtaaagaatgagaaggccgccaaggtggtcattttgaaaaaggccactgagtatgtccactccctccaggccgaggagcaccagcttttgctggaaaaggaaaaattgcaggcaagacagcagcagttgctaaagaaaattgaacacgctcggacttgctagacgcttctcaaaactggacagtcactgccactttgcacattttgattttttttttaaacaaacattgtgttgacattaagaatgttggtttactttcaaatcggtcccctgtcgagttcggctctgggtgggcagtaggaccaccagtgtggggttctgctgggaccttggagagcctgcatcccaggatgctgggtggccctgcagcctcctccacctcacctccatgacagcgctaaacgttggtgacggttgggagcctctggggctgttgaagtcaccttgtgtgttccaagtttccaaacaacagaaagtcattccttctttttaaaatggtgcttaagttccagcagatgccacataaggggtttgccatttgatacccctggggaacatttctgtaaataccattgacacatccgccttttgtatacatcctgggtaatgagaggtggcttttgcggccagtattagactggaagttcatacctaagtactgtaataatacctcaatgtttgaggagcatgttttgtatacaaatatattgttaatctctgttatgtactgtactaattcttacactgcctgtatactttagtatgacgctgatacataactaaatttgatacttatattttcgtatgaaaatgagttgtgaaagttttgagtagatattactttatcactttttgaactaagaaacttttgtaaagaaatttactatatatatatgcctttttcctagcctgtttcttcctgttaatgtatttgttcatgtttggtgcatagaactgggtaaatgcaaagttctgtgtttaatttcttcaaaatgtatatatttagtgctgcatcttatagcactttgaaatacctcatgtttatgaaaataaatagcttaaaattaaatga

SEQ ID NO: 199284 - DNA, 1953 bp, Homo sapiens
  Payload ID: 19314
  Gene Name: voltage-dependent anion channel 1
  Uniprot ID: P21796
  ENST ID: ENST00000265333
  CDS Start-End: 246-1097
attagcgcagggacctccgggccacagctcagagaatcggaaggcctcctcccccttcccgagcgctgccactggggccgaggtttccagcaagaacccgcgtgtccctgcgcacgcacacacggtgcacacgtcagtccggcgcctccccgtgccccgactcacgcaggtcctcccgcgcgcccgcaacacgcccgcaggctcctgtgtctgctgccggggcagcggggcccggaaggcagaagatggctgtgccacccacgtatgccgatcttggcaaatctgccagggatgtcttcaccaagggctatggatttggcttaataaagcttgatttgaaaacaaaatctgagaatggattggaatttacaagctcaggctcagccaacactgagaccaccaaagtgacgggcagtctggaaaccaagtacagatggactgagtacggcctgacgtttacagagaaatggaataccgacaatacactaggcaccgagattactgtggaagatcagcttgcacgtggactgaagctgaccttcgattcatccttctcacctaacactgggaaaaaaaatgctaaaatcaagacagggtacaagcgggagcacattaacctgggctgcgacatggatttcgacattgctgggccttccatccggggtgctctggtgctaggttacgagggctggctggccggctaccagatgaattttgagactgcaaaatcccgagtgacccagagcaactttgcagttggctacaagactgatgaattccagcttcacactaatgtgaatgacgggacagagtttggcggctccatttaccagaaagtgaacaagaagttggagaccgctgtcaatcttgcctggacagcaggaaacagtaacacgcgcttcggaatagcagccaagtatcagattgaccctgacgcctgcttctcggctaaagtgaacaactccagcctgataggtttaggatacactcagactctaaagccaggtattaaactgacactgtcagctcttctggatggcaagaacgtcaatgctggtggccacaagcttggtctaggactggaatttcaagcataaatgaatactgtacaattgtttaattttaaactattttgcagcatagctaccttcagaatttagtgtatcttttaatgttgtatgtctgggatgcaagtattgctaaatatgttagccctccaggttaaagttgattcagctttaagatgttacccttccagaggtacagaagaaacctatttccaaaaaaggtcctttcagtggtagactcggggagaacttggtggcccctttgagatgccaggtttcttttttatctagaaatggctgcaagtggaagcggataatatgtaggcactttgtaaattcatattgagtaaatgaatgaaattgtgatttcctgagaatcgaaccttggttccctaaccctaattgatgagaggctcgctgcttgatggtgtgtacaaactcacctgaatgggacttttttagacagatcttcatgacctgttcccaccccagttcatcatcatctcttttacaccaaaaggtctgcagggtgtggtaactgtttcttttgtgccattttggggtggagaaggtggatgtgatgaagccaataattcaggacttattccttcttgtgttgtgtttttttttggcccttgcaccagagtatgaaatagcttccaggagctccagctataagcttggaagtgtctgtgtgattgtaatcacatggtgacaacactcagaatctaaattggacttctgttgtattctcaccactcaatttgttttttagcagtttaatgggtacattttagagtcttccattttgttggaattagatcctccccttcaaatgctgtaattaacaacacttaaaaaacttgaataaaatattgaaacctca

SEQ ID NO: 199285 - DNA, 1807 bp, Homo sapiens
  Payload ID: 19314
  Gene Name: voltage-dependent anion channel 1
  Uniprot ID: P21796
  ENST ID: ENST00000395044
  CDS Start-End: 100-951
gccgctcgctcggctccgctccctggctcggctccctgcctccgcgtcgcagcccccgccgtagccgcctccgagcccgccgccacatcctctgagaagatggctgtgccacccacgtatgccgatcttggcaaatctgccagggatgtcttcaccaagggctatggatttggcttaataaagcttgatttgaaaacaaaatctgagaatggattggaatttacaagctcaggctcagccaacactgagaccaccaaagtgacgggcagtctggaaaccaagtacagatggactgagtacggcctgacgtttacagagaaatggaataccgacaatacactaggcaccgagattactgtggaagatcagcttgcacgtggactgaagctgaccttcgattcatccttctcacctaacactgggaaaaaaaatgctaaaatcaagacagggtacaagcgggagcacattaacctgggctgcgacatggatttcgacattgctgggccttccatccggggtgctctggtgctaggttacgagggctggctggccggctaccagatgaattttgagactgcaaaatcccgagtgacccagagcaactttgcagttggctacaagactgatgaattccagcttcacactaatgtgaatgacgggacagagtttggcggctccatttaccagaaagtgaacaagaagttggagaccgctgtcaatcttgcctggacagcaggaaacagtaacacgcgcttcggaatagcagccaagtatcagattgaccctgacgcctgcttctcggctaaagtgaacaactccagcctgataggtttaggatacactcagactctaaagccaggtattaaactgacactgtcagctcttctggatggcaagaacgtcaatgctggtggccacaagcttggtctaggactggaatttcaagcataaatgaatactgtacaattgtttaattttaaactattttgcagcatagctaccttcagaatttagtgtatcttttaatgttgtatgtctgggatgcaagtattgctaaatatgttagccctccaggttaaagttgattcagctttaagatgttacccttccagaggtacagaagaaacctatttccaaaaaaggtcctttcagtggtagactcggggagaacttggtggcccctttgagatgccaggtttcttttttatctagaaatggctgcaagtggaagcggataatatgtaggcactttgtaaattcatattgagtaaatgaatgaaattgtgatttcctgagaatcgaaccttggttccctaaccctaattgatgagaggctcgctgcttgatggtgtgtacaaactcacctgaatgggacttttttagacagatcttcatgacctgttcccaccccagttcatcatcatctcttttacaccaaaaggtctgcagggtgtggtaactgtttcttttgtgccattttggggtggagaaggtggatgtgatgaagccaataattcaggacttattccttcttgtgttgtgtttttttttggcccttgcaccagagtatgaaatagcttccaggagctccagctataagcttggaagtgtctgtgtgattgtaatcacatggtgacaacactcagaatctaaattggacttctgttgtattctcaccactcaatttgttttttagcagtttaatgggtacattttagagtcttccattttgttggaattagatcctccccttcaaatgctgtaattaacaacacttaaaaaacttgaataaaatattgaaacctca

SEQ ID NO: 199286 - DNA, 1873 bp, Homo sapiens
  Payload ID: 19314
  Gene Name: voltage-dependent anion channel 1
  Uniprot ID: P21796
  ENST ID: ENST00000395047
  CDS Start-End: 203-1054
gtcccgggcggggcctgggggcggagcgcgccgggccgggcgcgcaggaggggaggcgggtccgcgccgccgccgtccgcgccgccccgcccttggcccagccgctcgctcggctccgctccctggctcggctccctgcctccgcgtcgcagcccccgccgtagccgcctccgagcccgccgccacatcctctgagcagaagatggctgtgccacccacgtatgccgatcttggcaaatctgccagggatgtcttcaccaagggctatggatttggcttaataaagcttgatttgaaaacaaaatctgagaatggattggaatttacaagctcaggctcagccaacactgagaccaccaaagtgacgggcagtctggaaaccaagtacagatggactgagtacggcctgacgtttacagagaaatggaataccgacaatacactaggcaccgagattactgtggaagatcagcttgcacgtggactgaagctgaccttcgattcatccttctcacctaacactgggaaaaaaaatgctaaaatcaagacagggtacaagcgggagcacattaacctgggctgcgacatggatttcgacattgctgggccttccatccggggtgctctggtgctaggttacgagggctggctggccggctaccagatgaattttgagactgcaaaatcccgagtgacccagagcaactttgcagttggctacaagactgatgaattccagcttcacactaatgtgaatgacgggacagagtttggcggctccatttaccagaaagtgaacaagaagttggagaccgctgtcaatcttgcctggacagcaggaaacagtaacacgcgcttcggaatagcagccaagtatcagattgaccctgacgcctgcttctcggctaaagtgaacaactccagcctgataggtttaggatacactcagactctaaagccaggtattaaactgacactgtcagctcttctggatggcaagaacgtcaatgctggtggccacaagcttggtctaggactggaatttcaagcataaatgaatactgtacaattgtttaattttaaactattttgcagcatagctaccttcagaatttagtgtatcttttaatgttgtatgtctgggatgcaagtattgctaaatatgttagccctccaggttaaagttgattcagctttaagatgttacccttccagaggtacagaagaaacctatttccaaaaaaggtcctttcagtggtagactcggggagaacttggtggcccctttgagatgccaggtttcttttttatctagaaatggctgcaagtggaagcggataatatgtaggcactttgtaaattcatattgagtaaatgaatgaaattgtgatttcctgagaatcgaaccttggttccctaaccctaattgatgagaggctcgctgcttgatggtgtgtacaaactcacctgaatgggacttttttagacagatcttcatgacctgttcccaccccagttcatcatcatctcttttacaccaaaaggtctgcagggtgtggtaactgtttcttttgtgccattttggggtggagaaggtggatgtgatgaagccaataattcaggacttattccttcttgtgttgtgtttttttttggcccttgcaccagagtatgaaatagcttccaggagctccagctataagcttggaagtgtctgtgtgattgtaatcacatggtgacaacactcagaatctaaattggacttctgttgtattctcaccactcaatttgttttttagcagtttaatgggtacattttagagtcttccattttgttggaattagatcctccccttcaaatgctgtaattaac

SEQ ID NO: 199287 - DNA, 703 bp, Homo sapiens
  Payload ID: 19314
  Gene Name: voltage-dependent anion channel 1
  ENST ID: ENST00000425992
  CDS Start-End: 153-703
ggaaaaggaccccggcttccttgcgccctggacggcgggggccaggcccctggggagctgagagggaggcgctgagggaggagcgggcgaggggccccggcagcccggccgcggggagggatcgcgagcggccggcgcgggcctggctgaagatggctgtgccacccacgtatgccgatcttggcaaatctgccagggatgtcttcaccaagggctatggatttggcttaataaagcttgatttgaaaacaaaatctgagaatggattggaatttacaagctcaggctcagccaacactgagaccaccaaagtgacgggcagtctggaaaccaagtacagatggactgagtacggcctgacgtttacagagaaatggaataccgacaatacactaggcaccgagattactgtggaagatcagcttgcacgtggactgaagctgaccttcgattcatccttctcacctaacactgggaaaaaaaatgctaaaatcaagacagggtacaagcgggagcacattaacctgggctgcgacatggatttcgacattgctgggccttccatccggggtgctctggtgctaggttacgagggctggctggccggctaccagatgaattttgagactgcaaaatcccgagtgacccagagcaactttgcagttggctacaagactgatgaattccagcttcacactaatgt

SEQ ID NO: 199288 - DNA, 931 bp, Homo sapiens
  Payload ID: 19315
  Gene Name: voltage-dependent anion channel 2
  ENST ID: ENST00000298468
  CDS Start-End: 85-931
ggcagtcccaaaaagcctctcaggcacacaacccagcacagcaaggcagtcacaccaagattcccctcttcccgcggcctcgccatggcgacccacggacagacttgcgcgcgtccaatgtgtattcctccatcatatgctgaccttggcaaagctgccagagatattttcaacaaaggatttggttttgggttggtgaaactggatgtgaaaacaaagtcttgcagtggcgtggaattttcaacgtccggttcatctaatacagacactggtaaagttactgggaccttggagaccaaatacaagtggtgtgagtatggtctgactttcacagaaaagtggaacactgataacactctgggaacagaaatcgcaattgaagaccagatttgtcaaggtttgaaactgacatttgatactaccttctcaccaaacacaggaaagaaaagtggtaaaatcaagtcttcttacaagagggagtgtataaaccttggttgtgatgttgactttgattttgctggacctgcaatccatggttcagctgtctttggttatgagggctggcttgctggctaccagatgacctttgacagtgccaaatcaaagctgacaaggaataactttgcagtgggctacaggactggggacttccagctacacactaatgtcaatgatgggacagaatttggaggatcaatttatcagaaagtttgtgaagatcttgacacttcagtaaaccttgcttggacatcaggtaccaactgcactcgttttggcattgcagctaaatatcagttggatcccactgcttccatttctgcaaaagtcaacaactctagcttaattggagtaggctatactcagactctgaggcctggtgtgaagcttacactctctgctctggtagatgggaagagcattaatgctggag

SEQ ID NO: 199289 - DNA, 681 bp, Homo sapiens
  Payload ID: 19315
  Gene Name: voltage-dependent anion channel 2
  ENST ID: ENST00000344036
  CDS Start-End: 98-681
cccaccgacggacggaggcagcccacctgcaggaccggggcgctgtcggtccacgtggccgctctggagcagattcccctcttcccgcggcctcgccatggcgacccacggacagacttgcgcgcgtccaatgtgtattcctccatcatatgctgaccttggcaaagctgccagagatattttcaacaaaggatttggttttgggttggtgaaactggatgtgaaaacaaagtcttgcagtggcgtggaattttcaacgtccggttcatctaatacagacactggtaaagttactgggaccttggagaccaaatacaagtggtgtgagtatggtctgactttcacagaaaagtggaacactgataacactctgggaacagaaatcgcaattgaagaccagatttgtcaaggtttgaaactgacatttgatactaccttctcaccaaacacaggaaagaaaagtggtaaaatcaagtcttcttacaagagggagtgtataaaccttggttgtgatgttgactttgattttgctggacctgcaatccatggttcagctgtctttggttatgagggctggcttgctggctaccagatgacctttgacagtgccaaatcaaagctgacaaggaataactttgcagtgggctacaggactggggacttccagctacacactaatgt

SEQ ID NO: 199290 - DNA, 1467 bp, Homo sapiens
  Payload ID: 19315
  Gene Name: voltage-dependent anion channel 2
  Uniprot ID: P45880
  ENST ID: ENST00000313132
  CDS Start-End: 250-1179
gctgctggagctgcagcccgaccgcgagcgtgccaagcggcttcagcagctagcggagcggtggcggcggcccccctcaggacaccaccagattcccctcttcccgcggcctcgccatggcgacccacggacagacttgcgcgcgtcgatcggatcaatcacttttctagaggaagtagcagtccctcttgtgagagcgcaaggtcattacttgtgctcctaagggcgtggacgtgctttgtggaatgaatgagctggtgtaatgagctcagattgcctgcccttaagcagcacagcattggccgaggacttgagagtcacattacaatgtgtattcctccatcatatgctgaccttggcaaagctgccagagatattttcaacaaaggatttggttttgggttggtgaaactggatgtgaaaacaaagtcttgcagtggcgtggaattttcaacgtccggttcatctaatacagacactggtaaagttactgggaccttggagaccaaatacaagtggtgtgagtatggtctgactttcacagaaaagtggaacactgataacactctgggaacagaaatcgcaattgaagaccagatttgtcaaggtttgaaactgacatttgatactaccttctcaccaaacacaggaaagaaaagtggtaaaatcaagtcttcttacaagagggagtgtataaaccttggttgtgatgttgactttgattttgctggacctgcaatccatggttcagctgtctttggttatgagggctggcttgctggctaccagatgacctttgacagtgccaaatcaaagctgacaaggaataactttgcagtgggctacaggactggggacttccagctacacactaatgtcaatgatgggacagaatttggaggatcaatttatcagaaagtttgtgaagatcttgacacttcagtaaaccttgcttggacatcaggtaccaactgcactcgttttggcattgcagctaaatatcagttggatcccactgcttccatttctgcaaaagtcaacaactctagcttaattggagtaggctatactcagactctgaggcctggtgtgaagcttacactctctgctctggtagatgggaagagcattaatgctggaggccacaaggttgggctcgccctggagttggaggcttaatccagctgaaagaaacctttgggaatggatatcagaagatttggccttaatatatttccattgtgaccagcagcaggcttttttcccccaagaagatgatcaaaacaaaggatgatctcaacaagagctgtattttaagtatttagacagttctttgttagctggtttctagttggttatctagttaccaatgctgcagtcctgcagtcacctatacattatttaaatgtatttaactgttaaatgcgctacccaccaataatgaaatagacctttatgaaaactgtg

SEQ ID NO: 199291 - DNA, 1557 bp, Homo sapiens
  Payload ID: 19315
  Gene Name: voltage-dependent anion channel 2
  Uniprot ID: P45880
  ENST ID: ENST00000332211
  CDS Start-End: 214-1098
ggcgcggcggacagccccgggggcagcggcggggtcctgtctgggagaggacagggttgcggcgggcggaacggtgtctccttcacttcgccctccagctgctggagctgcagcccgaccgcgagcgtgccaagcggcttcagcagctagcggagcggtggcggcggcccccctcaggacaccaccagattcccctcttcccgcggcctcgccatggcgacccacggacagacttgcgcgcgtccaatgtgtattcctccatcatatgctgaccttggcaaagctgccagagatattttcaacaaaggatttggttttgggttggtgaaactggatgtgaaaacaaagtcttgcagtggcgtggaattttcaacgtccggttcatctaatacagacactggtaaagttactgggaccttggagaccaaatacaagtggtgtgagtatggtctgactttcacagaaaagtggaacactgataacactctgggaacagaaatcgcaattgaagaccagatttgtcaaggtttgaaactgacatttgatactaccttctcaccaaacacaggaaagaaaagtggtaaaatcaagtcttcttacaagagggagtgtataaaccttggttgtgatgttgactttgattttgctggacctgcaatccatggttcagctgtctttggttatgagggctggcttgctggctaccagatgacctttgacagtgccaaatcaaagctgacaaggaataactttgcagtgggctacaggactggggacttccagctacacactaatgtcaatgatgggacagaatttggaggatcaatttatcagaaagtttgtgaagatcttgacacttcagtaaaccttgcttggacatcaggtaccaactgcactcgttttggcattgcagctaaatatcagttggatcccactgcttccatttctgcaaaagtcaacaactctagcttaattggagtaggctatactcagactctgaggcctggtgtgaagcttacactctctgctctggtagatgggaagagcattaatgctggaggccacaaggttgggctcgccctggagttggaggcttaatccagctgaaagaaacctttgggaatggatatcagaagatttggccttaatatatttccattgtgaccagcagcaggcttttttcccccaagaagatgatcaaaacaaaggatgatctcaacaagagctgtattttaagtatttagacagttctttgttagctggtttctagttggttatctagttaccaatgctgcagtcctgcagtcacctatacattatttaaatgtatttaactgttaaatgcgctacccaccaataatgaaatagacctttatgaaaactgtgcaattgtgtgcatgtttgtttttatgttcctttagaaaacattgactgttaccattgaatgagatggatcagtggatattaagatgaggttacaaattttgttaagttcagccattattacttttggtatcccagaacatgacaaattatgaataaaacaagtatacataa

SEQ ID NO: 199292 - DNA, 457 bp, Homo sapiens
  Payload ID: 19315
  Gene Name: voltage-dependent anion channel 2
  ENST ID: ENST00000413289
  CDS Start-End: 129-457
gttaattggggattctgcctttggaggatcggatcaatcacttttctagaggaagtagcagtccctcttgtgagagcgcaaggtcattacttgtgctcctaagggcgtggacgtgctttgtggaatgaatgagctggtgtaatgagctcagattgcctgcccttaagcagcacagcattggccgaggacttgagagtcacattacaatgtgtattcctccatcatatgctgaccttggcaaagctgccagagatattttcaacaaaggatttggttttgggttggtgaaactggatgtgaaaacaaagtcttgcagtggcgtggaattttcaacgtccggttcatctaatacagacactggtaaagttactgggaccttggagaccaaatacaagtggtgtgagtatggtctgactttcacagaaaagtggaacactgataacactctgggaacaga

SEQ ID NO: 199293 - DNA, 738 bp, Homo sapiens
  Payload ID: 19315
  Gene Name: voltage-dependent anion channel 2
  ENST ID: ENST00000447677
  CDS Start-End: 126-738
aagatggccgcgctgccccgcggcccctcgcccctctctgcccgggatctccctttggccctttgaccccagcttaccgcacttcttgtccctcccgcagattcccctcttcccgcggcctcgccatggcgacccacggacagacttgcgcgcgtccaatgtgtattcctccatcatatgctgaccttggcaaagctgccagagatattttcaacaaaggatttggttttgggttggtgaaactggatgtgaaaacaaagtcttgcagtggcgtggaattttcaacgtccggttcatctaatacagacactggtaaagttactgggaccttggagaccaaatacaagtggtgtgagtatggtctgactttcacagaaaagtggaacactgataacactctgggaacagaaatcgcaattgaagaccagatttgtcaaggtttgaaactgacatttgatactaccttctcaccaaacacaggaaagaaaagtggtaaaatcaagtcttcttacaagagggagtgtataaaccttggttgtgatgttgactttgattttgctggacctgcaatccatggttcagctgtctttggttatgagggctggcttgctggctaccagatgacctttgacagtgccaaatcaaagctgacaaggaataactttgcagtgggctacaggactggggacttccagctacacactaatgtcaatgatgggacagaatttggaggatcaa

SEQ ID NO: 199294 - DNA, 1424 bp, Homo sapiens
  Payload ID: 19315
  Gene Name: voltage-dependent anion channel 2
  Uniprot ID: P45880
  ENST ID: ENST00000543351
  CDS Start-End: 85-969
ggcagtcccaaaaagcctctcaggcacacaacccagcacagcaaggcagtcacaccaagattcccctcttcccgcggcctcgccatggcgacccacggacagacttgcgcgcgtccaatgtgtattcctccatcatatgctgaccttggcaaagctgccagagatattttcaacaaaggatttggttttgggttggtgaaactggatgtgaaaacaaagtcttgcagtggcgtggaattttcaacgtccggttcatctaatacagacactggtaaagttactgggaccttggagaccaaatacaagtggtgtgagtatggtctgactttcacagaaaagtggaacactgataacactctgggaacagaaatcgcaattgaagaccagatttgtcaaggtttgaaactgacatttgatactaccttctcaccaaacacaggaaagaaaagtggtaaaatcaagtcttcttacaagagggagtgtataaaccttggttgtgatgttgactttgattttgctggacctgcaatccatggttcagctgtctttggttatgagggctggcttgctggctaccagatgacctttgacagtgccaaatcaaagctgacaaggaataactttgcagtgggctacaggactggggacttccagctacacactaatgtcaatgatgggacagaatttggaggatcaatttatcagaaagtttgtgaagatcttgacacttcagtaaaccttgcttggacatcaggtaccaactgcactcgttttggcattgcagctaaatatcagttggatcccactgcttccatttctgcaaaagtcaacaactctagcttaattggagtaggctatactcagactctgaggcctggtgtgaagcttacactctctgctctggtagatgggaagagcattaatgctggaggccacaaggttgggctcgccctggagttggaggcttaatccagctgaaagaaacctttgggaatggatatcagaagatttggccttaatatatttccattgtgaccagcagcaggcttttttcccccaagaagatgatcaaaacaaaggatgatctcaacaagagctgtattttaagtatttagacagttctttgttagctggtttctagttggttatctagttaccaatgctgcagtcctgcagtcacctatacattatttaaatgtatttaactgttaaatgcgctacccaccaataatgaaatagacctttatgaaaactgtgcaattgtgtgcatgtttgtttttatgttcctttagaaaacattgactgttaccattgaatgagatggatcagtggatattaagatgaggttacaaattttgttaagttcagccattattacttttggtatcccagaacatgacaaattatgaataaaacaagtatac

SEQ ID NO: 199295 - DNA, 1355 bp, Homo sapiens
  Payload ID: 19316
  Gene Name: voltage-dependent anion channel 3
  Uniprot ID: Q9Y277
  ENST ID: ENST00000022615
  CDS Start-End: 69-920
agcagagacaggccctcggggtggaggtctttggtttcataagagcctgagagagatttttctaagatatgtgtaacacaccaacgtactgtgacctaggaaaggctgctaaggatgtcttcaacaaaggatatggctttggcatggtcaagatagacctgaaaaccaagtcttgtagtggagtggaattttctacttctggtcatgcttacactgatacagggaaagcatcaggcaacctagaaaccaaatataaggtctgtaactatggacttaccttcacccagaaatggaacacagacaatactctagggacagaaatctcttgggagaataagttggctgaagggttgaaactgactcttgataccatatttgtaccgaacacaggaaagaagagtgggaaattgaaggcctcctataaacgggattgttttagtgttggcagtaatgttgatatagatttttctggaccaaccatctatggctgggctgtgttggccttcgaagggtggcttgctggctatcagatgagttttgacacagccaaatccaaactgtcacagaataatttcgccctgggttacaaggctgcggacttccagctgcacacacatgtgaacgatggcactgaatttggaggttctatctaccagaaggtgaatgagaagattgaaacatccataaaccttgcttggacagctgggagtaacaacacccgttttggcattgctgctaagtacatgctggattgtagaacttctctctctgctaaagtaaataatgccagcctgattggactgggttatactcagacccttcgaccaggagtcaaattgactttatcagctttaatcgatgggaagaacttcagtgcaggaggtcacaaggttggcttgggatttgaactggaagcttaatgtggtttgaggaaagcatcagatttgtccctggaagtgaagagaaatgaacccactatgttttggccttaaaattcttctgtgaaatttcaaaagtgtgaactttttattcttccaaagaattgtaatcctccccacactgaagtctaggggttgcgaatccctcctgagggagatgcttgaaggcatgcctggaagttgtcatgtttgtgccacgtttcagttcagttctgaagtgttattaaatgtgttcctcagcgacagtgtagcgtcatgttagaggagacgatctgacccaccagtttgtacatcacgtcctgcatgtcccacaccattttttcatgaccttgtaatatactggtctctgtgctatagtggaatctttggttttgcatcatagtaaaataaaataaacccatcacatttggaacataa

SEQ ID NO: 199296 - DNA, 799 bp, Homo sapiens
  Payload ID: 19316
  Gene Name: voltage-dependent anion channel 3
  ENST ID: ENST00000522572
  CDS Start-End: 108-512
acggcgttggtttgaagaccttcagcgttgccctggcggagcagagacaggccctcggggtggaggtctttggtttcataagagcctgagagagatttttctaagatatgtgtaacacaccaacgtactgtgacctaggaaaggctgctaaggatgtcttcaacaaaggatatggctttggcatggtcaagatagacctgaaaaccaagtcttgtagtggagtgatggaattttctacttctggtcatgcttacactgatacagggaaagcatcaggcaacctagaaaccaaatataaggtctgtaactatggacttaccttcacccagaaatggaacacagacaatactctagggacagaaatctcttgggagaataagttggctgaagggttgaaactgactcttgataccatatttgtaccgaacacaggaaagaagagtgggaaattgaaggcctcctataaacgggattgttttagtgttggcttgggatttgaactggaagcttaatgtggtttgaggaaagcatcagatttgtccctggaagtgaagagaaatgaacccactatgttttggccttaaaattcttctgtgaaatttcaaaagtgtgaactttttattcttccaaagaattgtaatcctccccacactgaagtctaggggttgcgaatccctcctgagggagatgcttgaaggcatgcctggaagttgtcatgtttgtgccacgtttcagttcagttctgaagtgttattaaatgtgttcctcagcgacagtgtagcgtcatgttagaggagac

SEQ ID NO: 199297 - DNA, 580 bp, Homo sapiens
  Payload ID: 19316
  Gene Name: voltage-dependent anion channel 3
  ENST ID: ENST00000520115
  CDS Start-End: 86-580
gaggctgcgcaggcgcggacggcgttggtttgaagaccttcagcgttgccctggcggagcagagacaggccctcggggtggagatatgtgtaacacaccaacgtactgtgacctaggaaaggctgctaaggatgtcttcaacaaaggatatggctttggcatggtcaagatagacctgaaaaccaagtcttgtagtggagtggaattttctacttctggtcatgcttacactgatacagggaaagcatcaggcaacctagaaaccaaatataaggtctgtaactatggacttaccttcacccagaaatggaacacagacaatactctagggacagaaatctcttgggagaataagttggctgaagggttgaaactgactcttgataccatatttgtaccgaacacaggaaagaagagtgggaaattgaaggcctcctataaacgggattgttttagtgttggcagtaatgttgatatagatttttctggaccaaccatctatggctgggctgtgttggccttcgaagggtggcttgctggctatcagatgagttttgacacagccaaatccaaactgtca

SEQ ID NO: 199298 - DNA, 949 bp, Homo sapiens
  Payload ID: 19316
  Gene Name: voltage-dependent anion channel 3
  Uniprot ID: Q9Y277
  ENST ID: ENST00000521158
  CDS Start-End: 69-923
agcagagacaggccctcggggtggaggtctttggtttcataagagcctgagagagatttttctaagatatgtgtaacacaccaacgtactgtgacctaggaaaggctgctaaggatgtcttcaacaaaggatatggctttggcatggtcaagatagacctgaaaaccaagtcttgtagtggagtgatggaattttctacttctggtcatgcttacactgatacagggaaagcatcaggcaacctagaaaccaaatataaggtctgtaactatggacttaccttcacccagaaatggaacacagacaatactctagggacagaaatctcttgggagaataagttggctgaagggttgaaactgactcttgataccatatttgtaccgaacacaggaaagaagagtgggaaattgaaggcctcctataaacgggattgttttagtgttggcagtaatgttgatatagatttttctggaccaaccatctatggctgggctgtgttggccttcgaagggtggcttgctggctatcagatgagttttgacacagccaaatccaaactgtcacagaataatttcgccctgggttacaaggctgcggacttccagctgcacacacatgtgaacgatggcactgaatttggaggttctatctaccagaaggtgaatgagaagattgaaacatccataaaccttgcttggacagctgggagtaacaacacccgttttggcattgctgctaagtacatgctggattgtagaacttctctctctgctaaagtaaataatgccagcctgattggactgggttatactcagacccttcgaccaggagtcaaattgactttatcagctttaatcgatgggaagaacttcagtgcaggaggtcacaaggttggcttgggatttgaactggaagcttaatgtggtttgaggaaagcatcagattt

SEQ ID NO: 199299 - DNA, 719 bp, Homo sapiens
  Payload ID: 19316
  Gene Name: voltage-dependent anion channel 3
  ENST ID: ENST00000518563
  CDS Start-End: 394-719
agggcacaggtgcggtccccagcctcttgggcccccagtcaacctcactgtccacaccgagccctcctgcgcacgcgcgctgcggagccggacagttggtggtgctggcttggcccggctgttcgtctccgcgccttgctccgaagcgcgcgaccgtggcgcgacacgccggcgcacaggcgctctcggggaggggcggcgcgcaggcgcggctgggggtgcgaggctgcgcaggcgcggacggcgttggtttgaagaccttcagcgttgccctggcggagcagagacaggccctcggggtggaggtctttggtttcataagagcctgagagagatttttctaagatatgtgtaacacaccaacgtactgtgacctaggaaaggctgctaaggatgtcttcaacaaaggatatggaattttctacttctggtcatgcttacactgatacagggaaagcatcaggcaacctagaaaccaaatataaggtctgtaactatggacttaccttcacccagaaatggaacacagacaatactctagggacagaaatctcttgggagaataagttggctgaagggttgaaactgactcttgataccatatttgtaccgaacacaggaaagaagagtgggaaattgaaggcctcctataaacgggattgttttagtgttggcagtaatgttgatatagatttttctggaccaaccatctatggctg

SEQ ID NO: 199300 - DNA, 625 bp, Homo sapiens
  Payload ID: 19316
  Gene Name: voltage-dependent anion channel 3
  ENST ID: ENST00000522069
  CDS Start-End: 150-625
aggcgcggacggcgttggtttgaagaccttcagcgttgccctggcggagcagagacaggccctcggggtggagtttctttaaaaatttccattgttgtcttatacaggtctttggtttcataagagcctgagagagatttttctaagatatgtgtaacacaccaacgtactgtgacctaggaaaggctgctaaggatgtcttcaacaaaggatatggctttggcatggtcaagatagacctgaaaaccaagtcttgtagtggagtggaattttctacttctggtcatgcttacactgatacagggaaagcatcaggcaacctagaaaccaaatataaggtctgtaactatggacttaccttcacccagaaatggaacacagacaatactctagggacagaaatctcttgggagaataagttggctgaagggttgaaactgactcttgataccatatttgtaccgaacacaggaaagaagagtgggaaattgaaggcctcctataaacgggattgttttagtgttggcagtaatgttgatatagatttttctggaccaaccatctatggctgggctgtgttggccttcgaagggtggcttgctggctatcagatgagttttgacac

SEQ ID NO: 199301 - DNA, 531 bp, Homo sapiens
  Payload ID: 19316
  Gene Name: voltage-dependent anion channel 3
  ENST ID: ENST00000518495
  CDS Start-End: 70-243
gagcagagacaggccctcggggtggaggtctttggtttcataagagcctgagagagatttttctaagatatgtgtaacacaccaacgtactgtgacctaggaaaggctgctaaggatgtcttcaacaaaggatatggctttggcatggtcaagatagacctgaaaaccaagtcttgtagtggagtgttgtgtggtaatattcattcagatggaattttctacttctggtcatgcttacactgatacagggaaagcatcaggcaacctagaaaccaaatataaggtctgtaactatggacttaccttcacccagaaatggaacacagacaatactctagggacagaaatctcttgggagaataagttggctgaagggttgaaactgactcttgataccatatttgtaccgaacacaggaaagaagagtgggaaattgaaggcctcctataaacgggattgttttagtgttggcagtaatgttgatatagatttttctggaccaaccatctatggctgggctgtgttggcctt

SEQ ID NO: 199302 - DNA, 631 bp, Homo sapiens
  Payload ID: 19316
  Gene Name: voltage-dependent anion channel 3
  ENST ID: ENST00000522010
  CDS Start-End: 3-305
atatgtgtaacacaccaacgtactgtgacctaggaaaggctgctaaggatgtcttcaacaaaggatatggctttggcatggtcaagatagacctgaaaaccaagtcttgtagtggagtggaattttctacttctggtcatgcttacactgatacagggaaagcatcaggcaacctagaaaccaaatataaggtctgtaactatggacttaccttcacccagaaatggaacacagacaatactctagggacagaaatctcttgggagaataagaaagaagagtgggaaattgaaggcctcctataaacgggattgttttagtgttggcagtaatgttgatatagatttttctggaccaaccatctatggctgggctgtgttggccttcgaagggtggcttgctggctatcagatgagttttgacacagccaaatccaaactgtcacagaataatttcgccctgggttacaaggctgcggacttccagctgcacacacatgtgaacgatggcactgaatttggaggttctatctaccagaaggtgaatgagaagattgaaacatccataaaccttgcttggacagctgggagtaacaacacccgttttggcattgctgctaagtacatgctgg

SEQ ID NO: 199303 - DNA, 2353 bp, Homo sapiens
  Payload ID: 19317
  Gene Name: vomeronasal 1 receptor 1
  Uniprot ID: Q9GZP7
  ENST ID: ENST00000321039
  CDS Start-End: 657-1718
tcccaggttcaagcgattctcctgcctcagcctcccgagtagctgggactagcacgcgccgccatgcccggctaatttttgtattattagtattttgtattattagtagagacagggtttcaccatgttggccaggatggtctccatcttggcctcccgaagtgctggaattacaggtgtgagccactgcacccggcctaaaatttgtttcaatgcatcaataacaatggtgtttactaaaatattagtgtggaaaaggttttatggtgtattatttttgcttttcatatctccaggctacttaattgaaggttttattgaaataagtgtagactcacaagcagtcataagaaataatacagaaaaagccctgtccatattacccagggttccgtcatgattacattttgcaaactatagtataatatcactctaatgatattgactcttctgtgttctgtttttatatatttccctagttttgcttgtatttacttgttgcatgtgtgtaagccctgagttttataggtttgatttgtggatctgttgtgcggttgagccctcattcattcacctgcttctctgcagttggacacacaagcaattgcctttgcacgaacagggacaatcttaatttctgtttaagatgagaaaatatggttggagacacattaaaacttctgtctccactgatgacaagatacttctttctgcttttttattctactgattcttcagacctcaatgaaaatcaacatcccctagattttgatgaaatggcttttggaaaagtaaaatcagggattagcttcctcattcagactggagttgggatcctgggaaattcctttctcctttgtttttataacttaattttgttcactggacacaagctgagacccacggacttgattctcagccaactggccttggctaactccatggtccttttctttaaagggatacctcagacaatggcagcttttggattgaaatatttgctgaatgacactggatgtaagtttgtcttttattatcacagggtgggcacaagagtttccctcagcaccatctgccttctcaatggattccaagccattaagctcaaccccagtatatgcaggtggatggagatcaagattagatccccaaggtttattgacttctgttgtctcctctgctgggccccccatgtcttgatgaatgcatctgttcttctattagtgaatggcccactgaatagcaaaaacagtagtgcaaaaaacaattatggatactgttcttacaaagcatcaaagagatttagctcattacatgcagtcttatatttttcccctgattttatgagtttgggcttcatggtctgggccagtggctccatggtcttcttcctctacagacacaagcagcaagtccaacacaatcacagcaacagactctcctgcagaccttcccaggaagccagagccacacacaccatcatggtcctggtgagctccttttttgttttctattcagtccatagttttctgacaatttggacaactgtagttgcaaacccaggccagtggatagtgaccaactctgtgttggtcgcctcatgtttcccagcacgcagcccttttgtcctcatcatgagtgatactcatatctctcagttctgttttgcctgcaggacaaggaaaacactctttcctaatctggttgtcatgccatgagtcttttctcttcatggaattcagctatttatcataactcttgctaagatttaggaaatattaactactagttatttgtgatagcaacatacacatggccagtaatgctcttgtccaggaagatctaataccagagctaaaaatgaaagtcatggatactgttacacaaagaacactctatataactgtgttaagtccttcagacaagttcaggaaatcaaaaagtttaaaaagggaattctttagagatttaggggagatttctcatttttgtactatgaagaatcatggaatgttttaaaaatatttttaaagcacagtttgattcaggtgcttcttgaacagcataaatcccctggagagtccacatgtaagaaagacatgtgcaggccgggcacagtggctcacgcctgtaatcccaccgttttgggaggctgaggcactcccaaatgcctcaagtgatccactcaagatgacttgaggccaggagttcgagaccagcctggccaacatggcaaaaaccctgtctcaaatacaaaaattagccaaccatgtggcacacacctgtagtcccagctactccagagggtgaagcacgagaattacttaccagcttgggtgacggagggagactc

SEQ ID NO: 199304 - DNA, 1311 bp, Homo sapiens
  Payload ID: 19318
  Gene Name: vomeronasal 1 receptor 2
  Uniprot ID: Q8NFZ6
  ENST ID: ENST00000341702
  CDS Start-End: 85-1272
tctctctctgccttggctgccaggcagggaagggccccctgtccagtggacacgtgacccacgtgaccttacctatcattggagatgactcacactctttaccctaccccttttgctttgtatccaataaatatcagcgcagcctggcatttggggccactaccagtctcctgctttgtatccaataaatatcagtgcagcctggcattcggggccactaccggtctccgcgtcttggtggtagtggtcccccagacacagctgtcttttctttcatctctttgtcttgtgtctttatttctacactctcttgtctctgcacacggagagaaacccaccaaacctgtggggctggaccctacactattccaggtagttgttggaatcctggggaatttttcactcttatattattatatgttcctttactttaggggatacaagccaagatccacagatttgattctcaggcacctgactgtagctgactccttggttatcctatctaaaagaatcccagagaccatggcaacttttgggttgaaacattttgacaattattttggatgcaaatttcttttgtatgcacacagggtaggcaggggtgtgtccattggaagcacctgcctcttgagtgtcttccaggtgatcaccatcaaccctaggaactccaggtgggcagagatgaaagtaaaagccccgacatacattggtctctccaatatcctgtgctgggccttccacatgctggtaaatgccatttttcctatttatacaactggcaaatggagcaacaacaacatcacaaagaaaggagatttgggatattgttctgccccacttagtgatgaagtcacaaagtcagtatatgcagcattgacatccttccatgatgttttgtgtctggggctcatgctctgggccagcagctccatcgttttggtcttgtacaggcacaaacagcaggtacaacacatctgtaggaacaatctctaccccaactcttctcctgggaacagagccatccaaagcatccttgcattggtgagcacctttgcattatgttacgccctttccttcatcacctacgtttatttagctctcttcgataattccagttggtggctagtgaacactgctgcactaatcattgcctgttttccaactattagcccttttgttctcatgtgccgtgaccccagcagatccaggctctgcagtatctgctgcagaagaaatagacgattctttcatgatttcaggaaaatgtgaattggctgtcttggtttatgttcggccactgatgcactc

SEQ ID NO: 199305 - DNA, 1048 bp, Homo sapiens
  Payload ID: 19319
  Gene Name: vomeronasal 1 receptor 4
  Uniprot ID: Q7Z5H5
  ENST ID: ENST00000311170
  CDS Start-End: 59-964
tccatgcaggacctcccagccctgaagacaaacatcagtgacagacatcagtggcagaatggcctcccggtatgtggcagtgggaatgatcttatcacagaccgtggtgggagtcctggggagcttctctgttcttctccattatctctccttttactgcactgggtgcaggttaaggtccacagatttgattgttaagcacctgattgtagccaacttcttagctctccgctgtaaaggagtcccccagacaatggcagcttttggggttagatattttctcaatgctcttgggtgcaaacttgttttctatctccatagagtgggcaggggagtgtccattggcaccacctgcctcttgagtgtcttccaggtgatcacggtcagctccaggaaatccaggtgggcaaaacttaaagagaaagcccccaagcatgttggcttttctgttctcctgtgctggatcgtgtgcatgttggtaaacatcatctttcccatgtatgtgactggcaaatggaactacacaaacatcacagtgaacgaggatttgggatactgttctgggggaggcaacaacaaaatcgcacagacactgcgtgcaatgttgttatcattccctgatgtgttgtgtctggggctcatgctctgggtcagcagctccatggtttgcatactgcacaggcacaagcagcgggtccagcacattgataggagcaatctctcccccagagcctccccagagaacagagctacgcagagcatcctcatcctggtgagcacctttgtgtcttcttacactctctcctgccttttccaagtttgtatggctcttttggataatcccaatagtttactggtgaacacttcagccttaatgagtgtatgtttcccaactctcagcccctttgttctcatgagctgtgaccccagtgtatacaggttttgttttgcctggaaaagatgacaagatctcctaacctcatcataaacatgtacattgtatatatttgctcatggttcaattgatgacttactcttctgtgccgca

SEQ ID NO: 199306 - DNA, 1686 bp, Homo sapiens
  Payload ID: 19320
  Gene Name: von Hippel-Lindau binding protein 1
  Uniprot ID: P61758
  ENST ID: ENST00000286428
  CDS Start-End: 118-711
tgcgcaccaatgaatgtgcatggagatggagaggcgggcctgcaagtgcgaacaagccaatcacggaatcccggcggccggcggcccgggaggcagtcgcgcgctcgcatccccaagatggcggccgttaaggacagttgtggcaaaggagaaatggccacagggaatgggcggcggctccacctggggattcctgaggccgtgtttgtggaagatgtagattccttcatgaaacagcctgggaatgagactgcagatacagtattaaagaagctggatgaacagtaccagaagtataagtttatggaactcaaccttgctcaaaagaaaagaaggctaaaaggtcagattcctgaaattaaacagactttggaaattctaaaatacatgcagaagaaaaaagagtccaccaactcaatggagaccagattcttgctggcagataacctgtattgcaaagcttcagttcctcctaccgataaagtgtgtctgtggttgggggctaatgtaatgcttgaatatgatattgatgaagctcaggcattgttggaaaagaatttatcgactgccacaaagaatcttgattccctggaggaagaccttgactttcttcgagatcaatttactaccacagaagtcaatatggccagggtttataattgggatgtaaaaagaagaaacaaggatgactctaccaagaacaaagcataatgctggcaattaaaaatgtggtttagttttccaaacatgttatcttaaatacccctttatccttacaggttgacataactttgaatgttttaacagcaagaattttaagaaaagataaacaccattttatttatttataaaaacaaaattagtttcaaatatttttgacattgtgatttttttttccacatttctcagcaaagctaatggtattttaatcattatttttgcctgtcataagaaaactcttagctgaaatggccgaaaactgtgagacatgctatggaagctgaatgccggacgctagcacagtttactttttccctttctaattggctgatgttactctcacttgatgtggttaaaccattttagaggtagagaagacagacagtttgaatatttgtaaacttgtttttctttggtatatttaggacttagtggtcctctgttgctattgtcttctataagtggagtttcatgacttactgcttaacgaataactaactactatgatattctggacattttaggaaatggtaatttgccttgctacacattaagagggctattaagactacattttttctaacctcagataagtgcagtgtctttgcaatgccaacataagggagatcttggccaacgtgaaataaaattactcattcaaaactctgcctaaggtgattttgtagttcttaacagttctccagagcatcttgaacaggaatattaagataaatgtgaatctgcaatggctgaaaagagttgtgagcttttttattcatgataaaaccttataggaatagtataaaaaatccctgtggaaagctactagtacattgaccagcgctgggtgatacagattctgataaaaacataaatgtattagttcatctccatgtagtaaaaagtatacttatacaatgttttgtacttgtatttcatgaaattaaaacagtgatgctaaaacta

SEQ ID NO: 199307 - DNA, 944 bp, Homo sapiens
  Payload ID: 19320
  Gene Name: von Hippel-Lindau binding protein 1
  ENST ID: ENST00000535916
  CDS Start-End: 164-742
attactcagcttttcatctgctgtgttgaaagccaacttatcatttttcacattattgtatacatctaaaagacatcataaacgaagactggaagtgaaaactgaaaaactgagaaagttttatttgttggaggttccaactccattgggagctccttctctaatggcacctcaacccatgattcatacccagcaaggcctaaggaccagtagtccttccactccatccccagagcatcaggaagatgtagattccttcatgaaacagcctgggaatgagactgcagatacagtattaaagaagctggatgaacagtaccagaagtataagtttatggaactcaaccttgctcaaaagaaaagaaggctaaaaggtcagattcctgaaattaaacagactttggaaattctaaaatacatgcagaagaaaaaagagtccaccaactcaatggagaccagattcttgctggcagataacctgtattgcaaagcttcagttcctcctaccgataaagtgtgtctgtggttgggggctaatgtaatgcttgaatatgatattgatgaagctcaggcattgttggaaaagaatttatcgactgccacaaagaatcttgattccctggaggaagaccttgactttcttcgagatcaatttactaccacagaagtcaatatggccagggtttataattgggatgtaaaaagaagaaacaaggatgactctaccaagaacaaagcataatgctggcaattaaaaatgtggtttagttttccaaacatgttatcttaaatacccctttatccttacaggttgacataactttgaatgttttaacagcaagaattttaagaaaagataaacaccattttatttatttataaaaacaaaattagtttcaaatatttttgacattgtgatttttttttccacatttctcagcaaa

SEQ ID NO: 199308 - DNA, 1547 bp, Homo sapiens
  Payload ID: 19320
  Gene Name: von Hippel-Lindau binding protein 1
  ENST ID: ENST00000625964
  CDS Start-End: 1-579
atggcacctcaacccatgattcatacccagcaaggcctaaggaccagtagtccttccactccatccccagagcatcaggaagatgtagattccttcatgaaacagcctgggaatgagactgcagatacagtattaaagaagctggatgaacagtaccagaagtataagtttatggaactcaaccttgctcaaaagaaaagaaggctaaaaggtcagattcctgaaattaaacagactttggaaattctaaaatacatgcagaagaaaaaagagtccaccaactcaatggagaccagattcttgctggcagataacctgtattgcaaagcttcagttcctcctaccgataaagtgtgtctgtggttgggggctaatgtaatgcttgaatatgatattgatgaagctcaggcattgttggaaaagaatttatcgactgccacaaagaatcttgattccctggaggaagaccttgactttcttcgagatcaatttactaccacagaagtcaatatggccagggtttataattgggatgtaaaaagaagaaacaaggatgactctaccaagaacaaagcataatgctggcaattaaaaatgtggtttagttttccaaacatgttatcttaaatacccctttatccttacaggttgacataactttgaatgttttaacagcaagaattttaagaaaagataaacaccattttatttatttataaaaacaaaattagtttcaaatatttttgacattgtgatttttttttccacatttctcagcaaagctaatggtattttaatcattatttttgcctgtcataagaaaactcttagctgaaatggccgaaaactgtgagacatgctatggaagctgaatgccggacgctagcacagtttactttttccctttctaattggctgatgttactctcacttgatgtggttaaaccattttagaggtagagaagacagacagtttgaatatttgtaaacttgtttttctttggtatatttaggacttagtggtcctctgttgctattgtcttctataagtggagtttcatgacttactgcttaacgaataactaactactatgatattctggacattttaggaaatggtaatttgccttgctacacattaagagggctattaagactacattttttctaacctcagataagtgcagtgtctttgcaatgccaacataagggagatcttggccaacgtgaaataaaattactcattcaaaactctgcctaaggtgattttgtagttcttaacagttctccagagcatcttgaacaggaatattaagataaatgtgaatctgcaatggctgaaaagagttgtgagcttttttattcatgataaaaccttataggaatagtataaaaaatccctgtggaaagctactagtacattgaccagcgctgggtgatacagattctgataaaaacataaatgtattagttcatctccatgtagtaaaaagtatacttatacaatgttttgtacttgtatttcatgaaattaaaacagtgatgct

SEQ ID NO: 199309 - DNA, 3737 bp, Homo sapiens
  Payload ID: 19321
  Gene Name: von Hippel-Lindau tumor suppressor, E3 ubiquitin protein ligase
  Uniprot ID: P40337
  ENST ID: ENST00000256474
  CDS Start-End: 841-1482
tgagtgtttatgtttgtagttttaattgctctgaagtaaatatctgattttccaatttccaccagagtgctctgcacatagtaggtctaattatttttccctctttactaatcacccatgccttgtaagaattcagttagttgactttttgtactttataagcgtgatgattgggtgttcccgtgtgagatgcgccaccctcgaaccttgttacgacgtcggcacattgcgcgtctgacatgaagaaaaaaaaaattcagttagtccaccaggcacagtggctaaggcctgtaatccctgcactttgagaggccaaggcaggaggatcacttgaacccaggagttcgagaccagcctaggcaacatagcgagactccgtttcaaacaacaaataaaaataattagtcgggcatggtggtgcgcgcctacagtaccaactactcgggaggctgaggcgagacgatcgcttgagccagggaggtcaaggctgcagtgagccaagctcgcgccactgcactccagcccgggcgacagagtgagaccctgtctcaaaaaaaaaaaaaacaccaaaccttagaggggcgaaaaaaaattttatagtggaaatacagtaacgagttggcctagcctcgcctccgttacaacggcctacggtgctggaggatccttctgcgcacgcgcacagcctccggccggctatttccgcgagcgcgttccatcctctaccgagcgcgcgcgaagactacggaggtcgactcgggagcgcgcacgcagctccgccccgcgtccgacccgcggatcccgcggcgtccggcccgggtggtctggatcgcggagggaatgccccggagggcggagaactgggacgaggccgaggtaggcgcggaggaggcaggcgtcgaagagtacggccctgaagaagacggcggggaggagtcgggcgccgaggagtccggcccggaagagtccggcccggaggaactgggcgccgaggaggagatggaggccgggcggccgcggcccgtgctgcgctcggtgaactcgcgcgagccctcccaggtcatcttctgcaatcgcagtccgcgcgtcgtgctgcccgtatggctcaacttcgacggcgagccgcagccctacccaacgctgccgcctggcacgggccgccgcatccacagctaccgaggtcacctttggctcttcagagatgcagggacacacgatgggcttctggttaaccaaactgaattatttgtgccatctctcaatgttgacggacagcctatttttgccaatatcacactgccagtgtatactctgaaagagcgatgcctccaggttgtccggagcctagtcaagcctgagaattacaggagactggacatcgtcaggtcgctctacgaagatctggaagaccacccaaatgtgcagaaagacctggagcggctgacacaggagcgcattgcacatcaacggatgggagattgaagatttctgttgaaacttacactgtttcatctcagcttttgatggtactgatgagtcttgatctagatacaggactggttccttccttagtttcaaagtgtctcattctcagagtaaaataggcaccattgcttaaaagaaagttaactgacttcactaggcattgtgatgtttaggggcaaacatcacaaaatgtaatttaatgcctgcccattagagaagtatttatcaggagaaggtggtggcatttttgcttcctagtaagtcaggacagcttgtatgtaaggaggtttgtataagtaattcagtgggaattgcagcatatcgtttaattttaagaaggcattggcatctgcttttaatggatgtataatacatccattctacatccgtagcggttggtgacttgtctgcctcctgctttgggaagactgaggcatccgtgaggcagggacaagtctttctcctctttgagaccccagtgcctgcacatcatgagccttcagtcagggtttgtcagaggaacaaaccaggggacactttgttagaaagtgcttagaggttctgcctctatttttgttggggggtgggagaggggaccttaaaatgtgtacagtgaacaaatgtcttaaagggaatcatttttgtaggaagcattttttataattttctaagtcgtgcactttctcggtccactcttgttgaagtgctgttttattactgtttctaaactaggattgacattctacagttgtgataatagcatttttgtaacttgccatccgcacagaaaatacgagaaaatctgcatgtttgattatagtattaatggacaaataagtttttgctaaatgtgagtatttctgttcctttttgtaaatatgtgacattcctgattgatttgggtttttttgttgttgttgttttgttttgttttgtttttttgagatggagtctcactcttgtcacccaggctggagtgcagtggcgccatctcggctcactgcaacctctgcctcctgggttcacgtaatcctcctgagtagctgggattacaggcgcctgccaccacgctggccaatttttgtacttttagtagagacagtgtttcgtcatgttggccaggctggtttcaaactcctgacctcaggtgatccgcccacctcagcctcccaaaatggtgggattacaggtgtgtgggccaccgtgcctggctgattcagcattttttatcaggcaggaccaggtggcacttccacctccagcctctggtcctaccaatggattcatggagtagcctggactgtttcatagttttctaaatgtacaaattcttataggctagacttagattcattaactcaaattcaatgcttctatcagactcagttttttgtaactaatagatttttttttccacttttgttctactccttccctaatagctttttaaaaaaatctccccagtagagaaacatttggaaaagacagaaaactaaaaaggaagaaaaaagatccctattagatacacttcttaaatacaatcacattaacattttgagctatttccttccagcctttttagggcagattttggttggtttttacatagttgagattgtactgttcatacagttttataccctttttcatttaactttataacttaaatattgctctatgttagtataagcttttcacaaacattagtatagtctcccttttataattaatgtttgtgggtatttcttggcatgcatctttaattccttatcctagcctttgggcacaattcctgtgctcaaaaatgagagtgacggctggcatggtggctcccgcctgtaatcccagtactttggaaagccaaggtaagaggattgcttgagcccagaacttcaagatgagcctgggctcatagtgagaacccatctatacaaaaaatttttaaaaattagcatggcggcacacatctgtaatcctagctacttggcaggctgaggtgagaagatcattggagtttaggaattggaggctgcagtgagccatgagtatgccactgcactccagcctgggggacagagcaagaccctgcctcaaaaaaaaaaaaaaaaaaaaaatcaggccgggcatggtggctcacgcctgtaatcccagcactttgggaggtcgaggtgggcagatcacctgaggtcaggagttcgagaccagcctggccaacatggtaaaaccccatttctactaaaaaatacaagaat

SEQ ID NO: 199310 - DNA, 2696 bp, Homo sapiens
  Payload ID: 19321
  Gene Name: von Hippel-Lindau tumor suppressor, E3 ubiquitin protein ligase
  Uniprot ID: P40337
  ENST ID: ENST00000345392
  CDS Start-End: 61-579
cccgcgtccgacccgcggatcccgcggcgtccggcccgggtggtctggatcgcggagggaatgccccggagggcggagaactgggacgaggccgaggtaggcgcggaggaggcaggcgtcgaagagtacggccctgaagaagacggcggggaggagtcgggcgccgaggagtccggcccggaagagtccggcccggaggaactgggcgccgaggaggagatggaggccgggcggccgcggcccgtgctgcgctcggtgaactcgcgcgagccctcccaggtcatcttctgcaatcgcagtccgcgcgtcgtgctgcccgtatggctcaacttcgacggcgagccgcagccctacccaacgctgccgcctggcacgggccgccgcatccacagctaccgagtgtatactctgaaagagcgatgcctccaggttgtccggagcctagtcaagcctgagaattacaggagactggacatcgtcaggtcgctctacgaagatctggaagaccacccaaatgtgcagaaagacctggagcggctgacacaggagcgcattgcacatcaacggatgggagattgaagatttctgttgaaacttacactgtttcatctcagcttttgatggtactgatgagtcttgatctagatacaggactggttccttccttagtttcaaagtgtctcattctcagagtaaaataggcaccattgcttaaaagaaagttaactgacttcactaggcattgtgatgtttaggggcaaacatcacaaaatgtaatttaatgcctgcccattagagaagtatttatcaggagaaggtggtggcatttttgcttcctagtaagtcaggacagcttgtatgtaaggaggtttgtataagtaattcagtgggaattgcagcatatcgtttaattttaagaaggcattggcatctgcttttaatggatgtataatacatccattctacatccgtagcggttggtgacttgtctgcctcctgctttgggaagactgaggcatccgtgaggcagggacaagtctttctcctctttgagaccccagtgcctgcacatcatgagccttcagtcagggtttgtcagaggaacaaaccaggggacactttgttagaaagtgcttagaggttctgcctctatttttgttggggggtgggagaggggaccttaaaatgtgtacagtgaacaaatgtcttaaagggaatcatttttgtaggaagcattttttataattttctaagtcgtgcactttctcggtccactcttgttgaagtgctgttttattactgtttctaaactaggattgacattctacagttgtgataatagcatttttgtaacttgccatccgcacagaaaatacgagaaaatctgcatgtttgattatagtattaatggacaaataagtttttgctaaatgtgagtatttctgttcctttttgtaaatatgtgacattcctgattgatttgggtttttttgttgttgttgttttgttttgttttgtttttttgagatggagtctcactcttgtcacccaggctggagtgcagtggcgccatctcggctcactgcaacctctgcctcctgggttcacgtaatcctcctgagtagctgggattacaggcgcctgccaccacgctggccaatttttgtacttttagtagagacagtgtttcgtcatgttggccaggctggtttcaaactcctgacctcaggtgatccgcccacctcagcctcccaaaatggtgggattacaggtgtgtgggccaccgtgcctggctgattcagcattttttatcaggcaggaccaggtggcacttccacctccagcctctggtcctaccaatggattcatggagtagcctggactgtttcatagttttctaaatgtacaaattcttataggctagacttagattcattaactcaaattcaatgcttctatcagactcagttttttgtaactaatagatttttttttccacttttgttctactccttccctaatagctttttaaaaaaatctccccagtagagaaacatttggaaaagacagaaaactaaaaaggaagaaaaaagatccctattagatacacttcttaaatacaatcacattaacattttgagctatttccttccagcctttttagggcagattttggttggtttttacatagttgagattgtactgttcatacagttttataccctttttcatttaactttataacttaaatattgctctatgttagtataagcttttcacaaacattagtatagtctcccttttataattaatgtttgtgggtatttcttggcatgcatctttaattccttatcctagcctttgggcacaattcctgtgctcaaaaatgagagtgacggctggcatggtggctcccgcctgtaatcccagtactttggaaagccaaggtaagaggattgcttgagcccagaacttcaagatgagcctgggctcatagtgagaacccatctatacaaaaaatttttaaaaattagcatggcggcacacatctgtaatcctagctacttggcaggctgaggtgagaagatcattggagtttaggaattggaggctgcagtgagccatgagtatgccactgcactccagcctgggggacagagcaagaccctgcctcaaaaaaaaaaaaaaaaaaaaaa

SEQ ID NO: 199311 - DNA, 676 bp, Homo sapiens
  Payload ID: 19322
  Gene Name: von Hippel-Lindau tumor suppressor-like
  Uniprot ID: Q6RSH7
  ENST ID: ENST00000339922
  CDS Start-End: 111-530
ctcccagcctttctgattccattgtaactcttgccgaaatccgggtgaacggaagtagtctctttaagaactggtatgggcaggcccaagttgtcaaggcttcggaggtaatgccctggagagcggggaacggggtgggtttagaggcccaggcgggcacccaggaggcaggcccagaagagtactgccaggaagagttgggcgccgaggaggagatggcagccagagcagcatggcctgtgctgcgctctgtgaactcacgcgagctctcccggatcatcatctgcaatcacagcccacgaatcgtgctgcctgtgtggctcaactactatggcaagctgctgccctacctgacgctgctgcccggcagggacttccgcatccacaacttccgaagccacccttggctcttcagagatgcaaggacacatgataagcttctggttaaccaaactgaattgtttgtgccatcttccaatgttaatggacagcctgtttttgccaacatcacactgcagtgtataccctgaaagagcaatgcctccaggttgtcggaagcctagtcaagcccaagaattacaggagactggacatcgtcagatcactctatgacgatctggaagatcatccaaatgtgattgaaagacctggagcggctgacgcaggagcacagtga

SEQ ID NO: 199312 - DNA, 8838 bp, Homo sapiens
  Payload ID: 19323
  Gene Name: von Willebrand factor
  Uniprot ID: P04275
  ENST ID: ENST00000261405
  CDS Start-End: 256-8697
gtggcagctcacagctattgtggtgggaaagggagggtggttggtggatgtcacagcttgggctttatctcccccagcagtggggactccacagcccctgggctacataacagcaagacagtccggagctgtagcagacctgattgagcctttgcagcagctgagagcatggcctagggtgggcggcaccattgtccagcagctgagtttcccagggaccttggagatagccgcagccctcatttgcaggggaagatgattcctgccagatttgccggggtgctgcttgctctggccctcattttgccagggaccctttgtgcagaaggaactcgcggcaggtcatccacggcccgatgcagccttttcggaagtgacttcgtcaacacctttgatgggagcatgtacagctttgcgggatactgcagttacctcctggcagggggctgccagaaacgctccttctcgattattggggacttccagaatggcaagagagtgagcctctccgtgtatcttggggaattttttgacatccatttgtttgtcaatggtaccgtgacacagggggaccaaagagtctccatgccctatgcctccaaagggctgtatctagaaactgaggctgggtactacaagctgtccggtgaggcctatggctttgtggccaggatcgatggcagcggcaactttcaagtcctgctgtcagacagatacttcaacaagacctgcgggctgtgtggcaactttaacatctttgctgaagatgactttatgacccaagaagggaccttgacctcggacccttatgactttgccaactcatgggctctgagcagtggagaacagtggtgtgaacgggcatctcctcccagcagctcatgcaacatctcctctggggaaatgcagaagggcctgtgggagcagtgccagcttctgaagagcacctcggtgtttgcccgctgccaccctctggtggaccccgagccttttgtggccctgtgtgagaagactttgtgtgagtgtgctggggggctggagtgcgcctgccctgccctcctggagtacgcccggacctgtgcccaggagggaatggtgctgtacggctggaccgaccacagcgcgtgcagcccagtgtgccctgctggtatggagtataggcagtgtgtgtccccttgcgccaggacctgccagagcctgcacatcaatgaaatgtgtcaggagcgatgcgtggatggctgcagctgccctgagggacagctcctggatgaaggcctctgcgtggagagcaccgagtgtccctgcgtgcattccggaaagcgctaccctcccggcacctccctctctcgagactgcaacacctgcatttgccgaaacagccagtggatctgcagcaatgaagaatgtccaggggagtgccttgtcacaggtcaatcacacttcaagagctttgacaacagatacttcaccttcagtgggatctgccagtacctgctggcccgggattgccaggaccactccttctccattgtcattgagactgtccagtgtgctgatgaccgcgacgctgtgtgcacccgctccgtcaccgtccggctgcctggcctgcacaacagccttgtgaaactgaagcatggggcaggagttgccatggatggccaggacgtccagctccccctcctgaaaggtgacctccgcatccagcatacagtgacggcctccgtgcgcctcagctacggggaggacctgcagatggactgggatggccgcgggaggctgctggtgaagctgtcccccgtctatgccgggaagacctgcggcctgtgtgggaattacaatggcaaccagggcgacgacttccttaccccctctgggctggcggagccccgggtggaggacttcgggaacgcctggaagctgcacggggactgccaggacctgcagaagcagcacagcgatccctgcgccctcaacccgcgcatgaccaggttctccgaggaggcgtgcgcggtcctgacgtcccccacattcgaggcctgccatcgtgccgtcagcccgctgccctacctgcggaactgccgctacgacgtgtgctcctgctcggacggccgcgagtgcctgtgcggcgccctggccagctatgccgcggcctgcgcggggagaggcgtgcgcgtcgcgtggcgcgagccaggccgctgtgagctgaactgcccgaaaggccaggtgtacctgcagtgcgggaccccctgcaacctgacctgccgctctctctcttacccggatgaggaatgcaatgaggcctgcctggagggctgcttctgccccccagggctctacatggatgagaggggggactgcgtgcccaaggcccagtgcccctgttactatgacggtgagatcttccagccagaagacatcttctcagaccatcacaccatgtgctactgtgaggatggcttcatgcactgtaccatgagtggagtccccggaagcttgctgcctgacgctgtcctcagcagtcccctgtctcatcgcagcaaaaggagcctatcctgtcggccccccatggtcaagctggtgtgtcccgctgacaacctgcgggctgaagggctcgagtgtaccaaaacgtgccagaactatgacctggagtgcatgagcatgggctgtgtctctggctgcctctgccccccgggcatggtccggcatgagaacagatgtgtggccctggaaaggtgtccctgcttccatcagggcaaggagtatgcccctggagaaacagtgaagattggctgcaacacttgtgtctgtcaggaccggaagtggaactgcacagaccatgtgtgtgatgccacgtgctccacgatcggcatggcccactacctcaccttcgacgggctcaaatacctgttccccggggagtgccagtacgttctggtgcaggattactgcggcagtaaccctgggacctttcggatcctagtggggaataagggatgcagccacccctcagtgaaatgcaagaaacgggtcaccatcctggtggagggaggagagattgagctgtttgacggggaggtgaatgtgaagaggcccatgaaggatgagactcactttgaggtggtggagtctggccggtacatcattctgctgctgggcaaagccctctccgtggtctgggaccgccacctgagcatctccgtggtcctgaagcagacataccaggagaaagtgtgtggcctgtgtgggaattttgatggcatccagaacaatgacctcaccagcagcaacctccaagtggaggaagaccctgtggactttgggaactcctggaaagtgagctcgcagtgtgctgacaccagaaaagtgcctctggactcatcccctgccacctgccataacaacatcatgaagcagacgatggtggattcctcctgtagaatccttaccagtgacgtcttccaggactgcaacaagctggtggaccccgagccatatctggatgtctgcatttacgacacctgctcctgtgagtccattggggactgcgcctgcttctgcgacaccattgctgcctatgcccacgtgtgtgcccagcatggcaaggtggtgacctggaggacggccacattgtgcccccagagctgcgaggagaggaatctccgggagaacgggtatgagtgtgagtggcgctataacagctgtgcacctgcctgtcaagtcacgtgtcagcaccctgagccactggcctgccctgtgcagtgtgtggagggctgccatgcccactgccctccagggaaaatcctggatgagcttttgcagacctgcgttgaccctgaagactgtccagtgtgtgaggtggctggccggcgttttgcctcaggaaagaaagtcaccttgaatcccagtgaccctgagcactgccagatttgccactgtgatgttgtcaacctcacctgtgaagcctgccaggagccgggaggcctggtggtgcctcccacagatgccccggtgagccccaccactctgtatgtggaggacatctcggaaccgccgttgcacgatttctactgcagcaggctactggacctggtcttcctgctggatggctcctccaggctgtccgaggctgagtttgaagtgctgaaggcctttgtggtggacatgatggagcggctgcgcatctcccagaagtgggtccgcgtggccgtggtggagtaccacgacggctcccacgcctacatcgggctcaaggaccggaagcgaccgtcagagctgcggcgcattgccagccaggtgaagtatgcgggcagccaggtggcctccaccagcgaggtcttgaaatacacactgttccaaatcttcagcaagatcgaccgccctgaagcctcccgcatcaccctgctcctgatggccagccaggagccccaacggatgtcccggaactttgtccgctacgtccagggcctgaagaagaagaaggtcattgtgatcccggtgggcattgggccccatgccaacctcaagcagatccgcctcatcgagaagcaggcccctgagaacaaggccttcgtgctgagcagtgtggatgagctggagcagcaaagggacgagatcgttagctacctctgtgaccttgcccctgaagcccctcctcctactctgccccccgacatggcacaagtcactgtgggcccggggctcttgggggtttcgaccctggggcccaagaggaactccatggttctggatgtggcgttcgtcctggaaggatcggacaaaattggtgaagccgacttcaacaggagcaaggagttcatggaggaggtgattcagcggatggatgtgggccaggacagcatccacgtcacggtgctgcagtactcctacatggtgactgtggagtaccccttcagcgaggcacagtccaaaggggacatcctgcagcgggtgcgagagatccgctaccagggcggcaacaggaccaacactgggctggccctgcggtacctctctgaccacagcttcttggtcagccagggtgaccgggagcaggcgcccaacctggtctacatggtcaccggaaatcctgcctctgatgagatcaagaggctgcctggagacatccaggtggtgcccattggagtgggccctaatgccaacgtgcaggagctggagaggattggctggcccaatgcccctatcctcatccaggactttgagacgctcccccgagaggctcctgacctggtgctgcagaggtgctgctccggagaggggctgcagatccccaccctctcccctgcacctgactgcagccagcccctggacgtgatccttctcctggatggctcctccagtttcccagcttcttattttgatgaaatgaagagtttcgccaaggctttcatttcaaaagccaatatagggcctcgtctcactcaggtgtcagtgctgcagtatggaagcatcaccaccattgacgtgccatggaacgtggtcccggagaaagcccatttgctgagccttgtggacgtcatgcagcgggagggaggccccagccaaatcggggatgccttgggctttgctgtgcgatacttgacttcagaaatgcatggtgccaggccgggagcctcaaaggcggtggtcatcctggtcacggacgtctctgtggattcagtggatgcagcagctgatgccgccaggtccaacagagtgacagtgttccctattggaattggagatcgctacgatgcagcccagctacggatcttggcaggcccagcaggcgactccaacgtggtgaagctccagcgaatcgaagacctccctaccatggtcaccttgggcaattccttcctccacaaactgtgctctggatttgttaggatttgcatggatgaggatgggaatgagaagaggcccggggacgtctggaccttgccagaccagtgccacaccgtgacttgccagccagatggccagaccttgctgaagagtcatcgggtcaactgtgaccgggggctgaggccttcgtgccctaacagccagtcccctgttaaagtggaagagacctgtggctgccgctggacctgcccctgcgtgtgcacaggcagctccactcggcacatcgtgacctttgatgggcagaatttcaagctgactggcagctgttcttatgtcctatttcaaaacaaggagcaggacctggaggtgattctccataatggtgcctgcagccctggagcaaggcagggctgcatgaaatccatcgaggtgaagcacagtgccctctccgtcgagctgcacagtgacatggaggtgacggtgaatgggagactggtctctgttccttacgtgggtgggaacatggaagtcaacgtttatggtgccatcatgcatgaggtcagattcaatcaccttggtcacatcttcacattcactccacaaaacaatgagttccaactgcagctcagccccaagacttttgcttcaaagacgtatggtctgtgtgggatctgtgatgagaacggagccaatgacttcatgctgagggatggcacagtcaccacagactggaaaacacttgttcaggaatggactgtgcagcggccagggcagacgtgccagcccatcctggaggagcagtgtcttgtccccgacagctcccactgccaggtcctcctcttaccactgtttgctgaatgccacaaggtcctggctccagccacattctatgccatctgccagcaggacagttgccaccaggagcaagtgtgtgaggtgatcgcctcttatgcccacctctgtcggaccaacggggtctgcgttgactggaggacacctgatttctgtgctatgtcatgcccaccatctctggtctacaaccactgtgagcatggctgtccccggcactgtgatggcaacgtgagctcctgtggggaccatccctccgaaggctgtttctgccctccagataaagtcatgttggaaggcagctgtgtccctgaagaggcctgcactcagtgcattggtgaggatggagtccagcaccagttcctggaagcctgggtcccggaccaccagccctgtcagatctgcacatgcctcagcgggcggaaggtcaactgcacaacgcagccctgccccacggccaaagctcccacgtgtggcctgtgtgaagtagcccgcctccgccagaatgcagaccagtgctgccccgagtatgagtgtgtgtgtgacccagtgagctgtgacctgcccccagtgcctcactgtgaacgtggcctccagcccacactgaccaaccctggcgagtgcagacccaacttcacctgcgcctgcaggaaggaggagtgcaaaagagtgtccccaccctcctgccccccgcaccgtttgcccacccttcggaagacccagtgctgtgatgagtatgagtgtgcctgcaactgtgtcaactccacagtgagctgtccccttgggtacttggcctcaactgccaccaatgactgtggctgtaccacaaccacctgccttcccgacaaggtgtgtgtccaccgaagcaccatctaccctgtgggccagttctgggaggagggctgcgatgtgtgcacctgcaccgacatggaggatgccgtgatgggcctccgcgtggcccagtgctcccagaagccctgtgaggacagctgtcggtcgggcttcacttacgttctgcatgaaggcgagtgctgtggaaggtgcctgccatctgcctgtgaggtggtgactggctcaccgcggggggactcccagtcttcctggaagagtgtcggctcccagtgggcctccccggagaacccctgcctcatcaatgagtgtgtccgagtgaaggaggaggtctttatacaacaaaggaacgtctcctgcccccagctggaggtccctgtctgcccctcgggctttcagctgagctgtaagacctcagcgtgctgcccaagctgtcgctgtgagcgcatggaggcctgcatgctcaatggcactgtcattgggcccgggaagactgtgatgatcgatgtgtgcacgacctgccgctgcatggtgcaggtgggggtcatctctggattcaagctggagtgcaggaagaccacctgcaacccctgccccctgggttacaaggaagaaaataacacaggtgaatgttgtgggagatgtttgcctacggcttgcaccattcagctaagaggaggacagatcatgacactgaagcgtgatgagacgctccaggatggctgtgatactcacttctgcaaggtcaatgagagaggagagtacttctgggagaagagggtcacaggctgcccaccctttgatgaacacaagtgtctggctgagggaggtaaaattatgaaaattccaggcacctgctgtgacacatgtgaggagcctgagtgcaacgacatcactgccaggctgcagtatgtcaaggtgggaagctgtaagtctgaagtagaggtggatatccactactgccagggcaaatgtgccagcaaagccatgtactccattgacatcaacgatgtgcaggaccagtgctcctgctgctctccgacacggacggagcccatgcaggtggccctgcactgcaccaatggctctgttgtgtaccatgaggttctcaatgccatggagtgcaaatgctcccccaggaagtgcagcaagtgaggctgctgcagctgcatgggtgcctgctgctgcctgccttggcctgatggccaggccagagtgctgccagtcctctgcatgttctgctcttgtgcccttctgagcccacaataaaggctgagctcttatcttgcaaaaggc

SEQ ID NO: 199313 - DNA, 709 bp, Homo sapiens
  Payload ID: 19323
  Gene Name: von Willebrand factor
  ENST ID: ENST00000538563
  CDS Start-End: 251-433
agctcacagctattgtggtgggaaagggagggtggttggtggatgtcacagcttgggctttatctcccccagcagtggggactccacagcccctgggctacataacagcaagacagtccggagctgtagcagacctgattgagcctttgcagcagctgagagcatggcctagggtgggcggcaccattgtccagcagctgagtttcccagggaccttggagatagccgcagccctcatttgcaggggaagatgattcctgccagatttgccggggtgctgcttgctctggccctcattttgccagagaccaggtgcctgcaaatgccatctcctgttggggaattaagaagcataaaggtggcacagaactgtcctatattatgggggcacaggatgaggaggaaggaatccaagacttggatggattattagttttcgataagattgtggaggtcaccttgttgaacctcccatggtacaatgaagagactgagggtcagagaggagaaatgactgctccaaagtctcctagagccaaaatcagagggaccctttgtgcagaaggaactcgcggcaggtcatccacggcccgatgcagccttttcggaagtgacttcgtcaacacctttgatgggagcatgtacagctttgcgggatactgcagttacctcctggcagggggctgccagaaacgctccttctcgatta

SEQ ID NO: 199314 - DNA, 1326 bp, Homo sapiens
  Payload ID: 19323
  Gene Name: von Willebrand factor
  ENST ID: ENST00000321023
  CDS Start-End: 251-433
agctcacagctattgtggtgggaaagggagggtggttggtggatgtcacagcttgggctttatctcccccagcagtggggactccacagcccctgggctacataacagcaagacagtccggagctgtagcagacctgattgagcctttgcagcagctgagagcatggcctagggtgggcggcaccattgtccagcagctgagtttcccagggaccttggagatagccgcagccctcatttgcaggggaagatgattcctgccagatttgccggggtgctgcttgctctggccctcattttgccagagaccaggtgcctgcaaatgccatctcctgttggggaattaagaagcataaaggtggcacagaactgtcctatattatgggggcacaggatgaggaggaaggaatccaagacttggatggattattagttttcgataagattgtggaggtcaccttgttgaacctcccatggtacaatgaagagactgagggtcagagaggagaaatgactgctccaaagtctcctagagccaaaatcagagggaccctttgtgcagaaggaactcgcggcaggtcatccacggcccgatgcagccttttcggaagtgacttcgtcaacacctttgatgggagcatgtacagctttgcgggatactgcagttacctcctggcagggggctgccagaaacgctccttctcgattattggggacttccagaatggcaagagagtgagcctctccgtgtatcttggggaattttttgacatccatttgtttgtcaatggtaccgtgacacagggggaccaaagagtctccatgccctatgcctccaaagggctgtatctagaaactgaggctgggtactacaagctgtccggtgaggcctatggctttgtggccaggatcgatggcagcggcaactttcaagtcctgctgtcagacagatacttcaacaagacctgcgggctgtgtggcaactttaacatctttgctgaagatgactttatgacccaagaagggaccttgacctcggacccttatgactttgccaactcatgggctctgagcagtggagaacagtggtgtgaacgggcatctcctcccagcagctcatgcaacatctcctctggggaaatgcagaaggtgggtgtggactggcctgggtgcacctggatggtgtgtgatttctggatctaaaagacagaaggactcagtctcatatccttccatctgggggaggaatggacttacgcagggccatttcctccaaaactaactgtggctagagtctaattctaatacatctcgagcctgaagctc

SEQ ID NO: 199315 - DNA, 4511 bp, Homo sapiens
  Payload ID: 19324
  Gene Name: von Willebrand factor A domain containing 1
  Uniprot ID: Q6PCB0
  ENST ID: ENST00000476993
  CDS Start-End: 79-1416
gcgcggtgacgcgccctgcagccccgagcgagcgagcgagcgagcgagttgccgagcgcgccccgtccctcgcgcgcgatgctcccctggacggcgctcggcctggccctgagcttgcggctggcgctggcgcggagcggcgcggagcgcggtccaccagcatcagccccccgaggggacctgatgttcctgctggacagctcagccagcgtctctcactacgagttctcccgggttcgggagtttgtggggcagctggtggctccactgcccctgggcaccggggccctgcgtgccagtctggtgcacgtgggcagtcggccatacaccgagttccccttcggccagcacagctcgggtgaggctgcccaggatgcggtgcgtgcttctgcccagcgcatgggtgacacccacactggcctggcgctggtctatgccaaggaacagctgtttgctgaagcatcaggtgcccggccaggggtgcccaaagtgctggtgtgggtgacagatggcggctccagcgaccctgtgggcccccccatgcaggagctcaaggacctgggcgtcaccgtgttcattgtcagcaccggccgaggcaacttcctggagctgtcagccgctgcctcagcccctgccgagaagcacctgcactttgtggacgtggatgacctgcacatcattgtccaagagctgaggggctccattctcgacgcgatgcggccgcagcagctccatgccacggagatcacgtccagcggcttccgcctggcctggccacccctgctgaccgcagactcgggctactatgtgctggagctggtgcccagcgcccagccgggggctgcaagacgccagcagctgccagggaacgccacggactggatctgggccggcctcgacccggacacggactacgacgtggcgctagtgcctgagtccaacgtgcgcctcctgaggccccagatcctgcgggtgcgcacgcggcccggtgaggcagggccgggggcttcgggcccggagtcgggggctgggccggcccccacgcagctcgccgccctccccgccccagaggaggccgggccagagcgcatcgtcatctcccacgcccggccgcgcagcctccgcgtgagttgggccccagcgctgggctcagccgcggcgctcggctaccacgtgcagttcgggccgctgcggggcggggaggcgcagcgggtggaggtgcccgcgggccgcaactgcaccacgctgcagggcctggcgccgggcaccgcctacctggtgaccgtgaccgccgccttccgctcgggccgcgagagcgcgctgtccgccaaggcctgcacgcccgacggcccgcgcccgcgcccacgccccgtgccccgcgccccgaccccggggaccgccagccgtgagccgtaagccggcgtccccgcccagccgagagggccggcgcctacctgagggcccctgtgtcccgaacccggagcggaggcgcccaacccggcagacgggtgcaggcccggcctttccccacgcggactccgcgcgaccccggccctctccctgcggccgcagggcttccccgcctggcgcctgccctccagggctggggcctcgcctggcgggaccccgcagcagccccggccccatccccgcccagagccgggcgtcgtgtgggtccgtgggtgataattgagagcgtcagacccaggactgttcagggaggagccccggtcagactcccacgtgtgaagaccgggccccaagtggcaagggctggcctggggcgggcagcttgggtcctggacgttgataggaagcggaaggggaatcgcgggaagctggcccaggtcaggtccgcaaaggcttctgaagaagaggaagggcgagtaggggcacctggacgctgatggtggccaggatgctcagctggccaggagggcagcacctgctggggacggtggccctgccttcatgcccaggacaccagctgggtccagctagcagccactgggaatcagaggaatggggcagagctgggcattcaggaccttgaggacacgtgaccccacccgcccaccgccactatcaggccccgggaccgcactgacaggaaaccttccgtcgtgagggagcacttcccaggggccgcagggacgacactctccagggaggccccagcaaccacaccatcttcttgctgtgagaggtctcaccccgggctacctcctgtcactactcactgccctggggtccgtgggcaagttgcccagggtgggggtgcctagccaggtgcagtccccgccccgcctagtcctcggcgtcacgcaatgctcacctcgcctcttccccactaacatcccagactttaaaattcagtaaatcagatgtacaccgagcctgcagtctcgctaggatgctttactcctccacaaacagcagccgccgacaggacagcttgtgaacgtctccgccttttggggtgtccggggagaggaggtggagctgtcccctcccagtgtcaggcctccttggtcctcatgtgcaccttttattcagagagcttgggcccccttcctttggagctgggcccagggcaggtggctggaatgcagaggacaagggggctggggcctctgcagggccattcccaccgcagtctctgccacggcccggagccctgggcccagggccacgcgggctccctctgctggcaaagccacaccctgcaccgcatggggtccactgcccctttccccacgtggactctgcgtgaccccaggaactgcagcattgaggtggtctcagtccctccctcaggtctggtgggcattgtgccaggggccaccttcgggacagctggccttggcaccgtctcccaagaacccagctctgtgcatcccgtggccccaccagaaacccaaggccacaccgcccaccagctgggtgtggtcaccattcatggagggccggctggggccaggctcaccacgcagagtttgccctccggtgtgatgatgcatgagacacagtaggcccccctgcctgtgtgtgcagggggtgtctgtgggggggccctgctggctggactttgggtttctcctgagctccccttagcccccaagtcaggccacggaggcctgagtaggacccatgggctgtgtgtgtcactgcaggtggcgtgctcacaactgcactgctggtcggcaggtggccagggttgcaggcccgggcctcgggccccacctcctctggaggggtaggatctccttcgtgcagcccctgccccctaccctgttctccggagtgttggcagatctgagcccacggtcacgtgagaggagatgcctcttgcacactgagcccaggcccagctcacggagcaccctgcaggtggcagcggggcaccaggggctcattcctggtggcctcagtggcttctgtggacgactcagactcacatgagaagctgggaggagctccagctctgcaatcccgagagggcagagcgggggccctggccacaaccctgctccccacatacccgtctggcagaggctctgcctcccctctgcccatctctgcacaccaaggctgagcacagcacaaggcctcacggagagggtgaaaaggcactgccgtctccatctcagtgccaaggaatgcccctttcagaagccctcgtctgagaagtgctgccccttatgtagccccaggcattttaaaatctttgaatctgcaccaagtctcagaacagctctggccccggagtgctccgtccaggccgctgtgaaccggctgtccccgcgtctcctccacctcccctgacacaatcctggccccgactcagtccacccagggtgcagtgcagaggctgatacccgccaggacttccttgccaagggcccggccacgtcacaaggccactgcacgcttttcgacatgcacctggaaatcgggaagggccatgctgcagttgcttctagttgagacgagaagagcgacaaggttgtgatccacgtggcaggtgttcagaaggctgggggcgggcagcgctggggagagccctgggtacttcgaggagaccccgaagggaggctgctcccacacctgcgccagtttccaccctctctgtgagcagggctgcggtcacctcccacatctgaagagaaccaacctgaggatttcacgctggctgcgtgccagaccagtccctgacaggttgtgcgaggcccttcgctggacagcccattgctggccactggacggagaggcagagggggctgaaattcgggcccatgcctctgtgagcgatgacggagcaacagctctccagcacgtgaagctctccagacagctgttcgtgagaagccagacagaggcctggggtctcagtccagatttctggggagtggggtgtccaagcgtgggccacgctgctgggagccacctagggaagcaggtcgcctgtttctatagtgacggtaataaaccaagtcaattttctatagtga

SEQ ID NO: 199316 - DNA, 2147 bp, Homo sapiens
  Payload ID: 19324
  Gene Name: von Willebrand factor A domain containing 1
  Uniprot ID: Q6PCB0
  ENST ID: ENST00000338660
  CDS Start-End: 227-421
tgtccctgcgtgtcggggtccgctcgtgcgcgcctctccggggtctgtgcgcgtggccctccgctcgcgccggagggcgtgggcgtggcctcggcgtgggtgtggccgctcggggaggggcctcccgggggcggggccggcctggtccgcgcggtgacgcgccctgcagccccgagcgagcgagcgagcgagcgagttgccgagcgcgccccgtccctcgcgcgcgatgctcccctggacggcgctcggcctggccctgagcttgcggctggcgctggcgcggagcggcgcggagcgcggagctcaaggacctgggcgtcaccgtgttcattgtcagcaccggccgaggcaacttcctggagctgtcagccgctgcctcagcccctgccgagaagcacctgcactttgtggacgtggatgacctgcacatcattgtccaagagctgaggggctccattctcgacgcgatgcggccgcagcagctccatgccacggagatcacgtccagcggcttccgcctggcctggccacccctgctgaccgcagactcgggctactatgtgctggagctggtgcccagcgcccagccgggggctgcaagacgccagcagctgccagggaacgccacggactggatctgggccggcctcgacccggacacggactacgacgtggcgctagtgcctgagtccaacgtgcgcctcctgaggccccagatcctgcgggtgcgcacgcggcccggtgaggcagggccgggggcttcgggcccggagtcgggggctgggccggcccccacgcagctcgccgccctccccgccccagaggaggccgggccagagcgcatcgtcatctcccacgcccggccgcgcagcctccgcgtgagttgggccccagcgctgggctcagccgcggcgctcggctaccacgtgcagttcgggccgctgcggggcggggaggcgcagcgggtggaggtgcccgcgggccgcaactgcaccacgctgcagggcctggcgccgggcaccgcctacctggtgaccgtgaccgccgccttccgctcgggccgcgagagcgcgctgtccgccaaggcctgcacgcccgacggcccgcgcccgcgcccacgccccgtgccccgcgccccgaccccggggaccgccagccgtgagccgtaagccggcgtccccgcccagccgagagggccggcgcctacctgagggcccctgtgtcccgaacccggagcggaggcgcccaacccggcagacgggtgcaggcccggcctttccccacgcggactccgcgcgaccccggccctctccctgcggccgcagggcttccccgcctggcgcctgccctccagggctggggcctcgcctggcgggaccccgcagcagccccggccccatccccgcccagagccgggcgtcgtgtgggtccgtgggtgataattgagagcgtcagacccaggactgttcagggaggagccccggtcagactcccacgtgtgaagaccgggccccaagtggcaagggctggcctggggcgggcagcttgggtcctggacgttgataggaagcggaaggggaatcgcgggaagctggcccaggtcaggtccgcaaaggcttctgaagaagaggaagggcgagtaggggcacctggacgctgatggtggccaggatgctcagctggccaggagggcagcacctgctggggacggtggccctgccttcatgcccaggacaccagctgggtccagctagcagccactgggaatcagaggaatggggcagagctgggcattcaggaccttgaggacacgtgaccccacccgcccaccgccactatcaggccccgggaccgcactgacaggaaaccttccgtcgtgagggagcacttcccaggggccgcagggacgacactctccagggaggccccagcaaccacaccatcttcttgctgtgagaggtctcaccccgggctacctcctgtcactactcactgccctggggtccgtgggcaagttgcccagggtgggggtgcctagccaggtgcagtccccgccccgcctagtcctcggcgtcacgcaatgctcacctcgcctcttccccactaacatcccagactttaaaattcagtaaatcagatgtacaccg

SEQ ID NO: 199317 - DNA, 819 bp, Homo sapiens
  Payload ID: 19324
  Gene Name: von Willebrand factor A domain containing 1
  ENST ID: ENST00000495558
  CDS Start-End: 319-819
cagccacctctcgtctgggcctcaccaagaccccaagactcaagagctcctgtctcaccagtgggaccctccagtcctgctgggggtgtgtcctgggtcctggagtctgggcccctcactgggtagggtatatgggtaacaggcccagtgtggtcccactggacagggcctcaaccaaccatctcccactcccatgcctcttcctccaagaagcccaggtggcgtgggtgcttcgagtctctctcgaattcctgtcttctgtcccctttcaagccactgtgtccttgtccaccagcatcagccccccgaggggacctgatgttcctgctggacagctcagccagcgtctctcactacgagttctcccgggttcgggagtttgtggggcagctggtggctccactgcccctgggcaccggggccctgcgtgccagtctggtgcacgtgggcagtcggccatacaccgagttccccttcggccagcacagctcgggtgaggctgcccaggatgcggtgcgtgcttctgcccagcgcatgggtgacacccacactggcctggcgctggtctatgccaaggaacagctgtttgctgaagcatcaggtgcccggccaggggtgcccaaagtgctggtgtgggtgacagatggcggctccagcgaccctgtgggcccccccatgcaggagctcaaggacctgggcgtcaccgtgttcattgtcagcaccggccgaggcaacttcctggagctgtcagccgctgcctcagcccctgccgagaagcacctgcactttgtggacgtggatgacctgcacatcattgtc

SEQ ID NO: 199318 - DNA, 458 bp, Homo sapiens
  Payload ID: 19324
  Gene Name: von Willebrand factor A domain containing 1
  ENST ID: ENST00000471398
  CDS Start-End: 15-458
gtccctcgcgcgcgatgctcccctggacggcgctcggcctggccctgagcttgcggctggcgctggcgcggagcggcgcggagcgcggacctttgggagaaggcaagcatccacttaaggaaagctggggccctgggggaccctgccttgctgtggggctgtctggggggcccacacctgaggctgagcattcctcctttcccccaggtccaccagcatcagccccccgaggggacctgatgttcctgctggacagctcagccagcgtctctcactacgagttctcccgggttcgggagtttgtggggcagctggtggctccactgcccctgggcaccggggccctgcgtgccagtctggtgcacgtgggcagtcggccatacaccgagttccccttcggccagcacagctcgggtgaggctgcccaggatgcggtgcgtgcttctgcccagcgcatg

SEQ ID NO: 199319 - DNA, 2794 bp, Homo sapiens
  Payload ID: 19325
  Gene Name: von Willebrand factor A domain containing 2
  Uniprot ID: Q5GFL6
  ENST ID: ENST00000392982
  CDS Start-End: 251-2518
ggccgatgccgctttaaaaaacgcgaggggctctatgcacctccctggcggtagttcctccgacctcagccgggtcgggtcgtgccgccctctcccaggagagacaaacaggtgtcccacgtggcagccgcgccccgggcgcccctcctgtgatcccgtagcgccccctggcccgagccgcgcccgggtctgtgagtagagccgcccgggcaccgagcgctggtcgccgctctccttccgttatatcaacatgccccctttcctgttgctggaagccgtctgtgttttcctgttttccagagtgcccccatctctccctctccaggaagtccatgtaagcaaagaaaccatcgggaagatttcagctgccagcaaaatgatgtggtgctcggctgcagtggacatcatgtttctgttagatgggtctaacagcgtcgggaaagggagctttgaaaggtccaagcactttgccatcacagtctgtgacggtctggacatcagccccgagagggtcagagtgggagcattccagttcagttccactcctcatctggaattccccttggattcattttcaacccaacaggaagtgaaggcaagaatcaagaggatggttttcaaaggagggcgcacggagacggaacttgctctgaaataccttctgcacagagggttgcctggaggcagaaatgcttctgtgccccagatcctcatcatcgtcactgatgggaagtcccagggggatgtggcactgccatccaagcagctgaaggaaaggggtgtcactgtgtttgctgtgggggtcaggtttcccaggtgggaggagctgcatgcactggccagcgagcctagagggcagcacgtgctgttggctgagcaggtggaggatgccaccaacggcctcttcagcaccctcagcagctcggccatctgctccagcgccacgccagactgcagggtcgaggctcacccctgtgagcacaggacgctggagatggtccgggagttcgctggcaatgccccatgctggagaggatcgcggcggacccttgcggtgctggctgcacactgtcccttctacagctggaagagagtgttcctaacccaccctgccacctgctacaggaccacctgcccaggcccctgtgactcgcagccctgccagaatggaggcacatgtgttccagaaggactggacggctaccagtgcctctgcccgctggcctttggaggggaggctaactgtgccctgaagctgagcctggaatgcagggtcgacctcctcttcctgctggacagctctgcgggcaccactctggacggcttcctgcgggccaaagtcttcgtgaagcggtttgtgcgggccgtgctgagcgaggactctcgggcccgagtgggtgtggccacatacagcagggagctgctggtggcggtgcctgtgggggagtaccaggatgtgcctgacctggtctggagcctcgatggcattcccttccgtggtggccccaccctgacgggcagtgccttgcggcaggcggcagagcgtggcttcgggagcgccaccaggacaggccaggaccggccacgtagagtggtggttttgctcactgagtcacactccgaggatgaggttgcgggcccagcgcgtcacgcaagggcgcgagagctgctcctgctgggtgtaggcagtgaggccgtgcgggcagagctggaggagatcacaggcagcccaaagcatgtgatggtctactcggatcctcaggatctgttcaaccaaatccctgagctgcaggggaagctgtgcagccggcagcggccagggtgccggacacaagccctggacctcgtcttcatgttggacacctctgcctcagtagggcccgagaattttgctcagatgcagagctttgtgagaagctgtgccctccagtttgaggtgaaccctgacgtgacacaggtcggcctggtggtgtatggcagccaggtgcagactgccttcgggctggacaccaaacccacccgggctgcgatgctgcgggccattagccaggccccctacctaggtggggtgggctcagccggcaccgccctgctgcacatctatgacaaagtgatgaccgtccagaggggtgcccggcctggtgtccccaaagctgtggtggtgctcacaggcgggagaggcgcagaggatgcagccgttcctgcccagaagctgaggaacaatggcatctctgtcttggtcgtgggcgtggggcctgtcctaagtgagggtctgcggaggcttgcaggtccccgggattccctgatccacgtggcagcttacgccgacctgcggtaccaccaggacgtgctcattgagtggctgtgtggagaagccaagcagccagtcaacctctgcaaacccagcccgtgcatgaatgagggcagctgcgtcctgcagaatgggagctaccgctgcaagtgtcgggatggctgggagggcccccactgcgagaaccgattcttgagacgcccctgaggcacatggctcccgtgcaggagggcagcagccgtacccctcccagcaactacagagaaggcctgggcactgaaatggtgcctaccttctggaatgtctgtgccccaggtccttagaatgtctgcttcccgccgtggccaggaccactattctcactgagggaggaggatgtcccaactgcagccatgctgcttagagacaagaaagcagctgatgtcacccacaaacgatgttgttgaaaagttttgatgtgtaagtaaatacccactttctgta

SEQ ID NO: 199320 - DNA, 2600 bp, Homo sapiens
  Payload ID: 19325
  Gene Name: von Willebrand factor A domain containing 2
  Uniprot ID: Q5GFL6
  ENST ID: ENST00000603594
  CDS Start-End: 1007-2272
ggggctctatgcacctccctggcggtagttcctccgacctcagccgggtcgggtcgtgccgccctctcccaggagagacaaacaggtgtcccacgtggcagccgcgccccgggcgcccctcctgtgatcccgtagcgccccctggcccgagccgcgcccgggtctgtgagtagagccgcccgggcaccgagcgctggtcgccgctctccttccgttatatcaacatgccccctttcctgttgctggaagccgtctgtgttttcctgttttccagagtgcccccatctctccctctccaggaagtccatgtaagcaaagaaaccatcgggaagatttcagctgccagcaaaagtcagagtgggagcattccagttcagttccactcctcatctggaattccccttggattcattttcaacccaacaggaagtgaaggcaagaatcaagaggatggttttcaaaggagggcgcacggagacggaacttgctctgaaataccttctgcacagagggttgcctggaggcagaaatgcttctgtgccccagatcctcatcatcgtcactgatgggaagtcccagggggatgtggcactgccatccaagcagctgaaggaaaggggtgtcactgtgtttgctgtgggggtcaggtttcccaggtgggaggagctgcatgcactggccagcgagcctagagggcagcacgtgctgttggctgagcaggtggaggatgccaccaacggcctcttcagcaccctcagcagctcggccatctgctccagcgccacgccagactgcagggtcgaggctcacccctgtgagcacaggacgctggagatggtccgggagttcgctggcaatgccccatgctggagaggatcgcggcggacccttgcggtgctggctgcacactgtcccttctacagctggaagagagtgttcctaacccaccctgccacctgctacaggaccacctgcccaggcccctgtgactcgcagccctgccagaatggaggcacatgtgttccagaaggactggacggctaccagtgcctctgcccgctggcctttggaggggaggctaactgtggtagccctgaagctgagcctggaatgcagggtcgacctcctcttcctgctggacagctctgcgggcaccactctggacggcttcctgcgggccaaagtcttcgtgaagcggtttgtgcgggccgtgctgagcgaggactctcgggcccgagtgggtgtggccacatacagcagggagctgctggtggcggtgcctgtgggggagtaccaggatgtgcctgacctggtctggagcctcgatggcattcccttccgtggtggccccaccctgacgggcagtgccttgcggcaggcggcagagcgtggcttcgggagcgccaccaggacaggccaggaccggccacgtagagtggtggttttgctcactgagtcacactccgaggatgaggttgcgggcccagcgcgtcacgcaagggcgcgagagctgctcctgctgggtgtaggcagtgaggccgtgcgggcagagctggaggagatcacaggcagcccaaagcatgtgatggtctactcggatcctcaggatctgttcaaccaaatccctgagctgcaggggaagctgtgcagccggcagcggccagggtgccggacacaagccctggacctcgtcttcatgttggacacctctgcctcagtagggcccgagaattttgctcagatgcagagctttgtgagaagctgtgccctccagtttgaggtgaaccctgacgtgacacaggtcggcctggtggtgtatggcagccaggtgcagactgccttcgggctggacaccaaacccacccgggctgcgatgctgcgggccattagccaggccccctacctaggtggggtgggctcagccggcaccgccctgctgcacatctatgacaaagtgatgaccgtccagaggggtgcccggcctggtgtccccaaagctgtggtggtgctcacaggcgggagaggcgcagaggatgcagccgttcctgcccagaagctgaggaacaatggcatctctgtcttggtcgtgggcgtggggcctgtcctaagtgagggtctgcggaggcttgcaggtccccgggattccctgatccacgtggcagcttacgccgacctgcggtaccaccaggacgtgctcattgagtggctgtgtggaggtgagtgggggaatccacaccctcagggctgcccccatggcaggccctcagcctgagccttcacatacatcatgacgaggatggcagctcttcccagctactgagcacttgcttcccaagtgccaggttctgtgctaaaccccatgctcacataaaatcctacagtaggcataaccatcctatttgacatttaaggtacagaaagtttaactaacatagataactccccccaaacttgagaatttatgcattccctttaaacagaacacacttttagaatatccacaagcttcctaagggtctaaagatcccacattcacactgacttgggcagtgacagagcccagagcaaacagggccaggccagcccaaatccagtgacct

SEQ ID NO: 199321 - DNA, 2513 bp, Homo sapiens
  Payload ID: 19326
  Gene Name: von Willebrand factor A domain containing 3A
  ENST ID: ENST00000299840
  CDS Start-End: 1-1288
gcatgacgctcctctcaccattgagtttccaaacttggacaagacttctgcagagtggcttaaggtcaatggtctgaaagccaagaaattaagtctatatcaggtcctggcacccaatgcattctctcctgtggaggaatttgtacctattctccagaaaacagtatcatcgaccatccatgagaaggcaatgatacaatttgaatggcacgacgggacagtgaagaacattcatgtggacccacccttcctctataagtaccagcaacagctcagcagagctatgcggatgtatgagaggcggattgagtggctctccctggccagcagaagaatctggggcacagtctgtgaaaaaagggtggttgtactgctcgatatctctgcgaccaattccatgtacattattcatatccagcactccctgcggctgctgctggaggagcagttatccaacaaggactgtttcaacctcatcgcgtttggaagcacaattgaaagctggaggcctgagatggttcccgtgagtcacaacaatttacaaagtgcctggcggtgggccctgaacctgcggtgtcggggcagcaggaacgttctcagcgccctgcggaaggctgtggaagtagacttcaaggacaaagacaaacaccaatcgcagggaatctacctcttcactgggggcatccccgaccaggacatgcctacactcagtgcctacatggctgaggcctgtggcggctgcgacctccagctgaacgtgtgtctcttctacgtgggcgagccaaagatggacaccacaccccctgcccgctatgccagtcacactgacacagccgccgcctacaaggaggtcacccgggctgcaggtggccgcttccactggtttggagacacaggcatttatgagagcgatgacatcaactccatcatgtctgagatggaaaaggctctcaactactcccaaaagtgtgccttcctcatggcctccctgaagaaccattcaggaaaagtactgggaagttcagccctcccgaaagaaaaaccaaagacacttcagctaagaagtcagcccaagaagctctgccctcccaggcccaccgtccccctgggggccagaatgagcattaaagatgaccctgacagagagaagagccccccgctgaaatctctgaaatggcgtccactcagtagcagagttggcatctcaccaggtatggcagagtggctcagagcagagttctggagtcagcaggaccagctgcggcccagccaacgaaagaagggatgatggaactgaggaggaagaccaagtcaagggaagcagagacatctcttttactgttctacacagagaaagggaatgacgtgggctcagtgtacaagaagtaccctcaaggaaggggcttgagaaggactagctcttctattgacttacccagaaaggatacagtttgctcaagccaagagtgggtggcaaaatatgggctcaaaaaattgaagctggagatttccagatgcatgggtcccaactgcactcatcaaaagtcaggacagaggtcagcatccgccaaacactgcagcatcttccccagcgttgagatccatggagtggtgagacacatccagtggacgcccagggagatggaggtgtacatcaggcacttggagaaggtgttaaggcgctatgtccagaggctgcagtggctgctgtccgggagccgccgactgtttggcaccgttttggagagcaaagtatgcatattgctggacacgtcagggtccatgggcccctacctgcagcaggtgaagacagagctggttttgctgatttgggaacagctgcggaagtgctgtgacagttttaacctgctcagctttgcagagagctttcagtcatggcaggacacgctggtggagaccacagatgcagcgtgtcatgaggctatgcaatgggtgacccacctgcaagctcagggcagcacctccatcttgcaagcattgctgaaagctttcagtttccatgatctggaaggattgtacctcctgaccgacggaaagccagacacaagctgcagccttgtcctaaatgaagtccaaaaactcagggagaaaagagatgtgaaagtgcacaccatttccttgaactgctcagacagagcggcggttgagttcctgagaaagctggcttccttcaccggcggacgctatcactgccctgtgggtgaggacacactctccaaaattcacagcctgctgaccaaaggcttcatcaatgaaaaggatcccacattgccaccatttgaaggagatgatttaaggatcctggcccaggagatcaccaaggccagaagcttcctctggcaggcccaatccttcagatcccaactccagaagaaaaatgatgcagaaccaaaggtcactctttcctagagaagtgttctcagaaaagtcatcctgcaaaggaccactcactgagcaaatctcagccccgagggcaggatgggatgaaatgc

SEQ ID NO: 199322 - DNA, 4600 bp, Homo sapiens
  Payload ID: 19326
  Gene Name: von Willebrand factor A domain containing 3A
  Uniprot ID: A6NCI4
  ENST ID: ENST00000389398
  CDS Start-End: 97-3651
agttgcttggaggagcttggagaaaccagaagtgagatccaggagaagtaaggccctggagtgccaggagcccttctcccaaagatggagaaataaatgaagaaatacaggaaaataagcattgggtgttttgcaatggctacacaaactagtcatgtcttccatggtcaagaaaatatgtttctggaaaaccattgcattaggagaaacactggcagagattcaaagaagccactaaagcagaagaatatgaatggacttgggcaaaattcggacaatggattattggttacacatgttaaccagacacaggacttactgaggctgcaggggagtgagacccagtcttcagattgggaggactctgaagactggctttcggctcacagtttaaaatgtcagaaactcaccttggctgacctgataagccagggcacagaagtgctggaggagggcaccaatgtcgtgcagaaaatatgtttctccacccagatcatccgccattttgagtcaaagctttctgacactattgaagtctatcaagagagaattcagtggctcacagaaaacagcaagaaggcatttggcctcatcaaaggggccagagtcagcatcctcatagatgtgtcagccatcagcagtggccctcagaaagaagagttccaaaaggacctcatgagcctcatcgatgagcagctgagccacaaggagaagctgtttgtcctgtcctttggcaccaatgccgggtccctctggccagaccccatggaagtcagcgcctccaccctccaggaacttaagctctgggtaaagacgctgcagcctgatggaggcagcaacctgctacaagctctgaagaagatcttcactctcaagggactggattccctggtggccatcatgagaagctgcccagatcagccttctgaaatcctgtctgactacatccagcagtccaccatgggaagagacctcatcatccacttcatcacctacagatgcgatgatcagatgccccctgctgtcctgaagaaccttgcagaagctgttaggggctactaccactgctacagcccaaagatggagcactacaccagccgggacatggatgagctcctggcagaaattcagaaggcccagagcctcctcagccacgtgcaagccctgcagcacagcagcccctgtgaggcgctcacctgcaccatggaggagatttccacagagattacaaatgggccactcataagcctcttgcctaaacccccaaagcatgacgctcctctcaccattgagtttccaaacttggacaagacttctgcagagtggcttaaggtcaatggtctgaaagccaagaaattaagtctatatcaggtcctggcacccaatgcattctctcctgtggaggaatttgtacctattctccagaaaacagtatcatcgaccatccatgagaaggcaatgatacaatttgaatggcacgacgggacagtgaagaacattcatgtggacccacccttcctctataagtaccagcaacagctcagcagagctatgcggatgtatgagaggcggattgagtggctctccctggccagcagaagaatctggggcacagtctgtgaaaaaagggtggttgtactgctcgatatctctgcgaccaattccatgtacattattcatatccagcactccctgcggctgctgctggaggagcagttatccaacaaggactgtttcaacctcatcgcgtttggaagcacaattgaaagctggaggcctgagatggttcccgtgagtcacaacaatttacaaagtgcctggcggtgggccctgaacctgcggtgtcggggcagcaggaacgttctcagcgccctgcggaaggctgtggaagtagacttcaaggacaaagacaaacaccaatcgcagggaatctacctcttcactgggggcatccccgaccaggacatgcctacactcagtgcctacatggctgaggcctgtggcggctgcgacctccagctgaacgtgtgtctcttctacgtgggcgagccaaagatggacaccacaccccctgcccgctatgccagtcacactgacacagccgccgcctacaaggaggtcacccgggctgcaggtggccgcttccactggtttggagacacaggcatttatgagagcgatgacatcaactccatcatgtctgagatggaaaaggctctcaactactcccaaaagtgtgccttcctcatggcctccctgaagaaccattcaggaaaagtactgggaagttcagccctcccgaaagaaaaaccaaagacacttcagctaagaagtcagcccaagaagctctgccctcccaggcccaccgtccccctgggggccagaatgagcattaaagatgaccctgacagagagaagagccccccgctgaaatctctgaaatggcgtccactcagtagcagagttggcatctcaccagctgcggcccagccaacgaaagaagggatgatggaactgaggaggaagaccaagtcaagggaagcagagacatctcttttactgttctacacagagaaagggaatgacgtgggctcagtgtacaagaagtaccctcaaggaaggggcttgagaaggactagctcttctattgacttacccagaaaggatacagtttgctcaagccaagagtgggtggcaaaatatgggctcaaaaaattgaagctggagatttccagatgcatgggtcccaactgcactcatcaaaagtcaggacagaggtcagcatccgccaaacactgcagcatcttccccagcgttgagatccatggagtggtgagacacatccagtggacgcccagggagatggaggtgtacatcaggcacttggagaaggtgttaaggcgctatgtccagaggctgcagtggctgctgtccgggagccgccgactgtttggcaccgttttggagagcaaagtatgcatattgctggacacgtcagggtccatgggcccctacctgcagcaggtgaagacagagctggttttgctgatttgggaacagctgcggaagtgctgtgacagttttaacctgctcagctttgcagagagctttcagtcatggcaggacacgctggtggagaccacagatgcagcgtgtcatgaggctatgcaatgggtgacccacctgcaagctcagggcagcacctccatcttgcaagcattgctgaaagctttcagtttccatgatctggaaggattgtacctcctgaccgacggaaagccagacacaagctgcagccttgtcctaaatgaagtccaaaaactcagggagaaaagagatgtgaaagtgcacaccatttccttgaactgctcagacagagcggcggttgagttcctgagaaagctggcttccttcaccggcggacgctatcactgccctgtgggtgaggacacactctccaaaattcacagcctgctgaccaaaggcttcatcaatgaaaaggatcccacattgccaccatttgaaggagatgatttaaggatcctggcccaggagatcaccaaggccagaagcttcctctggcaggcccaatccttcagatcccaactccagaagaaaaatgatgcagaaccaaaggtcactctttcctagagaagtgttctcagaaaagtcatcctgcaaaggaccactcactgagcaaatctcagccccgagggcaggatgggatgaaatgctgtgacctgcaggaaacatgattcctggtaccaggactctctggaagctgaggaaggaaagactttgtcttttgtgtgaggggccattcccgggtcttaatctaactctccagccctgtcccgcagcgcactctactctccagccactagattgtccctctctgggaagccctaaaccaaccccctgcctaaatggtggtgcttcttgcaaaccaaccccctgcctgaacggtgcttcttgccccctctgcctggagactcctgctcatccatcaaggcacagctcaaatgacatcagctccctgggacctatctagagcgaggggcctccagtctttctcttgcagcatcctgaccacgcagacctctcgcactcagcactctatgtcacgccaccttgctcgctgatctaactcttctccttgatggtgagctccttcgggatgagactggtgtcccaggatctgcaggtccccagaagctgccacataggagacacatggtgaacagtgagcaggcggctgagctgtgagagcctagctctggaaagcagctgatggggtggtctccaccctggttcataagaggctaatgcagagtcacagtcagcccatcctgggggaagaagaaacaagtgagcctcagcaccaccctccatccctgcccaaccaaactgaagtgaaggctgctcatctgggttcattttctaaaattaaaaacaattaattttattctactaataggatcaacatgactttaactgtttgaagtgatcattggcgtgtgtgtgtgtgcataaatttttagtgacataaaactttattaaaagactcataccataataaagaatttcaataagaaaaaga

SEQ ID NO: 199323 - DNA, 861 bp, Homo sapiens
  Payload ID: 19326
  Gene Name: von Willebrand factor A domain containing 3A
  Uniprot ID: A6NCI4
  ENST ID: ENST00000563755
  CDS Start-End: 1-861
atggaggtgtacatcaggcacttggagaaggtgttaaggcgctatgtccagaggctgcagtggctgctgtccggtccagtcctctgcagtaggacctggtatagacagtccatggacaggggcgtcatgatgactgctgcttcagggagccgccgactgtttggcaccgttttggagagcaaagtatgcatattgctggacacgtcagggtccatgggcccctacctgcagcaggtgaagacagagctggttttgctgatttgggaacagctgcggaagtgctgtgacagttttaacctgctcagctttgcagagagctttcagtcatggcaggacacgctggtggagaccacagatgcagcgtgtcatgaggctatgcaatgggtgacccacctgcaagctcagggcagcacctccatcttgcaagcattgctgaaagctttcagtttccatgatctggaaggattgtacctcctgaccgacggaaagccagacacaagctgcagccttgtcctaaatgaagtccaaaaactcagggagaaaagagatgtgaaagtgcacaccatttccttgaactgctcagacagagcggcggttgagttcctgagaaagctggcttccttcaccggcggacgctatcactgccctgtgggtgaggacacactctccaaaattcacagcctgctgaccaaaggcttcatcaatgaaaaggatcccacattgccaccatttgaaggagatgatttaaggatcctggcccaggagatcaccaaggccagaagcttcctctggcaggcccaatccttcagatcccaactccagaagaaaaatgatgcagaaccaaaggtcactctttcctag

SEQ ID NO: 199324 - DNA, 478 bp, Homo sapiens
  Payload ID: 19326
  Gene Name: von Willebrand factor A domain containing 3A
  ENST ID: ENST00000563389
  CDS Start-End: 1-444
atccccgaccaggacatgcctacactcagtgcctacatggctgaggcctgtggcggctgcgacctccagctgaacgtgtgtctcttctacgtgggcgagccaaagatggacaccacaccccctgcccgctatgccagtcacactgacacagccgccgcctacaaggaggtcacccgggctgcaggtggccgcttccactggtttggagacacaggcatttatgagagcgatgacatcaactccatcatgtctgagatggaaaaggctctcaactactcccaaaagtgtgccttcctcatggcctccctgaagaaccattcaggaaaagtactgggaagttcagccctcccgaaagaaaaaccaaagacacttcagctaagaagtcagcccaagaagctctgccctcccaggcccaccgtccccctgggggccagaatggtttgactcccctcctaataacacgcagaagatttggttt

SEQ ID NO: 199325 - DNA, 593 bp, Homo sapiens
  Payload ID: 19326
  Gene Name: von Willebrand factor A domain containing 3A
  ENST ID: ENST00000567131
  CDS Start-End: 499-593
tgagttgcttggaggagcttggagaaaccagaagtgagatccaggagaagtaaggccctggagtgccaggagcccttctcccaaagatggagaaataaatgaagaaatacaggaaaataagcattgggtgttttgcaatggctacacaaactagtcatgtcttccatggtcaagaaaatatgtttctggaaaaccattgaggctgcaggggagtgagacccagtcttcagattgggaggactctgaagactggctttcggctcacagtttaaaatgtcagaaactcaccttggctgacctgataagccagggcacagaagtgctggaggagggcaccaatgtcgtgcagaaaatatgtttctccacccagatcatccgccattttgagtcaaagctttctgagcatttggcctcatcaaaggggccagagtcagcatcctcatagatgtgtcagccatcagcagtggccctcagaaagaagagttccaaaaggacctcatgagcctcatcgatgagcagctgagccacaaggagaagctgtttgtcctgtcctttggcaccaatgccgggtccctctggccagaccccatgga

SEQ ID NO: 199326 - DNA, 2336 bp, Homo sapiens
  Payload ID: 19326
  Gene Name: von Willebrand factor A domain containing 3A
  ENST ID: ENST00000568328
  CDS Start-End: 97-2336
agttgcttggaggagcttggagaaaccagaagtgagatccaggagaagtaaggccctggagtgccaggagcccttctcccaaagatggagaaataaatgaagaaatacaggaaaataagcattgggtgttttgcaatggctacacaaactagtcatgtcttccatggtcaagaaaatatgtttctggaaaaccattgcattaggagaaacactggcagagattcaaagaagccactaaagcagaagaatatgaatggacttgggcaaaattcggacaatggattattggttacacatgttaaccagacacaggacttactgaggctgcaggggagtgagacccagtcttcagattgggaggactctgaagactggctttcggctcacagtttaaaatgtcagaaactcaccttggctgacctgataagccagggcacagaagtgctggaggagggcaccaatgtcgtgcagaaaatatgtttctccacccagatcatccgccattttgagtcaaagctttctgacactattgaagtctatcaagagagaattcagtggctcacagaaaacagcaagaaggcatttggcctcatcaaaggggccagagtcagcatcctcatagatgtgtcagccatcagcagtggccctcagaaagaagagttccaaaaggacctcatgagcctcatcgatgagcagctgagccacaaggagaagctgtttgtcctgtcctttggcaccaatgccgggtccctctggccagaccccatggaagtcagcgcctccaccctccaggaacttaagctctgggtaaagacgctgcagcctgatggaggcagcaacctgctacaagctctgaagaagatcttcactctcaagggactggattccctggtggccatcatgagaagctgcccagatcagccttctgaaatcctgtctgactacatccagcagtccaccatgggaagagacctcatcatccacttcatcacctacagatgcgatgatcagatgccccctgctgtcctgaagaaccttgcagaagctgttaggggctactaccactgctacagcccaaagatggagcactacaccagccgggacatggatgagctcctggcagaaattcagaaggcccagagcctcctcagccacgtgcaagccctgcagcacagcagcccctgtgaggcgctcacctgcaccatggaggagatttccacagagattacaaatgggccactcataagcctcttgcctaaacccccaaagcatgacgctcctctcaccattgagtttccaaacttggacaagacttctgcagagtggcttaaggtcaatggtctgaaagccaagaaattaagtctatatcaggtcctggcacccaatgcattctctcctgtggaggaatttgtacctattctccagaaaacagtatcatcgaccatccatgagaaggcaatgatacaatttgaatggcacgacgggacagtgaagaacattcatgtggacccacccttcctctataagtaccagtggaatgattatactgcctggattcccagggacttgacacaccattccctgaagcccacccagcaacagctcagcagagctatgcggatgtatgagaggcggattgagtggctctccctggccagcagaagaatctggggcacagtctgtgaaaaaagggtggttgtactgctcgatatctctgcgaccaattccatgtacattattcatatccagcactccctgcggctgctgctggaggagcagttatccaacaaggactgtttcaacctcatcgcgtttggaagcacaattgaaagctggaggcctgagatggttcccgtgagtcacaacaatttacaaagtgcctggcggtgggccctgaacctgcggtgtcggggcagcaggaacgttctcagcgccctgcggaaggctgtggaagtagacttcaaggacaaagacaaacaccaatcgcagggaatctacctcttcactgggggcatccccgaccaggacatgcctacactcagtgcctacatggctgaggcctgtggcggctgcgacctccagctgaacgtgtgtctcttctacgtgggcgagccaaagatggacaccacaccccctgcccgctatgccagtcacactgacacagccgccgcctacaaggaggtcacccgggctgcaggtggccgcttccactggtttggagacacaggcatttatgagagcgatgacatcaactccatcatgtctgagatggaaaaggctctcaactactcccaaaagtgtgccttcctcatggcctccctgaagaaccattcagg

SEQ ID NO: 199327 - DNA, 2642 bp, Homo sapiens
  Payload ID: 19327
  Gene Name: von Willebrand factor A domain containing 3B
  Uniprot ID: Q502W6
  ENST ID: ENST00000433678
  CDS Start-End: 220-2094
gtcacagagacctagaacagctggaatccttcgcccccggcgcgcagccttcgcccgccggaatcgctgccttatccaccagcgggatgcttacctcgcccgccctctcgggtcaggcgggcccgggaggatgggagggtggctgctgagcgggagccgccacgtcttccacccgacatattgcctagagtttgctgtgacttagatcttgattcagagatggagaaatcaggcccatcttctaccatctctgagcagcagctgcagaggcaagagggatggattaacaccaaaacagacttggctgagcagagtctcatttcatctgagaaatggcttcaactgcatgggcttaagagcaacaaattgaccttgaaacagattttgtcacagatcggattcccacattgtgaagattatgtggcgtctctggggagacctgtggcttctcggtatgctgatggtctgtttccacagctctacagagcagaagatggcagagtatacaatctgacagctaaatcagaactgatttatcagtttgtggaacatttaacacaagctgtggagagctacaagcagcgaatggactggctcaccagcaagagccggcagatttttggtgtcatcttggaacagtgcgtcaccatagtgctggattttggcggcattctggagggggagcttgatctgtgccgagaggctctaacaatggttctccaggagcaggtggctcacataaccgagttcaatatcatacgggtttctcaagagcctgtgaagtggcaggaaaatgctactcctgtgaccgaacagtccatagctactgccatcagttgggttgagaaactgacggttgagctgactgtgagcgaggctggccgcctggatgctctgctggaagccgggagagacaagactattgaatccatttactactttgtggtgggggatgttcctgaagaatccaaggagcttctcctccagagggccttggagatcccgtgtccagtctacacagtgtccttcaacgccagaggagaaggcactatagcttttctaaaggatctgagtgccaagacccacagcagattccacgcatttgccgagagaacagagtgtgtagaatttcctgcattctccacaaaggatggtgacaatgtgatgacttggaattcaaggaaactgaaaggaaaactccctccaggagctggagtcagagaggacgtgtttctcgtttggcaagagatggaggaagcctgcagcacgctggcccagatccagaggctggtggccgagcctcccaagcccgacgtggccactgtggactgcgagtcagaaacaacctctgttgagattgcatcgaatccagaagacacctgggactctaagacatggctgcagaaatatggcttgaaggcccagaagctatccttgtatgatgtgcttgccgactgctctttccgccacgctgatggggttgtggatataaaagccaaaccggagaatgagtccgtgcagaccagtgcggagacgaacaagaagacagtccatgcaaaatattgcagcaggtttgtccatgctccctggaaggatgggagcttggtccacgtcaacattaccaaagagaagtgcaagtggtacagtgagagaatccacacagccctggcccggatccgaaggaggattaaatggctacaggatgggagtcaaagcctctttggaagattgcataatgattgcatctacattctcattgacacgtctcactcaatgaagagcaaactggacttggtgaaggacaagatcattcagttcatacaggaacagctgaaatataaaagtaagtttaactttgtgaagtttgatggtcaagcagttgcttggcgggaacaacttgctgaagtcaatgaagataatttggaacaggctcagtcctggattagagacataaagattggaagctccacaaacaccctgagtgccctgaaaactgcttttgctgataaagaaacacaggcaatctaccttctgaccgatgggagacctgatcagggaacatcatctcatttactcctcacagcagccgtttaaggagggagtatcagttctgagccacagatgaggaaactcacattagacaggacatgccctaggccattcagatgggcagtgctggatgagcttcaagcccaagtctctcgctctggagctgtttccttcattccatacagctgaagacagcatgagtgggagagactgtcatgtgtatcattccacctgaaacagttatagaccaggtcaaacgttttcaggaaattcctatttataccatctccttcaattacaatgatgagattgcaaacaggtttttgaaagaggttgctgctttgactggaggagagttccatttttataattttggttgcaaggatcccactcccccagaggctgttcagaatgaagatctgactcttttagttaaggaaatggaacagggtcacagtgatctggagaagatgcaagacctttattctgagtccttgatcatggactggtggtacaatgcagaaaaggatggagacagcaaatattcaagtatcacagcctaccctgccaggagatgtcttttttatttcaaa

SEQ ID NO: 199328 - DNA, 1927 bp, Homo sapiens
  Payload ID: 19327
  Gene Name: von Willebrand factor A domain containing 3B
  ENST ID: ENST00000422503
  CDS Start-End: 161-535
ggaatcgctgccttatccaccagcgggatgcttacctcgcccgccctctcgggtcaggcgggcccgggaggatgggagggtggctgctgagcgggagccgccacgtcttccacccgacatattgcctagagtttgctgtgacttagatcttgattcagagatggagaaatcaggcccatcttctaccatctctgagcagcagctgcagaggcaagagggatggattaacaccaaaacagacttggctgagcagagtctcatttcatctgagaaatggcttcaactgcatgggcttaagagcaacaaattgaccttgaaacagattttgtcacagatcggattcccacattgtgaagattatgtggcgtctctggggagacctgtggcttctcggtatgctgatggtctgtttccacagctctacagagcagaagatggcagagtatacaatggtttctcaagagcctgtgaagtggcaggaaaatgctactcctgtgaccgaacagtccatagctactgccatcagttgggttgagaaactgacggttgagctgactgtgagcgaggctggccgcctggatgctctgctggaagccgggagagacaagactattgaatccatttactactttgtggtgggggatgttcctgaagaatccaaggagcttctcctccagagggccttggagatcccgtgtccagtctacacagtgtccttcaacgccagaggagaaggcactatagcttttctaaaggatctgagtgccaagacccacagcagattccacgcatttgccgagagaacagagtgtgtagaatttcctgcattctccacaaaggatggtgacaatgtgatgacttggaattcaaggaaactgaaaggaaaactccctccaggagctggagtcagagaggacgtgtttctcgtttggcaagagatggaggaagcctgcagcacgctggcccagatccagaggctggtggccgagcctcccaagcccgacgtggccactgtggactgcgagtcagaaacaacctctgttgagattgcatcgaatccagaagacacctgggactctaagacatggctgcagaaatatggcttgaaggcccagaagctatccttgtatgatgtgcttgccgactgctctttccgccacgctgatggggttgtggatataaaagccaaaccggagaatgagtccgtgcagaccagtgcggagacgaacaagaagacagtccatgcaaaatattgcagcaggtttgtccatgctccctggaaggatgggagcttggtccacgtcaacattaccaaagagaagtgcaagtggtacagtgagagaatccacacagccctggcccggatccgaaggaggattaaatggctacaggatgggagtcaaagcctctttggaagattgcataatgattgcatctacattctcattgacacgtctcactcaatgaagagcaaactggacttggtgaaggacaagatcattcagttcatacaggaacagctgaaatataaaagtaagtttaactttgtgaagtttgatggtcaagcagttgcttggcgggaacaacttgctgaagtcaatgaagataatttggaacaggctcagtcctggattagagacataaagattggaagctccacaaacaccctgagtgccctgaaaactgcttttgctgataaagaaacacaggcaatctaccttctgaccgatgggagacctgatcagcagccgtttaaggagggagtatcagttctgagccacagatgaggaaactcacattagacaggacatgccctaggccattcagatgggcagtgctggatgagcttcaagcccaagtctctcgctctggagctgtttccttcattccatacagctgaagacagcatgagtgggagagactgtca

SEQ ID NO: 199329 - DNA, 5324 bp, Homo sapiens
  Payload ID: 19327
  Gene Name: von Willebrand factor A domain containing 3B
  ENST ID: ENST00000432242
  CDS Start-End: 281-586
gtgtccaggcaaccgcggagacgccgtcgtcaacagaccgcgctcggaaccagaggcgcgggtcacagagacctagaacagctggaatccttcgcccccggcgcgcagccttcgcccgccggaatcgctgccttatccaccagcgggatgcttacctcgcccgccctctcgggtcaggcgggcccgggaggatgggagggtggctgctgagcgggagccgccacgtcttccacccgacatattgcctagagtttgctgtgacttagatcttgattcagagatggagaaatcaggcccatcttctaccatctctgagcagcagctgcagaggcaagagggatggattaacaccaaaacagacttggctgagcagagtctcatttcatctgagaaatggcttcaactgcatgggcttaagagcaacaaattgaccttgaaacagattttgtcacagatcggattcccacattgtgaagattatgtggcgtctctggggagacctgtggcttctcggtatgctgatggtctgtttccacagctctacagagcagaagatggcagagtatacaatctaaatcagaactgatttatcagtttgtggaacatttaacacaagctgtggagagctacaagcagcgaatggactggctcaccagcaagagccggcagatttttggtgtcatcttggaacagtgcgtcaccatagtgctggattttggcggcattctggagggggagcttgatctgtgccgagaggctctaacaatggttctccaggagcaggtggctcacataaccgagttcaatatcatacgggtttctcaagagcctgtgaagtggcaggaaaatgctactcctgtgaccgaacagtccatagctactgccatcagttgggttgagaaactgacggttgagctgactgtgagcgaggctggccgcctggatgctctgctggaagccgggagagacaagactattgaatccatttactactttgtggtgggggatgttcctgaagaatccaaggagcttctcctccagagggccttggagatcccgtgtccagtctacacagtgtccttcaacgccagaggagaaggcactatagcttttctaaaggatctgagtgccaagacccacagcagattccacgcatttgccgagagaacagagtgtgtagaatttcctgcattctccacaaaggatggtgacaatgtgatgacttggaattcaaggaaactgaaaggaaaactccctccaggagctggagtcagagaggacgtgtttctcgtttggcaagagatggaggaagcctgcagcacgctggcccagatccagaggctggtggccgagcctcccaagcccgacgtggccactgtggactgcgagtcagaaacaacctctgttgagattgcatcgaatccagaagacacctgggactctaagacatggctgcagaaatatggcttgaaggcccagaagctatccttgtatgatgtgcttgccgactgctctttccgccacgctgatggggttgtggatataaaagccaaaccggagaatgagtccgtgcagaccagtgcggattaaatggctacaggatgggagtcaaagcctctttggaagattgcataatgattgcatctacattctcattgacacgtctcactcaatgaagagcaaactggacttggtgaaggacaagatcattcagttcatacaggaacagctgaaatataaaagtaagtttaactttgtgaagtttgatggtcaagcagttgcttggcgggaacaacttgctgaagtcaatgaagataatttggaacaggctcagtcctggattagagacataaagattggaagctccacaaacaccctgagtgccctgaaaactgcttttgctgataaagaaacacaggcaatctaccttctgaccgatgggagacctgatcagggaacatcatctcatttactcctcacagcagccgtttaaggagggagtatcagttctgagccacagatgaggaaactcacattagacaggacatgccctaggccattcagatgggcagtgctggatgagcttcaagcccaagtctctcgctctggagctgtttccttcattccatacagctgaagacagcatgagtgggagagactgtcatgtgtatcattccacctgaaacagttatagaccaggtcaaacgttttcaggaaattcctatttataccatctccttcaattacaatgatgagattgcaaacaggtttttgaaagaggttgctgctttgactggaggagagttccatttttataattttggttgcaaggatcccactcccccagaggctgttcagaatgaagatctgactcttttagttaaggaaatggaacagggtcacagtgatctggagaagatgcaagacctttattctgagtccttgatcatggactggtggtacaatgcagaaaaggatggagacagcaagcatcaaaaggaaatctgttctatgatttcaaccccagaaaagtgtgcaaagcctcaatctgatgtcgattcaacacaaacttcatctctgaatatgttgaagggaccatggggcctttcagatcaaaaggttcagaaaaagaaagtccttcacgcagaatcaaccaaaaccagcctgctcagaagccagatgtcctccctcaggagctcagcttgcagtgaaaggaaggatggcctctccaatgccagcagccggaggactgctctaagtgacaaagaaatgagcatcttgctggctgaggagtggctggatgacaaatcgtcagaaaaggtgacgcgagaaggaagccaggtttatgaccacgattcttcagatgtgtcttcagaaaactggctgaagacctatggcttggtcgccaagaaactcaccctcatggatgccttgtcagtggcagcagtcccgcacagctccacctatgttcccgtcctggacaagcatgtcgtgtctaaggtctttgatgaggtgttccctctggcacatgtgtgcaacgacacaaataagatgacattaattaacccccaaggagccaaactcaatatctacaagcgaaaagtggaacaggcaattcaatcctatgaaaagcgcttgaataaaattgtttggcgagcattatctcaagaggaaaaagaaaagagcctgtaatatcttgttccccctggtgtctctctgaagtactgcagtatctccaatgctgtaacaagctgtgacactcatttctgttctcagaggtcccaacctgacctgcaaaatatgccactgttctcatcagcattctgaatcaggttagatgcaaacaaaccaatacagtacttggaaaacaaaacagttttaaaccaggctttagaacggttgaattggcccatttcactgaaagagctgtcgatgctggaaagtgaaatcctagctgggaaaatgtacatccagcaggccatggaactccaggaggctgccaagaagaattatgcaaacaaggccccgggagagcaacagaaattgcaaggaaatccaacaaagaaaaccaaatcaaaaagaccagatcccctcaaaggacagaaggttattgcaagatgtgatgaaaatggcttttattttccaggggttgtgaagaagtgtgtgagccgcacccaagcactggtgggcttcagttacggagacaccaaggtcgtgtccacctccttcatcacgcctgtggggggcgccatgccctgcccgctgctccaggttggagattatgtgtttgccaaaattgtgatacccaaaggatttgacttctatgtccctgccattgtcatagcacttcccaataagcatgtggccacagaaaaattctacacagttttgaagtgtaacaaccggagagaattttgccctcggagtgcacttattaagatcagccaaaacaagtatgcgctctcttgctctcatataaagtcacccccaattcctgaggatccagaagtagaggatgtggaggcgaggaactctgctttcctcttctggccactgaaagaagcggacacgcaggattccagagagccaagacgagagaagcccaggaggaaaaagaggcccgccaagcagccactccagcaggcggcgccctcggactcggacggctcctcccacggcatcagctcccatgggtcctgccaggggacacaccccgagcccaggacagcccacctccacttccccgcggccgggcgtctaggactcagcagccacgccatcattgccacacctccacctcgagcagccctgccctgtactctccaagccacccacagcagcaaagggctgaggagcgtccctgagacactttaaggccgtctggtggcagctatgtttaagagaccagcgtccttccaggctgttcagacctcagcgttgacactgaaactggcccctccgcggaggtaaggccgccctccgcgccgcctatgcctgccctgtctgtagcaaagactcctctcccctccatccctgctgcctcccctacccgtttgacgacttggttctggctttttctgactgttctttatcctgttttccccctgcactcacaaaattgtattccatcttctggtagacgccccacccccagaagttttaacctgaaggatgactgtcacaggactttcaaattgtttagcagtcagcatagtcaggatccaagcccgcaatcttgttttaaattaattatcacatctaaattagagaatttgtcacccaatattaggactgaaattcagactcggtaacttgtctgagatctgcaagactgaacatcccctactgtatagtttcctgacattttcatttagcctttcctaattatttttgtctatagtctgttgtaggtaactctaattgagcccgaaaccagaataaaaactcttacattggaaacatttcaaaaccattggattgttggattatttgttaccatttttctctgaacacattttagcaatgacatatgaaagtattcagttgtgtttactaacttcaaaaatgaaatcgctccatcaaatttcgtttttctagtcggtaagatccctgaggctagatgaaaatagagcacaggtcatcactagggaaaatattggatgctttttgcaaacagaacagatagggctgagttctgatactctaaaaatttacaatctaattaaaagtggcattcacattcctgaaagctaggagtagccagggttatggtgaagaaattaaagaactaatccacttctaaaaatatgaaaaaaaaaaaataa

SEQ ID NO: 199330 - DNA, 2516 bp, Homo sapiens
  Payload ID: 19327
  Gene Name: von Willebrand factor A domain containing 3B
  ENST ID: ENST00000448638
  CDS Start-End: 207-1118
agaacagctggaatccttcgcccccggcgcgcagccttcgcccgccggaatcgctgccttatccaccagcgggatgcttacctcgcccgccctctcgggtcaggcgggcccgggaggatgggagggtggctgctgagcgggagccgccacgtcttccacccgacatattgcctagagtttgctgtgacttagatcttgattcagagatggagaaatcaggcccatcttctaccatctctgagcagcagctgcagaggcaagagggatggattaacaccaaaacagacttggctgagcagagtctcatttcatctgagaaatggcttcaactgcatgggcttaagagcaacaaattgaccttgaaacagattttgtcacagatcggattcccacattgtgaagattatgtggcgtctctggggagacctgtggcttctcggtatgctgatggtctgtttccacagctctacagagcagaagatggcagagtatacaatctgacagctaaatcagaactgatttatcagtttgtggaacatttaacacaagctgtggagagctacaagcagcgaatggactggctcaccagcaagagccggcagatttttggtgtcatcttggaacagtgcgtcaccatagtgctggattttggcggcattctggagggggagcttgatctgtgccgagaggctctaacaatggttctccaggagcaggtggctcacataaccgagttcaatatcatacgggtttctcaagagcctgtgaagtggcaggaaaatgctactcctgtgaccgaacagtccatagctactgccatcagttgggttgagaaactgacggttgagctgactgtgagcgaggctggccgcctggatgctctgctggaagccgggagagacaagactgagctggagtcagagaggacgtgtttctcgtttggcaagagatggaggaagcctgcagcacgctggcccagatccagaggctggtggccgagcctcccaagcccgacgtggccactgtggactgcgagtcagaaacaacctctgttgagattgcatcgaatccagaagacacctgggactctaagacatggctgcagaaatatggcttgaaggcccagaagctatccttgtatgatgtgcttgccgactgctctttccgccacgctgatggggttgtggatataaaagccaaaccggagaatgagtccgtgcagaccagtgcggattaaatggctacaggatgggagtcaaagcctctttggaagattgcataatgattgcatctacattctcattgacacgtctcactcaatgaagagcaaactggacttggtgaaggacaagatcattcagttcatacaggaacagctgaaatataaaagtaagtttaactttgtgaagtttgatggtcaagcagttgcttggcgggaacaacttgctgaagtcaatgaagataatttggaacaggctcagtcctggattagagacataaagattggaagctccacaaacaccctgagtgccctgaaaactgcttttgctgataaagaaacacaggcaatctaccttctgaccgatgggagacctgatcagccacctgaaacagttatagaccaggtcaaacgttttcaggaaattcctatttataccatctccttcaattacaatgatgagattgcaaacaggtttttgaaagaggttgctgctttgactggaggagagttccatttttataattttggttgcaaggatcccactcccccagaggctgttcagaatgaagatctgactcttttagttaaggaaatggaacagggtcacagtgatctggagaagatgcaagacctttattctgagtccttgatcatggactggtggtacaatgcagaaaaggatggagacagcaagcatcaaaaggaaatctgttctatgatttcaaccccagaaaagtgtgcaaagcctcaatctgatgtcgattcaacacaaacttcatctctgaatatgttgaagggaccatggggcctttcagatcaaaaggttcagaaaaagaaagtccttcacgcagaatcaaccaaaaccagcctgctcagaagccagatgtcctccctcaggagctcagcttgcagtgaaaggaaggatggcctctccaatgccagcagccggaggactgctctaagtgacaaagaaatgagcatcttgctggctgaggagtggctggatgacaaatcgtcagaaaaggtgacgcgagaaggaagccaggtttatgaccacgattcttcagatgtgtcttcagaaaactggctgaagacctatggcttggtcgccaagaaactcaccctcatggatgccttgtcagtggcagcagtcccgcacagctccacctatgttcccgtcctggacaagcatgtcgtgtctaaggtctttgatgaggtaaactgattgtctatacgtccctacttgaggccattttcattttctgctcaaataaaaagtagtccaatttcttgt

SEQ ID NO: 199331 - DNA, 2827 bp, Homo sapiens
  Payload ID: 19327
  Gene Name: von Willebrand factor A domain containing 3B
  ENST ID: ENST00000416277
  CDS Start-End: 161-1432
ggaatcgctgccttatccaccagcgggatgcttacctcgcccgccctctcgggtcaggcgggcccgggaggatgggagggtggctgctgagcgggagccgccacgtcttccacccgacatattgcctagagtttgctgtgacttagatcttgattcagagatggagaaatcaggcccatcttctaccatctctgagcagcagctgcagaggcaagagggatggattaacaccaaaacagacttggctgagcagagtctcatttcatctgagaaatggcttcaactgcatgggcttaagagcaacaaattgaccttgaaacagattttgtcacagatcggattcccacattgtgaagattatgtggcgtctctggggagacctgtggcttctcggtatgctgatggtctgtttccacagctctacagagcagaagatggcagagtatacaatctgacagctaaatcagaactgatttatcagtttgtggaacatttaacacaagctgtggagagctacaagcagcgaatggactggctcaccagcaagagccggcagatttttggtgtcatcttggaacagtgcgtcaccatagtgctggattttggcggcattctggagggggagcttgatctgtgccgagaggctctaacaatggttctccaggagcaggtggctcacataaccgagttcaatatcatacgggtttctcaagagcctgtgaagtggcaggaaaatgctactcctgtgaccgaacagtccatagctactgccatcagttgggttgagaaactgacggttgagctgactgtgagcgaggctggccgcctggatgctctgctggaagccgggagagacaagactattgaatccatttactactttgtggtgggggatgttcctgaagaatccaaggagcttctcctccagagggccttggagatcccgtgtccagtctacacagtgtccttcaacgccagaggagaaggcactatagcttttctaaaggatctgagtgccaagacccacagcagattccacgcatttgccgagagaacagagtgtgtagaatttcctgcattctccacaaaggatggtgacaatgtgatgacttggaattcaaggaaactgaaaggaaaactccctccaggagctggagtcagagaggacgtgtttctcgtttggcaagagatggaggaagcctgcagcacgctggcccagatccagaggctggtggccgagcctcccaagcccgacgtggccactgtggactgcggtgctgttccaagtttcgagtcatctggaaaaatagttttctgcttgtgtgatatgctggcttgtcccgctcagagtcagaaacaacctctgttgagattgcatcgaatccagaagacacctgggactctaagacatggctgcagaaatatggcttgaaggcccagaagctatccttgtatgatgtgcttgccgactgctctttccgccacgctgatggggttgtggatataaaagccaaaccggagaatgagtccgtgcagaccagtgcggattaaatggctacaggatgggagtcaaagcctctttggaagattgcataatgattgcatctacattctcattgacacgtctcactcaatgaagagcaaactggacttggtgaaggacaagatcattcagttcatacaggaacagctgaaatataaaagtaagtttaactttgtgaagtttgatggtcaagcagttgcttggcgggaacaacttgctgaagtcaatgaagataatttggaacaggctcagtcctggattagagacataaagattggaagctccacaaacaccctgagtgccctgaaaactgcttttgctgataaagaaacacaggcaatctaccttctgaccgatgggagacctgatcagccacctgaaacagttatagaccaggtcaaacgttttcaggaaattcctatttataccatctccttcaattacaatgatgagattgcaaacaggtttttgaaagaggttgctgctttgactggaggagagttccatttttataattttggttgcaaggatcccactcccccagaggctgttcagaatgaagatctgactcttttagttaaggaaatggaacagggtcacagtgatctggagaagatgcaagacctttattctgagtccttgatcatggactggtggtacaatgcagaaaaggatggagacagcaagcatcaaaaggaaatctgttctatgatttcaaccccagaaaagtgtgcaaagcctcaatctgatgtcgattcaacacaaacttcatctctgaatatgttgaagggaccatggggcctttcagatcaaaaggttcagaaaaagaaagtccttcacgcagaatcaaccaaaaccagcctgctcagaagccagatgtcctccctcaggagctcagcttgcagtgaaaggaaggatggcctctccaatgccagcagccggaggactgctctaagtgacaaagaaatgagcatcttgctggctgaggagtggctggatgacaaatcgtcagaaaaggtgacgcgagaaggaagccaggtttatgaccacgattcttcagatgtgtcttcagaaaactggctgaagacctatggcttggtcgccaagaaactcaccctcatggatgccttgtcagtggcagcagtcccgcacagctccacctatgttcccgtcctggacaagcatgtcgtgtctaaggtctttgatgaggtaaactgattgtctatacgtccctacttgaggccattttcattttctgctcaaataaaaagtagtccaatttct

SEQ ID NO: 199332 - DNA, 4454 bp, Homo sapiens
  Payload ID: 19327
  Gene Name: von Willebrand factor A domain containing 3B
  Uniprot ID: Q502W6
  ENST ID: ENST00000477737
  CDS Start-End: 205-4089
aacagctggaatccttcgcccccggcgcgcagccttcgcccgccggaatcgctgccttatccaccagcgggatgcttacctcgcccgccctctcgggtcaggcgggcccgggaggatgggagggtggctgctgagcgggagccgccacgtcttccacccgacatattgcctagagtttgctgtgacttagatcttgattcagagatggagaaatcaggcccatcttctaccatctctgagcagcagctgcagaggcaagagggatggattaacaccaaaacagacttggctgagcagagtctcatttcatctgagaaatggcttcaactgcatgggcttaagagcaacaaattgaccttgaaacagattttgtcacagatcggattcccacattgtgaagattatgtggcgtctctggggagacctgtggcttctcggtatgctgatggtctgtttccacagctctacagagcagaagatggcagagtatacaatctgacagctaaatcagaactgatttatcagtttgtggaacatttaacacaagctgtggagagctacaagcagcgaatggactggctcaccagcaagagccggcagatttttggtgtcatcttggaacagtgcgtcaccatagtgctggattttggcggcattctggagggggagcttgatctgtgccgagaggctctaacaatggttctccaggagcaggtggctcacataaccgagttcaatatcatacgggtttctcaagagcctgtgaagtggcaggaaaatgctactcctgtgaccgaacagtccatagctactgccatcagttgggttgagaaactgacggttgagctgactgtgagcgaggctggccgcctggatgctctgctggaagccgggagagacaagactattgaatccatttactactttgtggtgggggatgttcctgaagaatccaaggagcttctcctccagagggccttggagatcccgtgtccagtctacacagtgtccttcaacgccagaggagaaggcactatagcttttctaaaggatctgagtgccaagacccacagcagattccacgcatttgccgagagaacagagtgtgtagaatttcctgcattctccacaaaggatggtgacaatgtgatgacttggaattcaaggaaactgaaaggaaaactccctccaggagctggagtcagagaggacgtgtttctcgtttggcaagagatggaggaagcctgcagcacgctggcccagatccagaggctggtggccgagcctcccaagcccgacgtggccactgtggactgcgagtcagaaacaacctctgttgagattgcatcgaatccagaagacacctgggactctaagacatggctgcagaaatatggcttgaaggcccagaagctatccttgtatgatgtgcttgccgactgctctttccgccacgctgatggggttgtggatataaaagccaaaccggagaatgagtccgtgcagaccagtgcggagacgaacaagaagacagtccatgcaaaatattgcagcaggtttgtccatgctccctggaaggatgggagcttggtccacgtcaacattaccaaagagaagtgcaagtggtacagtgagagaatccacacagccctggcccggatccgaaggaggattaaatggctacaggatgggagtcaaagcctctttggaagattgcataatgattgcatctacattctcattgacacgtctcactcaatgaagagcaaactggacttggtgaaggacaagatcattcagttcatacaggaacagctgaaatataaaagtaagtttaactttgtgaagtttgatggtcaagcagttgcttggcgggaacaacttgctgaagtcaatgaagataatttggaacaggctcagtcctggattagagacataaagattggaagctccacaaacaccctgagtgccctgaaaactgcttttgctgataaagaaacacaggcaatctaccttctgaccgatgggagacctgatcagccacctgaaacagttatagaccaggtcaaacgttttcaggaaattcctatttataccatctccttcaattacaatgatgagattgcaaacaggtttttgaaagaggttgctgctttgactggaggagagttccatttttataattttggttgcaaggatcccactcccccagaggctgttcagaatgaagatctgactcttttagttaaggaaatggaacagggtcacagtgatctggagaagatgcaagacctttattctgagtccttgatcatggactggtggtacaatgcagaaaaggatggagacagcaagcatcaaaaggaaatctgttctatgatttcaaccccagaaaagtgtgcaaagcctcaatctgatgtcgattcaacacaaacttcatctctgaatatgttgaagggaccatggggcctttcagatcaaaaggttcagaaaaagaaagtccttcacgcagaatcaaccaaaaccagcctgctcagaagccagatgtcctccctcaggagctcagcttgcagtgaaaggaaggatggcctctccaatgccagcagccggaggactgctctaagtgacaaagaaatgagcatcttgctggctgaggagtggctggatgacaaatcgtcagaaaaggtgacgcgagaaggaagccaggtttatgaccacgattcttcagatgtgtcttcagaaaactggctgaagacctatggcttggtcgccaagaaactcaccctcatggatgccttgtcagtggcagcagtcccgcacagctccacctatgttcccgtcctggacaagcatgtcgtgtctaaggtctttgatgaggtgttccctctggcacatgtgtgcaacgacacaaataagatgacattaattaacccccaaggagccaaactcaatatctacaagcgaaaagtggaacaggcaattcaatcctatgaaaagcgcttgaataaaattgtttggcgagcattatctcaagaggaaaaagaaaagttagatgcaaacaaaccaatacagtacttggaaaacaaaacagttttaaaccaggctttagaacggttgaattggcccatttcactgaaagagctgtcgatgctggaaagtgaaatcctagctgggaaaatgtacatccagcaggccatggaactccaggaggctgccaagaagaattatgcaaacaaggccccgggagagcaacagaaattgcaaggaaatccaacaaagaaaaccaaatcaaaaagaccagatcccctcaaaggacagaaggttattgcaagatgtgatgaaaatggcttttattttccaggggttgtgaagaagtgtgtgagccgcacccaagcactggtgggcttcagttacggagacaccaaggtcgtgtccacctccttcatcacgcctgtggggggcgccatgccctgcccgctgctccaggttggagattatgtgtttgccaaaattgtgatacccaaaggatttgacttctatgtccctgccattgtcatagcacttcccaataagcatgtggccacagaaaaattctacacagttttgaagtgtaacaaccggagagaattttgccctcggagtgcacttattaagatcagccaaaacaagtatgcgctctcttgctctcatataaagtcacccccaattcctgaggatccagaagtagaggatgtggaggcgaggaactctgctttcctcttctggccactgaaagaagcggacacgcaggattccagagagccaagacgagagaagcccaggaggaaaaagaggcccgccaagcagccactccagcaggcggcgccctcggactcggacggctcctcccacggcatcagctcccatgggtcctgccaggggacacaccccgagcccaggacagcccacctccacttccccgcggccgggcgtctaggactcagcagccacgccatcattgccacacctccacctcgagcagccctgccctgtactctccaagccacccacagcagcaaagggctgaggagcgtccctgagacactttaaggccgtctggtggcagctatgtttaagagaccagcgtccttccaggctgttcagacctcagcgttgacactgaaactggcccctccgcggaggtaaggccgccctccgcgccgcctatgcctgccctgtctgtagcaaagactcctctcccctccatccctgctgcctcccctacccgtttgacgacttggttctggctttttctgactgttctttatcctgttttccccctgcactcacaaaattgtattccatcttctggtagacgccccacccccagaagttttaacctgaaggatgactgtcacaggactttcaaattgtttagcagtcagcatagtcaggatccaagcccgcaatcttgt

SEQ ID NO: 199333 - DNA, 2575 bp, Homo sapiens
  Payload ID: 19327
  Gene Name: von Willebrand factor A domain containing 3B
  ENST ID: ENST00000489630
  CDS Start-End: 1-313
gaaaactgcttttgctgataaagaaacacaggcaatctaccttctgaccgatgggagacctgatcagccacctgaaacagttatagaccaggtcaaacgttttcaggaaattcctatttataccatctccttcaattacaatgatgagattgcaaacaggtttttgaaagaggttgctgctttgactggaggagagttccatttttataattttggttgcaaggatcccactcccccagaggctgttcaggcatcaaaaggaaatctgttctatgatttcaaccccagaaaagtgtgcaaagcctcaatctgatgtcgattcaacacaaacttcatctctgaatatgttgaagggaccatggggcctttcagatcaaaaggttcagaaaaagaaagtccttcacgcagaatcaaccaaaaccagcctgctcagaagccagatgtcctccctcaggagctcagcttgcagtgaaaggaaggatggcctctccaatgccagcagccggaggactgctctaagtgacaaagaaatgagcatcttgctggctgaggagtggctggatgacaaatcgtcagaaaaggtgacgcgagaaggaagccaggtttatgaccacgattcttcagatgtgtcttcagaaaactggctgaagacctatggcttggtcgccaagaaactcaccctcatggatgccttgtcagtggcagcagtcccgcacagctccacctatgttcccgtcctggacaagcatgtcgtgtctaaggtctttgatgaggtgttccctctggcacatgtgtgcaacgacacaaataagatgacattaattaacccccaaggagccaaactcaatatctacaagcgaaaagtggaacaggcaattcaatcctatgaaaagcgcttgaataaaattgtttggcgagcattatctcaagaggaaaaagaaaagttagatgcaaacaaaccaatacagtacttggaaaacaaaacagttttaaaccaggctttagaacggttgaattggcccatttcactgaaagagctgtcgatgctggaaagtgaaatcctagctgggaaaatgtacatccagcaggccatggaactccaggaggctgccaagaagaattatgcaaacaaggccccgggagagcaacagaaattgcaaggaaatccaacaaagaaaaccaaatcaaaaagaccagatcccctcaaaggacagaaggttattgcaagatgtgatgaaaatggcttttattttccaggggttgtgaagaagtgtgtgagccgcacccaagcactggtgggcttcagttacggagacaccaaggtcgtgtccacctccttcatcacgcctgtggggggcgccatgccctgcccgctgctccaggttggagattatgtgtttgccaaaattgtgatacccaaaggatttgacttctatgtccctgccattgtcatagcacttcccaataagcatgtggccacagaaaaattctacacagttttgaagtgtaacaaccggagagaattttgccctcggagtgcacttattaagatcagccaaaacaagtatgcgctctcttgctctcatataaagtcacccccaattcctgaggatccagaagtagaggatgtggaggcgaggaactctgctttcctcttctggccactgaaagaagcggacacgcaggattccagagagccaagacgagagaagcccaggaggaaaaagaggcccgccaagcagccactccagcaggcggcgccctcggactcggacggctcctcccacggcatcagctcccatgggtcctgccaggggacacaccccgagcccaggacagcccacctccacttccccgcggccgggcgtctaggactcagcagccacgccatcattgccacacctccacctcgagcagccctgccctgtactctccaagccacccacagcagcaaagggctgaggagcgtccctgagacactttaaggccgtctggtggcagctatgtttaagagaccagcgtccttccaggctgttcagacctcagcgttgacactgaaactggcccctccgcggaggtaaggccgccctccgcgccgcctatgcctgccctgtctgtagcaaagactcctctcccctccatccctgctgcctcccctacccgtttgacgacttggttctggctttttctgactgttctttatcctgttttccccctgcactcacaaaattgtattccatcttctggtagacgccccacccccagaagttttaacctgaaggatgactgtcacaggactttcaaattgtttagcagtcagcatagtcaggatccaagcccgcaatcttgttttaaattaattatcacatctaaattagagaatttgtcacccaatattaggactgaaattcagactcggtaacttgtctgagatctgcaagactgaacatcccctactgtatagtttcctgacattttcatttagcctttcctaattatttttgtctatagtctgttgtaggtaactctaattgagcccgaaaccagaataaaaactcttacattggaaacattt

SEQ ID NO: 199334 - DNA, 246 bp, Homo sapiens
  Payload ID: 19327
  Gene Name: von Willebrand factor A domain containing 3B
  ENST ID: ENST00000465555
  CDS Start-End: 1-246
tcaccctcatggatgccttgtcagtggcagcagtcccgcacagctccacctatgttcccgtcctggacaagcatgtcgtgtctaaggtctttgatgagtgtttcccggaccagcctcaaatcggtcaccttggaaatgaggtgttccctctggcacatgtgtgcaacgacacaaataagatgacattaattaacccccaaggagccaaactcaatatctacaagcgaaaagtggaacaggcaattc

SEQ ID NO: 199335 - DNA, 2874 bp, Homo sapiens
  Payload ID: 19327
  Gene Name: von Willebrand factor A domain containing 3B
  ENST ID: ENST00000473149
  CDS Start-End: 1-2170
gaaaactgcttttgctgataaagaaacacaggcaatctaccttctgaccgatgggagacctgatcagccacctgaaacagttatagaccaggtcaaacgttttcaggaaattcctatttataccatctccttcaattacaatgatgagattgcaaacaggtttttgaaagaggttgctgctttgactggaggagagttccatttttataattttggttgcaaggatcccactcccccagaggctgttcagaatgaagatctgactcttttagttaaggaaatggaacagggtcacagtgatctggagaagatgcaagacctttattctgagtccttgatcatggactggtggtacaatgcagaaaaggatggagacagcaagcatcaaaaggaaatctgttctatgatttcaaccccagaaaagtgtgcaaagcctcaatctgatgtcgattcaacacaaacttcatctctgaatatgttgaagggaccatggggcctttcagatcaaaaggttcagaaaaagaaagtccttcacgcagaatcaaccaaaaccagcctgctcagaagccagatgtcctccctcaggagctcagcttgcagtgaaaggaaggatggcctctccaatgccagcagccggaggactgctctaagtgacaaagaaatgagcatcttgctggctgaggagtggctggatgacaaatcgtcagaaaaggtgacgcgagaaggaagccaggtttatgaccacgattcttcagatgtgtcttcagaaaactggctgaagacctatggcttggtcgccaagaaactcaccctcatggatgccttgtcagtggcagcagtcccgcacagctccacctatgttcccgtcctggacaagcatgtcgtgtctaaggtctttgatgaggtgttccctctggcacatgtgtgcaacgacacaaataagatgacattaattaacccccaaggagccaaactcaatatctacaagcgaaaagtggaacaggcaattcaatcctatgaaaagcgcttgaataaaattgtttggcgagcattatctcaagaggaaaaagaaaagttagatgcaaacaaaccaatacagtacttggaaaacaaaacagttttaaaccaggctttagaacggttgaattggcccatttcactgaaagagctgtcgatgctggaaagtgaaatcctagctgggaaaatgtacatccagcaggccatggaactccaggaggctgccaagaagaattatgcaaacaaggccccgggagagcaacagaaattgcaaggaaatccaacaaagaaaaccaaatcaaaaagaccagatcccctcaaaggacagaaggttattgcaagatgtgatgaaaatggcttttattttccaggggttgtgaagaagtgtgtgagccgcacccaagcactggtgggcttcagttacggagacaccaaggtcgtgtccacctccttcatcacgcctgtggggggcgccatgccctgcccgctgctccaggttggagattatgtgtttgccaaaattgtgatacccaaaggatttgacttctatgtccctgccattgtcatagcacttcccaataagcatgtggccacagaaaaattctacacagttttgaagtgtaacaaccggagagaattttgccctcggagtgcacttattaagatcagccaaaacaagtatgcgctctcttgctctcatataaagtcacccccaattcctgaggatccagaagtagaggatgtggaggcgaggaactctgctttcctcttctggccactgaaagaagcggacacgcaggattccagagagccaagacgagagaagcccaggaggaaaaagaggcccgccaagcagccactccagcaggcggcgccctcggactcggacggctcctcccacggcatcagctcccatgggtcctgccaggggacacaccccgagcccagggtttgggtgatggggggggaacacaacatcgcttatctcaggaacaccctgaaatccctttcaagaatagtacacctaacatcgtccttcagattctgggcctgtttaggctccagtgcagcaaagaccctaacatccttaagtaatgctgaactctgcttccccagacagcccacctccacttccccgcggccgggcgtctaggactcagcagccacgccatcattgccacacctccacctcgagcagccctgccctgtactctccaagccacccacagcagcaaagggctgaggagcgtccctgagacactttaaggccgtctggtggcagctatgtttaagagaccagcgtccttccaggctgttcagacctcagcgttgacactgaaactggcccctccgcggaggtaaggccgccctccgcgccgcctatgcctgccctgtctgtagcaaagactcctctcccctccatccctgctgcctcccctacccgtttgacgacttggttctggctttttctgactgttctttatcctgttttccccctgcactcacaaaattgtattccatcttctggtagacgccccacccccagaagttttaacctgaaggatgactgtcacaggactttcaaattgtttagcagtcagcatagtcaggatccaagcccgcaatcttgttttaaattaattatcacatctaaattagagaatttgtcacccaatattaggactgaaattcagactcggtaacttgtctgagatctgcaagactgaacatcccctactgtatagtttcctgacattttcatttagcctttcctaattatttttgtctatagtctgttgtaggtaactctaattgagcccgaaaccagaataaaaactcttacattggaaacatttc

SEQ ID NO: 199336 - DNA, 2711 bp, Homo sapiens
  Payload ID: 19327
  Gene Name: von Willebrand factor A domain containing 3B
  ENST ID: ENST00000495571
  CDS Start-End: 1-316
gagcaaactggacttggtgaaggacaagatcattcagttcatacaggaacagctgaaatataaaagtaagtttaactttgtgaagtttgatggtcaagcagttgcttggcgggaacaacttgctgaagtcaatgaagataatttggaacaggctcagtcctggattagagacataaagattggaagctccacaaacaccctgagtgccctgaaaactgcttttgctgataaagaaacacaggcaatctaccttctgaccgatgggagacctgatcagggaacatcatctcatttactcctcacagcagccgtttaaggagggagtatcagttctgagccacagatgaggaaactcacattagacaggacatgccctaggccattcagatgggcagtgctggatgagcttcaagcccaagtctctcgctctggagctgtttccttcattccatacagctgaagacagcatgagtgggagagactgtcatgtgtatcattccacctgaaacagttatagaccaggtcaaacgttttcaggaaattcctatttataccatctccttcaattacaatgatgagattgcaaacaggtttttgaaagaggttgctgctttgactggaggagagttccatttttataattttggttgcaaggatcccactcccccagaggctgttcagaatgaagatctgactcttttagttaaggaaatggaacagggtcacagtgatctggagaagatgcaagacctttattctgagtccttgatcatggactggtggtacaatgcagaaaaggatggagacagcaagcatcaaaaggaaatctgttctatgatttcaaccccagaaaagtgtgcaaagcctcaatctgatgtcgattcaacacaaacttcatctctgaatatgttgaagggaccatggggcctttcagatcaaaaggttcagaaaaagaaagtccttcacgcagaatcaaccaaaaccagcctgctcagaagccagatgtcctccctcaggagctcagcttgcagtgaaaggaaggatggcctctccaatgccagcagccggaggactgctctaagtgacaaagaaatgagcatcttgctggctgaggagtggctggatgacaaatcgtcagaaaaggtgacgcgagaaggaagccaggtttatgaccacgattcttcagatgtgtcttcagaaaactggctgaagacctatggcttggtcgccaagaaactcaccctcatggatgccttgtcagtggcagcagtcccgcacagctccacctatgttcccgtcctggacaagcatgtcgtgtctaaggtctttgatgaggtgttccctctggcacatgtgtgcaacgacacaaataagatgacattaattaacccccaaggagccaaactcaatatctacaagcgaaaagtggaacaggcaattcaatcctatgaaaagcgcttgaataaaattgtttggcgagcattatctcaagaggaaaaagaaaagttagatgcaaacaaaccaatacagtacttggaaaacaaaacagttttaaaccaggctttagaacggttgaattggcccatttcactgaaagagctgtcgatgctggaaagtgaaatcctagctgggaaaatgtacatccagcaggccatggaactccaggaggctgccaagaagaattatgcaaacaaggccccgggagagcaacagaaattgcaaggaaatccaacaaagaaaaccaaatcaaaaagaccagatcccctcaaaggacagaaggttattgcaagatgtgatgaaaatggcttttattttccaggggttgtgaagaagtgtgtgagccgcacccaagcactggtgggcttcagttacggagacaccaaggtcgtgtccacctccttcatcacgcctgtggggggcgccatgccctgcccgctgctccaggttggagattatgtgtttgccaaaattgtgatacccaaaggatttgacttctatgtccctgccattgtcatagcacttcccaataagcatgtggccacagaaaaattctacacagttttgaagtgtaacaaccggagagaattttgccctcggagtgcacttattaagatcagccaaaacaagtatgcgctctcttgctctcatataaagtcacccccaattcctgaggatccagaagtagaggatgtggaggcgaggaactctgctttcctcttctggccactgaaagaagcggacacgcaggattccagagagccaagacgagagaagcccaggaggaaaaagaggcccgccaagcagccactccagcaggcggcgccctcggactcggacggctcctcccacggcatcagctcccatgggtcctgccaggggacacaccccgagcccaggacagcccacctccacttccccgcggccgggcgtctaggactcagcagccacgccatcattgccacacctccacctcgagcagccctgccctgtactctccaagccacccacagcagcaaagggctgaggagcgtccctgagacactttaaggccgtctggtggcagctatgtttaagagaccagcgtccttccaggctgttcagacctcagcgttgacactgaaactggcccctccgcggagtctgttgtaggtaactctaattgagcccgaaaccagaataaaaactcttacattggaaacatttcaaaacca

SEQ ID NO: 199337 - DNA, 1542 bp, Homo sapiens
  Payload ID: 19327
  Gene Name: von Willebrand factor A domain containing 3B
  Uniprot ID: Q502W6
  ENST ID: ENST00000614454
  CDS Start-End: 129-1379
gtaaaaactaagatgtcagactcgaagtgtggggtatgactttatctttccctggatctgcatgtggagaggacggagagtgggtgcacacaagccaaatctgagctactatcacactgaagcacacaatggccacgaaaggcatgaggttgaaatccacaaaagaggtgttccctctggcacatgtgtgcaacgacacaaataagatgacattaattaacccccaaggagccaaactcaatatctacaagcgaaaagtggaacaggcaattcaatcctatgaaaagcgcttgaataaaattgtttggcgagcattatctcaagaggaaaaagaaaagttagatgcaaacaaaccaatacagtacttggaaaacaaaacagttttaaaccaggctttagaacggttgaattggcccatttcactgaaagagctgtcgatgctggaaagtgaaatcctagctgggaaaatgtacatccagcaggccatggaactccaggaggctgccaagaagaattatgcaaacaaggccccgggagagcaacagaaattgcaaggaaatccaacaaagaaaaccaaatcaaaaagaccagatcccctcaaaggacagaaggttattgcaagatgtgatgaaaatggcttttattttccaggggttgtgaagaagtgtgtgagccgcacccaagcactggtgggcttcagttacggagacaccaaggtcgtgtccacctccttcatcacgcctgtggggggcgccatgccctgcccgctgctccaggttggagattatgtgtttgccaaaattgtgatacccaaaggatttgacttctatgtccctgccattgtcatagcacttcccaataagcatgtggccacagaaaaattctacacagttttgaagtgtaacaaccggagagaattttgccctcggagtgcacttattaagatcagccaaaacaagtatgcgctctcttgctctcatataaagtcacccccaattcctgaggatccagaagtagaggatgtggaggcgaggaactctgctttcctcttctggccactgaaagaagcggacacgcaggattccagagagccaagacgagagaagcccaggaggaaaaagaggcccgccaagcagccactccagcaggcggcgccctcggactcggacggctcctcccacggcatcagctcccatgggtcctgccaggggacacaccccgagcccaggacagcccacctccacttccccgcggccgggcgtctaggactcagcagccacgccatcattgccacacctccacctcgagcagccctgccctgtactctccaagccacccacagcagcaaagggctgaggagcgtccctgagacactttaaggccgtctggtggcagctatgtttaagagaccagcgtccttccaggctgttcagacctcagcgttgacactgaaactggcccctccgcggagtctgttgtaggtaactctaattgagcccgaaaccagaataaaaactcttacattggaaacatttcaaaacc

SEQ ID NO: 199338 - DNA, 1863 bp, Homo sapiens
  Payload ID: 19328
  Gene Name: von Willebrand factor A domain containing 5A
  Uniprot ID: O00534
  ENST ID: ENST00000361352
  CDS Start-End: 95-1342
cggttctttccggaaattatgactgcagctgttttcactccgctgtgactcagagcgctccgggctgcaggagaggaagaaatcttgcatcaccatggtgcacttctgtggcctactcaccctccaccgggagccagtgccgctgaagagtatctctgtgagcgtgaacatttacgagtttgtggctggtgtgtctgcaactttgaactacgagaatgaggagaaagttcctttggaggccttctttgtgttccccatggatgaagactctgctgtttacagctttgaggccttggtggatgggaagaaaattgtagcagaattacaagacaagatgaaggcccgcaccaactatgagaaagccatctcccagggccaccaggccttcttattggagggggacagcagctccagggatgtcttctcttgcaatgtgggtaacctccaacctgggtcgaaggcggcagtcaccctgaagtatgtgcaggagctgcctctggaagcagatggggctctgcgctttgtgctcccagctgtcctgaatcctagataccagttctctgggtcgtctaaggacagttgccttaatgtgaagactcctatagtccctgtggaggacctgccctacacactcagcatggtcgccaccatagattcccagcatggcattgagaaggtccaatccaactgccccttgagtcctaccgagtacctaggagaggacaagacttctgctcaggtttccctggctgctggacacaagtttgatcgggacgtggaactcctgatttactacaatgaggtgcatacccccagcgtggttttggagatggggatgcctaacatgaagccaggtcatttgatgggagatccatctgcaatggtgagtttctatccaaatatcccagaagatcaaccatcaaatacctgtggagagtttatctttctcatggaccgctcgggaagtatgcagagccccatgagtagccaggatacatctcagctgcgaatacaggcagccaaggaaacactgattttgctgctgaagagtttacctataggctgttatttcaacatctatggatttggctcttcctatgaggcatgctttccggagagtgtgaagtacactcagcaaacaatggaggaggctctggggagagtgaagcttatgcaggccgacctagggggcactgaaatcttggcaccactccagaacatttacaggggaccctccatcccaggccaccccctacagctttttgtctttacagatggagaagttacagacacgtttagtgtaattaaagaagttaggatcaacagacagaaacacaggtaggaagaaaatgtgatttccgggtgattggtgctgagtagtgacacacagactctagtgctacatgatgccggtgttgaccttccttcaagaggaccaaatgatttcagaatttagttttagcagctgaaaatttatttctccctgtaaacgttaaaaacagttttccaaataacatcaacaacacagcaaaaccattgtttcttattctttctaaactacaacgaacacaagaattgaatagtaagatgttaattttttttactataaacatttttagagaagtaaaacatgctgaaaactacacaaattataagcatacaactggactcattatcacagtgaatgcactgtgtgatcgccacataggtaaaaactggaatggtcgtaggcctctccatctgtacccttttccatcatgtcctattccctgtcactacacactaaaactttcctgacttacaataccatgggttatttatgcttgtttttgaatgaaaataaataagttatacagtatgctt

SEQ ID NO: 199339 - DNA, 2691 bp, Homo sapiens
  Payload ID: 19328
  Gene Name: von Willebrand factor A domain containing 5A
  ENST ID: ENST00000392744
  CDS Start-End: 1329-2624
gactcagagcgctccgggctgcaggagaggaaggtaggggaccaagctaccggtgcagggcctggatccaacccctgctctggaagactgagagctccacattctagctccctttccccagtccccaaatttgtaggggctccttgaattgcacgccccatgggtggaggatttcatcctgatgtatgatccccaggaaggttcctgcaagtttggcagtttaggggaatcttttggaggttgaaggagggatttagccatctcctaatctcaaggcccttcttcctactttccttctcttttactttactttttttcccgctttctttctttgatatagacaattgatgttttctcagtttcaggatagtgtaagctgaggaaatgaggctgtaagcctcatctactccaatcagttgcagcccctaagcccttctctatagaaatgtaagagaccgacgcagtctcttctgtaaatacgtggacattggaaatctaggactgaatggaaaggttaaatcaatctctgattttatccaagccccacttcttaccccaaatctcctccttgtctggttccgagttctccacttcacccctgccacaggccgcaggggtgtgtgtggccggtggtgccacccagctcccctcccaccctcctagctgctgagcggctggtgctgggactctgcattcctgaagcagctacctggctaggccggaagccttgtattctcccagctgcctcagattcatggctttcagcttggtggccagtctctacctaagccttgcaagttgcctttctgaagtgccatcctgagagacagaactaattctgacccaaactaattttgtttgtactgggaagagtgggggcaagggtgcagaatagcaagttttcctcaacggaggatttgttctgagcttagaatcaggaagcgaaggctatttccttgtaggggtgccctttgcgtctctctctcttttactctagccaccttggtgagtattgcccagcctgagagcttctctttcagctgttttactcctgtgtgagtctcctgctttaggctctctgcttaatgtgttattagaaattcttccctcccccagcccagcctgttctaccagagaacttgcccaggtcagaggtctgcgtagaagcccttttctgagcatcctctcctctcctcacacctgccactgtcctctgcgttgctgtcgaattgttccaacttcctaactccaacattaaccctttgaatgtattcttatgccagagaaaggcacataaagtactggtgtttgaacagataacttccaacatgtcctctgtttgtgatatgtcttttctgcagaaatcttgcatcaccatggtgcacttctgtggcctactcaccctccaccgggagccagtgccgctgaagagtatctctgtgagcgtgaacatttacgagtttgtggctggtgtgtctgcaactttgaactacgagaatgaggagaaagttcctttggaggccttctttgtgttccccatggatgaagactctgctgtttacagctttgaggccttggtggatgggaagaaaattgtagcagaattacaagacaagatgaaggcccgcaccaactatgagaaagccatctcccagggccaccaggccttcttattggagggggacagcagctccagggatgtcttctcttgcaatgtgggtaacctccaacctgggtcgaaggcggcagtcaccctgaagtatgtgcaggagctgcctctggaagcagatggggctctgcgctttgtgctcccagctgtcctgaatcctagataccagttctctgggtcgtctaaggacagttgccttaatgtgaagactcctatagtccctgtggaggacctgccctacacactcagcatggtcgccaccatagattcccagcatggcattgagaaggtccaatccaactgccccttgagtcctaccgagtacctaggagaggacaagacttctgctcaggtttccctggctgctggacacaagtttgatcgggacgtggaactcctgatttactacaatgaggtgcatacccccagcgtggttttggagatggggatgcctaacatgaagccaggtcatttgatgggagatccatctgcaatggtgagtttctatccaaatatcccagaagatcaaccatcaaatacctgtggagagtttatctttctcatggaccgctcgggaagtatgcagagccccatgagtagccaggatacatctcagctgcgaatacaggcagccaaggaaacactgattttgctgctgaagagtttacctataggctgttatttcaacatctatggatttggctcttcctatgaggcatgctttccggagagtgtgaagtacactcagcaaacaatggaggaggctctggggagagtgaagcttatgcaggccgacctagggggcactgaaatcttggcaccactccagaacatttacaggggaccctccatcccaggccaccccctacagctttttgtctttacagatggagaagttacagacacgtttagtgtaattaaagaagttaggatcaacagacagaaacacaggtaggaagaaaatgtgatttccgggtgattggtgctgagtagtgacacacagactctagtgctacatgatg

SEQ ID NO: 199340 - DNA, 3419 bp, Homo sapiens
  Payload ID: 19328
  Gene Name: von Willebrand factor A domain containing 5A
  Uniprot ID: O00534
  ENST ID: ENST00000392748
  CDS Start-End: 95-2455
cggttctttccggaaattatgactgcagctgttttcactccgctgtgactcagagcgctccgggctgcaggagaggaagaaatcttgcatcaccatggtgcacttctgtggcctactcaccctccaccgggagccagtgccgctgaagagtatctctgtgagcgtgaacatttacgagtttgtggctggtgtgtctgcaactttgaactacgagaatgaggagaaagttcctttggaggccttctttgtgttccccatggatgaagactctgctgtttacagctttgaggccttggtggatgggaagaaaattgtagcagaattacaagacaagatgaaggcccgcaccaactatgagaaagccatctcccagggccaccaggccttcttattggagggggacagcagctccagggatgtcttctcttgcaatgtgggtaacctccaacctgggtcgaaggcggcagtcaccctgaagtatgtgcaggagctgcctctggaagcagatggggctctgcgctttgtgctcccagctgtcctgaatcctagataccagttctctgggtcgtctaaggacagttgccttaatgtgaagactcctatagtccctgtggaggacctgccctacacactcagcatggtcgccaccatagattcccagcatggcattgagaaggtccaatccaactgccccttgagtcctaccgagtacctaggagaggacaagacttctgctcaggtttccctggctgctggacacaagtttgatcgggacgtggaactcctgatttactacaatgaggtgcatacccccagcgtggttttggagatggggatgcctaacatgaagccaggtcatttgatgggagatccatctgcaatggtgagtttctatccaaatatcccagaagatcaaccatcaaatacctgtggagagtttatctttctcatggaccgctcgggaagtatgcagagccccatgagtagccaggatacatctcagctgcgaatacaggcagccaaggaaacactgattttgctgctgaagagtttacctataggctgttatttcaacatctatggatttggctcttcctatgaggcatgctttccggagagtgtgaagtacactcagcaaacaatggaggaggctctggggagagtgaagcttatgcaggccgacctagggggcactgaaatcttggcaccactccagaacatttacaggggaccctccatcccaggccaccccctacagctttttgtctttacagatggagaagttacagacacgtttagtgtaattaaagaagttaggatcaacagacagaaacacaggtgtttctcatttggtattggagaaggcacctccaccagcctaataaaaggtattgcccgggcatcagggggcacctcagaatttatcacaggcaaagacaggatgcagtccaaggctctcaggactctgaaacgctctctgcagcctgtggtagaggatgtctctctgagctggcatttgcctcctggtctgtctgctaaaatgctttccccagaacagactgtcatctttaggggtcagagattaatcagctatgcccagctgaccgggaggatgccagcagcagagacaacaggagaagtatgcctcaaatatacactccagggcaagacttttgaggataaggtgacatttcctctacaacccaagcctgatgtcaacctcaccattcaccgccttgctgccaagtccttgctccagaccaaggacatgggcctcagggagactccagcaagtgataaaaaagatgcattgaaccttagccttgagtctggtgtcataagctccttcacagctttcattgctatcaataaggagctcaacaagccggttcaggggcctctggctcatagggacgtcccaaggccaattctgttgggtgcttctgccccattgaagataaaatgccaatcaggttttcgaaaggccttacactctgaccgtcctccttctgcatctcagcccagaggggaacttatgtgttataaggccaagacattccagatggacgattacagtctctgtgggttgataagtcacaaggaccagcacagtccaggctttggagagaatcaccttgtgcagctgatttaccaccaaaatgcaaatggttcctgggatctgaatgaagatctagccaagatcctaggtatgagtttggaagaaataatggctgcacagcctgccgagcttgtggattcctcaggctgggccaccatcctggccgtgatctggctgcacagcaatggtaaggacttgaagtgtgaatgggagcttctggaaaggaaggccgtggcctggatgcgtgcccatgcaggctccaccatgccttcggttgtgaaagctgctattactttcctgaagtcatctgtggatcctgctatctttgccttttgaagataccatccagaaaaagaagtgcctttaatttgctactgtcatttcctctagtatcacttttgctgtgatgatgtgttcttgtgtattataactctttattttttgccataaaagtaaaggatgcttactccacttcgcttctctgctccaggttcactttggatatgatctttcttttcccaacatatgccctcagaaaagtgacagtggtcccagaacctattccctttcttgagggagttcaaaacattcataggcagtaatgttcctcccagggtttccagggaaacaacatgaaaaacaggtgacatgaactacagactaaagattgcagcatttatgttagagaatgcttgaattagagaattttctgcattatctttgtctgttcactttctatcttatatacttatcagggccatactggtaagcttgcgtaggaggagttagagggaagttgaaagccaacatctggatcaatgtaatgtcaagatcacaaagacagagactgcaggggtccactgtgagaggtgacactgttggggaccttcctgattcattcttcttgggctttgctagcctgtacaacctacatgtcttttcttccactgcctgaaagacttgggttgaactataactgttggagagagatgttcctctttaatcatgaaacaccttaagaagtctataatgcaatccttagtcctaccctgaacctatgtgtcctctaagtcaggccctgatctagtgcagtaaagggaagggtgggcttaatgggagctttgcctgggacctgaacctggagcacttaccgcattaggaagaaaggagctccccgtaatcgttcctgacccttgtgtctcatataccctatcctggtggaaatgaccctatttgatatgctgtcccttaaaataacttgtatcaatattaaaatgactatttctaccctttgatgagt

SEQ ID NO: 199341 - DNA, 1978 bp, Homo sapiens
  Payload ID: 19328
  Gene Name: von Willebrand factor A domain containing 5A
  Uniprot ID: O00534
  ENST ID: ENST00000449321
  CDS Start-End: 210-1457
cggttctttccggaaattatgactgcagctgttttcactccgctgtgactcagagcgctccgggctgcaggagaggaagcccagcctgttctaccagagaacttgcccaggtcagaggtctgcgtagaagcccttttctgagcatcctctcctctcctcacacctgccactgtcctctgcgttgctgtcgaattaaatcttgcatcaccatggtgcacttctgtggcctactcaccctccaccgggagccagtgccgctgaagagtatctctgtgagcgtgaacatttacgagtttgtggctggtgtgtctgcaactttgaactacgagaatgaggagaaagttcctttggaggccttctttgtgttccccatggatgaagactctgctgtttacagctttgaggccttggtggatgggaagaaaattgtagcagaattacaagacaagatgaaggcccgcaccaactatgagaaagccatctcccagggccaccaggccttcttattggagggggacagcagctccagggatgtcttctcttgcaatgtgggtaacctccaacctgggtcgaaggcggcagtcaccctgaagtatgtgcaggagctgcctctggaagcagatggggctctgcgctttgtgctcccagctgtcctgaatcctagataccagttctctgggtcgtctaaggacagttgccttaatgtgaagactcctatagtccctgtggaggacctgccctacacactcagcatggtcgccaccatagattcccagcatggcattgagaaggtccaatccaactgccccttgagtcctaccgagtacctaggagaggacaagacttctgctcaggtttccctggctgctggacacaagtttgatcgggacgtggaactcctgatttactacaatgaggtgcatacccccagcgtggttttggagatggggatgcctaacatgaagccaggtcatttgatgggagatccatctgcaatggtgagtttctatccaaatatcccagaagatcaaccatcaaatacctgtggagagtttatctttctcatggaccgctcgggaagtatgcagagccccatgagtagccaggatacatctcagctgcgaatacaggcagccaaggaaacactgattttgctgctgaagagtttacctataggctgttatttcaacatctatggatttggctcttcctatgaggcatgctttccggagagtgtgaagtacactcagcaaacaatggaggaggctctggggagagtgaagcttatgcaggccgacctagggggcactgaaatcttggcaccactccagaacatttacaggggaccctccatcccaggccaccccctacagctttttgtctttacagatggagaagttacagacacgtttagtgtaattaaagaagttaggatcaacagacagaaacacaggtaggaagaaaatgtgatttccgggtgattggtgctgagtagtgacacacagactctagtgctacatgatgccggtgttgaccttccttcaagaggaccaaatgatttcagaatttagttttagcagctgaaaatttatttctccctgtaaacgttaaaaacagttttccaaataacatcaacaacacagcaaaaccattgtttcttattctttctaaactacaacgaacacaagaattgaatagtaagatgttaattttttttactataaacatttttagagaagtaaaacatgctgaaaactacacaaattataagcatacaactggactcattatcacagtgaatgcactgtgtgatcgccacataggtaaaaactggaatggtcgtaggcctctccatctgtacccttttccatcatgtcctattccctgtcactacacactaaaactttcctgacttacaataccatgggttatttatgcttgtttttgaatgaaaataaataagttatacagtatgctt

SEQ ID NO: 199342 - DNA, 4388 bp, Homo sapiens
  Payload ID: 19328
  Gene Name: von Willebrand factor A domain containing 5A
  Uniprot ID: O00534
  ENST ID: ENST00000456829
  CDS Start-End: 252-2612
agtcttgtagtcgctactttataaccggtccctagaagggggcggttctttccggaaattatgactgcagctgttttcactccgctgtgactcagagcgctccgggctgcaggagaggaagcccagcctgttctaccagagaacttgcccaggtcagaggtctgcgtagaagcccttttctgagcatcctctcctctcctcacacctgccactgtcctctgcgttgctgtcgaattaaatcttgcatcaccatggtgcacttctgtggcctactcaccctccaccgggagccagtgccgctgaagagtatctctgtgagcgtgaacatttacgagtttgtggctggtgtgtctgcaactttgaactacgagaatgaggagaaagttcctttggaggccttctttgtgttccccatggatgaagactctgctgtttacagctttgaggccttggtggatgggaagaaaattgtagcagaattacaagacaagatgaaggcccgcaccaactatgagaaagccatctcccagggccaccaggccttcttattggagggggacagcagctccagggatgtcttctcttgcaatgtgggtaacctccaacctgggtcgaaggcggcagtcaccctgaagtatgtgcaggagctgcctctggaagcagatggggctctgcgctttgtgctcccagctgtcctgaatcctagataccagttctctgggtcgtctaaggacagttgccttaatgtgaagactcctatagtccctgtggaggacctgccctacacactcagcatggtcgccaccatagattcccagcatggcattgagaaggtccaatccaactgccccttgagtcctaccgagtacctaggagaggacaagacttctgctcaggtttccctggctgctggacacaagtttgatcgggacgtggaactcctgatttactacaatgaggtgcatacccccagcgtggttttggagatggggatgcctaacatgaagccaggtcatttgatgggagatccatctgcaatggtgagtttctatccaaatatcccagaagatcaaccatcaaatacctgtggagagtttatctttctcatggaccgctcgggaagtatgcagagccccatgagtagccaggatacatctcagctgcgaatacaggcagccaaggaaacactgattttgctgctgaagagtttacctataggctgttatttcaacatctatggatttggctcttcctatgaggcatgctttccggagagtgtgaagtacactcagcaaacaatggaggaggctctggggagagtgaagcttatgcaggccgacctagggggcactgaaatcttggcaccactccagaacatttacaggggaccctccatcccaggccaccccctacagctttttgtctttacagatggagaagttacagacacgtttagtgtaattaaagaagttaggatcaacagacagaaacacaggtgtttctcatttggtattggagaaggcacctccaccagcctaataaaaggtattgcccgggcatcagggggcacctcagaatttatcacaggcaaagacaggatgcagtccaaggctctcaggactctgaaacgctctctgcagcctgtggtagaggatgtctctctgagctggcatttgcctcctggtctgtctgctaaaatgctttccccagaacagactgtcatctttaggggtcagagattaatcagctatgcccagctgaccgggaggatgccagcagcagagacaacaggagaagtatgcctcaaatatacactccagggcaagacttttgaggataaggtgacatttcctctacaacccaagcctgatgtcaacctcaccattcaccgccttgctgccaagtccttgctccagaccaaggacatgggcctcagggagactccagcaagtgataaaaaagatgcattgaaccttagccttgagtctggtgtcataagctccttcacagctttcattgctatcaataaggagctcaacaagccggttcaggggcctctggctcatagggacgtcccaaggccaattctgttgggtgcttctgccccattgaagataaaatgccaatcaggttttcgaaaggccttacactctgaccgtcctccttctgcatctcagcccagaggggaacttatgtgttataaggccaagacattccagatggacgattacagtctctgtgggttgataagtcacaaggaccagcacagtccaggctttggagagaatcaccttgtgcagctgatttaccaccaaaatgcaaatggttcctgggatctgaatgaagatctagccaagatcctaggtatgagtttggaagaaataatggctgcacagcctgccgagcttgtggattcctcaggctgggccaccatcctggccgtgatctggctgcacagcaatggtaaggacttgaagtgtgaatgggagcttctggaaaggaaggccgtggcctggatgcgtgcccatgcaggctccaccatgccttcggttgtgaaagctgctattactttcctgaagtcatctgtggatcctgctatctttgccttttgaagataccatccagaaaaagaagtgcctttaatttgctactgtcatttcctctagtatcacttttgctgtgatgatgtgttcttgtgtattataactctttattttttgccataaaagtaaaggatgcttactccacttcgcttctctgctccaggttcactttggatatgatctttcttttcccaacatatgccctcagaaaagtgacagtggtcccagaacctattccctttcttgagggagttcaaaacattcataggcagtaatgttcctcccagggtttccagggaaacaacatgaaaaacaggtgacatgaactacagactaaagattgcagcatttatgttagagaatgcttgaattagagaattttctgcattatctttgtctgttcactttctatcttatatacttatcagggccatactggtaagcttgcgtaggaggagttagagggaagttgaaagccaacatctggatcaatgtaatgtcaagatcacaaagacagagactgcaggggtccactgtgagaggtgacactgttggggaccttcctgattcattcttcttgggctttgctagcctgtacaacctacatgtcttttcttccactgcctgaaagacttgggttgaactataactgttggagagagatgttcctctttaatcatgaaacaccttaagaagtctataatgcaatccttagtcctaccctgaacctatgtgtcctctaagtcaggccctgatctagtgcagtaaagggaagggtgggcttaatgggagctttgcctgggacctgaacctggagcacttaccgcattaggaagaaaggagctccccgtaatcgttcctgacccttgtgtctcatataccctatcctggtggaaatgaccctatttgatatgctgtcccttaaaataacttgtatcaatattaaaatgactatttctaccctttgatgagtaaatgcagtggttcttaaagtggtctcgtctccctaccccacaatattttggtactgccactttgggaagccaaactaggatagtaaattgaccggaacacagttgtggaaatttgacctgaagttagtgaaataaaacttagtagggaaaaaaagcttagcaagaggtctactcctccatagattcatttattgaacttacattggttttattgtcccttgttttctgttccagcttttctgatgcctccactgttcccatggtatcctgaccctctatcttctgttgtaggctgacttcttttatatgaagcaagtaaaggatactaataagaataccactgtagaatcctgaccatacccttaaatagttatgtgatgatgggcaaatgatttcaccctcaggcacttaatatcctcatctgtaaaactaagggattaaactagaactttattaacactttcgagttccactcagaattcctagaggaacatcggtgacttttcactcagaaagtgggtggactaggcctgagtttctttaagttgttgagttacctggtattaggaagacttgtgtgacttgcatagtggactctaatctctcagtctttcttccaagtttgtttatgctgaatgtgatctgcggaacagggttgttagaaatgcagctttttagaaatgcagaattttaatcgataccaggaactactttatttaacaaggctcccaggtatcatgcatgcacattgaagtttgaaaagtaaaggcttaatattttcatgaaataggcttatatccaagcctgccat

SEQ ID NO: 199343 - DNA, 4475 bp, Homo sapiens
  Payload ID: 19329
  Gene Name: von Willebrand factor A domain containing 5B1
  Uniprot ID: Q5TIE3
  ENST ID: ENST00000289815
  CDS Start-End: 197-3844
atcgcaatgtgggcattgatcaagccagctgccagggcagcgggcgcagggcttgggcactggagcccagccccggaccgcacctccagcagtgctgggtgcagaaggcagtcactgtggcagtggagagacagagtgtgtacccagacacgtgttgcttctggggtaaggttctgaaggctgagtagccagcgggatgcccggcttgctgaattggatcacgggggcagccctgcccctcaccgcgtctgatgttacctcctgtgtcagcggttatgccctgggcctaactgcctccctcacctatggcaacctggaagcccagcccttccagggcctcttcgtgtaccccctggatgagtgcaccacggtgatcggctttgaggcagtcattgccgaccgtgtcgtgacagtacagatcaaggacaaagccaagctggagagcggccacttcgatgcctcccatgttcgatccccaacagtcacagggaacattctgcaagacggggtttccatagcccctcattcctgcacaccgggaaaggtgaccttggacgaggatttggagcggatcctgttcgtggccaacctggggaccattgcccccatggagaatgtcaccatcttcatcagcacctcctcggagctcccaacgctgcccagcggggctgtgagggtccttctgcctgctgtctgtgccccaaccgtgccccagttctgcaccaagagcactggcacctccaaccaacaggcccagggcaaagacaggcactgcttcggtgcctgggccccgggctcctggaataagttgtgcctggcgactctcctgaacaccgaagtgtccaaccccatggagtatgagttcaacttccagctggagatccgtgggccatgtctgctcgcaggggtggagagtcccactcatgagattcgtgccgacgccgccccatctgcccgctcggccaagagcatcatcatcaccttggccaacaagcacacctttgaccggcctgtggagatcctcatccaccccagcgagccccatatgccccatgtcctgatagagaaaggggacatgaccctgggagagtttgaccagcacttgaagggaagaacagatttcattaaagggatgaagaagaagagcagagcagagcggaagacagaaatcattcgaaaacgcctccacaaagacattccccaccactccgtcatcatgctcaacttctgtcccgacctccagtcagtccagccgtgcctgagaaaggcccacggggagttcatcttcctcattgacaggagcagcagcatgagcgggatcagcatgcaccgagtcaaggatgccatgttggtggcccttaagagcctcatgccagcctgcctcttcaatatcattgggtttggatccacatttaagagcctttttccttccagccagacctacagtgaggacagcttggccatggcttgtgatgacatccagagaatgaaggccgacatgggtgggaccaacatcctttcccctctcaagtgggtcatcaggcagccagtgcaccgaggccacccgcggctcctcttcgtgatcacagatggcgctgtcaacaacacagggaaggtgctggagctggtgcgaaatcacgccttctccaccaggtgctatagctttggaattggacccaacgtctgccacagactggtgaaaggactggcatctgtgtccgagggcagtgctgagctcctgatggagggggagcggctgcaacccaagatggtcaaatccttgaagaaggccatggccccagtcctgagcgatgtgactgtggagtggatcttccctgagaccactgaggtcctggtctcacccgtcagcgccagctccctcttccctggagaacggctggtggggtatggcattgtatgtgatgcttctttgcacatctccaatcccagatctgacaagaggcgccggtacagcatgctgcactctcaggagtctggcagctctgtcttctaccactctcaggatgacggacccgggctggaaggtggagactgtgccaagaactcgggggcacccttcatcctagggcaggccaaaaatgcccggctagccagcggagactctaccaccaagcacgatctgaacctctctcagcgacggagggcatacagcaccaaccagatcaccaatcacaagcccctcccaagagccaccatggcaagtgaccccatgccagctgccaagagatacccactgcggaaagccaggctgcaggacctcaccaaccagaccagcctggatgtccagcggtggcagattgatttgcagcccttgctgaacagtggtcaggacctgaaccagggccccaaactccgtggcccaggggcccgaaggccctctctgctgccccaaggctgccagcccttcctgccctggggccaggagacccaggcctggagccctgtgagagagcggacttctgacagccgaagccctggagatctggagccgtcccaccatccctctgccttcgagacagagacgtcctcggactgggaccccccagccgagtcccaggagcgagccagtcccagcaggcccgccaccccggccccggtgctgggcaaggccctggtcaaaggcctgcacgacagccaacgcctgcagtgggaggtgagcttcgagctggggacccctggaccggagcggggcggcgcgcaggatgccgacctatggagcgagaccttccaccacctggcggcccgcgccatcatccgcgacttcgagcagctggcggagcgcgagggcgagatcgagcaggggtccaaccgccgctaccaagtgagcgccttgcacaccagcaaggcctgcaacatcattagcaaatacacagccttcgtgcctgtggacgtgagcaagagccggtacctgcccaccgtggtggagtaccccaactctggagctgccctgcgtatgcttggctctcgggccctggcccaacagtggaggggcacctcttctggctttggaaggccgcagacgatgcttggagaagattcggcaccaggaaatgacatggaggcaagtcccactgctctcttcagcgaggccaggtcccccggccgcgagaagcacggtgcttctgaaggtccccagcgcagcctggctacaaatactctttcttccatgaaggcctcagagaatctctttggatcctggctaaatctcaacaagtccaggctactgacgcgagcagccaagggcttcctgagcaagccactgatcaaagctgtggagtcgacctccgggaaccagagcttcgactacatacctctggtgtctctgcagctggcctccggagccttcctgctcaacgaagccttctgtgaggccacgcacatccccatggagaagctcaagtggacgtcccccttcacctgccatcgagtgtccctcaccacccgcccgtctgagtccaagaccccgagtccccagctgtgcaccagctccccgcctaggcacccgtcctgtgacagcttctccctggagcctctggccaagggcaagctgggcctggagccgagggcagtggtggagcacactgggaagctgtgggccacggtggtggggctggcatggctggagcacagttcggcctcctacttcactgagtgggagttggtggctgccaaggccaactcatggctggagcagcaggaagtacccgagggccgcacgcagggcacactcaaggccgctgcccgccagctgtttgtgcttctgcggcactgggatgagaatctcgagttcaatatgctctgctataacccgaattatgtgtagttgagtgacggggaggctgggtggagggaagggtggggaggagagggatgggcagggccatgtcggcctggtttcggggagcttttggagctgtaactaatatttcagttactagaaagagccctggactggcagccaggaggcctgagttcaatcccaactttgctaccatccagccatgcaactttaggccagtgcctgcccccgtctgggcctcagtttcctcatctataaaataagagggcgagatgaaggaggtggagtggatctcaaatggttcagtggttcctttctgcccattcaggcagtcccgggctgactgctgctggggctggcgagggaagatgcagtggaagcctgagccctgtctggaggtagaccacgtgggcacggagtggacacagcaatgcccactcaaataaaagggcagatgagagaacccagtgacctcaagtaaccaggcctacaggcttgcataggcacatagagactagcaagtctggtgcctgtaggacaggctcttgtctccatggtaacagccaaggaccccccctaaatcccacttaaaagccaattggagaagcatccttctcaacgctttacaaaagagtagtttgggggccttttgttt

SEQ ID NO: 199344 - DNA, 3859 bp, Homo sapiens
  Payload ID: 19329
  Gene Name: von Willebrand factor A domain containing 5B1
  Uniprot ID: Q5TIE3
  ENST ID: ENST00000375079
  CDS Start-End: 197-3859
atcgcaatgtgggcattgatcaagccagctgccagggcagcgggcgcagggcttgggcactggagcccagccccggaccgcacctccagcagtgctgggtgcagaaggcagtcactgtggcagtggagagacagagtgtgtacccagacacgtgttgcttctggggtaaggttctgaaggctgagtagccagcgggatgcccggcttgctgaattggatcacgggggcagccctgcccctcaccgcgtctgatgttacctcctgtgtcagcggttatgccctgggcctaactgcctccctcacctatggcaacctggaagcccagcccttccagggcctcttcgtgtaccccctggatgagtgcaccacggtgatcggctttgaggcagtcattgccgaccgtgtcgtgacagtacagatcaaggacaaagccaagctggagagcggccacttcgatgcctcccatgttcgatccccaacagtcacagggaacattctgcaagacggggtttccatagcccctcattcctgcacaccgggaaaggtgaccttggacgaggatttggagcggatcctgttcgtggccaacctggggaccattgcccccatggagaatgtcaccatcttcatcagcacctcctcggagctcccaacgctgcccagcggggctgtgagggtccttctgcctgctgtctgtgccccaaccgtgccccagttctgcaccaagagcactggcacctccaaccaacaggcccagggcaaagacaggcactgcttcggtgcctgggccccgggctcctggaataagttgtgcctggcgactctcctgaacaccgaagtgtccaaccccatggagtatgagttcaacttccagctggagatccgtgggccatgtctgctcgcaggggtggagagtcccactcatgagattcgtgccgacgccgccccatctgcccgctcggccaagagcatcatcatcaccttggccaacaagcacacctttgaccggcctgtggagatcctcatccaccccagcgagccccatatgccccatgtcctgatagagaaaggggacatgaccctgggagagtttgaccagcacttgaagggaagaacagatttcattaaagggatgaagaagaagagcagagcagagcggaagacagaaatcattcgaaaacgcctccacaaagacattccccaccactccgtcatcatgctcaacttctgtcccgacctccagtcagtccagccgtgcctgagaaaggcccacggggagttcatcttcctcattgacaggagcagcagcatgagcgggatcagcatgcaccgagtcaaggatgccatgttggtggcccttaagagcctcatgccagcctgcctcttcaatatcattgggtttggatccacatttaagagcctttttccttccagccagacctacagtgaggacagcttggccatggcttgtgatgacatccagagaatgaaggccgacatgggtgggaccaacatcctttcccctctcaagtgggtcatcaggcagccagtgcaccgaggccacccgcggctcctcttcgtgatcacagatggcgctgtcaacaacacagggaaggtgctggagctggtgcgaaatcacgccttctccaccaggtgctatagctttggaattggacccaacgtctgccacagactggtgaaaggactggcatctgtgtccgagggcagtgctgagctcctgatggagggggagcggctgcaacccaagatggtcaaatccttgaagaaggccatggccccagtcctgagcgatgtgactgtggagtggatcttccctgagaccactgaggtcctggtctcacccgtcagcgccagctccctcttccctggagaacggctggtggggtatggcattgtatgtgatgcttctttgcacatctccaatcccagatctgacaagaggcgccggtacagcatgctgcactctcaggagtctggcagctctgtcttctaccactctcaggatgacggacccgggctggaaggtggagactgtgccaagaactcgggggcacccttcatcctagggcaggccaaaaatgcccggctagccagcggagactctaccaccaagcacgatctgaacctctctcagcgacggagggcatacagcaccaaccagatcaccaatcacaagcccctcccaagagccaccatggcaagtgaccccatgccagctgccaagagatacccactgcggaaagccaggctgcaggacctcaccaaccagaccagcctggatgtccagcggtggcagattgatttgcagcccttgctgaacagtggtcaggacctgaaccagggccccaaactccgtggcccaggggcccgaaggccctctctgctgccccaaggctgccagcccttcctgccctggggccaggagacccaggcctggagccctgtgagagagcggacttctgacagccgaagccctggagatctggagccgtcccaccatccctctgccttcgagacagagacgtcctcggactgggaccccccagccgagtcccaggagcgagccagtcccagcaggcccgccaccccggccccggtgctgggcaaggccctggtcaaaggcctgcacgacagccaacgcctgcagtgggaggtgagcttcgagctggggacccctggaccggagcggggcggcgcgcaggatgccgacctatggagcgagaccttccaccacctggcggcccgcgccatcatccgcgacttcgagcagctggcggagcgcgagggcgagatcgagcaggggtccaaccgccgctaccaagtgagcgccttgcacaccagcaaggcctgcaacatcattagcaaatacacagccttcgtgcctgtggacgtgagcaagagccggtacctgcccaccgtggtggagtaccccaactctgctgccctgcgtatgcttggctctcgggccctggcccaacagtggaggggcacctcttctggctttggaaggccgcagacgatgcttggagaagattcggcaccaggaaatggtaaatttcaggccctaaacatggaggcaagtcccactgctctcttcagcgaggccaggtcccccggccgcgagaagcacggtgcttctgaaggtccccagcgcagcctggctacaaatactctttcttccatgaaggcctcagagaatctctttggatcctggctaaatctcaacaagtccaggctactgacgcgagcagccaagggcttcctgagcaagccactgatcaaagctgtggagtcgacctccgggaaccagagcttcgactacatacctctggtgtctctgcagctggcctccggagccttcctgctcaacgaagccttctgtgaggccacgcacatccccatggagaagctcaagtggacgtcccccttcacctgccatcgagtgtccctcaccacccgcccgtctgagtccaagaccccgagtccccagctgtgcaccagctccccgcctaggcacccgtcctgtgacagcttctccctggagcctctggccaagggcaagctgggcctggagccgagggcagtggtggagcacactgggaagctgtgggccacggtggtggggctggcatggctggagcacagttcggcctcctacttcactgagtgggagttggtggctgccaaggccaactcatggctggagcagcaggaagtacccgagggccgcacgcagggcacactcaaggccgctgcccgccagctgtttgtgcttctgcggcactgggatgagaatctcgagttcaatatgctctgctataacccgaattatgtgtag

SEQ ID NO: 199345 - DNA, 3776 bp, Homo sapiens
  Payload ID: 19329
  Gene Name: von Willebrand factor A domain containing 5B1
  ENST ID: ENST00000485375
  CDS Start-End: 197-751
atcgcaatgtgggcattgatcaagccagctgccagggcagcgggcgcagggcttgggcactggagcccagccccggaccgcacctccagcagtgctgggtgcagaaggcagtcactgtggcagtggagagacagagtgtgtacccagacacgtgttgcttctggggtaaggttctgaaggctgagtagccagcgggatgcccggcttgctgaattggatcacgggggcagccctgcccctcaccgcgtctgatgttacctcctgtgtcagcggttatgccctgggcctaactgcctccctcacctatggcaacctggaagcccagcccttccagggcctcttcgtgtaccccctggatgagtgcaccacggtgatcggctttgaggcagtcattgccgaccgtgtcgtgacagtacagatcaaggacaaagccaagctggagagcggccacttcgatgcctcccatgttcgatccccaacagtcacaggtgaccttggacgaggatttggagcggatcctgttcgtggccaacctggggaccattgcccccatggagaatgtcaccatcttcatcagcacctcctcggagctcccaacgctgcccagcggggctgtgagggtccttctgcctgctgtctgtgccccaaccgtgccccagttctgcaccaagagcactggcacctccaaccaacaggcccagggcaaagacaggcactgcttcggtgcctgggccccgggctcctggaataagttgtgcctggcgactctcctgaacaccgaagtgtccaaccccatggagtatgagttcaacttccagctggagatccgtgggccatgtctgctcgcaggggtggagagtcccactcatgagattcgtgccgacgccgccccatctgcccgctcggccaagagcatcatcatcaccttggccaacaagcacacctttgaccggcctgtggagatcctcatccaccccagcgagccccatatgccccatgtcctgatagagaaaggggacatgaccctgggagagtttgaccagcacttgaagggaagaacagatttcattaaagggatgaagaagaagagcagagcagagcggaagacagaaatcattcgaaaacgcctccacaaagacattccccaccactccgtcatcatgctcaacttctgtcccgacctccagtcagtccagccgtgcctgagaaaggcccacggggagttcatcttcctcattgacaggagcagcagcatgagcgggatcagcatgcaccgagtcaaggatgccatgttggtggcccttaagagcctcatgccagcctgcctcttcaatatcattgggtttggatccacatttaagagcctttttccttccagccagacctacagtgaggacagcttggccatggcttgtgatgacatccagagaatgaaggccgacatgggtgggaccaacatcctttcccctctcaagtgggtcatcaggcagccagtgcaccgaggccacccgcggctcctcttcgtgatcacagatggcgctgtcaacaacacagggaaggtgctggagctggtgcgaaatcacgccttctccaccaggtgctatagctttggaattggacccaacgtctgccacagactggtgaaaggactggcatctgtgtccgagggcagtgctgagctcctgatggagggggagcggctgcaacccaagatggtcaaatccttgaagaaggccatggccccagtcctgagcgatgtgactgtggagtggatcttccctgagaccactgaggtcctggtctcacccgtcagcgccagctccctcttccctggagaacggctggtggggtatggcattgtatgtgatgcttctttgcacatctccaatcccagatctgacaagaggcgccggtacagcatgctgcactctcaggagtctggcagctctgtcttctaccactctcaggatgacggacccgggctggaaggtggagactgtgccaagaactcgggggcacccttcatcctagggcaggccaaaaatgcccggctagccagcggagactctaccaccaagcacgatctgaacctctctcagcgacggagggcatacagcaccaaccagatcaccaatcacaagcccctcccaagagccaccatggcaagtgaccccatgccagctgccaagagatacccactgcggaaagccaggctgcaggacctcaccaaccagaccagcctggatgtccagcggtggcagattgatttgcagcccttgctgaacagtggtcaggacctgaaccagggccccaaactccgtggcccaggggcccgaaggccctctctgctgccccaaggctgccagcccttcctgccctggggccaggagacccaggcctggagccctgtgagagagcggacttctgacagccgaagccctggagatctggagccgtcccaccatccctctgccttcgagacagagacgtcctcggactgggaccccccagccgagtcccaggagcgagccagtcccagcaggcccgccaccccggccccggtgctgggcaaggccctggtcaaaggcctgcacgacagccaacgcctgcagtgggaggtgagcttcgagctggggacccctggaccggagcggggcggcgcgcaggatgccgacctatggagcgagaccttccaccacctggcggcccgcgccatcatccgcgacttcgagcagctggcggagcgcgagggcgagatcgagcaggggtccaaccgccgctaccaagtgagcgccttgcacaccagcaaggcctgcaacatcattagcaaatacacagccttcgtgcctgtggacgtgagcaagagccggtacctgcccaccgtggtggagtaccccaactctggagctgccctgcgtatgcttggctctcgggccctggcccaacagtggaggggcacctcttctggctttggaaggccgcagacgatgcttggagaagattcggcaccaggaaatgacatggaggcaagtcccactgctctcttcagcgaggccaggtcccccggccgcgagaagcacggtgcttctgaaggtccccagcgcagcctggctacaaatactctttcttccatgaaggcctcagagaatctctttggatcctggctaaatctcaacaagtccaggctactgacgcgagcagccaagggcttcctgagcaagccactgatcaaagctgtggagtcgacctccgggaaccagagcttcgactacatacctctggtgtctctgcagctggcctccggagccttcctgctcaacgaagccttctgtgaggccacgcacatccccatggagaagctcaagtggacgtcccccttcacctgccatcgagtgtccctcaccacccgcccgtctgagtccaagaccccgagtccccagctgtgcaccagctccccgcctaggcacccgtcctgtgacagcttctccctggagcctctggccaagggcaagctgggcctggagccgagggcagtggtggagcacactgggaagctgtgggccacggtggtggggctggcatggctggagcacagttcggcctcctacttcactgagtgggagttggtggctgccaaggccaactcatggctggagcagcaggaagtacccgagggccgcacgcagggcacactcaaggccgctgcccgccagctgtttgtgcttctgcggcactgggatgagaatctcgagttcaatatgctctgctataacccg

SEQ ID NO: 199346 - DNA, 541 bp, Homo sapiens
  Payload ID: 19329
  Gene Name: von Willebrand factor A domain containing 5B1
  ENST ID: ENST00000534075
  CDS Start-End: 159-541
actttgataagagtgttggtgctattggtgattgggtggcccttagagcacgggcttctaaaggggacatgaaagcaggacttcctagagggggctggagataagaaaagaagcaaaggcccctagccccaggttctgaaggctgagtagccagcgggatgcccggcttgctgaattggatcacgggggcagccctgcccctcaccgcgtctgatgttacctcctgtgtcagcggttatgccctgggcctaactgcctccctcacctatggcaacctggaagcccagcccttccagggcctcttcgtgtaccccctggatgagtgcaccacggtgatcggctttgaggcagtcattgccgaccgtgtcgtgacagtacagatcaaggacaaagccaagctggagagcggccacttcgatgcctcccatgttcgatccccaacagtcacagggaacattctgcaagacggggtttccatagcccctcattcctgcacaccgggaaaggtgaccttggacgaggatttggagcggatcctgtt

SEQ ID NO: 199347 - DNA, 2116 bp, Homo sapiens
  Payload ID: 19329
  Gene Name: von Willebrand factor A domain containing 5B1
  ENST ID: ENST00000467486
  CDS Start-End: 1-1333
atgtgatgcttctttgcacatctccaatcccagatctgacaagaggcgccggtacagcatgctgcactctcaggagtctggcagctctgtcttctaccactctcaggatgacggacccgggctggaaggtggagactgtgccaagaactcgggggcacccttcatcctagggcaggccaaaaatgcccggctagccagcggagactctaccaccaagcacgatctgaacctctctcagcgacggagggcatacagcaccaaccagatcaccaatcacaagcccctcccaagagccaccatggcaagtgaccccatgccagctgccaagagatacccactgcggaaagccaggctgcaggacctcaccaaccagaccagcctggatgtccagcggtggcagattgatttgcagcccttgctgaacagtggtcaggacctgaaccagggccccaaactccgtggcccaggggcccgaaggccctctctgctgccccaaggctgccagcccttcctgccctggggccaggagacccaggcctggagccctgtgagagagcggacttctgacagccgaagccctggagatctggagccgtcccaccatccctctgccttcgagacagagacgtcctcggactgggaccccccagccgagtcccaggagcgagccagtcccagcaggcccgccaccccggccccggtgctgggcaaggccctggtcaaaggcctgcacgacagccaacgcctgcagtgggaggtgagcttcgagctggggacccctggaccggagcggggcggcgcgcaggatgccgacctatggagcgagaccttccaccacctggcggcccgcgccatcatccgcgacttcgagcagctggcggagcgcgagggcgagatcgagcaggggtccaaccgccgctaccaagtgagcgccttgcacaccagcaaggcctgcaacatcattagcaaatacacagccttcgtgcctgtggacgtgagcaagagccggtacctgcccaccgtggtggagtaccccaactctggagctgccctgcgtatgcttggctctcgggccctggcccaacagtggaggggcacctcttctggctttggaaggccgcagacgatgcttggagaagattcggcaccaggaaatggtcctagaaagtgctcacagacattgatgggttttaaaacaaaaacagaaacagaacacagtgtgagggggtggaaacccagaggagctcttcagaatcaaagtgttctctcaacttcttggtcccattggcctccaaaacccaggagaaccagctccacccctgagccaagctgaacttccagtcttcaggaaattgctgacatggaggcaagtcccactgctctcttcagcgaggccaggtcccccggccgcgagaagcacggtgcttctgaaggtccccagcgcagcctggctacaaatactctttcttccatgaaggcctcagagaatctctttggatcctggctaaatctcaacaagtccaggctactgacgcgagcagccaagggcttcctgagcaagccactgatcaaagctgtggagtcgacctccgggaaccagagcttcgactacatacctctggtgtctctgcagctggcctccggagccttcctgctcaacgaagccttctgtgaggccacgcacatccccatggagaagctcaagtggacgtcccccttcacctgccatcgagtgtccctcaccacccgcccgtctgagtccaagaccccgagtccccagctgtgcaccagctccccgcctaggcacccgtcctgtgacagcttctccctggagcctctggccaagggcaagctgggcctggagccgagggcagtggtggagcacactgggaagctgtgggccacggtggtggggctggcatggctggagcacagttcggcctcctacttcactgagtgggagttggtggctgccaaggccaactcatggctggagcagcaggaagtacccgagggccgcacgcagggcacactcaaggccgctgcccgccagctgtttgtgcttctgcggcactgggatgagaatctcgagttcaatatgctctgctataacccg

SEQ ID NO: 199348 - DNA, 541 bp, Homo sapiens
  Payload ID: 19329
  Gene Name: von Willebrand factor A domain containing 5B1
  ENST ID: ENST00000530722
  CDS Start-End: 296-541
actttgataagagtgttggtgctattggtgattgggtggcccttagagcacgggcttctaaaggggacatgaaagcaggacttcctagagggggctggagataagaaaagaagcaaaggcccctagccccaggtaagagggcaggtggcaagcccagaattgcttgtgggctcacagtcttcatctagcccaggcctggctgagcccacacaggtaggggaccccaactctatggagaagcatctaggagggatcaggccaggatgagggttctgaaggctgagtagccagcgggatgcccggcttgctgaattggatcacgggggcagccctgcccctcaccgcgtctgatgttacctcctgtgtcagcggttatgccctgggcctaactgcctccctcacctatggcaacctggaagcccagcccttccagggcctcttcgtgtaccccctggatgagtgcaccacggtgatcggctttgaggcagtcattgccgaccgtgtcgtgacagtacagatcaaggacaaagccaagctggag

SEQ ID NO: 199349 - DNA, 3725 bp, Homo sapiens
  Payload ID: 19329
  Gene Name: von Willebrand factor A domain containing 5B1
  ENST ID: ENST00000473325
  CDS Start-End: 179-1075
atcaagccagctgccagggcagcgggcgcagggcttgggcactggagcccagccccggaccgcacctccagcagtgctgggtgcagaaggcagtcactgtggcagtggagagacagagtgtgtacccagacacgtgttgcttctggggtaaggttctgaaggctgagtagccagcgggatgcccggcttgctgaattggatcacgggggcagccctgcccctcaccgcgtctgatgttacctcctgtgtcagcggttatgccctgggcctaactgcctccctcacctatggcaacctggaagcccagcccttccagggcctcttcgtgtaccccctggatgagtgcaccacggtgatcggctttgaggcagtcattgccgaccgtgtcgtgacagtacagatcaaggacaaagccaagctggagagcggccacttcgatgcctcccatgttcgatccccaacagtcacagggaacattctgcaagacggggtttccatagcccctcattcctgcacaccgggaaaggtgaccttggacgaggatttggagcggatcctgttcgtggccaacctggggaccattgcccccatggagaatgtcaccatcttcatcagcacctcctcggagctcccaacgctgcccagcggggctgtgagggtccttctgcctgctgtctgtgccccaaccgtgccccagttctgcaccaagagcactggcacctccaaccaacaggcccagggcaaagacaggcactgcttcggtgcctgggccccgggctcctggaataagttgtgcctggcgactctcctgaacaccgaagtgtccaaccccatggagtatgagttcaacttccagctggagatccgtgggccatgtctgctcgcaggtggggaaattgaggcagcctggccatggtcacactgcaggtcaggagcccctaacggggctggcatgtcactcatctctggcctggatctcggtgtgccccagcgaactcctctctctcctgacctcatgagcctatatcccccttgcctttctatgccactcaggggtggagagtcccactcatgagattcgtgccgacgccgccccatctgcccgctcggccaagagcatcatcatcaccttggccaacaagcacacctttgaccggcctgtggagatcctcatccaccccagcgagccccatatgccccatgtcctgatagagaaaggggacatgaccctgggagagtttgaccagcacttgaagggaagaacagatttcattaaagggatgaagaagaagagcagagcagagcggaagacagaaatcattcgaaaacgcctccacaaagacattccccaccactccgtcatcatgctcaacttctgtcccgacctccagtcagtccagccgtgcctgagaaaggcccacggggagttcatcttcctcattgacaggagcagcagcatgagcgggatcagcatgcaccgagtcaaggatgccatgttggtggcccttaagagcctcatgccagcctgcctcttcaatatcattgggtttggatccacatttaagagcctttttccttccagccagacctacagtgaggacagcttggccatggcttgtgatgacatccagagaatgaaggccgacatgggtgggaccaacatcctttcccctctcaagtgggtcatcaggcagccagtgcaccgaggccacccgcggctcctcttcgtgatcacagatggcgctgtcaacaacacagggaaggtgctggagctggtgcgaaatcacgccttctccaccaggtgctatagctttggaattggacccaacgtctgccacagactggtgaaaggactggcatctgtgtccgagggcagtgctgagctcctgatggagggggagcggctgcaacccaagatggtcaaatccttgaagaaggccatggccccagtcctgagcgatgtgactgtggagtggatcttccctgagaccactgaggtcctggtctcacccgtcagcgccagctccctcttccctggagaacggctggtggggtatggcattgtatgtgatgcttctttgcacatctccaatcccagatctgacaagaggcgccggtacagcatgctgcactctcaggagtctggcagctctgtcttctaccactctcaggatgacggacccgggctggaaggtggagactgtgccaagaactcgggggcacccttcatcctagggcaggccaaaaatgcccggctagccagcggagactctaccaccaagcacgatctgaacctctctcagcgacggagggcatacagcaccaaccagatcaccaatcacaagcccctcccaagagccaccatggcaagtgaccccatgccagctgccaagagatacccactgcggaaagccaggctgcaggacctcaccaaccagaccagcctggatgtccagcggtggcagattgatttgcaggccttcatctgccttacctccgaggacaccttccaaatcaggacacccaccggtcaataagctcgctcattccctgcacacacactgcccagttggcaaggaacatttgcatgtgctctttcatttgactttatagcagacctgggggaggagagagtttaggggcccaccttggctcagtacagatgtggaaattgagagccagagaggtagggcacttatccaaggtcacacagccagtcagaggattgtaacctgtctgacctttgaaggaccccctgccttcaaagccttttattccccctcattagattgcacctcctacaaattccaggggatatacatttacccagggcagagaggattttttgtttatttgtttgtttgtttgttgagacagagtctcgctctgttgcccaggctggagtgcagtggtgccatctcagctcactgcaacctctacctcctaggttcaagcaattctcatgcctcagccttccaagtagctgggattacaggcacgtgccaccatacctggctaacttttgtattttatttatttatttatttttgagatggagttttgctcgtgttgcccaggctggagtgcaatggcgcaatctcagctcactgcaacctctgcctcctgggttcaagcgattctcctgcctcagcctcctgagtagctgagattacaggcatgtaccgctatgcccggctaatttttgtatttttggtagagacagggtttcaccatgttggccaggctagtctcgaactcctggcctcaggtgatccacctgcctcgaactcccaaagcactgggattacaggtgtgggccaccacgcctggcctgatttttgtatttttagtagagacagggttttgccatattgcccgggctggtcttgaactcctgggctcaagcgatctgcctgcctcggcctcccaaaggtctgggattacagaagtgagcaaccatgcctggcagcagagagaatttgagagttagagagccacagctaggccagggtttctcagcctcagcaccatggacacgataattttatatttgggggcaattctgtgcactgtagaatgttcggcagcatcccttggcctctgctcgctagaggcctcctgggaataacaccatccccaatcatgacaaccaaaaatgtctgcagacactgccaaatgttccctggggagctaaatcacctggttgagcaccattgtcctaaacc

SEQ ID NO: 199350 - DNA, 3486 bp, Homo sapiens
  Payload ID: 19330
  Gene Name: von Willebrand factor A domain containing 5B2
  ENST ID: ENST00000273794
  CDS Start-End: 167-3241
ctcttcgtccctccctcggcttctctgggtctagtgcggccccaccagctgcttcggggtgggcagccttcaggaggaagggctggcctgggaggagctggctgcccctcgggacgtgttctcaggccctgcccgctgccctgccccatataccttctccttcgagatgctggtgactgggccatgcctgcttgcaggcctggagagcccctctcatgctctgcgggcagatgccccccctcatgccagctctgcagccaccatctgtgtcacactggcagagggccaccactgtgaccgggccttggagatcctgctgcaccccagtgagccccatcagccacacctgatgctggagggcggcagcctgagctcagcagaatatgaggcccgggtgagggcccgccgagattttcagaggctacagcgaagggacagtgatggggaccggcaggtgtggttcctgcagcgacgcttccacaaggacatcctgctgaaccccgtgctggcgctgagcttctgcccagacctgagctccaagcccggacacctggggacagctactcgggagctactcttccttttggatagcagcagcgtggcacacaaggatgccattgttttggctgtgaagtccctcccgccccagacgcttatcaacctggccgtgtttgggacgttggtgcagccactcttcccagagagccggccttgcagtgatgatgctgtgcagctgatctgcgagagcattgagaccctgcaggttccgagtgggcccccagacgtgctggctgctctggactgggccgtggggcagccccagcacagggcctaccctcggcagctgttcctgctcactgctgcctcacccatggccgccactacccaccgaaccctggagctcatgaggtggcacagggggacagccagatgcttctcctttgggctggggcccacctgccaccagctgctccagggtttatctgccctcagcagaggccaggcctacttcctgaggcctgggcagaggctgcagcccatgctggtacaggctctgcggaaggcactggagcctgctttgagtgacatctctgtggactggtttgtgcccgacactgtggaggcactgctgaccccccgggagatcccagcactctaccctggggaccagctgctcggttactgctcactcttcagggtggatggcttccggtcccgcccaccagggggccaagagcctggctggcagagctcgggtgggtccgtgtttccatccccagaagaggccccgtctgctgccagccctggcactgagcccactggcacctcagagccactgggaacaggcactgtctcagcagaactgtccagcccatgggctgccagggactcggagcagacaggtactgatgctctgacagacccagtcacggatcctggacccaacccctctgacacagccatatggcgccgcatctttcagtcctcgtacattcgggagcagtatgtgctcacccactgctctgccagccccgagccaggcccaggctccacaggcagcagtgagtccccaggctcacagggccctggctcccccgaaggtagtgctcccttggagcccccttctcagcagggctgccgcagtctggcctggggagaacctgcaggctcccgctcctgtcccctgcctgcacccacaccagctccattcaaggtgggggccttgagtactgaggtgctgggccgtcagcacagagcggctctggctggccgaagcctctcatcccctccaggccgggcaaaccaagtccccggccgaccccggaaaccctctttgggtgcaatactagatggcccaagtcctgagccaggccaacagttgggacaaggcctggatgactcaggaaacctgctctccccagcccctatggactgggacatgctgatggaaccacccttcttattcacggctgtgcctcctagtggggagttggcccctccagcagtgcctccccaggctccacgctgccatgtggtgatccggggcctgtgtggggagcagcccatgtgctgggaggtgggtgttgggctggagacactgtggggacctggagatggctcacagcctccctcacctcctgtaagagaagctgcttgggaccaagcactccatcggctgacagcagcctctgtggtccgggacaatgagcagctggccctccgaggaggggcagagaccacagctgaccggggccatgcccggaggtgctggcttcgagcccttcagacaagtaaggtcagctctgccccctcctgcttcacttgccctgtagctgtggatgctactactagggaggtcctgcctggggccctgcaggtgtgcagctcagagcccgctgagcccccaggaacccctcctgcctctcacagccatctagatgcagctcctctgcccactgttgtctactctaaaggacttcagagaggctctccagcaggcgcctgggactcggaccaaaatggcaactccaagcgtgctttgggggaccctgccactcccacggaaggtcctcgccgcccacctccccgtcctccctgtcggctcagcatgggccgccgtcacaaactctgtagccctgacccgggccaggccaacaacagtgaaggcagcgaccatgactacctgcccttggtgcggctgcaggaggcaccaggctccttccgcctggacgcgcccttctgcgccgctgtgcgcatctcgcaggagcgcctctgccgtgcctcgccctttgccgtgcaccgcgccagcctcagccccacctcggcctcattgccctgggcacttctgggccctggtgttggccagggtgacagtgccacggcctcctgcagcccgtcccccagctcgggctctgaggggccaggccaggtggacagtgggcggggctcagacaccgaggcctccgagggggcggaagggctgggcggcaccgacctgcggggccggacctgggccactgccgtagcactcgcctggctggagcaccgatgcgccgctgccttcgacgagtgggaactgacagcggccaaggctgattgctggctgcgggcccagcacttgcctgacggccttgacctggccgccctcaaggccgcagcccgagggctcttcctgctactgcgccactgggaccaaaacctgcagctacacctgctgtgctacagcccagcgaacgtgtgaaggctgccccctgctgcttgggctggcgccccacccaacacactcaagtcactgccgcccagggctggcctcttggtgctgggaaagtgtaggctggtgccagcctgtcccccactgcttcttactccctccctagagccctcttgcccccacaaaaagtgcctgcctgtgctctctccctctcctcccaccccactcacactcccctccatcctctgagctccctgcaacacagtggaagggta

SEQ ID NO: 199351 - DNA, 4120 bp, Homo sapiens
  Payload ID: 19330
  Gene Name: von Willebrand factor A domain containing 5B2
  Uniprot ID: Q8N398
  ENST ID: ENST00000426955
  CDS Start-End: 101-3829
gtgagactctcgcgctggcctctggagcgcggggtgggcgtcccgtcaccctgcgcccagcttccccggcccgttcccgcagggccggcctcccggcgccatgcccggcctgtactgcccctccagctggacgccgctgccgctcacggactcctgggtccgggcctgcgccaacggcccctgcctcagcgtgcgggcccggctcacctaccgcaacccgcagccgcagccggtggacggcgtgttcgtgtacccgctggccgaggccgaggtggtgtccggcttcgaggccgaggccgccggacggcgcgtctccttccagctgcagagccggcgccgctcgcaggccgcctgctgccgcgctctgggcccggggctggggaccccgacgccccgccgctgcgcgcagggtcatcttgtcttggatctggcccaggcccggtccacgttggtgctgcccacaggcattatcgccgcggctggcaccatgacggtgaccctgcacagcagccgggagctgccctcaaggcctgacggggtgctgcatgtggccctgcccactgtgctcaccccgctggccccgccaggcccgccggggccccccaggcctccggggctctgtgacgacagccccaccagctgcttcggggtgggcagccttcaggaggaagggctggcctgggaggagctggctgcccctcgggacgtgttctcaggccctgcccgctgccctgccccatataccttctccttcgagatgctggtgactgggccatgcctgcttgcaggcctggagagcccctctcatgctctgcgggcagatgccccccctcatgccagctctgcagccaccatctgtgtcacactggcagagggccaccactgtgaccgggccttggagatcctgctgcaccccagtgagccccatcagccacacctgatgctggagggcggcagcctgagctcagcagaatatgaggcccgggtgagggcccgccgagattttcagaggctacagcgaagggacagtgatggggaccggcaggtgtggttcctgcagcgacgcttccacaaggacatcctgctgaaccccgtgctggcgctgagcttctgcccagacctgagctccaagcccggacacctggggacagctactcgggagctactcttccttttggatagcagcagcgtggcacacaaggatgccattgttttggctgtgaagtccctcccgccccagacgcttatcaacctggccgtgtttgggacgttggtgcagccactcttcccagagagccggccttgcagtgatgatgctgtgcagctgatctgcgagagcattgagaccctgcaggttccgagtgggcccccagacgtgctggctgctctggactgggccgtggggcagccccagcacagggcctaccctcggcagctgttcctgctcactgctgcctcacccatggccgccactacccaccgaaccctggagctcatgaggtggcacagggggacagccagatgcttctcctttgggctggggcccacctgccaccagctgctccagggtttatctgccctcagcagaggccaggcctacttcctgaggcctgggcagaggctgcagcccatgctggtacaggctctgcggaaggcactggagcctgctttgagtgacatctctgtggactggtttgtgcccgacactgtggaggcactgctgaccccccgggagatcccagcactctaccctggggaccagctgctcggttactgctcactcttcagggtggatggcttccggtcccgcccaccagggggccaagagcctggctggcagagctcgggtgggtccgtgtttccatccccagaagaggccccgtctgctgccagccctggcactgagcccactggcacctcagagccactgggaacaggcactgtctcagcagaactgtccagcccatgggctgccagggactcggagcagagtactgatgctctgacagacccagtcacggatcctggacccaacccctctgacacagccatatggcgccgcatctttcagtcctcgtacattcgggagcagtatgtgctcacccactgctctgccagccccgagccaggcccaggctccacaggcagcagtgagtccccaggctcacagggccctggctcccccgaaggtagtgctcccttggagcccccttctcagcagggctgccgcagtctggcctggggagaacctgcaggctcccgctcctgtcccctgcctgcacccacaccagctccattcaaggtgggggccttgagtactgaggtgctgggccgtcagcacagagcggctctggctggccgaagcctctcatcccctccaggccgggcaaaccaagtccccggccgaccccggaaaccctctttgggtgcaatactagatggcccaagtcctgagccaggccaacagttgggacaaggcctggatgactcaggaaacctgctctccccagcccctatggactgggacatgctgatggaaccacccttcttattcacggctgtgcctcctagtggggagttggcccctccagcagtgcctccccaggctccacgctgccatgtggtgatccggggcctgtgtggggagcagcccatgtgctgggaggtgggtgttgggctggagacactgtggggacctggagatggctcacagcctccctcacctcctgtaagagaagctgcttgggaccaagcactccatcggctgacagcagcctctgtggtccgggacaatgagcagctggccctccgaggaggggcagagaccacagctgaccggggccatgcccggaggtgctggcttcgagcccttcagacaagtaaggtcagctctgccccctcctgcttcacttgccctgtagctgtggatgctactactagggaggtcctgcctggggccctgcaggtgtgcagctcagagcccgctgagcccccaggaacccctcctgcctctcacagccatctagatgcagctcctctgcccactgttgtctactctaaaggacttcagagaggctctccagcaggcgcctgggactcggaccaaaatggcaactccaagcgtgctttgggggaccctgccactcccacggaaggtcctcgccgcccacctccccgtcctccctgtcggctcagcatgggccgccgtcacaaactctgtagccctgacccgggccaggccaacaacagtgaaggcagcgaccatgactacctgcccttggtgcggctgcaggaggcaccaggctccttccgcctggacgcgcccttctgcgccgctgtgcgcatctcgcaggagcgcctctgccgtgcctcgccctttgccgtgcaccgcgccagcctcagccccacctcggcctcattgccctgggcacttctgggccctggtgttggccagggtgacagtgccacggcctcctgcagcccgtcccccagctcgggctctgaggggccaggccaggtggacagtgggcggggctcagacaccgaggcctccgagggggcggaagggctgggcggcaccgacctgcggggccggacctgggccactgccgtagcactcgcctggctggagcaccgatgcgccgctgccttcgacgagtgggaactgacagcggccaaggctgattgctggctgcgggcccagcacttgcctgacggccttgacctggccgccctcaaggccgcagcccgagggctcttcctgctactgcgccactgggaccaaaacctgcagctacacctgctgtgctacagcccagcgaacgtgtgaaggctgccccctgctgcttgggctggcgccccacccaacacactcaagtcactgccgcccagggctggcctcttggtgctgggaaagtgtaggctggtgccagcctgtcccccactgcttcttactccctccctagagccctcttgcccccacaaaaagtgcctgcctgtgctctctccctctcctcccaccccactcacactcccctccatcctctgagctccctgcaacacagtggaagggtagagagccacagtccccaaatcctatgcaataaagtgcctcttagga

SEQ ID NO: 199352 - DNA, 2881 bp, Homo sapiens
  Payload ID: 19331
  Gene Name: von Willebrand factor A domain containing 7
  Uniprot ID: Q9Y334
  ENST ID: ENST00000375688
  CDS Start-End: 202-2877
cctggcgtgggctgctgcctgtggctttgggcaggcaggagcgaaagggccaggggttgcctgtcctcccccaccctgttgaggccttcctccccctctgctgagcctcggttaattataactctgacctaagtgccctgtgacgtcaagcccgggccagccctgcccaggagacccagcaaccaggtccatgtctcagccatgctccccacggaggtcccccaatcccacccgggcccctcagcgttgcttctgctgcagctgttgctgccccccacatctgccttcttccccaacatctggagcctgctggctgcccctggctccatcacccaccaagacctaactgaggaggcagcgctcaacgtcaccctgcagctcttcctggagcagccacccccaggccgcccccctcttcgtcttgaggacttcctgggtcgaacactccttgctgatgacctctttgccgcctactttggacctggttcttctcggcggttccgagcagccttaggtgaggtgtctcgtgccaatgcagcccaggacttcctgccaacttccaggaatgaccccgacctgcactttgatgctgagcgactgggtcagggacgcgcgcgcctggtaggggctctgcgggagaccgtggtggcagccagggcccttgaccacaccctggctcgccagcgcctcggggctgcacttcatgccctgcaggatttctacagtcatagcaactgggtggagctgggcgagcagcagccacaccctcacctcctctggccaaggcaggagctccagaacctggcacaagtggccgatcctacctgctccgattgcgaggagttgagctgccccaggaattggctgggcttcacactcctcacctctggctactttggaactcatcccccgaaacctccagggaaatgtagccacgggggccattttgaccggagcagctcccagccaccgaggggaggcatcaacaaggacagcacatccccaggcttctcccctcaccacatgctgcacctccaggctgcaaaactggcccttctagcctccatccaggccttcagccttctgcgaagccgcctgggagacagggatttctccaggctgctggacatcaccccagcctccagcctgagctttgtcctggacaccacgggcagcatgggtgaggagatcaacgctgccaaaatccaggctcgccaccttgtggagcagcggagaggcagccccatggagcctgtccactatgtcctggtgccttttcatgacccagggttcggccctgtctttacaaccagtgaccctgacagcttctggcaacagcttaatgagatccatgccttggggggtggagacgagcctgagatgtgcctgtcagccctgcagctggccctgctgcacacacctccactctcagatatctttgtcttcacggatgcctcccccaaggatgcctttctcaccaaccaggtggaatccctgactcaggagcggcgctgccgggtaacattcctggtgactgaagatacatcaagggttcagggtcgagctcggcgtgagatcttgtcccctctgcgttttgagccatacaaagcagtggccctggcctcaggaggagaggtgatcttcaccaaagaccagcacattcgagacgtggcagccattgttggggagagcatggctgccctggtgactcttcccctggaccctcctgttgtggtgcctgggcagccacttgtgttcagcgtggatgggctgctccagaagatcacagtccggatccacggagacatcagcagcttctggatcaagaaccctgcaggggtctcccagggccaggaggaaggcgggggtcctctaggtcacactcgccgctttgggcagttctggatggtgaccatggatgaccctccacagacaggaacctgggagatccaggtcacagctgaggacacccctggggtgagagtgcaagcccagacctccctggacttcctcttccactttgggatccccatggaggatggaccccaccctggcctctaccccctgactcagccagttgcaggtcttcagacccagctgctggtagaagtgacagggttgggttccagagccaatcctggggatcctcagccgcatttctcccacgtcatccttcgaggggtcccagagggtgccgaactaggccaggtgcccttggagcccgtgggacctccggagcgaggtctcctcgcagcctcgctgtcgcccacgctgctgtccacccctagacccttctccctggagctgattggccaggacgcagcggggcggcgcctgcacagggctgcccctcagcctagcactgtagtccctgtccttctggagcttagtggcccctcgggtttcttggccccgggcagcaaagtcccgctcagtctccgcatcgccagcttctcgggccctcaggatcttgaccttaggactttcgtcaaccccagcttctccctcacctccaacctctccagggctcacctggaactgaatgagtcggcctggggccgcctgtggctggaggtcccagattcagcggccccggattccgtggtgatggtgactgtgactgcagggggacgagaagccaacccagtacccccgactcatgctttcctccggctcctggtatcggccccagccccgcaggaccggcacaccacccctaccggctcatctgacccgatcctcaccacggccacccctgccttttcccccttcacattggtgactcaaggcagggctggggcagggctggctgcgggcagcccctggtggggcacagttggaggggtgctgcttctgctaggcctggcctcctggtgacaca

SEQ ID NO: 199353 - DNA, 2881 bp, Homo sapiens; identical to SEQ ID NO: 199352
  Payload ID: 19331
  Gene Name: von Willebrand factor A domain containing 7
  Uniprot ID: Q9Y334
  ENST ID: ENST00000438415
  CDS Start-End: 202-2877

SEQ ID NO: 199354 - DNA, 2881 bp, Homo sapiens; identical to SEQ ID NO: 199352
  Payload ID: 19331
  Gene Name: von Willebrand factor A domain containing 7
  Uniprot ID: Q9Y334
  ENST ID: ENST00000452329
  CDS Start-End: 202-2877

SEQ ID NO: 199355 - DNA, 2881 bp, Homo sapiens
  Payload ID: 19331
  Gene Name: von Willebrand factor A domain containing 7
  ENST ID: ENST00000452630
  CDS Start-End: 202-2877
cctggcgtgggctgctgcctgtggctttgggcaggcaggagcgaaagggccaggggttgcctgtcctcccccaccctgttgaggccttcctccccctctgctgagcctcggttaattataactctgacctaagtgccctgtgacgtcaagcccgggccagccctgcccaggagacccagcaaccaggtccatgtctcagccatgctccccacggaggtcccccaatcccacccgggcccctcagcgttgcttctgctgcagctgttgctgccccccacatctgccttcttccccaacatctggagcctgctggctgcccctggctccatcacccaccaagacctaactgaggaggcagcgctcaacgtcaccctgcagctcttcctggagcagccacccccaggccgcccccctcttcgtcttgaggacttcctgggtcgaacactccttgctgatgacctctttgccgcctactttggacctggttcttctcggcggttccgagcagccttaggtgaggtgtctcgtgccaatgcagcccaggacttcctgccaacttccaggaatgaccccgacctgcactttgatgctgagcgactgggtcagggacgcgcgcgcctggtaggggctctgcgggagaccgtggtggcagccagggcccttgaccacaccctggctcgccagcgcctcggggctgcacttcatgccctgcaggatttctacagtcatagcaactgggtggagctgggcgagcagcagccacaccctcacctcctctggccaaggcaggagctccagaacctggcacaagtggccgatcctacctgctccgattgcgaggagttgagctgccccaggaattggctgggcttcacactcctcacctctggctactttggaactcatcccccgaaacctccagggaaatgtagccacgggggccattttgaccggagcagctcccagccaccgaggggaggcatcaacaaggacagcacatccccaggcttctcccctcaccacatgctgcacctccaggctgcaaaactggcccttctagcctccatccaggccttcagccttctgcgaagccgcctgggagacagggatttctccaggctgctggacatcaccccagcctccagcctgagctttgtcctggacaccacgggcagcatgggtgaggagatcaacgctgccaaaatccaggctcgccaccttgtggagcagcggagaggcagccccatggagcctgtccactatgtcctggtgccttttcatgacccagggttcggccctgtctttacaaccagtgaccctgacagcttctggcaacagcttaatgagatccatgccttggggggtggagacgagcctgagatgtgcctgtcagccctgcagctggccctgctgcacacacctccactctcagatatctttgtcttcacggatgcctcccccaaggatgcctttctcaccaaccaggtggaatccctgactcaggagcggcgctgccgggtaacattcctggtgactgaagatacatcaagggttcagggtcgagctcggcgtgagatcttgtcccctctgcgttttgagccatacaaagcagtggccctggcctcaggaggagaggtgatcttcaccaaagaccagcacattcgagacgtggcagccattgttggggagagcatggctgccctggtgactcttcccctggaccctcctgttgtggtgcctgggcagccacttgtgttcagcgtggatgggctgctccagaagatcacagtccggatccacggagacatcagcagcttctggatcaagaaccctgcaggggtctcccagggccaggaggaaggcgggggtcctctaggtcacactcgccgctttgggcagttctggatggtgaccatggatgaccctccacagacaggaacctgggagatccaggtcacagctgaggacacccctggggtgagagtgcaagcccagacctccctggacttcctcttccactttgggatccccatggaggatggaccccaccctggcctctaccccctgactcagccagttgcaggtcttcagacccagctgctggtagaagtgacagggttgggttccagagccaatcctggggatcctcagccgcatttctcccacgtcatccttcgaggggtcccagagggtgccgaactaggccaggtgcccttggagcccgtgggacctccggagcgaggtctcctcgcagcctcgctgtcgcccacgctgctgtcaacccctagacccttctccctggagctgattggccaggacgcagcggggcggcgcctgcacagggctgcccctcagcctagcactgtagtccctgtccttctggagcttagtggcccctcgggtttcttggccccgggcagcaaagtcccgctcagtctccgcatcgccagcttctcgggccctcaggatcttgaccttaggactttcgtcaaccccagcttctccctcacctccaacctctccagggctcacctggaactgaatgagtcggcctggggccgcctgtggctggaggtcccagattcagcggccccggattccgtggtgatggtgactgtgactgcagggggacgagaagccaacccagtacccccgactcatgctttcctccggctcctggtatcggccccagccccgcaggaccggcacaccacccctaccggctcatctgacccgatcctcaccacggccacccctgccttttcccccttcacattggtggctcaaggcagggctggggcagggctggctgcgggcagcccctggtggggcacagttggaggggtgctgcttctgctaggcctggcctcctggtgacaca

SEQ ID NO: 199356 - DNA, 2881 bp, Homo sapiens; identical to SEQ ID NO: 199352
  Payload ID: 19331
  Gene Name: von Willebrand factor A domain containing 7
  Uniprot ID: Q9Y334
  ENST ID: ENST00000430726
  CDS Start-End: 202-2877

SEQ ID NO: 199357 - DNA, 2881 bp, Homo sapiens; identical to SEQ ID NO: 199352
  Payload ID: 19331
  Gene Name: von Willebrand factor A domain containing 7
  Uniprot ID: Q9Y334
  ENST ID: ENST00000438725
  CDS Start-End: 202-2877

SEQ ID NO: 199358 - DNA, 3475 bp, Homo sapiens
  Payload ID: 19332
  Gene Name: von Willebrand factor A domain containing 8
  Uniprot ID: A3KMH1
  ENST ID: ENST00000281496
  CDS Start-End: 106-3225
aggtgccgcttcctgtccccttctccgcgctgcctcacggtgcctgcacgggacgccgctcgatccccgagccccctcgccgtccccgacagcccccccggcgccatgcaatcccggcttctactcctcggggcacccggaggccacggcggcccggcctcgcggcgcatgcggctgctcctgcggcaggtggtgcagcgcaggccgggtggcgacaggcagcggccggaggtcagactgttgcacgccggctcgggggccgacacaggtgatacagttaatattggagatgtatcctacaagttgaaaattcctaagaatccagaacttgtgccacagaactacatttcagactctctggctcaatctgtagttcagcatctaagatggataatgcagaaggatcttttggggcaagatgtttttctaataggacctcctgggcctcttcgacgctctattgctatgcagtacttggagctgaccaaacgggaggtcgaatacattgccctgtcaagggacaccactgaaactgatctcaaacagcgacgagagatccgtgcaggcacagccttttacattgatcagtgtgcagttcgtgcagccacagaaggcagaactctcattttggaaggtttggaaaaggcagagaggaatgttttgcctgttttgaacaacttgctggaaaacagagagatgcagcttgaagatggacgcttcctgatgtctgctgagcgttacgacaaacttctccgagatcataccaaaaaagagttggattcttggaaaattgtccgagttagtgaaaatttccgagtgattgccttgggcttgccagtgccaaggtattctgggaatccattagacccccctcttcgttctcgatttcaagccagggatatttattatttacccttcaaggaccaacttaagttgttatattcaattggagccaatgtttctgctgagaaagtttctcagctcttgtcctttgccacaactctgtgttcccaagaatcttctactcttggacttccagactttcctttagatagtttagcagctgcggttcaaatcttggattcctttcctatgatgccaatcaaacatgcaatccagtggctttatccatatagtattttactaggtcatgaagggaagatggctgtggaaggtgttttaaagcgctttgaacttcaagattcaggaagctctctacttcctaaagagattgtaaaagtagagaagatgatggaaaaccatgtgtcccaagcttctgtgaccatccggattgcagataaagaggtgaccattaaggtgccagccgggaccaggctattaagtcaaccttgtgcgtcagaccgtttcatacagactttgagccataagcagctacaggctgaaatgatgcagtctcacatggttaaagatatatgtttaattggaggaaagggttgtggaaaaacagtgatcgctaagaactttgccgataccttaggatacaacatagaacctattatgctctatcaggatatgacagcgcgtgatctgctacagcagagatacacccttccaaatggagacactgcctggcggtcctcaccccttgtgaatgctgctctggaaggcaagctggtcctgctggatggcattcaccgggtgaatgcgggcacgcttgctgtattgcaaaggttaatccatgatcgagagctaagcctctatgatggttctaggctgctgagagaagacaggtatatgcgtttaaaggaggagctgcaactgtctgatgaacagctacagaagagatccatttttcctatccatccctccttcagaatcattgccttggcagaaccccctgttattggaagcacagcacaccagtggctgggaccagaattcttaaccatgttctttttccattacatgaaaccacttgtgaaaagtgaagaaatccaagtgattaaggaaaaggtcccaaatgtacctcaggaagctctggataagttattatcatttacacacaaactcagagaaacacaggatccaacggcacaatcattagcggcatcactttctaccagacaactgttgcgaatttctcgtcggctgtcacagtatcctaatgaaaatcttcacagtgctgttactaaagcctgcctttccaggtttttacccagtcttgctaggtcagcattagaaaaaaatctggcagatgctacaatagaaataaatactgatgacaatttggagccagaactgaaggattacaaatgtgaagtaacatctggaactctgaggattggtgctgttagtgcaccgatctataatgcacatgagaaaatgaaagtgcctgatgttcttttctatgacaacattcagcatgtgatagtgatggaagatatgctgaaagactttctccttggagaacacttattattggttggcaaccagggtgtaggaaaaaacaagattgttgacagattccttcacctgctcaacagaccccgagaatatattcagctacacagggataccacagtacaaactcttacgcttcagccttcggttaaagacggacttattgtatatgaagactcacctttggttaaagcagtaaagttgggtcatattctggtagtagatgaggctgacaaagctccaacaaatgtcacgtgtattttaaaaactctagtagaaaatggagaaatgattctagcagatggaagacgcattgttgcaaattctgctaatgtgaatggaagagaaaatgttgtagtgattcatcctgattttaggatgattgttctggcaaatagacctggatttcctttcctaggcaatgatttcttcggtaccttaggtgatatttttagctgccatgcagttgataaccccaaaccccactcggagctcgagatgctcagacagtatggaccaaatgtgcctgagcccatccttcagaagcttgtggctgcctttggagagctgaggagtttggctgaccaagggattattaactatccttattctaccagagaagttgtcaacatagtcaaacatttacagaaatttccgactgaaggtctctccagtgtagttcgaaatgtgtttgactttgattcctacaacaatgacatgagggagatattgattaacactttacacaaatacgggatacctatcggagcaaagcctaccagtgtgcagctggcaaaggagtaaggcaaattcagtactcttctgattcttaaatgctgatagttcttgatttatcattccattctacaaaactgagttgctatggaaattactttccatgagtaagcttttcaaatacatgtatatgttgctgtttgctggctgcttttcagttaaatagcattatttataggcctgtaaattgaaaattttgattattatgtatgtcccatgagtagatgtaataaataaagggaaatatttgtttctttaa

SEQ ID NO: 199359 - DNA, 7147 bp, Homo sapiens
  Payload ID: 19332
  Gene Name: von Willebrand factor A domain containing 8
  Uniprot ID: A3KMH1
  ENST ID: ENST00000379310
  CDS Start-End: 70-5787
acggtgcctgcacgggacgccgctcgatccccgagccccctcgccgtccccgacagcccccccggcgccatgcaatcccggcttctactcctcggggcacccggaggccacggcggcccggcctcgcggcgcatgcggctgctcctgcggcaggtggtgcagcgcaggccgggtggcgacaggcagcggccggaggtcagactgttgcacgccggctcgggggccgacacaggtgatacagttaatattggagatgtatcctacaagttgaaaattcctaagaatccagaacttgtgccacagaactacatttcagactctctggctcaatctgtagttcagcatctaagatggataatgcagaaggatcttttggggcaagatgtttttctaataggacctcctgggcctcttcgacgctctattgctatgcagtacttggagctgaccaaacgggaggtcgaatacattgccctgtcaagggacaccactgaaactgatctcaaacagcgacgagagatccgtgcaggcacagccttttacattgatcagtgtgcagttcgtgcagccacagaaggcagaactctcattttggaaggtttggaaaaggcagagaggaatgttttgcctgttttgaacaacttgctggaaaacagagagatgcagcttgaagatggacgcttcctgatgtctgctgagcgttacgacaaacttctccgagatcataccaaaaaagagttggattcttggaaaattgtccgagttagtgaaaatttccgagtgattgccttgggcttgccagtgccaaggtattctgggaatccattagacccccctcttcgttctcgatttcaagccagggatatttattatttacccttcaaggaccaacttaagttgttatattcaattggagccaatgtttctgctgagaaagtttctcagctcttgtcctttgccacaactctgtgttcccaagaatcttctactcttggacttccagactttcctttagatagtttagcagctgcggttcaaatcttggattcctttcctatgatgccaatcaaacatgcaatccagtggctttatccatatagtattttactaggtcatgaagggaagatggctgtggaaggtgttttaaagcgctttgaacttcaagattcaggaagctctctacttcctaaagagattgtaaaagtagagaagatgatggaaaaccatgtgtcccaagcttctgtgaccatccggattgcagataaagaggtgaccattaaggtgccagccgggaccaggctattaagtcaaccttgtgcgtcagaccgtttcatacagactttgagccataagcagctacaggctgaaatgatgcagtctcacatggttaaagatatatgtttaattggaggaaagggttgtggaaaaacagtgatcgctaagaactttgccgataccttaggatacaacatagaacctattatgctctatcaggatatgacagcgcgtgatctgctacagcagagatacacccttccaaatggagacactgcctggcggtcctcaccccttgtgaatgctgctctggaaggcaagctggtcctgctggatggcattcaccgggtgaatgcgggcacgcttgctgtattgcaaaggttaatccatgatcgagagctaagcctctatgatggttctaggctgctgagagaagacaggtatatgcgtttaaaggaggagctgcaactgtctgatgaacagctacagaagagatccatttttcctatccatccctccttcagaatcattgccttggcagaaccccctgttattggaagcacagcacaccagtggctgggaccagaattcttaaccatgttctttttccattacatgaaaccacttgtgaaaagtgaagaaatccaagtgattaaggaaaaggtcccaaatgtacctcaggaagctctggataagttattatcatttacacacaaactcagagaaacacaggatccaacggcacaatcattagcggcatcactttctaccagacaactgttgcgaatttctcgtcggctgtcacagtatcctaatgaaaatcttcacagtgctgttactaaagcctgcctttccaggtttttacccagtcttgctaggtcagcattagaaaaaaatctggcagatgctacaatagaaataaatactgatgacaatttggagccagaactgaaggattacaaatgtgaagtaacatctggaactctgaggattggtgctgttagtgcaccgatctataatgcacatgagaaaatgaaagtgcctgatgttcttttctatgacaacattcagcatgtgatagtgatggaagatatgctgaaagactttctccttggagaacacttattattggttggcaaccagggtgtaggaaaaaacaagattgttgacagattccttcacctgctcaacagaccccgagaatatattcagctacacagggataccacagtacaaactcttacgcttcagccttcggttaaagacggacttattgtatatgaagactcacctttggttaaagcagtaaagttgggtcatattctggtagtagatgaggctgacaaagctccaacaaatgtcacgtgtattttaaaaactctagtagaaaatggagaaatgattctagcagatggaagacgcattgttgcaaattctgctaatgtgaatggaagagaaaatgttgtagtgattcatcctgattttaggatgattgttctggcaaatagacctggatttcctttcctaggcaatgatttcttcggtaccttaggtgatatttttagctgccatgcagttgataaccccaaaccccactcggagctcgagatgctcagacagtatggaccaaatgtgcctgagcccatccttcagaagcttgtggctgcctttggagagctgaggagtttggctgaccaagggattattaactatccttattctaccagagaagttgtcaacatagtcaaacatttacagaaatttccgactgaaggtctctccagtgtagttcgaaatgtgtttgactttgattcctacaacaatgacatgagggagatattgattaacactttacacaaatacgggatacctatcggagcaaagcctaccagtgtgcagctggcaaaggagttgactctgccagaacaaacgttcatgggctactggacaattggtcaggcaagaagtgggatgcaaaaactcttgtgtccagtggaaactcatcatatagacataaagggtccagcacttataaatatacaggagtatccaatagaaagacatgaagaaagatccctaaactttactgaagaatgtgcctcatggagaataccattggatgaaattaatataatctgtgacattgctacatcacatgaaaatgagcaaaatactctctatgtagttacatgcaatcccgcttccctgtactttatgaatatgactgggaaaagtggcttctttgtggacttttttgatatcttcccaagaacagccaatggcgtttggcacccttttgtgacagtggcaccgctgggaagtcctctcaaaggtcaagtggttctccatgagcagcagagtaatgttatcctgttgttagatactactggccgggcccttcatcgtctcatcctcccttccgagaagtttacatctaagaaacctttctggtggaacaaagaagaagctgaaacttataaaatgtgtaaagaattttcacacaaaaactggctggtgttctacaaagaaaaagggaacagcctgactgtgctggatgttctagaagggcgaactcacaccatctcacttcccatcaacctcaagacagttttccttgtagcagaggacaaatggcttctggtggagagcaaaacaaatcagaaatatcttttaactaagcctgcacacatcgaatctgagggtagtggggtttgccagttgtatgtgctgaaagaggagccgcccagcacagggtttggagttacacaagaaacagagttcagcatacctcataaaatttccagtgatcaactatcatctgaacatctaagttcagctgtggaacaaaagattgcctctcccaacagaattctctcagatgagaaaaattatgctacaatagttgttggttttccagatctcatgtcacccagtgaagtttattcttggaagagaccatcatctttgcataaacgaagtggcactgatacatcattctatagaggaaagaagaaaagggggactccaaaacaaagcaattgtgtgactcttttagatacgaatcaggtagtgaggattttacccccaggagaagtccctctaaaagatatctacccaaaagatgttactcctccacaaacatctggttatatagaagtcactgatcttcaatcaaagaaactccgatatatccctattcccagatcagaatctctctcgccgtataccacatggctgtcgaccatttcagacacagatgcactgctggctgagtgggacaaaagcggtgttgttactgttgatatgggaggtcacatcaggctttgggaaactggacttgaacgtctgcagcgatcactcatggaatggagaaacatgattggacaagatgacagaaatatgcagataacaatcaacagagacagtggtgaagatgtaagctcccccaaacacgggaaggaggacccagacaacatgcctcacgtgggcggcaacacttgggctggcggaacagggggaagagacacggcaggcctgggtggcaaaggaggcccttaccggctggatgcaggccatacggtgtaccaggtctctcaggctgagaaagatgcagttcccgaagaggtcaagagagctgctagagagatgggccagagagcattccagcagaggctaaaggagatccaaatgagtgaatacgatgctgcaacctatgaaaggttttcaggtgctgttcggcgacaggtgcactccctccgaatcatcctggataatttacaggctaaaggtaaagaaagacaatggctaagacatcaagctactggagaattagatgatgccaagatcattgatgggctgactggagaaaaagccatctacaaacgtcggggtgagctggagccacaacttggcagcccacaacagaaacccaagcgtctgcgcctggtggtagatgtgtctggtagcatgtaccgtttcaacaggatggatggccggcttgagcgcacaatggaggctgtgtgtatggtcatggaagccttcgagaactatgaggagaagttccagtatgacatcgttggacactctggagatggctacaacattggtctggttccaatgaacaaaatccccaaggacaataagcaaagactagaaattctgaagacaatgcatgcccactctcagttctgcatgagtggggaccacacgttagaagggacagaacatgccatcaaggaaattgtcaaagaagaagctgatgagtactttgtcatagtcttgagtgatgcaaatctgtcacgatatggaatacatcctgctaagtttgctcaaatcctcacaagagaccctcaagtaaatgcttttgccatttttattggctctttaggtgatcaagcaaccaggcttcagagaactttaccagctggtcggtctttcgttgccatggataccaaggatatccctcagattttacaacagatcttcacctccaccatgttgtcgagtgtctaagaagtgcccttcatcaccctgatgacaccaggatttgaaataagacaggaataaagagtattctgaaaaaaagaagatatggatgaagtgaacccatgcagtgactggatgattccggcattcctgggtcttcctacacttgctccgtaatgagaattcagagaagcagccagaaggagacttaaacatggaaagatactccactgatgagtttagaagtgattagggcaagctagttgacctgcactttatcaaaggttggggttaaaggaaggtggttttgagaactatgtgtttggtctatttccaaaaacctgagggggagaaaatactttgcttttgccttaacacatcatctggtcacgttagaaaagtgaccccatcaaactgagcctttgatgtcacattctgacacaagatgcaagtctgtgcaaaacccaccaaaatgctcctatccaacaattatttttattttctccctgctctgtattgaccagaaaacaatgattttataatatttaacccaccaaaaagtccctccaacagcaatatcttatgaaagtctggctgttctcaataatttcattttcttggccaaagccaaaaggaatcaaaaaatccttggagtgcttgcctttccacgtgacttttaaaaggctcttaaagagcaaatgtcctcttctccttgctgctagagtgggaggagaaagatgtcttgccttaaaagtttactgtttcttctgttcttctagcatctctcaaaaaattcacagtactccattttggggtccaaactgtaatgctcaaaataataaatgcttacacgaaaattatttattgagaatattcatataaaaattacctaaagcaaagtaaaaaaagtaaaatcaaggtggtatatttgaagtgaatggtgattggaaatttttagctgtaacaaaaagaaagaaaacaactttttttaaagcctcattctcttttctttcaaaatgtaccttattcccacacactcttgggctgacctttattttatcaataagctcaatattactttgtttaaaataagatgcttcagcaaaagtcattctctctttaaccatataatttaaaaactcctcttcacgattgatagcaaaatcagaaacgttagggcaccagtgagttgaaaaaactggtcttaagttggaaaaactattattaataatattatcctatccatccatatctattgaaattgtacaggtccataatttcattttaattaattataggaaagaagaaaagataatacccatttgttctatcacccctctccctatcattaactatcaaataaataaataaaagcaatctgatttcc

SEQ ID NO: 199360 - DNA, 2393 bp, Homo sapiens
  Payload ID: 19333
  Gene Name: von Willebrand factor A domain containing 9
  Uniprot ID: Q96SY0
  ENST ID: ENST00000313182
  CDS Start-End: 211-1767
tccaaggaccgccccgcccagcgcggagtgcaggcgccggattcccttctgtcgcgcggccttatagttccggctgtggcgcgcggacggaaagtttatgccgacggaaagtttatgccgacggactgtgtccggcgatgggcacgggcatttcttcgtttatagctgtctgtttgcattctgattgggaacactgggatcattttcatcatgccgacagtggtggtaatggatgtatccctttccatgacccgacctgtgtctattgaggggtccgaggaataccagcgtaagcacctagcagcccatggtttaacgatgctgtttgagcacatggccacaaattacaagcttgaatttacagcacttgtggttttttcatcactttgggagttgatggtccccttcacgagagattataataccctacaggaagcactaagtaatatggatgattatgacaaaacctgcttggagtctgcattagttggtgtttgcaatatcgttcagcaagaatggggtggtgcaattccttgccaggttgtcctggtgacagacggctgtcttggcattggtagagggtcactgcgacattccctagccactcaaaatcaacgaagtgagagcaacaggtttccactaccttttcctttcccatctaagttatatatcatgtgcatggcgaatttggaggagctccagagcaccgattccttggaatgccttgaacgtctcatagatttaaacaatggtgaagggcagatttttactattgatggccccctgtgcttgaagaatgtacagtctatgtttggaaaactgatagatttggcatatacgcctttccatgctgttctcaagtgtggccacctaactgctgatgtacaagtcttccccaggccagaaccttttgttgtagatgaagaaattgatcctatccctaaagtcattaacacagatttggaaatagtgggatttattgatatagctgatatttcaagtcccccagttctgtccagacatctggtcttacctatagcacttaacaaagaaggtgatgaggtgggtactggcatcactgatgacaatgaagatgaaaattcagccaatcagattgcaggcaaaatacccaacttttgtgtcctgctccatggtagcctaaaagtggaaggaatggtagcgattgttcaattaggtcctgaatggcatggaatgctctactcccaagctgacagcaagaagaaatcaaacctcatgatgtctctctttgagcctggcccagaacctctcccatggctagggaaaatggcacagttgggtcctatttcagatgctaaagaaaacccttatggcgaggatgacaataagagtccattccccctgcagcccaaaaacaaacgcagttatgcccagaatgtgactgtctggatcaaacccagcggcctgcagacagatgtacagaagattttaagaaatgcaaggaaactacctgaaaaaacacagacattctataaggagctgaaccgtttgcgaaaggccgctctagcctttggtttcctggacctgctgaaaggggtggctgacatgctggaaagggaatgcacactgctgcctgagacagcccaccctgatgctgcattccagctgacccatgctgcccagcagctcaagctggccagtaccggcacctctgagtatgccgcttatgaccagaacatcacacctttgcacacggacttctctgggagcagcactgaaagaatttgaaactgacttttggagctttccttcttttttcatttcaactgaaaatgctttaggtaaaaacctttccagtatgttcacctctagaatagccacccaaagaccttcctgaggctgcctcagaagcaccacttgctgttttgaatgactctactagtatgagaaggatgtgaaggtggttggctggttgggctttaacttcctgggattcataatttttaagcttggaagatagctgctgttcccatgatgggcacatttcctgagaagcttgaatgactgatgagcatagagcacccctgccttcctcaggaaacctgaccggcaggggctctctggcttcctgaaagcttcacctcttccctcgtttatatctcaactgtaagggcattttcaagcttctgttcatggaatgagcaactcagactgtctggagcttgctgagtacaaacacaccaccactaagtttcagaactttccttagaacttgggcaaaatgtggtggtaactcttaagtgcttttggtatctcttgagattctaacttttaaagagcaaccattaatgtgtaaaatgattcctattattcaaggtttttttttaatgaaaataaaatatttgattttctag

SEQ ID NO: 199361 - DNA, 1863 bp, Homo sapiens
  Payload ID: 19333
  Gene Name: von Willebrand factor A domain containing 9
  ENST ID: ENST00000442903
  CDS Start-End: 255-1703
cctccgggatgagccagaaccctgcccgggcgaccctgaagctctccaaggaccgccccgcccagcgcggagtgcaggcgccggattcccttctgtcgcgcggccttatagttccggctgtggcgcgcggacggaaagtttatgccgacggaaagtttatgccgacggactgtgtccggcgatgggcacgggcatttcttcgtttatagctgtctgtttgcattctgattgggaacactgggatcattttcatcatgccgacagtggtggtaatggatgtatccctttccatgacccgacctgtgtctattgaggggtccgaggaataccagcgtaagcacctagcagcccatggtttaacgatgctgtttgagcacatggccacaaattacaagcttgaatttacagcacttgtggttttttcatcactttgggagttgatggtccccttcacgagagattataataccctacaggttgtcctggtgacagacggctgtcttggcattggtagagggtcactgcgacattccctagccactcaaaatcaacgaagtgagagcaacaggtttccactaccttttcctttcccatctaagttatatatcatgtgcatggcgaatttggaggagctccagagcaccgattccttggaatgccttgaacgtctcatagatttaaacaatggtgaagggcagatttttactattgatggccccctgtgcttgaagaatgtacagtctatgtttggaaaactgatagatttggcatatacgcctttccatgctgttctcaagtgtggccacctaactgctgatgtacaagtcttccccaggccagaaccttttgttgtagatgaagaaattgatcctatccctaaagtcattaacacagatttggaaatagtgggatttattgatatagctgatatttcaagtcccccagttctgtccagacatctggtcttacctatagcacttaacaaagaaggtgatgaggtgggtactggcatcactgatgacaatgaagatgaaaattcagccaatcagattgcaggcaaaatacccaacttttgtgtcctgctccatggtagcctaaaagtggaaggaatggtagcgattgttcaattaggtcctgaatggcatggaatgctctactcccaagctgacagcaagaagaaatcaaacctcatgatgtctctctttgagcctggcccagaacctctcccatggctagggaaaatggcacagttgggtcctatttcagatgctaaagaaaacccttatggcgaggatgacaataagagtccattccccctgcagcccaaaaacaaacgcagttatgcccagaatgtgactgtctggatcaaacccagcggcctgcagacagatgtacagaagattttaagaaatgcaaggaaactacctgaaaaaacacagacattctataaggagctgaaccgtttgcgaaaggccgctctagcctttggtttcctggacctgctgaaaggggtggctgacatgctggaaagggaatgcacactgctgcctgagacagcccaccctgatgctgcattccagctgacccatgctgcccagcagctcaagctggccagtaccggcacctctgagtatgccgcttatgaccagaacatcacacctttgcacacggacttctctgggagcagcactgaaagaatttgaaactgacttttggagctttccttcttttttcatttcaactgaaaatgctttaggtaaaaacctttccagtatgttcacctctagaatagccacccaaagaccttcctgaggctgcctcagaagcaccacttgctgttttgaatgactctactagtatgag

SEQ ID NO: 199362 - DNA, 1980 bp, Homo sapiens
  Payload ID: 19333
  Gene Name: von Willebrand factor A domain containing 9
  Uniprot ID: Q96SY0
  ENST ID: ENST00000431261
  CDS Start-End: 318-1637
gaccctgaagctctccaaggaccgccccgcccagcgcggagtgcaggcgccggattcccttctgtcgcgcggccttatagttccggctgtggcgcgcggacggaaagtttatgccgacggaaagtttatgccgacggactgtgtccggcgatgggcacgggcatttcttcgtttatagctgtctgtttgcattctgattgggaacactgggatcattttcatcatgccgacagtggtggtaatggatgtatccctttccatgacccgacctgtgtctattgaggggtccgaggaataccagcgaagcactaagtaatatggatgattatgacaaaacctgcttggagtctgcattagttggtgtttgcaatatcgttcagcaagaatggggtggtgcaattccttgccaggttgtcctggtgacagacggctgtcttggcattggtagagggtcactgcgacattccctagccactcaaaatcaacgaagtgagagcaacaggtttccactaccttttcctttcccatctaagttatatatcatgtgcatggcgaatttggaggagctccagagcaccgattccttggaatgccttgaacgtctcatagatttaaacaatggtgaagggcagatttttactattgatggccccctgtgcttgaagaatgtacagtctatgtttggaaaactgatagatttggcatatacgcctttccatgctgttctcaagtgtggccacctaactgctgatgtacaagtcttccccaggccagaaccttttgttgtagatgaagaaattgatcctatccctaaagtcattaacacagatttggaaatagtgggatttattgatatagctgatatttcaagtcccccagttctgtccagacatctggtcttacctatagcacttaacaaagaaggtgatgaggtgggtactggcatcactgatgacaatgaagatgaaaattcagccaatcagattgcaggcaaaatacccaacttttgtgtcctgctccatggtagcctaaaagtggaaggaatggtagcgattgttcaattaggtcctgaatggcatggaatgctctactcccaagctgacagcaagaagaaatcaaacctcatgatgtctctctttgagcctggcccagaacctctcccatggctagggaaaatggcacagttgggtcctatttcagatgctaaagaaaacccttatggcgaggatgacaataagagtccattccccctgcagcccaaaaacaaacgcagttatgcccagaatgtgactgtctggatcaaacccagcggcctgcagacagatgtacagaagattttaagaaatgcaaggaaactacctgaaaaaacacagacattctataaggagctgaaccgtttgcgaaaggccgctctagcctttggtttcctggacctgctgaaaggggtggctgacatgctggaaagggaatgcacactgctgcctgagacagcccaccctgatgctgcattccagctgacccatgctgcccagcagctcaagctggccagtaccggcacctctgagtatgccgcttatgaccagaacatcacacctttgcacacggacttctctgggagcagcactgaaagaatttgaaactgacttttggagctttccttcttttttcatttcaactgaaaatgctttaggtaaaaacctttccagtatgttcacctctagaatagccacccaaagaccttcctgaggctgcctcagaagcaccacttgctgttttgaatgactctactagtatgagaaggatgtgaaggtggttggctggttgggctttaacttcctgggattcataatttttaagcttggaagatagctgctgttcccatgatgggcacatttcctgagaagcttgaatgactgatgagcatagagcacccctgccttcctcaggaaacctgaccggcaggggctctctggcttcctg

SEQ ID NO: 199363 - DNA, 1741 bp, Homo sapiens
  Payload ID: 19333
  Gene Name: von Willebrand factor A domain containing 9
  Uniprot ID: Q96SY0
  ENST ID: ENST00000420799
  CDS Start-End: 95-1480
aaggaccgccccgcccagcgcggagtgcaggcgccggattcccttctgtcgcgcggccttatagttccggctgtggcgcgcggacggaaagtttatgccgacggaaagtttatgccgacggactgtgtccggcgatgggcacggggaagcactaagtaatatggatgattatgacaaaacctgcttggagtctgcattagttggtgtttgcaatatcgttcagcaagaatggggtggtgcaattccttgccaggttgtcctggtgacagacggctgtcttggcattggtagagggtcactgcgacattccctagccactcaaaatcaacgaagtgagagcaacaggtttccactaccttttcctttcccatctaagttatatatcatgtgcatggcgaatttggaggagctccagagcaccgattccttggaatgccttgaacgtctcatagatttaaacaatggtgaagggcagatttttactattgatggccccctgtgcttgaagaatgtacagtctatgtttggaaaactgatagatttggcatatacgcctttccatgctgttctcaagtgtggccacctaactgctgatgtacaagtcttccccaggccagaaccttttgttgtagatgaagaaattgatcctatccctaaagtcattaacacagatttggaaatagtgggatttattgatatagctgatatttcaagtcccccagttctgtccagacatctggtcttacctatagcacttaacaaagaaggtgatgaggtgggtactggcatcactgatgacaatgaagatgaaaattcagccaatcagattgcaggcaaaatacccaacttttgtgtcctgctccatggtagcctaaaagtggaaggaatggtagcgattgttcaattaggtcctgaatggcatggaatgctctactcccaagctgacagcaagaagaaatcaaacctcatgatgtctctctttgagcctggcccagaacctctcccatggctagggaaaatggcacagttgggtcctatttcagatgctaaagaaaacccttatggcgaggatgacaataagagtccattccccctgcagcccaaaaacaaacgcagttatgcccagaatgtgactgtctggatcaaacccagcggcctgcagacagatgtacagaagattttaagaaatgcaaggaaactacctgaaaaaacacagacattctataaggagctgaaccgtttgcgaaaggccgctctagcctttggtttcctggacctgctgaaaggggtggctgacatgctggaaagggaatgcacactgctgcctgagacagcccaccctgatgctgcattccagctgacccatgctgcccagcagctcaagctggccagtaccggcacctctgagtatgccgcttatgaccagaacatcacacctttgcacacggacttctctgggagcagcactgaaagaatttgaaactgacttttggagctttccttcttttttcatttcaactgaaaatgctttaggtaaaaacctttccagtatgttcacctctagaatagccacccaaagaccttcctgaggctgcctcagaagcaccacttgctgttttgaatgactctactagtatgagaaggatgtgaaggtggttggctggttgggctttaacttcctgggattcataatttttaagcttggaagatagctgctgttcccatgatgggcacatttcct

SEQ ID NO: 199364 - DNA, 584 bp, Homo sapiens
  Payload ID: 19333
  Gene Name: von Willebrand factor A domain containing 9
  ENST ID: ENST00000567923
  CDS Start-End: 76-584
gcggagtgcaggcgccggattcccttctgtcgcgcggccttatagttccggctgtggcgcgcggacggaaagtttatgccgacggaaagtttatgccgacggactgtgtccggcgatgggcacgggctgtctgtttgcattctgattgggaacactgggatcattttcatcatgccgacagtggtggtaatggatgtatccctttccatgacccgacctgtgtctattgaggggtccgaggaataccagcgtaagcacctagcagcccatggtttaacgatgctgtttgagcacatggccacaaattacaagcttgaatttacagcacttgtggttttttcatcactttgggagttgatggtccccttcacgagagattataataccctacaggaagcactaagtaatatggatgattatgacaaaacctgcttggagtctgcattagttggtgtttgcaatatcgttcagcaagaatggggtggtgcaattccttgccaggttgtcctggtgacagacggctgtcttggcattggtagagggtcactgcgacattccctagccactcaaaatcaacgaagtga

SEQ ID NO: 199365 - DNA, 564 bp, Homo sapiens
  Payload ID: 19333
  Gene Name: von Willebrand factor A domain containing 9
  ENST ID: ENST00000561769
  CDS Start-End: 352-564
atgccgacggactgtgtccggcgatgggcacggggtgagtggggaggccgagggcccgggactgcctttcgctgcttgttggggttacaggtgaaggggttatgggtgaagaacaacccagggccagcgcttggccttcccgccaccgtggcggccgccccgcgctgtctgtgaggcgccagttccggggcgctgctcccggcctcccctcgctctgaggctcggggtccccagctccgcgtaaactgcacgatttcgccctctgctcagctcccctctgccccctctttccaagagagacttccagatcccacattttcttgactgatttttaaggaagcactaagtaatatggatgattatgacaaaacctgcttggagtctgcattagttggtgtttgcaatatcgttcagcaagaatggggtggtgcaattccttgccaggttgtcctggtgacagacggctgtcttggcattggtagagggtcactgcgacattccctagccactcaaaatcaacgaagtgagagcaacaggtttccactaccttttcctttcccatct

SEQ ID NO: 199366 - DNA, 772 bp, Homo sapiens
  Payload ID: 19333
  Gene Name: von Willebrand factor A domain containing 9
  ENST ID: ENST00000569565
  CDS Start-End: 9-182
gaaagtttatgccgacggactgtgtccggcgatgggcacggggtgagtggggaggccgagggcccgggactgcctttcgctgcttgttggggttacaggtgaaggggttatgggtgaagaacaacccagggccagcgcttggccttcccgccaccgtggcggccgccccgcgctgtctgtgaggcgccagttccggggcgctgctcccggcctcccctcgctctgaggctcggggtccccagctccgcgtaaactgcacgatttcgccctctgctcagctcccctctgccccctctttccaagagagacttccagatcccacattttcttgactgatttttaaggtaaaaatacatctcccagatgtgattttcagtctggacttttagagatgaaattatatctgagaactggggagggactcccggaggctgacgggaaagccaaagagcagcatttcttcgtttatagctgtctgtttgcattctgattgggaacactgggatcattttcatcatgccgacagtggtggtaatggatgtatccctttccatgacccgacctgtgtctattgaggggtccgaggaataccagcgtaagcacctagcagcccatggtttaacgatgctgtttgagcacatggccacaaattacaagcttgaatttacagcacttgtggttttttcatcactttgggagttgatggtccccttcacgagagattataataccctacaggaagcactaagtaatatggatgattatgacaaaa

SEQ ID NO: 199367 - DNA, 806 bp, Homo sapiens
  Payload ID: 19333
  Gene Name: von Willebrand factor A domain containing 9
  ENST ID: ENST00000569004
  CDS Start-End: 30-494
tgattgggaacactgggatcattttcatcatgccgacagtggtggtaatggatgtatccctttccatgacccgacctgtgtctattgaggggtccgaggaataccagcgtaagcacctagcagcccatggtttaacgatgctgtttgagcacatggccacaaattacaagcttgaatttacagcacttgtggttttttcatcactttgggagttgatggtccccttcacgagagattataataccctacaggaagcactaagtaatatggatgattatgacaaaacctgcttggagtctgcattagttggtgtttgcaatatcgttcagcaagaatggggtggtgcaattccttgccaggttgtcctggtgacagacggctgtcttggcattggtagagggtcactgcgacattccctagccactcaaaatcaacgaagtgagagcaacagctccagagcaccgattccttggaatgccttgaacgtctcatagatttaaacaatggtgaagggcagatttttactattgatggccccctgtgcttgaagaatgtacagtctatgtttggaaaactgatagatttggcatatacgcctttccatgctgttctcaagtgtggccacctaactgctgatgtacaagtcttccccaggccagaaccttttgttgtagatgaagaaattgatcctatccctaaagtcattaacacagatttggaaatagtgggatttattgatatagctgatatttcaagtcccccagttctgtccagacatctggtcttacctatagcacttaacaaag

SEQ ID NO: 199368 - DNA, 1797 bp, Homo sapiens
  Payload ID: 19333
  Gene Name: von Willebrand factor A domain containing 9
  ENST ID: ENST00000569491
  CDS Start-End: 80-1486
atgccgacggactgtgtccggcgatgggcacgggctgtctgtttgcattctgattgggaacactgggatcattttcatcatgccgacagtggtggtaatggatgtatccctttccatgacccgacctgtgtctattgaggggtccgaggaataccagccactaagtaatatggatgattatgacaaaacctgcttggagtctgcattagttggtgtttgcaatatcgttcagcaagaatggggtggtgcaattccttgccaggttgtcctggtgacagacggctgtcttggcattggtagagggtcactgcgacattccctagccactcaaaatcaacgaagtgagagcaacaggtttccactaccttttcctttcccatctaagttatatatcatgtgcatggcgaatttggaggagctccagagcaccgattccttggaatgccttgaacgtctcatagatttaaacaatggtgaagggcagatttttactattgatggccccctgtgcttgaagaatgtacagtctatgtttggaaaactgatagatttggcatatacgcctttccatgctgttctcaagtgtggccacctaactgctgatgtacaagtcttccccaggccagaaccttttgttgtagatgaagaaattgatcctatccctaaagtcattaacacagatttggaaatagtgggatttattgatatagctgatatttcaagtcccccagttctgtccagacatctggtcttacctatagcacttaacaaaggtgatgaggtgggtactggcatcactgatgacaatgaagatgaaaattcagccaatcagattgcaggcaaaatacccaacttttgtgtcctgctccatggtagcctaaaagtggaaggaatggtagcgattgttcaattaggtcctgaatggcatggaatgctctactcccaagctgacagcaagaagaaatcaaacctcatgatgtctctctttgagcctggcccagaacctctcccatggctagggaaaatggcacagttgggtcctatttcagatgctaaagaaaacccttatggcgaggatgacaataagagtccattccccctgcagcccaaaaacaaacgcagttatgcccagaatgtgactgtctggatcaaacccagcggcctgcagacagatgtacagaagattttaagaaatgcaaggaaactacctgaaaaaacacagacattctataaggagctgaaccgtttgcgaaaggccgctctagcctttggtttcctggacctgctgaaaggggtggctgacatgctggaaagggaatgcacactgctgcctgagacagcccaccctgatgctgcattccagctgacccatgctgcccagcagctcaagctggccagtaccggcacctctgagtatgccgcttatgaccagaacatcacacctttgcacacggacttctctgggagcagcactgaaagaatttgaaactgacttttggagctttccttcttttttcatttcaactgaaaatgctttaggtaaaaacctttccagtatgttcacctctagaatagccacccaaagaccttcctgaggctgcctcagaagcaccacttgctgttttgaatgactctactagtatgagaaggatgtgaaggtggttggctggttgggctttaacttcctgggattcataatttttaagcttggaagatagctgctgttcccatgatgggcacatttcctgagaagcttgaatgactgatgagcatagagcacccctgccttcctcagga

SEQ ID NO: 199369 - DNA, 492 bp, Homo sapiens
  Payload ID: 19333
  Gene Name: von Willebrand factor A domain containing 9
  ENST ID: ENST00000562830
  CDS Start-End: 376-492
ggactgtgtccggcgatgggcacggggtgagtggggaggccgagggcccgggactgcctttcgctgcttgttggggttacaggtgaaggggttatgggtgaagaacaacccagggccagcgcttggccttcccgccaccgtggcggccgccccgcgctgtctgtgaggcgccagttccggggcgctgctcccggcctcccctcgctctgaggctcggggtccccagctccgcgtaaactgcacgatttcgccctctgctcagctcccctctgccccctctttccaagagagacttccagatcccacattttcttgactgatttttaaggtaaaaatacatctcccagatgtgattttcagtctggacttttagagatgaaattatatctgagaactggggagggactcccggaggctgacgggaaagccaaagagcaggaagcactaagtaatatggatgattatgacaaaacctgcttggagtctgcatta

SEQ ID NO: 199370 - DNA, 2419 bp, Homo sapiens
  Payload ID: 19333
  Gene Name: von Willebrand factor A domain containing 9
  ENST ID: ENST00000567744
  CDS Start-End: 374-2038
actgtgtccggcgatgggcacggggtgagtggggaggccgagggcccgggactgcctttcgctgcttgttggggttacaggtgaaggggttatgggtgaagaacaacccagggccagcgcttggccttcccgccaccgtggcggccgccccgcgctgtctgtgaggcgccagttccggggcgctgctcccggcctcccctcgctctgaggctcggggtccccagctccgcgtaaactgcacgatttcgccctctgctcagctcccctctgccccctctttccaagagagacttccagatcccacattttcttgactgatttttaaggtaaaaatacatctcccagatgtgattttcagtctggacttttagagatgaaattatatctgagaactggggagggactcccggaggctgacgggaaagccaaagagcagctgtctgtttgcattctgattgggaacactgggatcattttcatcatgccgacagtggtggtaatggatgtatccctttccatgacccgacctgtgtctattgaggggtccgaggaataccagcgtaagcacctagcagcccatggtttaacgatgctgtttgagcacatggccacaaattacaagcttgaatttacagcacttgtggttttttcatcactttgggagttgatggtccccttcacgagagattataataccctacaggaagcactaagtaatatggatgattatgacaaaacctgcttggagtctgcattagttggtgtttgcaatatcgttcagcaagaatggggtggtgcaattccttgccaggttgtcctggtgacagacggctgtcttggcattggtagagggtcactgcgacattccctagccactcaaaatcaacgaagtgagagcaacaggtttccactaccttttcctttcccatctaagttatatatcatgtgcatggcgaatttggaggagctccagagcaccgattccttggaatgccttgaacgtctcatagatttaaacaatggtgaagggcagatttttactattgatggccccctgtgcttgaagaatgtacagtctatgtttggaaaactgatagatttggcatatacgcctttccatgctgttctcaagtgtggccacctaactgctgatgtacaagtcttccccaggccagaaccttttgttgtagatgaagaaattgatcctatccctaaagtcattaacacagatttggaaatagtgggatttattgatatagctgatatttcaagtcccccagttctgtccagacatctggtcttacctatagcacttaacaaagaaggtgatgaggtgggtactggcatcactgatgacaatgaagatgaaaattcagccaatcagattgcaggcaaaatacccaacttttgtgtcctgctccatggtagcctaaaagtggaaggaatggtagcgattgttcaattaggtcctgaatggcatggaatgctctactcccaagctgacagcaagaagaaatcaaacctcatgatgtctctctttgagcctggcccagaacctctcccatggctagggaaaatggcacagttgggtcctatttcagatgctaaagaaaacccttatggcgaggatgacaataagagtccattccccctgcagcccaaaaacaaacgcagttatgcccagaatgtgactgtctggatcaaacccagcggcctgcagacagatgtacagaagattttaagaaatgcaaggaaactacctgaaaaaacacagacattctataaggagctgaaccgtttgcgaaaggccgctctagcctttggtttcctggacctgctgaaaggggtggctgacatgctggaaagggaatgcacactgctgcctgagacagcccaccctgatgctgcattccagctgacccatgctgcccagcagctcaagctggccagtaccggcacctctgagtatgccgcttatgaccagaacatcacacctttgcacacggacttctctgggagcagcactgaaagaatttgaaactgacttttggagctttccttcttttttcatttcaactgaaaatgctttaggtaaaaacctttccagtatgttcacctctagaatagccacccaaagaccttcctgaggctgcctcagaagcaccacttgctgttttgaatgactctactagtatgagaaggatgtgaaggtggttggctggttgggctttaacttcctgggattcataatttttaagcttggaagatagctgctgttcccatgatgggcacatttcctgagaagcttgaatgactgatgagcatagagcacccctgccttcctcaggaaacctgaccggcaggggctctctggcttcctgaaagcttcacctcttccctcgtttatatctcaactgta

SEQ ID NO: 199371 - DNA, 618 bp, Homo sapiens
  Payload ID: 19333
  Gene Name: von Willebrand factor A domain containing 9
  ENST ID: ENST00000568573
  CDS Start-End: 389-618
actgtgtccggcgatgggcacggggtgagtggggaggccgagggcccgggactgcctttcgctgcttgttggggttacaggtgaaggggttatgggtgaagaacaacccagggccagcgcttggccttcccgccaccgtggcggccgccccgcgctgtctgtgaggcgccagttccggggcgctgctcccggcctcccctcgctctgaggctcggggtccccagctccgcgtaaactgcacgatttcgccctctgctcagctcccctctgccccctctttccaagagagacttccagatcccacattttcttgactgatttttaagcatttcttcgtttatagctgtctgtttgcattctgattgggaacactgggatcattttcatcatgccgacagtggtggtaatggatgtatccctttccatgacccgacctgtgtctattgaggggtccgaggaataccagccactaagtaatatggatgattatgacaaaacctgcttggagtctgcattagttggtgtttgcaatatcgttcagcaagaatggggtggtgcaattccttgccaggttgtcctggtgacagacggctgtcttggcattggtagagggtcact

SEQ ID NO: 199372 - DNA, 761 bp, Homo sapiens
  Payload ID: 19333
  Gene Name: von Willebrand factor A domain containing 9
  ENST ID: ENST00000567940
  CDS Start-End: 18-191
atgccgacggaaagtttatgccgacggactgtgtccggcgatgggcacggggtgagtggggaggccgagggcccgggactgcctttcgctgcttgttggggttacaggtgaaggggttatgggtgaagaacaacccagggccagcgcttggccttcccgccaccgtggcggccgccccgcgctgtctgtgaggcgccagttccggggcgctgctcccggcctcccctcgctctgaggctcggggtccccagctccgcgtaaactgcacgatttcgccctctgctcagctcccctctgccccctctttccaagagagacttccagatcccacattttcttgactgatttttaagctgtctgtttgcattctgattgggaacactgggatcattttcatcatgccgacagtggtggtaatggatgtatccctttccatgacccgacctgtgtctattgaggggtccgaggaataccagcgtaagcacctagcagcccatggtttaacgatgctgtttgagcacatggccacaaattacaagcttgaatttacagcacttgtggttttttcatcactttgggagttgatggtccccttcacgagagattataataccctacaggaagcactaagtaatatggatgattatgacaaaacctgcttggagtctgcattagttggtgtttgcaatatcgttcagcaagaatggggtggtgcaattccttgccaggttgtcctggtgacagacggctgtcttggcatt

SEQ ID NO: 199373 - DNA, 2615 bp, Homo sapiens
  Payload ID: 19333
  Gene Name: von Willebrand factor A domain containing 9
  ENST ID: ENST00000573314
  CDS Start-End: 6-179
agtttatgccgacggactgtgtccggcgatgggcacggggtgagtggggaggccgagggcccgggactgcctttcgctgcttgttggggttacaggtgaaggggttatgggtgaagaacaacccagggccagcgcttggccttcccgccaccgtggcggccgccccgcgctgtctgtgaggcgccagttccggggcgctgctcccggcctcccctcgctctgaggctcggggtccccagctccgcgtaaactgcacgatttcgccctctgctcagctcccctctgccccctctttccaagagagacttccagatcccacattttcttgactgatttttaagcatttcttcgtttatagctgtctgtttgcattctgattgggaacactgggatcattttcatcatgccgacagtggtggtaatggatgtatccctttccatgacccgacctgtgtctattgaggggtccgaggaataccagcgtaagcacctagcagcccatggtttaacgatgctgtttgagcacatggccacaaattacaagcttgaatttacagcacttgtggttttttcatcactttgggagttgatggtccccttcacgagagattataataccctacaggaagcactaagtaatatggatgattatgacaaaacctgcttggagtctgcattagttggtgtttgcaatatcgttcagcaagaatggggtggtgcaattccttgccaggttgtcctggtgacagacggctgtcttggcattggtagagggtcactgcgacattccctagccactcaaaatcaacgaagtgagagcaacaggtttccactaccttttcctttcccatctaagttatatatcatgtgcatggcgaatttggaggagctccagagcaccgattccttggaatgccttgaacgtctcatagatttaaacaatggtgaagggcagatttttactattgatggccccctgtgcttgaagaatgtacagtctatgtttggaaaactgatagatttggcatatacgcctttccatgctgttctcaagtgtggccacctaactgctgatgtacaagtcttccccaggccagaaccttttgttgtagatgaagaaattgatcctatccctaaagtcattaacacagatttggaaatagtgggatttattgatatagctgatatttcaagtcccccagttctgtccagacatctggtcttacctatagcacttaacaaagaaggtgatgaggtgggtactggcatcactgatgacaatgaagatgaaaattcagccaatcagattgcaggcaaaatacccaacttttgtgtcctgctccatggtagcctaaaagtggaaggaatggtagcgattgttcaattaggtcctgaatggcatggaatgctctactcccaagctgacagcaagaagaaatcaaacctcatgatgtctctctttgagcctggcccagaacctctcccatggctagggaaaatggcacagttgggtcctatttcagatgctaaagaaaacccttatggcgaggatgacaataagagtccattccccctgcagcccaaaaacaaacgcagttatgcccagaatgtgactgtctggatcaaacccagcggcctgcagacagatgtacagaagattttaagaaatgcaaggaaactacctgaaaaaacacagacattctataaggagctgaaccgtttgcgaaaggccgctctagcctttggtttcctggacctgctgaaaggggtggctgacatgctggaaagggaatgcacactgctgcctgagacagcccaccctgatgctgcattccagctgacccatgctgcccagcagctcaagctggccagtaccggcacctctgagtatgccgcttatgaccagaacatcacacctttgcacacggacttctctgggagcagcactgaaagaatttgaaactgacttttggagctttccttcttttttcatttcaactgaaaatgctttaggtaaaaacctttccagtatgttcacctctagaatagccacccaaagaccttcctgaggctgcctcagaagcaccacttgctgttttgaatgactctactagtatgagaaggatgtgaaggtggttggctggttgggctttaacttcctgggattcataatttttaagcttggaagatagctgctgttcccatgatgggcacatttcctgagaagcttgaatgactgatgagcatagagcacccctgccttcctcaggaaacctgaccggcaggggctctctggcttcctgaaagcttcacctcttccctcgtttatatctcaactgtaagggcattttcaagcttctgttcatggaatgagcaactcagactgtctggagcttgctgagtacaaacacaccaccactaagtttcagaactttccttagaacttgggcaaaatgtggtggtaactcttaagtgcttttggtatctcttgagattctaacttttaaagagcaaccattaatgtgtaaaatgattcctattattcaaggtttttttttaatgaaaataaaatatttgattttctagaaaatggtttcactatgaaactaaaggtc

SEQ ID NO: 199374 - DNA, 3368 bp, Homo sapiens
  Payload ID: 19334
  Gene Name: von Willebrand factor C and EGF domains
  Uniprot ID: Q96DN2
  ENST ID: ENST00000301770
  CDS Start-End: 55-714
cccgcgcgcggcgcaggagccgagcccagcccgggggacccgccgccgccggtcatgtgggccggactgctccttcgggccgcctgtgtcgcgctcctgctgccgggggcaccagcccgaggctacaccgggaggaagccgcccgggcacttcgcggccgagagacgccgactgggcccccacgtctgcctctctgggtttgggagtggctgctgccctggctgggcgccctctatgggtggtgggcactgcaccctgcccctctgctccttcggctgtgggagtggcatctgcatcgctcccaatgtctgctcctgccaggatggagagcaaggggccacctgcccagaaacccatggaccatgtggggagtacggctgtgaccttacctgcaaccatggaggctgtcaggaggtggcccgagtgtgccccgtgggcttctcgatgacggagacagctgttggcatcaggtgtacagacattgacgaatgtgtaacctcctcctgcgagggccactgtgtgaacacagaaggtgggtttgtgtgcgagtgtgggccgggcatgcagctgtctgccgaccgccacagctgccaagacactgacgaatgcctagggactccctgtcagcagagatgtaaaaacagcattggcagctacaagtgttcctgtcgaactggcttccaccttcatggcaaccggcactcctgtatgtaaacgagtgtcggaggccattggagaggcgagtctgtcaccattcctgccacaacaccgtgggcagcttcctatgcacatgccgacctggcttcaggctccgagctgaccgcgtgtcctgtgaagctttcccgaaagccgtgctggccccatctgccatcctgcaaccccggcaacacccgtccaagatgcttctgttgcttcctgaggccggccggcctgccctgtccccaggacatagccctccttctggggctccagggcccccagccggagtcaggaccacccgcctgccatctcccaccccacgactacccacatcctccccttctgcccctgtgtggctgctgtccaccctgctggccaccccagtgcctactgcctccctgctggggaacctcagacccccctcactccttcagggggaggtgatggggaccccttcctcacccaggggccctgagtccccccgactggcagcagggccctctccctgctggcacctgggagccatgcatgaatcaaggagtcgctggacagagcctgggtgttcccagtgctggtgcgaggacgggaaggtgacctgtgaaaaggtgaggtgtgaagctgcttgttcccacccaattccctccagagatggtgggtgctgcccatcgtgcacaggctgttttcacagtggtgtcgtccgagctgaaggggatgtgttttcacctcccaatgagaactgcaccgtctgtgtctgtctggctggaaacgtgtcctgcatctctcctgagtgtccttctggcccctgtcagacccccccacagacggattgctgtacttgtgttccagtgagatgctatttccacggccggtggtacgcagacggggctgtgttcagtgggggtggtgacgagtgtaccacctgtgtttgccagaatggggaggtggagtgctccttcatgccctgccctgagctggcctgcccccgagaagagtggcggctgggccctgggcagtgttgcttcacctgccaggagcccacaccctcgacaggctgctctcttgacgacaacggggttgagtttccgattggacagatctggtcgcctggtgacccctgtgagttatgcatctgccagggcggggaggcaggggccggtgtcaccggtggggtcttggtgaagttcctccttcctccaggcagatggctcggtgagctgcaagaggacagactgtgtggactcctgccctcacccgatccggatccctggacagtgctgcccagactgttcagcaggctgcacctacacaggcagaatcttctataacaacgagaccttcccgtctgtgctggacccatgtctgagctgcatctgcctgctgggctcagtggcctgttcccccgtggactgccccatcacctgtacctaccctttccaccctgacggggagtgctgccccgtgtgccgagactgcaactacgagggaaggaaggtggcgaatggccaggtgttcaccttggatgatgaaccctgcacccggtgcacgtgccagctgggagaggtgagctgtgagaaggttccctgccagcgggcctgtgccgaccctgccctgcttcctggggactgctgctcttcctgtccagattccctgtctcctctggaagaaaagcaggggctctcccctcacggaaatgtggcattcagcaaagctggtcggagcctgcatggagacactgaggcccctgtcaactgtagctcctgtcctgggcccccgacagcatcaccctcgaggccggtgcttcatctcctccagctccttttaagaacgaacttgatgaaaacacagactttacctacaagcccggcaggagctcatggtccacactcactcgctttggggctgacagccactttcccaggggagcctggggcctcccctcgactctcaccagggccttcgacccctccaggagcccccactctacctctagcttccccaggggctcctcagccacctcctgtgactccagagcgctcgttctcagcctctggggcccagatagtgtccaggtggcctcctctgcctggcaccctcctgacggaagcttcagcactttccatgatggaccccagcccctcgaagacccccatcaccctcctcgggcctcgcgtgctttctcccaccacctctagactctccacagcccttgcagccaccacccaccctggcccccagcagcccccagtgggggcttctcggggggaagagtccaccatgtaaggaggtcactgtgtccgggagactctggagagaggacctctgccagtggcccagggtgtgtgcagggcagctccaaggatgaacctggtggggatgcctgggctccctcctgcaggggccctggtgaggatggaagacccccaaggctggatgtaaccttgttcccaagaagtgtttggaatgtgctgtaagaatggaggaagtcgtttccactgtcagcatcctccctggaccgcgtggctggctcatcttttgagaagggttgggactgccaagttctcctggaggaagagttgcgtccggctgggattccactcactgggactgtaccgccaggtgtcatgcgtctctctgaggtttcctgattaaaggttgtctcggtttcccca

SEQ ID NO: 199375 - DNA, 3640 bp, Homo sapiens
  Payload ID: 19334
  Gene Name: von Willebrand factor C and EGF domains
  Uniprot ID: Q96DN2
  ENST ID: ENST00000335613
  CDS Start-End: 388-3255
agtcagcgcttcgcaggaagccgactcccaaaccggggcagggggtgtgggccgagggcgaaaccccgcccccaggggtccctgatctttgcccccgccccgggctccgcgcctctcggagaggcatcagcaggcgggcggcgttgcctttgtgtgtttcgcttcgaggtgccagagaccctccccacaatcgtccgccgcgtcccctcgcggccctcggcccctcctctcggcgtcccaagcccccctgctcagctctgcgtgccatttcggggatcgctggttcgctccccacggcgccaggaggaggggcgagggccggcagccccctctcccgcgcgcggcgcaggagccgagcccagcccgggggacccgccgccgccggtcatgtgggccggactgctccttcgggccgcctgtgtcgcgctcctgctgccgggggcaccagcccgaggctacaccgggaggaagccgcccgggcacttcgcggccgagagacgccgactgggcccccacgtctgcctctctgggtttgggagtggctgctgccctggctgggcgccctctatgggtggtgggcactgcaccctgcccctctgctccttcggctgtgggagtggcatctgcatcgctcccaatgtctgctcctgccaggatggagagcaaggggccacctgcccagaaacccatggaccatgtggggagtacggctgtgaccttacctgcaaccatggaggctgtcaggaggtggcccgagtgtgccccgtgggcttctcgatgacggagacagctgttggcatcaggtgtacagacattgacgaatgtgtaacctcctcctgcgagggccactgtgtgaacacagaaggtgggtttgtgtgcgagtgtgggccgggcatgcagctgtctgccgaccgccacagctgccaagacactgacgaatgcctagggactccctgtcagcagagatgtaaaaacagcattggcagctacaagtgttcctgtcgaactggcttccaccttcatggcaaccggcactcctgtgtagatgtaaacgagtgtcggaggccattggagaggcgagtctgtcaccattcctgccacaacaccgtgggcagcttcctatgcacatgccgacctggcttcaggctccgagctgaccgcgtgtcctgtgaagctttcccgaaagccgtgctggccccatctgccatcctgcaaccccggcaacacccgtccaagatgcttctgttgcttcctgaggccggccggcctgccctgtccccaggacatagccctccttctggggctccagggcccccagccggagtcaggaccacccgcctgccatctcccaccccacgactacccacatcctccccttctgcccctgtgtggctgctgtccaccctgctggccaccccagtgcctactgcctccctgctggggaacctcagacccccctcactccttcagggggaggtgatggggaccccttcctcacccaggggccctgagtccccccgactggcagcagggccctctccctgctggcacctgggagccatgcatgaatcaaggagtcgctggacagagcctgggtgttcccagtgctggtgcgaggacgggaaggtgacctgtgaaaaggtgaggtgtgaagctgcttgttcccacccaattccctccagagatggtgggtgctgcccatcgtgcacaggctgttttcacagtggtgtcgtccgagctgaaggggatgtgttttcacctcccaatgagaactgcaccgtctgtgtctgtctggctggaaacgtgtcctgcatctctcctgagtgtccttctggcccctgtcagacccccccacagacggattgctgtacttgtgttccagtgagatgctatttccacggccggtggtacgcagacggggctgtgttcagtgggggtggtgacgagtgtaccacctgtgtttgccagaatggggaggtggagtgctccttcatgccctgccctgagctggcctgcccccgagaagagtggcggctgggccctgggcagtgttgcttcacctgccaggagcccacaccctcgacaggctgctctcttgacgacaacggggttgagtttccgattggacagatctggtcgcctggtgacccctgtgagttatgcatctgccaggcagatggctcggtgagctgcaagaggacagactgtgtggactcctgccctcacccgatccggatccctggacagtgctgcccagactgttcagcaggctgcacctacacaggcagaatcttctataacaacgagaccttcccgtctgtgctggacccatgtctgagctgcatctgcctgctgggctcagtggcctgttcccccgtggactgccccatcacctgtacctaccctttccaccctgacggggagtgctgccccgtgtgccgagactgcaactacgagggaaggaaggtggcgaatggccaggtgttcaccttggatgatgaaccctgcacccggtgcacgtgccagctgggagaggtgagctgtgagaaggttccctgccagcgggcctgtgccgaccctgccctgcttcctggggactgctgctcttcctgtccagattccctgtctcctctggaagaaaagcaggggctctcccctcacggaaatgtggcattcagcaaagctggtcggagcctgcatggagacactgaggcccctgtcaactgtagctcctgtcctgggcccccgacagcatcaccctcgaggccggtgcttcatctcctccagctccttttaagaacgaacttgatgaaaacacagactttacctacaagcccggcaggagctcatggtccacactcactcgctttggggctgacagccactttcccaggggagcctggggcctcccctcgactctcaccagggccttcgacccctccaggagcccccactctacctctagcttccccaggggctcctcagccacctcctgtgactccagagcgctcgttctcagcctctggggcccagatagtgtccaggtggcctcctctgcctggcaccctcctgacggaagcttcagcactttccatgatggaccccagcccctcgaagacccccatcaccctcctcgggcctcgcgtgctttctcccaccacctctagactctccacagcccttgcagccaccacccaccctggcccccagcagcccccagtgggggcttctcggggggaagagtccaccatgtaaggaggtcactgtgtccgggagactctggagagaggacctctgccagtggcccagggtgtgtgcagggcagctccaaggatgaacctggtggggatgcctgggctccctcctgcaggggccctggtgaggatggaagacccccaaggctggatgtaaccttgttcccaagaagtgtttggaatgtgctgtaagaatggaggaagtcgtttccactgtcagcatcctccctggaccgcgtggctggctcatcttttgagaagggttgggactgccaagttctcctggaggaagagttgcgtccggctgggattccactcactgggactgtaccgccaggtgtcatgcgtctctctgaggtttcctgattaaaggttgtctcggtttc

SEQ ID NO: 199376 - DNA, 883 bp, Homo sapiens
  Payload ID: 19334
  Gene Name: von Willebrand factor C and EGF domains
  ENST ID: ENST00000535599
  CDS Start-End: 59-580
ctctcccgcgcgcggcgcaggagccgagcccagcccgggggacccgccgccgccggtcatgtgggccggactgctccttcgggccgcctgtgtcgcgctcctgctgccgggggcaccagcccgaggctacaccgggaggaagccgcccgggcacttcgcggccgagagacgccgactgggcccccacgtctgcctctctgggtttgggagtggctgctgccctggctgggcgccctctatgggtggtgggcactgcaccctgcgtaagtgcttgtccctgtgccccaagtcttctcctccagcagtgtgtgttgccagccctcagtccctggtccgaggggcagacgggaggccccagttcctcgtgtctcacctgcacttctcctctcagccctctgctccttcggctgtgggagtggcatctgcatcgctcccaatgtctgctcctgccaggatggagagcaaggggccacctgcccagaaacccatggaccatgtggggagtacggctgtgaccttacctgcaaccatggaggctgtcaggaggtggcccgagtgtgccccgtgggcttctcgatgacggagacagctgttggcatcaggtgtacagacattgacgaatgtgtaacctcctcctgcgagggccactgtgtgaacacagaaggtgggtttgtgtgcgagtgtgggccgggcatgcagctgtctgccgaccgccacagctgccaagacactgacgaatgcctagggactccctgtcagcagagatgtaaaaacagcattggcagctacaagtgttcctgtcgaactggcttccaccttcatggcaaccggcactcctgtgtagatacaccccaaggattcctctctgctcacccattttctt

SEQ ID NO: 199377 - DNA, 1437 bp, Homo sapiens
  Payload ID: 19334
  Gene Name: von Willebrand factor C and EGF domains
  ENST ID: ENST00000535710
  CDS Start-End: 124-1386
ctctctgctccccagggagtgggggtggtgaccatctaggcatctctggaggacgcagctgccgtcagccactggcagtacttcggagacaggacctggaatggggaggtggagtgctccttcatgccctgccctgagctggcctgcccccgagaagagtggcggctgggccctgggcagtgttgcttcacctgccaggagcccacaccctcgacaggctgctctcttgacgacaacggggttgagtttccgattggacagatctggtcgcctggtgacccctgtgagttatgcatctgccaggcagatggctcggtgagctgcaagaggacagactgtgtggactcctgccctcacccgatccggatccctggacagtgctgcccagactgttcagcaggctgcacctacacaggcagaatcttctataacaacgagaccttcccgtctgtgctggacccatgtctgagctgcatctgcctgctgggctcagtggcctgttcccccgtggactgccccatcacctgtacctaccctttccaccctgacggggagtgctgccccgtgtgccgagactgcaactacgagggaaggaaggtggcgaatggccaggtgttcaccttggatgatgaaccctgcacccggtgcacgtgccagctgggagaggtgagctgtgagaaggttccctgccagcgggcctgtgccgaccctgccctgcttcctggggactgctgctcttcctgtccagattccctgtctcctctggaagaaaagcaggggctctcccctcacggaaatgtggcattcagcaaagctggtcggagcctgcatggagacactgaggcccctgtcaactgtagctcctgtcctgggcccccgacagcatcaccctcgaggccggtgcttcatctcctccagctccttttaagaacgaacttgatgaaaacacagactttacctacaagcccggcaggagctcatggtccacactcactcgctttggggctgacagccactttcccaggggagcctggggcctcccctcgactctcaccagggccttcgacccctccaggagcccccactctacctctagcttccccaggggctcctcagccacctcctgtgactccagagcgctcgttctcagcctctggggcccagatagtgtccaggtggcctcctctgcctggcaccctcctgacggaagcttcagcactttccatgatggaccccagcccctcgaagacccccatcaccctcctcgggcctcgcgtgctttctcccaccacctctagactctccacagcccttgcagccaccacccaccctggcccccagcagcccccagtgggggcttctcggggggaagagtccaccatgtaaggaggtcactgtgtccgggagactctggagagaggacctctgccagtggcc

SEQ ID NO: 199378 - DNA, 3032 bp, Homo sapiens
  Payload ID: 19334
  Gene Name: von Willebrand factor C and EGF domains
  ENST ID: ENST00000613271
  CDS Start-End: 634-2646
ttcggctgtgggagtggcatctgcatcgctcccaatgtctgctcctgccaggatggagagcaaggggccacctgcccagaaacccatggaccatgtggggagtacggctgtgaccttacctgcaaccatggaggctgtcaggaggtggcccgagtgtgccccgtgggcttctcgatgacggagacagctgttggcatcaggtgtacagacattgacgaatgtgtaacctcctcctgcgagggccactgtgtgaacacagaaggtgggtttgtgtgcgagtgtgggccgggcatgcagctgtctgccgaccgccacagctgccaagacactgacgaatgcctagggactccctgtcagcagagatgtaaaaacagcattggcagctacaagtgttcctgtcgaactggcttccaccttcatggcaaccggcactcctgtgtagatgtaaacgagtgtcggaggccattggagaggcgagtctgtcaccattcctgccacaacaccgtgggcagcttcctatgcacatgccgacctggcttcaggctccgagctgaccgcgtgtcctgtgaagctttcccgaaagccgtgctggccccatctgccatcctgcaaccccggcaacacccgtccaagatgcttctgttgcttcctgaggccggccggcctgccctgtccccaggacatagccctccttctggggctccagggcccccagccggagtcaggaccacccgcctgccatctcccaccccacgactacccacatcctccccttctgcccctgtgtggctgctgtccaccctgctggccaccccagtgcctactgcctccctgctggggaacctcagacccccctcactccttcagggggaggtgatggggaccccttcctcacccaggggccctgagtccccccgactggcagcagggccctctccctgctggcacctgggagccatgcatgaatcaaggagtcgctggacagagcctgggtgttcccagtgctggtgcgaggacgggaaggtgacctgtgaaaaggtgaggtgtgaagctgcttgttcccacccaattccctccagagatggtgggtgctgcccatcgtgcacaggctgttttcacagtggtgtcgtccgagctgaaggggatgtgttttcacctcccaatgagaactgcaccgtctgtgtctgtctggctggaaacgtgtcctgcatctctcctgagtgtccttctggcccctgtcagacccccccacagacggattgctgtacttgtgttccagtgagatgctatttccacggccggtggtacgcagacggggctgtgttcagtgggggtggtgacgagtgtaccacctgtgtttgccagaatggggaggtggagtgctccttcatgccctgccctgagctggcctgcccccgagaagagtggcggctgggccctgggcagtgttgcttcacctgccaggagcccacaccctcgacaggctgctctcttgacgacaacggggttgagtttccgattggacagatctggtcgcctggtgacccctgtgagttatgcatctgccaggcagatggctcggtgagctgcaagaggacagactgtgtggactcctgccctcacccgatccggatccctggacagtgctgcccagactgttcagcaggctgcacctacacaggcagaatcttctataacaacgagaccttcccgtctgtgctggacccatgtctgagctgcatctgcctgctgggctcagtggcctgttcccccgtggactgccccatcacctgtacctaccctttccaccctgacggggagtgctgccccgtgtgccgagactgcaactacgagggaaggaaggtggcgaatggccaggtgttcaccttggatgatgaaccctgcacccggtgcacgtgccagctgggagaggtgagctgtgagaaggttccctgccagcgggcctgtgccgaccctgccctgcttcctggggactgctgctcttcctgtccaggattccctgtctcctctggaagaaaagcaggggctctcccctcacggaaatgtcattcagcaaagctggtcggagcctgcatggagacagaggcccctgtcaactgtagctcctgtcctgggcccccgacagcatcaccctcgaggccggtgcttcatctcctccagctccttttaagaacgaacttgatgaaaacacagactttacctacaagcccggcaggagctcatggtccacactcactcgctttggggctgacagccactttcccaggggagcctggggcctcctcgactctcaccagggccttcgacccctccaggagcccccactctacctctagcttccccaggggctcctcagccacctcctgtgactccagagcgctcgttctcagcctctggggcccagatagtgtccaggtggcctcctctgcctggcaccctcctgacggaagcttcagcactttccatgatggaccccagcccctcgaagaccccatcaccctcctcgggcctcgcgtgctttctcccaccacctctagactctccacagcccttgcagccaccacccaccctggcccccagcagcccccagtgggggcttctcggggggaagagtccaccatgtaaggaggtcactgtgtccgggagactctggagagaggacctctgccagtggcccagggtgtgtgcagggcagctccaaggatgaacctggtggggatgcctgggctccctcctgcaggggccctggtgaggatggaagacccccaaggctggatgtaaccttgttcccaagaagtgtttggaatgtgctgtaagaatggaggaagtcgtttccactgtcagcatcctccctggaccgcgtggctggctcatcttttgagaagggttgggactgccaagttctcctggaggaagagttgcgtccggctgggattccactcactgggactgtaccgccaggtgtcatgcgtctctctgaggtttcctgattaaaggttgtctcggtttcc

SEQ ID NO: 199379 - DNA, 11299 bp, Homo sapiens
  Payload ID: 19335
  Gene Name: von Willebrand factor C domain containing 2
  Uniprot ID: Q2TAL6
  ENST ID: ENST00000340652
  CDS Start-End: 557-1534
ggtgccactcgcgcgccggccgcgctccgggcttctcttttccctccgacgcgccacggctgcccagacattccggctgccgggtctggagagctccccgaacccctccgcggagaggagcgaggcggcgccagggtggcccccggggcgcgcttggtctcggagaagcggggacgaggccggaggatgagcgactgagggcgacgcgggcactgacgcgagttggggccgcgactaccggcagctgacagcgcgatgagcgactccccagagacgccctagcccggtgtgcgcgccaggcggagcgcgcaggtggggctgggctgttagtggtccgccccacgcgggtcgccggccggcccaggatgggcgctggcaacccgggcccgcgcccgccgctgctacccctgcgcccgctgcgagcccggcgtccggcccgcgccctgcgctcatggacggcggctcccggctggcggcggcgcgcccccgggctgtgaatgcgactcgcccctcggccgcgctccccgcccgcccgcccgccgggacgtggtaggggatgcccagctccactgcgatggcagttggcgcgctctccagttccctcctggtcacctgctgcctgatggtggctctgtgcagtccgagcatcccgctggagaagctggcccaggcaccagagcagccgggccaggagaagcgtgagcacgcctctcgggacggcccggggcgggtgaacgagctcgggcgcccggcgagggacgagggcggcagcggccgggactggaagagcaagagcggccgtgggctcgccggccgtgagccgtggagcaagctgaagcaggcctgggtctcccagggcgggggcgccaaggccggggatctgcaggtccggccccgcggggacaccccgcaggcggaagccctggccgcagccgcccaggacgcgattggcccggaactcgcgcccacgcccgagccacccgaggagtacgtgtacccggactaccgtggcaagggctgcgtggacgagagcggcttcgtgtacgcgatcggggagaagttcgcgccgggcccctcggcctgcccgtgcctgtgcaccgaggaggggccgctgtgcgcgcagcccgagtgcccgaggctgcacccgcgctgcatccacgtcgacacgagccagtgctgcccgcagtgcaaggagaggaagaactactgcgagttccggggcaagacctatcagactttggaggagttcgtggtgtctccatgcgagaggtgtcgctgtgaagccaacggtgaggtgctatgcacagtgtcagcgtgtccccagacggagtgtgtggaccctgtgtacgagcctgatcagtgctgtcccatctgcaaaaatggtccaaactgctttgcagaaaccgcggtgatccctgctggcagagaagtgaagactgacgagtgcaccatatgccactgtacttatgaggaaggcacatggagaatcgagcggcaggccatgtgcacgagacatgaatgcaggcaaatgtagacgcttcccagaacacaaactctgactttttctagaacattttactgatgtgaacattctagatgactctgggaactatcagtcaaagaagacttttgatgaggaataatggaaaattgttggtacttttccttttcttgataacagttactacaacagaaggaaatggatatatttcaaaacatcaacaagaactttgggcataaaatccttctctaaataaatgtgctattttcacagtaagtacacaaaagtacactattatatatcaaatgtatttctataatccctccattagagagcttatataagtgttttctatagatgcagattaaaaatgctgtgttgtcaaccgtcctcaccgtgtacctgcatatctttttcagttctgattccatcacccaggaatgttccccctgcacattttcacagggcagagtcacgcatgaatggatcataagatattaggaccaatttccactgaaaccctgtttaaattctatttaattacagacatatctctaatgttgatgtctacttcacataaatatatttcctttttataataatatatggcttttatctgcttcattctcagtcacttgtgaaatgcaggtgtaaagatcactaactcacactttctcagttctttcccctaagctcctgtattgtacaccataggtaagcacatacatatatttcattcttatttacattattttctcttctaaggataactttaattcattccctaaactgaggaataaagtaggctggaaaatttgcattactgttccatcaagctgaagcagacaacaaaataggggaggagtccttcgattctcctaggatagttaaggaaaatcaaactcctaaacaagtttatatacctgaaatctaaatgtgctacagataactcagctgtcagttcagtggaatcatatttgtcatcagacttgagtcatctatcctccataaactacacagtaaaatcttgactgataaccttgaattagccacccttcacaagcagagtgaggaagcagttattttgttaaaacaaagctgaagaccaagtgcactccacaactttcctatagttataattccaaaccaacttcttttctcttcatttgaacagagaacataaaaagccactgcaaagtcctgctaatctaattaatgcataatagaaaatagttctacctttatcaatcatatcagcatgcggtgtgttgatgaaagaggtaattggagtcttaataggtgtaggataaaaaaagcaaaactataatcactattaatgtctttaaaggattaaaatatatataatcattatttgaagcctctaaaggtatttttcatatttttgtttattctgaaattttgcattaagaacctattaagtacaaagcattgacaacaagggaataaggcttgatttcttgccttcttggactttcggtctctggcataagaagtatatgaaatcataatgtattgtattaggagccaaactagagaccagcaaatggagattagaaagccttcctaatgagaagatggagaacatgaaaaaatcattatataaaaaataattcaatcattaaagactgaataacattcaagaaaaatggatacatctatcataattgaaaaattaaactattgtgaaccttagtaagtataaagatgccactgactgagtcatcaaaacactacatatagtcatttaatttttgtcttgttcataaagaacaccttgagccaaaggaactaccagtacatagatttcatgaaaatactcaggggaattattagctaattgttctcaggtgtaatcagctttccaaaatttaacctttgtattaaagactggtagacattggccatccctcctttattcaaggatggattgtttgagacacagttatttaaagttgtcgttttgctaataaatggccctagcccccatgggtaggtgggccattagtaacctcttctctctccatcaggcatgatgcagttagagactcagtccatgcagctcaaagtcttcctgtttcccttaataataattcctaccagaatggatgatgagctctgaaataattgcaatggtgttttcaatgctgtgagaatttcagaaaacctagtattttgttgcatatagagagaatgaacccagtatcatcttgggaagttaactgactcacttgctctaaacttagtttgacctgcagggtcaccagcacacactcctaagagctaaagctcaatggctgttattacaccaaagtaactcccctccccatctctgatttcaaccccctcattcctctctcctcatagaaataatgcataaaccaaacacatggaagaacttggatttttgacactgtatatactcattaataataatggcattatttgcatttttgtccaagatcaacttcttcttgcagttagactttcacaaatacatagctatctcagattgacattctattttcctcccctctgttgtcagagaactctttgctgagattgtcaacaacaaactgttctattcaataaataacctgaataactgcccaataaaaaaggaaagtataagttactcaatttcaaaataatatggtttggagatagcacagaaaagggggcctcagaattcaagtatagaagttctggaaaagccataatcactaaaattcaaataggcctgctctataagtacctaataattgttaaatgatttgttcaagttaataaactaaatcgtgcttacaaatgtattaatgaatttatttcaaattttcaacccatatttagatctgaaagtataaagctacttatgtaagcaatagaatggttctggaaattatctgatgtcttagaggttttcaagttaaattcattctttcagtgataggatatttacttgttgggtggattaacaatactttttattgacatttcccagaagtcttgagaaaagtcatttcaaaaacttgtatttcatccctgcatgcaagaagtattagatgcactccagtccaggcaagtcctgctataatgttgcagctagtgcagatggagaggcacagtgtccttgacatcaaggggtctgtaagccttgaaactaatttaggtttgattataatacttttaatcttttgatacttagaatttcatcacctgctttgtgcagtaaaacatgctaagaagaattatcatgcagttttaagttcataacatcaataatatgtttaataaactttcttccctcgttctccaacataaatgttgcatttatataaggttaaaagtcctaaaaaatcataaaattcagatgtttaatttttgtttttaagcagtgaaatgggtttttaaatgtatacattatctgaaacttacaaaatatacactgtttcaaacaagcattgttggaaactaaatccattattttaaatgtggactatttaaacatgtagaaaacaaaattatagacataaactatgattttaaaaatattaacaatttgctaaatttgcttcaatgggcaagagatcaatcctacttttcattgttatttttaatatcatatttttccccaacataatgttattatgaagagtatcagatgtacaaataagcatcattggtaaaaacatacatgcttctttggccaacataatttgtaactgtcttactgaacctacttacctactatattttttttcctcactagtagcatctgatggttgatacagtcagtaactattctgaagaatcagattaagagagaacaatttacttattcaggaataagtgcatttttacagtacatatttttcacatttcagctgcaacttccaaagatcaggttctcattgctccgtagcacagattaaacagcctacttatgtcatatcctcacttcacaccaacttcttcagtctattattttagttttctaaatgtagatctagttttcaactgaattctttgaggatcgcaatcacacacaaaataacatccaaactcctcaacatggaagactggtgtcttcacaattagatcatggacaacaccatgacccaggcccctgtggctggtgagacttctgggccctgggtaccacagactatactctaaacatggtctttactatctcagatcctgccctgagtgtcctttgcagcatgttgagtattagccattttcaatgtccagttcaagtgccattgctggtaaggcttctgtagttcttattggaagaattgtcactctatgtcccagtaatagtactaatttggtttcttattttaacatatcatttaggaatcataccatagtttgcataatggttaattttatgcctgcttcttctattatttacaaatccctttagtttgggctgtgaaatattcaattcccaaaacatcacccaatatctatatgttaaaggcttgttgaattgtattccatctattagttcagagttatttgctattcttgtttaaggacaatgtatgtattaaagagcaactaaaaactcccattactgtttgccaacccagttgtcttttgatttctctgtcaacttacaagtatcaaatatctaagtcacagaacccagagacacatcaaataccccaaataccccatggtagttttcggatgaactctgacagctattggccatttctggtgcaagtcagaaaaaaattgcttttagtgtgaaatttttgatgctgaagaaagttgattgtattgaagagacactggccctttatgataaaggaagtcaagtttacagttttgatatttgtttactttcttatttctaatttttggaaaacaattttcttagactttcatttgtgatattgatcatttctgtgtgttttaatctttctacataacataattaaacacctcagtaggtatctagtgaactgatacaataatgagctgagtcatttgtacagaaatatagtagcttccataatctgaatgataaccatttaaaagtgatggttgttgaaattttactgtagtgtcaaatttcactttaaattttgcaaagcacctgctattctagccttaacacaaagatttggctaatttttaaatgaacaaatcccattgaatattaagtgacactgacaatcaccctgaaaagtattcagccaaagtttcaatagaattaggaaacttaaatgaaaatgtgctctcagtgcttggcccatgagcagtttatgatttaagacgtgcatactgtttaactctttcctttaaagttcagaaaagtacataaaacctctggctgacctattatataggcacagaattatcaaaagcaatcaaagtatgtacctaaagtcaatttagtatattatgaatacagcctgatgactaaacacaattgcaaatattgcgactttagtttttaattcaattttcagcaagtagaaatatttctcaattttatttggtatctaattatattaagaccaacatatacattaaagtgtatttagatgattaatatttaatgatcattattttatttaatgattaatattttctattatttgaatttctgtaatttatgttttagaaagaactgtttccaaacacattttatggaaagatttcatttttccattccctttacttttatatttacattgtcaaataaatacaattctattttcatttctattagttttcagggtttattcttttcctaagcatataattcttataatggaaaaaagtgaaaagtatccagtaagtaatatacacctatgaaactattaatgttctttatactaccaagtagtttcatagttttaaaaagccattcttaagcagtcggtgaatgtatatcatcggccaaaagttatgctaggtttccttcacttattatcacatttaacctcacagttctcccaaattgtgggtaatgctatcccctttgttgcagaaaagtaaatataggctcagggaaatttaaaaactgccttaagattcagtctagtgaatgagaggctgagttaagaatccaaatctgctttatatcagagcccgtgatttgaagtcttatcatttgtgtttaggtcagggacctctagaaaatagacagaaatttccaaaatggtcttttaccccactccccataaataagataatgaatagcaacactgatccctaattctagaatatcaatcttgatacttgtcaaagtaaatagtagctcgtcacaaaaatgttgtagcctccctagtctaaatgcttatgctatattttgtttcctaaatctagagatctctttttaaaaatagtattgaagcatcaggttgttcaggtatgattctcatattgaaatttacaaaatataaccaaatattgtgacccagtttttctggagccaagagaagtaaactgccatttattaggtgatgattatagggcaaacactacaatttcaaatttcatattcttttatctgatttattcattttatcaactctgctatattgatgaagaagtcaacatatggtgggtaacttatccaaatttcagtgatgggctgggcgtggtggctcacgcctataatcccagcactttgggaggctgaggcaggtggatcaggagtttgaggccaacctgaccaacatgtgaaaccccatctctactaaaaatacaaaaaaattacctgggcatggtggcacatgcctgtaatctactcgggaggctgaggcaggagaatcccttaaaccgagggggtggaggttgcttgagccgagatcgcgtcactgcactccagcctgggtaacagagcaagactctgtttaaaaaaaaaaaaaaaatcagtgatggaactgaggccaaatctgtctggttccaaagctatcctacatggggcacagtcaggactggaatggatagctctacctgcttccaaatattcttccctggggagcagctgtgagtcttactgaatcgatttattcattgcattctatgtgtcaactgcaatttagacctgggtgatagagtcatatatggtctttggacccatgaagctctgagtcaaggataccagcagatatccttaaactaataaaaaaagcgatggcatcacatgccattttgaacttttgcattaaagtcataaacttacatcagtattatgatttatacttttaagcaaaattttgccattttctgatacatagtagctagctagtgataaaattatgaagttaccattgtatgttccaatgacataaaaaactaagtgcctgcttgggctagttatactctgcagtataccctggtttattgtgaggattaaataaaaaatcctcacaaaccccaatttaatttaatatagattaattataaaaataatctacccatgttacataatgttaaatctgtagtttcaaggtgtatgctatttcttaaaacaaaaacaaagattgtccccactccaaacaataacagcaatggtgaaggttgtgggtggacagaggtagtcccactcatccccagggggctcagctgccaccggccaggtctatctattgctcccacctgctctgactgttttctctcaagaaaaagattttcattttaagataggcatcagtgcaataaaggagcttgatacaaaaatcattatgttctatatatgtttttgtaggttttagattaattatggccaactgataccttaaaatatttgttacaaataacactgaagtgagattcaaaattgtgccttctattgaagccaagaaagtaaatgtctttaaaataaacataatggtgtttttttttggtacaataaacagcatacctacatttcagaggacaaatcatgttattataataaccaggagagaaaataaaaggagacattaatttggatatggaagcaaaatggaacagagcaatatagagcaaaacagaggtttgtctgaaacatttaaaatattaagaagtatgactaaaaaactcaaacattttaatacacgatgaatccttttcttaaggaaaaaatgaaaataataaaagtggtatttggatgagataattttcctttaaatttattcctcagaatgatgtaaattttccagctggaaggtcatctttctatacatgcatgcatctatacaaatggttaaacagttactctctcaatttgctgtgataggaaaggtggatataaatataagcaagggtctgattaaaacaaaacaaaacaaacaaaagacaagagaagcactgcattgttggcaagaaattccttttaagtcagacttaagtccacggaaagctggacctaagcagtgaaggatgtaagggaacagagagagactctgcttggccgagtttgctattctcatttgtctatgtcaatacggctacataaagttcacaactatttgcacatagctataaatatagcatgaataaaacacatatgtatttaattgtgttatttactatttataatttgaattgtttaaaataattttaaatacttattccataaactcagtatttgaaaacttaaaaaaaaagtcattttaaataacatcatttaccaagtctgtgtgatgctttacaaggtacctgatgaatgtaaaattatagctttttgtcttcatttctaatagactgttataggggaaatgtactaaaatgttgtacttattacatttatgaatttctgacagtttctatagactgagaataatgatatgcttttataaattatttggtgaaagttttccagtaagtgttcatgtcctgtacaaatttattaaacaacatcaattttacctaacaactgtaaccactaataaatcatcagtcaccacctttcctgcatatctgacagatggagaacactgtgcttagtgttgaagataccaaagggaattcaagtgaggggaaaagaggagagcaaactgatcaaaagggaatgcccatgatgctttcaggaaaccagggtgagaacatgctggctggaggatgggtctggtttccagcagagatgataggagttaaaaggcataggtgagttgttcccatccctggcctgagccttactccatagctatagagacatagtctctagaaacaaaggccagagcatccttttaacatttatatcataagtattctcaataaacgtttgcaatttatttgctttaatgtaacttggcagtaaagactttggcctttggaggtctgattctaatcccagttctaccacttactggttatttatcaggtacacgttacctacctctctgtaactcagattgctcatcagtaacatggggagagtggtatcaaccactaagaggattaaatgagtgaatatttgtaaaacacgtagcctagaatagatatttataaagcacaagatctatgtaaagtgtttataacataatacattggaatatgagacttgaacattttgaagattctaataaatgaataatttaatttagtgctcatttgaaaaatattttatcctcatgtttacatttaacacatataatttatatcttagtttttatcccatttatatatatatttaccagaaaaatgttttgtaataccttaattttatgtggagttgaatttaaataattaggccgaatttgtatgtattgttggatgggtatgtgtattgacctgatttataaaataaagtatttattaaactga

SEQ ID NO: 199380 - DNA, 4610 bp, Homo sapiens
  Payload ID: 19336
  Gene Name: von Willebrand factor C domain containing protein 2-like
  Uniprot ID: B2RUY7
  ENST ID: ENST00000312504
  CDS Start-End: 803-1471
aagcagctctgggatttcgacagagctgggctcagaagccagttgttggcgctgtccgtggtgctgaggaattcccggctgccggcagaatgagctccaaatcagcaatctgcaaactgctcttactgatgcagaaacccagctaaagttgctcctttccttcacatccacagttagtattttccggtgtgtaagaggggattcaagcaacacactgtggacgatggtgatggtattgccagcggagtgggctttaagctacagcatgctgttgctgtttgtgatcctcagagcctagccaaatcacctctactgccgtagcaaacactgtgtaagtgaactcatgtgtggaggaggcgtaatcagccgggaaatttcatagaaggatctaagaaaatgctaaaaataagttcaacatgattctgctactggggtctggatttctacaggaccagctttgcttcttgctttgaattctgaagacaggtccaaagcaaatttcttatatgtgtctgctgtgtttctttctggaagggcgggagactgcttctttactgtgttttgaaatgggaggtagagagaatggattgcctttaattcatgcctaaaaaatgtattctttgggtaattaaagaggaactgctttcttaaaacatacctgaccttttagttcattttgggctgtgacccctaccaccaccattaacctccagagtgattagcctacccctcttgtattcccatggaaggagctgagtatatttaatattaggagcacatccagaagtctttgaagagggggatggctcttcatattcatgaagcttgcatacttctgttggtcatccctggattggtcacctctgctgctatcagtcatgaagactatcctgctgatgaaggtgaccagatctccagtaatgacaatctgatctttgatgactatcgagggaaagggtgtgtcgatgacagcggctttgtatacaagttgggagaacgatttttccctgggcattccaactgtccatgtgtctgtgctctagatggacctgtttgcgaccaaccagaatgccctaaaattcacccaaagtgtactaaagtggaacacaatggatgctgtcctgagtgcaaagaagtaaaaaacttctgtgaatatcacgggaaaaattacaaaatcttggaggaatttaagccctctccatgtgaatggtgtcgctgtgagcccagcaatgaagttcactgtgttgtagcagactgcgcagttcctgagtgtgtcaacccagtctatgaaccagaacaatgttgtcctgtctgcaaaaatggtccaaactgctttgcaggaacgacgataattccagctggcattgaagtgaaagtggacgaatgtaacatctgtcattgtcacaacggggactggtggaagcctgctcagtgttcgaaacgtgaatgccaaggcaagcagactgtgtaggacaaacttccacccaatgatgagttcttaggaaaggatgctatggcttcaacactgcacatgtttaacacaaaacaaaacaaacaaactcctgccagctacaacagggtcaccagcaaaactttctagggttgacaaaagtgaatattttcctaagaggaaatttctttctctcttgctatataaaatatatatagtatatagctatctaaatcgcttttgtatttaccaatgcttgatggtgacttgacgactggattgctggaacaaaaagaaagaaatagccttgcacaggctccttccctggtaatgcctctgacctaccagctcactgtcccctggtttacttcatttttactcttctgtacattgtacatggcattgttctcctgtaatatttgttttttcacttttagagtctaaggggctaaatttgactgcacagtaaagttttgagttgtgtaaaaaaaaaagtttggtaaaggaatgtcaggggaaatatctttcccgagctgggaaacacaagagcatccagtcaattgctcccctagggtgaatcatgccctgtagactaaggaaagaggggtgggcacatagacgggcctattgctggacagggttgggaacaagtactttgtccattacgtgggggctcacaatttaattcttacaaaccacacatttcatatggaaaacctcgaaactgccaatcaaaatctattacgtaaagaacaccataagctcaactaaagaatccaaagagagacagatctttaaaattgtagcattaatcatcagactttttcatgatgtgaaatttgagtttggtttgtagctaaacacactctaaactcactgtcatcaggcaatataaataccagaaccagggtgagaaaacccactgtgaatccaaatccttatgaacatctctggcttttgagttcagatttggctaaaagtcagtagtacacactggcagtttttgtggttcgggactgtgtttgccatgttgtagtaacaaccactcagccctatgtctgaaacacagattcaggacaccctttccacctcaagtgctgatttaaattaaagattagggtagagtgagtcttgcacaatacaattccatttgttgaacattttttaaaatgtatatattagatactgaaaaattaaagtgaacctttgaagagtctctaggttgccctggtaatgctgctagtatagtaacagaaaaaacaaaacacacagggtatctgatgccacctcgattcaagtgcaaaattaacaattctgaaaccacatggcatagttagtcgcttattccatgctcctgccctaaaaaccctggcacagatctgatagggtccttgaagagactttacagttgtctttattatcaatgttctttctttttctgctcccccaacctgggctttgccatagctcctgtggagagccatattctagagcaaggtgtctcaatcttagtaggattgacatttggggccagatcattattcgttggtgggggctgtcctgtgtgcttttaggatgtttagcaccatcactggcctctatccactagcaacatcccagcaactggtgacaaccaaatttctccagacattgcctaatgtccctaaggagtgggagtgaggggcctaatttcacctcgttgagaaccagtggtctagaataatcagtatagagtggtttctggcaggggacacagtaggcaagctctagcagcacctgtggcttttgtgagcttctgatccctatgggacatacacagtcagcatttccaaggggtcagtcttctccatagagagtgaggcttctaatgctataggcccaccctcaggaaacatatttttttgagtcttgtcaactggtttttcatttaaaattgtcagcctctcctccctggaagcatctgctgtcatcaagaaagagttgtcatttccaaaattaacgtgctgacgagtcagacctgacattcttatgcacactgtgcttgcgttatgatacaaatagccatgccggcaccatcccgaggaagagcatcaagccaccttcccttagaacaccaatttgcagcaaggttggtgcctttcatttgccaccatggatacatcatatagacagtcatgaatcattcatgagcaatgctgcatgatttatgtctgcactcaaaagtaaaggaattccacactttagcttatgtctagacagagatgtattatagagctttctttgccccgaggttgcctgttgccaacttcaaaaatccacactcttggaaagaaataataataataaatgacaggaataaggtttgaaactcagaaaatatcattaatagagccatgcagcatagtaccttatctattattaaggagttactatgtccttttttagaaaacagaaagagagtacaactgggaagctgaagtgcagaaattttgcatcaaagcattggcacagcgagagtcacagcaagaatttactagaattgaatgggacatccattaaggatctctcttcagagagtttgcagaaagcaggctgttctgtggcctctgataaccagctagagagagggatttttatggttggttttgttgttgttggattttctttttctcaaagtttcactgcaggctgtttcctttaagattttgtagcactgacatttttccccctttagggagagatgaacctatactgtgacaatttctcataaactgataaacattttacaacttccttctacccaggtcattgagaaattctttccagactctgaacaacagagctctggtctcatctgttgtttgtttcttgtgaagtctttgtttgcagccacactgtcatctctgtactcctatttctcctccgcctttggttctcggctttaacaacagctatgttaaaataagggatcaacatcttgtttgtcagctgatgcctattaaaaacgattcagtttctaaaatctttgaaaaatggcgtgcctgaaaactagtgagaaaaaaaaaaaacctaaacactaaactgtaaaaaggggattctagcaacaatatttgatgtgtaaaagaatatattattaaaaaattattttgttaaatataaa

SEQ ID NO: 199381 - DNA, 4480 bp, Homo sapiens
  Payload ID: 19336
  Gene Name: von Willebrand factor C domain containing protein 2-like
  ENST ID: ENST00000427124
  CDS Start-End: 803-1222
aagcagctctgggatttcgacagagctgggctcagaagccagttgttggcgctgtccgtggtgctgaggaattcccggctgccggcagaatgagctccaaatcagcaatctgcaaactgctcttactgatgcagaaacccagctaaagttgctcctttccttcacatccacagttagtattttccggtgtgtaagaggggattcaagcaacacactgtggacgatggtgatggtattgccagcggagtgggctttaagctacagcatgctgttgctgtttgtgatcctcagagcctagccaaatcacctctactgccgtagcaaacactgtgtaagtgaactcatgtgtggaggaggcgtaatcagccgggaaatttcatagaaggatctaagaaaatgctaaaaataagttcaacatgattctgctactggggtctggatttctacaggaccagctttgcttcttgctttgaattctgaagacaggtccaaagcaaatttcttatatgtgtctgctgtgtttctttctggaagggcgggagactgcttctttactgtgttttgaaatgggaggtagagagaatggattgcctttaattcatgcctaaaaaatgtattctttgggtaattaaagaggaactgctttcttaaaacatacctgaccttttagttcattttgggctgtgacccctaccaccaccattaacctccagagtgattagcctacccctcttgtattcccatggaaggagctgagtatatttaatattaggagcacatccagaagtctttgaagagggggatggctcttcatattcatgaagcttgcatacttctgttggtcatccctggattggtcacctctgctgctatcagtcatgaagactatcctgctgatgaaggtgaccagatctccagtaatgacaatctgatctttgatgactatcgagggaaagggtgtgtcgatgacagcggctttgtatacaagttgggagaacgatttttccctgggcattccaactgtccatgtgtctgtgctctagatggacctgtttgcgaccaaccagaatgccctaaaattcacccaaagtgtactaaagtggaacacaatggatgctgtcctgagtgcaaagaagtaaaaaacttctgtgaatatcacgggaaaaattacaaaatcttggaggaatttaaggtccaaactgctttgcaggaacgacgataattccagctggcattgaagtgaaagtggacgaatgtaacatctgtcattgtcacaacggggactggtggaagcctgctcagtgttcgaaacgtgaatgccaaggcaagcagactgtgtaggacaaacttccacccaatgatgagttcttaggaaaggatgctatggcttcaacactgcacatgtttaacacaaaacaaaacaaacaaactcctgccagctacaacagggtcaccagcaaaactttctagggttgacaaaagtgaatattttcctaagaggaaatttctttctctcttgctatataaaatatatatagtatatagctatctaaatcgcttttgtatttaccaatgcttgatggtgacttgacgactggattgctggaacaaaaagaaagaaatagccttgcacaggctccttccctggtaatgcctctgacctaccagctcactgtcccctggtttacttcatttttactcttctgtacattgtacatggcattgttctcctgtaatatttgttttttcacttttagagtctaaggggctaaatttgactgcacagtaaagttttgagttgtgtaaaaaaaaaagtttggtaaaggaatgtcaggggaaatatctttcccgagctgggaaacacaagagcatccagtcaattgctcccctagggtgaatcatgccctgtagactaaggaaagaggggtgggcacatagacgggcctattgctggacagggttgggaacaagtactttgtccattacgtgggggctcacaatttaattcttacaaaccacacatttcatatggaaaacctcgaaactgccaatcaaaatctattacgtaaagaacaccataagctcaactaaagaatccaaagagagacagatctttaaaattgtagcattaatcatcagactttttcatgatgtgaaatttgagtttggtttgtagctaaacacactctaaactcactgtcatcaggcaatataaataccagaaccagggtgagaaaacccactgtgaatccaaatccttatgaacatctctggcttttgagttcagatttggctaaaagtcagtagtacacactggcagtttttgtggttcgggactgtgtttgccatgttgtagtaacaaccactcagccctatgtctgaaacacagattcaggacaccctttccacctcaagtgctgatttaaattaaagattagggtagagtgagtcttgcacaatacaattccatttgttgaacattttttaaaatgtatatattagatactgaaaaattaaagtgaacctttgaagagtctctaggttgccctggtaatgctgctagtatagtaacagaaaaaacaaaacacacagggtatctgatgccacctcgattcaagtgcaaaattaacaattctgaaaccacatggcatagttagtcgcttattccatgctcctgccctaaaaaccctggcacagatctgatagggtccttgaagagactttacagttgtctttattatcaatgttctttctttttctgctcccccaacctgggctttgccatagctcctgtggagagccatattctagagcaaggtgtctcaatcttagtaggattgacatttggggccagatcattattcgttggtgggggctgtcctgtgtgcttttaggatgtttagcaccatcactggcctctatccactagcaacatcccagcaactggtgacaaccaaatttctccagacattgcctaatgtccctaaggagtgggagtgaggggcctaatttcacctcgttgagaaccagtggtctagaataatcagtatagagtggtttctggcaggggacacagtaggcaagctctagcagcacctgtggcttttgtgagcttctgatccctatgggacatacacagtcagcatttccaaggggtcagtcttctccatagagagtgaggcttctaatgctataggcccaccctcaggaaacatatttttttgagtcttgtcaactggtttttcatttaaaattgtcagcctctcctccctggaagcatctgctgtcatcaagaaagagttgtcatttccaaaattaacgtgctgacgagtcagacctgacattcttatgcacactgtgcttgcgttatgatacaaatagccatgccggcaccatcccgaggaagagcatcaagccaccttcccttagaacaccaatttgcagcaaggttggtgcctttcatttgccaccatggatacatcatatagacagtcatgaatcattcatgagcaatgctgcatgatttatgtctgcactcaaaagtaaaggaattccacactttagcttatgtctagacagagatgtattatagagctttctttgccccgaggttgcctgttgccaacttcaaaaatccacactcttggaaagaaataataataataaatgacaggaataaggtttgaaactcagaaaatatcattaatagagccatgcagcatagtaccttatctattattaaggagttactatgtccttttttagaaaacagaaagagagtacaactgggaagctgaagtgcagaaattttgcatcaaagcattggcacagcgagagtcacagcaagaatttactagaattgaatgggacatccattaaggatctctcttcagagagtttgcagaaagcaggctgttctgtggcctctgataaccagctagagagagggatttttatggttggttttgttgttgttggattttctttttctcaaagtttcactgcaggctgtttcctttaagattttgtagcactgacatttttccccctttagggagagatgaacctatactgtgacaatttctcataaactgataaacattttacaacttccttctacccaggtcattgagaaattctttccagactctgaacaacagagctctggtctcatctgttgtttgtttcttgtgaagtctttgtttgcagccacactgtcatctctgtactcctatttctcctccgcctttggttctcggctttaacaacagctatgttaaaataagggatcaacatcttgtttgtcagctgatgcctattaaaaacgattcagtttctaaaatctttgaaaaatggcgtgcctgaaaactagtgagaaaaaaaaaaaacctaaacactaaactgtaaaaaggggattctagcaacaatatttgatgtgtaaaagaatatattattaaaaaattattttgttaaatataaa

SEQ ID NO: 199382 - DNA, 5260 bp, Homo sapiens
  Payload ID: 19337
  Gene Name: von Willebrand factor D and EGF domains
  Uniprot ID: Q8N2E2
  ENST ID: ENST00000275358
  CDS Start-End: 190-4962
acgcgaaggctctatcccacgaaaggactgggtgcaccccagaacgaggacgcggagcttccctgttccaagcagcaacagactgagaaaatccaagaaaggaggcccgaggggctgctgtggccccatcctcctggcacccgcggcccgggctctgcgacgcctttcgccccacctgcggaagcagcgatgcctggcggagcctgcgtgctggtgatcgcgctgatgttcctggcctggggggaagctcaggagtgctctcctgggggacaccagtttcttcggagtccttatagaagtgtccgttttgactcatggcacctccagcagtcagctgttcaagacctaatatgtgaccattccctctcccctggatggtatagatttctcatccttgacagacctgccgagatgccaaccaaatgtgttgagatgaaccattgtggaactcaggcccccatctggctgtctctgagagattcagaaacactgccatctcctggggagatcaagcaattgacagcttgtgcaacatggcagtttttgttcagcactacaaaagactgctgtctctttcaaatcccagtgtctgtaagaaactgtgggaacttttctgtatacttactacaaccaactcagggatgtatgggctactgtgcggaagctatttctgatgcacgattacacccatgtggttctgatgaaactgaaacaggaggtgattgtgttcgtcagctggctgcctcattgccacctccacctgcaggaaggccagaggttctggtggagttgattgagtccaggcttttctgtaggtgttcttttgatgttcccgctacaaaaaactcagtgggatttcacatagcttggtctaggctttcttctcaagaagtcaaagaggagctgacacaagagaccacagttcaggcattctctcttttagaacttgatggcataaatctcagacttggagacaggatattctgcagcgcttctgtctttttcttggagaatcctcatgtacaaagtgtagccatcgaaagccaagaattttttgcaggctttaagctacagcctgaattgagcactatatcagaggatgggaaagaatactacctgaggatagaaagcacagttcctattatttgttctgaatttagtgagcttgatcaagaatgcaaaatctcattaaaactgaaaactattggtcaaggtagagagcacctaggcttaaatttggcactgtcttcctgtcatgtggaccttctccagacatcttcctgtgctaatggaacctgtagccacacttttgtgtactacactgctgtcacagatttttctcgagatggagatagagtctcaaacattgtagtgcaaccaatagttaatgaggatttcctgtggaacaactacattccagacagcatccagatcaaagtaaaggatgtcccaactgcttactgctatacatttactgacccacatataattacatttgatggcagggtatatgataatttcaagactggaacatttgtgctttataagagtatgtcacgtgattttgaagtccatgtacgtcagtgggactgcagaagccttcactatccagtgtcatgtaattgtgggtttgttgcccaggaaggaggtgatatagttacttttgatatgtgcaatggtcagctacgtgaatcacaaccatatttgttcataaaaagccaagatgtaaccaggaatatcaagataagtgaatcttacttaggaagaaaagtcacaatctggttttcttctggggcatttatccgtgctgatcttggtgaatggggcatgagtctaacgatcagagcccctagtgtagattacagaaacactctgggactttgtggaacctttgatgaaaatccggaaaatgatttccatgacaaaaatgggatgcaaattgatcaaaattttaacaattatgttgcttttattaatgaatggaggattttaccaggaaaaagcatgtctgacacactgccagtttctatgacatcacctggaaagccatcctattgtagctgttcattggacactgcagcgtatccgtcttccgaagatctggacagtgtttctcgatcagaaattgccttgggttgcaaagacctcaatcatgtcagcttatcttctttgataccagaactagatgtcacctccgaatatattaattcagacactcttgtcagagagataaacaagcatacatctccagaagaatataatctaaatttatttctgcaagaaaaaaaacacataaacctgactaaactcggcttaaatgtacaaaaacatcctggaaatgagaaagaagattcactacaatatttggccaataagaaatatacacaaggccggggaagccacagccaagaaatgaggtacaatcgacaaaacagatggaaacggcagaactttcatgagtttcctcctttgtttgctttcccgagtctcagccaaacggatctggaagaacttacttattttttcccagaggaccatgctgaggatgtacagcaagagtttttcccctcttggcccactccctctggcctcaccgagtatagcaccttgaccctctgtcaggagactctagccaactccagcataggaaggctgtgtcttgcttttcttggcaagagattagacagtgttatagagatgtgtgtgaaggatgttctgttaaaagatgatcttagttgggcagaagcaggtgtggcccttttagaaaatgaatgtgaaaagaggattgtggaggaggggaaatataacacagaagagtatggcacatcaattgaagacattctctcagtattaaaatgccccaatttatgcagcggcaatgggcagtgcatggaatgggggtgtgcgtgttccccaagctttagttcctatgactgcagtgattcctatgacaaagctcctgaaattacagagcttgggaatgctggattctgtgatgttcaaaaatataattgtatgatggtgagagtttttggcaaaggcttcaaagaattaccttcaattaaatgtgaagttactaagctacagtataatagcagtgaatggatgcctggagaacccatctatacacagactgttttccacaatagcagagctgttgattgtcagctgcccactgatgttcagcagtttgataccatggatctggtgggtgggaaaccaactgggaagtggcagttgaaggtatctaatgatggttataaattcagtaatcccaaaataacggtcatatatgatggtgcttgccaagtttgtggtctctataaaaatgactcatgtactataaaggaaaatgtttgcattattgatggactctgctatgttgaaggagacaaaaatccaaccagcccttgtttgatttgtagacccaaaatttcaagatttacttggtcatttttagaaaacaaccagcccccagtgattcaagcattgcaagacaaattacagacattttatggtgaaaactttgagtatcagttcgtggccttcgatccagaaggttctgacatccattttacgttggactctggtcctgaaggggcaagtgtttcctctgcagggctttttatgtggaaaacagatttactaactacccaacaaattactgtacgccttaatgatgactgcgatgctgaaactagagtcacgattgaggtgactgtgaagtcttgtgattgcttgaatggtggatcatgtgtatctgataggaacttttctccagggagtggagtgtacctgtgtgtctgcttgcctggcttccatggcagcctttgtgaagtggacattagtgggtgccaatccaacccttgtggtcttggcagctatattagtggttttcacagttattcctgtgattgtccacctgagctcaaagttgaaacacagtttgtaaatcaatttactacacaaactgtggttctcacaagatctgataaaagtgtaaataaagaagaggatgataaaaatgcccaagggagaaagaggcatgttaagccaacaagtggaaatgccttcaccatttgtaaatatccatgtggaaaaagtagggagtgtgttgccccaaacatctgcaaatgtaaacctggttacattggttctaactgccaaactgctctttgtgaccctgattgcaaaaaccatggaaaatgtattaagcctaacatttgtcagtgtcttccaggacatggtggagcaacctgtgatgaagaacattgtaacccaccttgtcaacatggtggcacatgcttggctgggaatctctgcacttgtccttatggttttgtaggaccaaggtgtgaaacaatggtttgtaacaggcactgtgaaaatggaggccagtgtcttacaccagatatttgccagtgcaaacctggctggtatggacccacctgtagtacagctttgtgcgaccctgtctgcctcaatggtggttcgtgtaataagccaaatacttgcctctgtccaaatggattctttggggaacactgtcagaatgctttctgtcaccctccctgtaagaatggtggccactgcatgagaaataatgtgtgcgtctgtcgtgaaggatacactggtaggagattccaaaaaagcatctgtgatcctacgtgcatgaatggaggaaaatgtgtgggaccaagcacttgctcttgtccttctggttggagtgggaaacgatgcaacacacctatctgcttgcagaaatgtaaaaacggtggtgaatgcattgcgcccagcatatgccattgtccttcctcctgggaaggagtgcggtgtcaaataccaatttgcaacccaaaatgtctttatggaggcagatgcatatttcccaatgtgtgttcctgccgcactgaatactctggagtcaaatgtgagaagaaaatacagataagacgccattgagtagcatcaagtatatgaattacaagcctgtatcttaagaatggaaatattttgttcagaaaaagttggagataacttggagtttatttgaacatcattcaaaaaatatcttaaagactgaagaaactaataaaatacataatgatctctgttgtaatcatagagaaaagcaaagaagaaatccaggtaatctaaatttgatgttgagatgggataggatatttacatattgagatgatgtatctgatattccacccattcacaatatttaataaactgaatattttctcagccctaa

SEQ ID NO: 199383 - DNA, 1394 bp, Homo sapiens
  Payload ID: 19337
  Gene Name: von Willebrand factor D and EGF domains
  ENST ID: ENST00000326715
  CDS Start-End: 9-521
aagcagcgatgcctggcggagcctgcgtgctggtgatcgcgctgatgttcctggcctggggggaagctcaggagtgctctcctgggggacaccagtttcttcggagtccttatagaagtgtccgttttgactcatggcacctccagcagtcagctgttcaagacctaatatgtgaccattccctctcccctggatggtatagatttctcatccttgacagacctgccgagatgccaaccaaatgtgttgagatgaaccattgtggaactcaggcccccatctggctgtctctgagagattcagaaacactgccatctcctggggagatcaagcaattgacagcttgtgcaacatggcagtttttgttcagcactacaaaagactgctgtctctttcaaatcccagtgtctgtaagaaactgtgggaacttttctgtatacttactacaaccaactcagggatgtatgggctactgtgcggaagggttctttgccaagattgtaaagtccccccacacgtgaaagcatcaaaacagacatctcacatttttccactggacataatgattgagtgtgttaaaaattctttggtttcctcaagtccattcctgttttaattaaaggatgaagaaggctatttctgatgcacgattacacccatgtggttctgatgaaactgaaacaggaggtgattgtgttcgtcagctggctgcctcattgccacctccacctgcaggaaggccagaggttctggtggagttgattgagtccaggcttttctgtaggtgttcttttgatgttcccgctacaaaaaactcagtgggatttcacatagcttggtctaggctttcttctcaagaagtcaaagaggagctgacacaagagaccacagttcaggcattctctcttttagaacttgatggcataaatctcagacttggagacaggatattctgcagcgcttctgtctttttcttggagaatcctcatgtacaaagtgtagccatcgaaagccaagaattttttgcaggctttaagctacagcctgaattgagcactatatcagaggatgggaaagaatactacctgaggatagaaagcacagttcctattatttgttctgaatttagtgagcttgatcaagaatgcaaaatctcattaaaactgaaaactattggtcaaggtaatatactaactttattttatcttattattagattgcaaacaataatgcttttttttcctgtaggaaaagtcactggagtgtactcatataataaatcatgttgcatgttgacatcaaattttagcccaatcatattactaatactcggccaaactgacgattgccaaagcaattcacatttcttcttcttggctgaaagcatacatttt

SEQ ID NO: 199384 - DNA, 5936 bp, Homo sapiens
  Payload ID: 19337
  Gene Name: von Willebrand factor D and EGF domains
  ENST ID: ENST00000452576
  CDS Start-End: 226-4134
cagccaaaatgggaagggaggagtcgcagacggattacgcgaaggctctatcccacgaaaggactgggtgcaccccagaacgaggacgcggagcttccctgttccaagcagcaacagactgagaaaatccaagaaaggaggcccgaggggctgctgtggccccatcctcctggcacccgcggcccgggctctgcgacgcctttcgccccacctgcggaagcagcgatgcctggcggagcctgcgtgctggtgatcgcgctgatgttcctggcctggggggaagctcaggagtgctctcctgggggacaccagtttcttcggagtccttatagaagtgtccgttttgactcatggcacctccagcagtcagctgttcaagacctaatatgtgaccattccctctcccctggatggtatagatttctcatccttgacagacctgccgagatgccaaccaaatgtgttgagatgaaccattgtggaactcaggcccccatctggctgtctctgagagattcagaaacactgccatctcctggggagatcaagcaattgacagcttgtgcaacatggcagtttttgttcagcactacaaaagactgctgtctctttcaaatcccagtgtctgtaagaaactgtgggaacttttctgtatacttactacaaccaactcagggatgtatgggctactgtgcggaagctatttctgatgcacgattacacccatgtggttctgatgaaactgaaacaggaggtgattgtgttcgtcagctggctgcctcattgccacctccacctgcaggaaggccagaggttctggtggagttgattgagtccaggcttttctgtaggtgttcttttgatgttcccgctacaaaaaactcagtgggatttcacatagcttggtctaggctttcttctcaagaagtcaaagaggagctgacacaagagaccacagttcaggcattctctcttttagaacttgatggcataaatctcagacttggagacaggatattctgcagcgcttctgtctttttcttggagaatcctcatgtacaaagtgtagccatcgaaagccaagaattttttgcaggctttaagctacagcctgaattgagcactatatcagaggatgggaaagaatactacctgaggatagaaagcacagttcctattatttgttctgaatttagtgagcttgatcaagaatgcaaaatctcattaaaactgaaaactattggtcaaggtagagagcacctaggcttaaatttggcactgtcttcctgtcatgtggaccttctccagacatcttcctgtgctaatggaacctgtagccacacttttgtgtactacactgctgtcacagatttttctcgagatggagatagagtctcaaacattgtagtgcaaccaatagttaatgaggatttcctgtggaacaactacattccagacagcatccagatcaaagtaaaggatgtcccaactgcttactgctatacatttactgacccacatataattacatttgatggcagggtatatgataatttcaagactggaacatttgtgctttataagagtatgtcacgtgattttgaagtccatgtacgtcagtgggactgcagaagccttcactatccagtgtcatgtaattgtgggtttgttgcccaggaaggaggtgatatagttacttttgatatgtgcaatggtcagctacgtgaatcacaaccatatttgttcataaaaagccaagatgtaaccaggaatatcaagataagtgaatcttacttaggaagaaaagtcacaatctggttttcttctggggcatttatccgtgctgatcttggtgaatggggcatgagtctaacgatcagagcccctagtgtagattacagaaacactctgggactttgtggaacctttgatgaaaatccggaaaatgatttccatgacaaaaatgggatgcaaattgatcaaaattttaacaattatgttgcttttattaatgaatggaggattttaccaggaaaaagcatgtctgacacactgccagtttctatgacatcacctggaaagccatcctattgtagctgttcattggacactgcagcgtatccgtcttccgaagatctggacagtgtttctcgatcagaaattgccttgggttgcaaagacctcaatcatgtcagcttatcttctttgataccagaactagatgtcacctccgaatatattaattcagacactcttgtcagagagataaacaagcatacatctccagaagaatataatctaaatttatttctgcaagaaaaaaaacacataaacctgactaaactcggcttaaatgtacaaaaacatcctggaaatgagaaagaagattcactacaatatttggccaataagaaatatacacaaggccggggaagccacagccaagaaatgaggtacaatcgacaaaacagatggaaacggcagaactttcatgagtttcctcctttgtttgctttcccgagtctcagccaaacggatctggaagaacttacttattttttcccagaggaccatgctgaggatgtacagcaagagtttttcccctcttggcccactccctctggcctcaccgagtatagcaccttgaccctctgtcaggagactctagccaactccagcataggaaggctgtgtcttgcttttcttggcaagagattagacagtgttatagagatgtgtgtgaaggatgttctgttaaaagatgatcttagttgggcagaagcaggtgtggcccttttagaaaatgaatgtgaaaagaggattgtggaggaggggaaatataacacagaagagtatggcacatcaattgaagacattctctcagtattaaaatgccccaatttatgcagcggcaatgggcagtgcatggaatgggggtgtgcgtgttccccaagctttagttcctatgactgcagtgattcctatgacaaagctcctgaaattacagagcttgggaatgctggattctgtgatgttcaaaaatataattgtatgatggtgagagtttttggcaaaggcttcaaagaattaccttcaattaaatgtgaagttactaagctacagtataatagcagtgaatggatgcctggagaacccatctatacacagactgttttccacaatagcagagctgttgattgtcagctgcccactgatgttcagcagtttgataccatggatctggtgggtgggaaaccaactgggaagtggcagttgaaggtatctaatgatggttataaattcagtaatcccaaaataacggtcatatatgatggtgcttgccaagtttgtggtctctataaaaatgactcatgtactataaaggaaaatgtttgcattattgatggactctgctatgttgaaggagacaaaaatccaaccagcccttgtttgatttgtagacccaaaatttcaagatttacttggtcatttttagaaaacaaccagcccccagtgattcaagcattgcaagacaaattacagacattttatggtgaaaactttgagtatcagttcgtggccttcgatccagaaggttctgacatccattttacgttggactctggtcctgaaggggcaagtgtttcctctgcagggctttttatgtggaaaacagatttactaactacccaacaaattactgtacgccttaatgatgactgcgatgctgaaactagagtcacgattgaggtgactgtgaagtcttgtgattgcttgaatggtggatcatgtgtatctgataggaacttttctccagggagtggagtgtacctgtgtgtctgcttgcctggcttccatggcagcctttgtgaagtggacattagtgggtgccaatccaacccttgtggtcttggcagctatattagtggttttcacagttattcctgtgattgtccacctgagctcaaaggcaaaaattgccaggaagatgttgatgagtgtgactccaagccttgctttgagggagtagcatgcctgaatacctttggttcctatcattgtggttcatgtccagaaggattttatggggatggaaaaatatgccatggtaaaagtttctattttctgctatgagattttttttgctgcagttaattattttttaatagcatagtttctgtttttgactcatgtatttatttagtgtaaatgcattaagtgtcatgcattgaactagatacaaaggatgcaaaaatatataagacatgttttctgacttaataggtagagtgtaacagcagggaatatgactagtaattacagagtataataaagtgttctgtgtcttttgatagaaatcacaaaagggctagtaggaatactacacagggaatcttatctacctggagaaataatgaaaaagttttaaaaaaggaagcgactagactatactagacacatgagaactgaatctgatagatcaagagagagaaaggcattccaggcaaaaccaacagcaggagcaaagggacagaagcaggcaacatcacagcactccttgggcagccagccactgtgaatagttcagtgtgcctggaatataggaagaaaggggagctgctacaagagttggagctagagagttgaaacacagtttgtaaatcaatttactacacaaactgtggttctcacaagatctgataaaagtgtaaataaagaagaggatgataaaaatgcccaagggagaaagaggcatgttaagccaacaagtggaaatgccttcaccatttgtaaatatccatgtggaaaaagtagggagtgtgttgccccaaacatctgcaaatgtaaacctggttacattggttctaactgccaaactgctctttgtgaccctgattgcaaaaaccatggaaaatgtattaagcctaacatttgtcagtgtcttccaggacatggtggagcaacctgtgatgaagaacattgtaacccaccttgtcaacatggtggcacatgcttggctgggaatctctgcacttgtccttatggttttgtaggaccaaggtgtgaaacaatggtttgtaacaggcactgtgaaaatggaggccagtgtcttacaccagatatttgccagtgcaaacctggctggtatggacccacctgtagtacagctttgtgcgaccctgtctgcctcaatggtggttcgtgtaataagccaaatacttgcctctgtccaaatggattctttggggaacactgtcagaatgctttctgtcaccctccctgtaagaatggtggccactgcatgagaaataatgtgtgcgtctgtcgtgaaggatacactggtaggagattccaaaaaagcatctgtgatcctacgtgcatgaatggaggaaaatgtgtgggaccaagcacttgctcttgtccttctggttggagtgggaaacgatgcaacacacctatctgcttgcagaaatgtaaaaacggtggtgaatgcattgcgcccagcatatgccattgtccttcctcctgggaaggagtgcggtgtcaaataccaatttgcaacccaaaatgtctttatggaggcagatgcatatttcccaatgtgtgttcctgccgcactgaatactctggagtcaaatgtgagaagaaaatacagataagacgccattgagtagcatcaagtatatgaattacaagcctgtatcttaagaatggaaatattttgttcagaaaaagttggagataacttggagtttatttgaacatcattcaaaaaatatcttaaagactgaagaaactaataaaatacataatgatctctgttgtaatcatagagaaaagcaaagaagaaatccaggtaatctaaatttgatgttgagatgggataggatatttacatattgagatgatgtatctgatattccacccattcacaa

SEQ ID NO: 199385 - DNA, 4700 bp, Homo sapiens
  Payload ID: 19337
  Gene Name: von Willebrand factor D and EGF domains
  ENST ID: ENST00000521169
  CDS Start-End: 226-1284
cagccaaaatgggaagggaggagtcgcagacggattacgcgaaggctctatcccacgaaaggactgggtgcaccccagaacgaggacgcggagcttccctgttccaagcagcaacagactgagaaaatccaagaaaggaggcccgaggggctgctgtggccccatcctcctggcacccgcggcccgggctctgcgacgcctttcgccccacctgcggaagcagcgatgcctggcggagcctgcgtgctggtgatcgcgctgatgttcctggcctggggggaagctcaggagtgctctcctgggggacaccagtttcttcggagtccttatagaagtgtccgttttgactcatggcacctccagcagtcagctgttcaagacctaatatgtgaccattccctctcccctggatggtatagatttctcatccttgacagacctgccgagatgccaaccaaatgtgttgagatgaaccattgtggaactcaggcccccatctggctgtctctgagagattcagaaacactgccatctcctggggagatcaagcaattgacagcttgtgcaacatggcagtttttgttcagcactacaaaagactgctgtctctttcaaatcccagtgtctgtaagaaactgtgggaacttttctgtatacttactacaaccaactcagggatgtatgggctactgtgcggaagctatttctgatgcacgattacacccatgtggttctgatgaaactgaaacaggaggtgattgtgttcgtcagctggctgcctcattgccacctccacctgcaggaaggccagaggttctggtggagttgattgagtccaggcttttctgtaggtgttcttttgatgttcccgctacaaaaaactcagtgggatttcacatagcttggtctaggctttcttctcaagaagtcaaagaggagctgacacaagagaccacagttcaggcattctctcttttagaacttgatggcataaatctcagacttggagacaggatattctgcagcgcttctgtctttttcttggagaatcctcatgtacaaagtgtagccatcgaaagccaagaattttttgcaggctttaagctacagcctgaattgagcactatatcagaggatgggaaagaatactacctgaggatagaaagcacagttcctattatttgttctgaatttagtgagcttgatcaagaatgcaaaatctcattaaaactgaaaactattggtcaagatctggttttcttctggggcatttatccgtgctgatcttggtgaatggggcatgagtctaacgatcagagcccctagtgtagattacagaaacactctgggactttgtggaacctttgatgaaaatccggaaaatgatttccatgacaaaaatgggatgcaaattgatcaaaattttaacaattatgttgcttttattaatgaatggaggattttaccaggaaaaagcatgtctgacacactgccagtttctatgacatcacctggaaagccatcctattgtagctgttcattggacactgcagcgtatccgtcttccgaagatctggacagtgtttctcgatcagaaattgccttgggttgcaaagacctcaatcatgtcagcttatcttctttgataccagaactagatgtcacctccgaatatattaattcagacactcttgtcagagagataaacaagcatacatctccagaagaatataatctaaatttatttctgcaagaaaaaaaacacataaacctgactaaactcggcttaaatgtacaaaaacatcctggaaatgagaaagaagattcactacaatatttggccaataagaaatatacacaaggccggggaagccacagccaagaaatgaggtacaatcgacaaaacagatggaaacggcagaactttcatgagtttcctcctttgtttgctttcccgagtctcagccaaacggatctggaagaacttacttattttttcccagaggaccatgctgaggatgtacagcaagagtttttcccctcttggcccactccctctggcctcaccgagtatagcaccttgaccctctgtcaggagactctagccaactccagcataggaaggctgtgtcttgcttttcttggcaagagattagacagtgttatagagatgtgtgtgaaggatgttctgttaaaagatgatcttagttgggcagaagcaggtgtggcccttttagaaaatgaatgtgaaaagaggattgtggaggaggggaaatataacacagaagagtatggcacatcaattgaagacattctctcagtattaaaatgccccaatttatgcagcggcaatgggcagtgcatggaatgggggtgtgcgtgttccccaagctttagttcctatgactgcagtgattcctatgacaaagctcctgaaattacagagcttgggaatgctggattctgtgatgttcaaaaatataattgtatgatggtgagagtttttggcaaaggcttcaaagaattaccttcaattaaatgtgaagttactaagctacagtataatagcagtgaatggatgcctggagaacccatctatacacagactgttttccacaatagcagagctgttgattgtcagctgcccactgatgttcagcagtttgataccatggatctggtgggtgggaaaccaactgggaagtggcagttgaaggtatctaatgatggttataaattcagtaatcccaaaataacggtcatatatgatggtgcttgccaagtttgtggtctctataaaaatgactcatgtactataaaggaaaatgtttgcattattgatggactctgctatgttgaaggagacaaaaatccaaccagcccttgtttgatttgtagacccaaaatttcaagatttacttggtcatttttagaaaacaaccagcccccagtgattcaagcattgcaagacaaattacagacattttatggtgaaaactttgagtatcagttcgtggccttcgatccagaaggttctgacatccattttacgttggactctggtcctgaaggggcaagtgtttcctctgcagggctttttatgtggaaaacagatttactaactacccaacaaattactgtacgccttaatgatgactgcgatgctgaaactagagtcacgattgaggtgactgtgaagtcttgtgattgcttgaatggtggatcatgtgtatctgataggaacttttctccagggagtggagtgtacctgtgtgtctgcttgcctggcttccatggcagcctttgtgaagtggacattagtgggtgccaatccaacccttgtggtcttggcagctatattagtggttttcacagttattcctgtgattgtccacctgagctcaaagttgaaacacagtttgtaaatcaatttactacacaaactgtggttctcacaagatctgataaaagtgtaaataaagaagaggatgataaaaatgcccaagggagaaagaggcatgttaagccaacaagtggaaatgccttcaccatttgtaaatatccatgtggaaaaagtagggagtgtgttgccccaaacatctgcaaatgtaaacctggttacattggttctaactgccaaactgctctttgtgaccctgattgcaaaaaccatggaaaatgtattaagcctaacatttgtcagtgtcttccaggacatggtggagcaacctgtgatgaagaacattgtaacccaccttgtcaacatggtggcacatgcttggctgggaatctctgcacttgtccttatggttttgtaggaccaaggtgtgaaacaatggtttgtaacaggcactgtgaaaatggaggccagtgtcttacaccagatatttgccagtgcaaacctggctggtatggacccacctgtagtacagctttgtgcgaccctgtctgcctcaatggtggttcgtgtaataagccaaatacttgcctctgtccaaatggattctttggggaacactgtcagaatgctttctgtcaccctccctgtaagaatggtggccactgcatgagaaataatgtgtgcgtctgtcgtgaaggatacactggtaggagattccaaaaaagcatctgtgatcctacgtgcatgaatggaggaaaatgtgtgggaccaagcacttgctcttgtccttctggttggagtgggaaacgatgcaacacacctatctgcttgcagaaatgtaaaaacggtggtgaatgcattgcgcccagcatatgccattgtccttcctcctgggaaggagtgcggtgtcaaataccaatttgcaacccaaaatgtctttatggaggcagatgcatatttcccaatgtgtgttcctgccgcactgaatactctggagtcaaatgtgagaagaaaatacagataagacgccattgagtagcatcaagtatatgaattacaagcctgtatcttaagaatggaaatattttgttcagaaaaagttggagataacttggagtttatttgaacatcattcaaaaaatatcttaaagactgaagaaactaataaaatacataatgatctctgttgtaatcatagagaaaagcaaagaagaaatccaggtaatctaaatttgatgttgagatgggataggatatttacatattgagatgatgtatctgatattccacccattcacaa

SEQ ID NO: 199386 - DNA, 4701 bp, Homo sapiens
  Payload ID: 19337
  Gene Name: von Willebrand factor D and EGF domains
  ENST ID: ENST00000614403
  CDS Start-End: 1301-4135
cagccaaaatgggaagggaggagtcgcagacggattacgcgaaggctctatcccacgaaaggactgggtgcaccccagaacgaggacgcggagcttccctgttccaagcagcaacagactgagaaaatccaagaaaggaggcccgaggggctgctgtggccccatcctcctggcacccgcggcccgggctctgcgacgcctttcgccccacctgcggaagcagcgatgcctggcggagcctgcgtgctggtgatcgcgctgatgttcctggcctggggggaagctcaggagtgctctcctgggggacaccagtttcttcggagtccttatagaagtgtccgttttgactcatggcacctccagcagtcagctgttcaagacctaatatgtgaccattccctctcccctggatggtatagatttctcatccttgacagacctgccgagatgccaaccaaatgtgttgagatgaaccattgtggaactcaggcccccatctggctgtctctgagagattcagaaacactgccatctcctggggagatcaagcaattgacagcttgtgcaacatggcagtttttgttcagcactacaaaagactgctgtctctttcaaatcccagtgtctgtaagaaactgtgggaacttttctgtatacttactacaaccaactcagggatgtatgggctactgtgcggaagctatttctgatgcacgattacacccatgtggttctgatgaaactgaaacaggaggtgattgtgttcgtcagctggctgcctcattgccacctccacctgcaggaaggccagaggttctggtggagttgattgagtccaggcttttctgtaggtgttcttttgatgttcccgctacaaaaaactcagtgggatttcacatagcttggtctaggctttcttctcaagaagtcaaagaggagctgacacaagagaccacagttcaggcattctctcttttagaacttgatggcataaatctcagacttggagacaggatattctgcagcgcttctgtctttttcttggagaatcctcatgtacaaagtgtagccatcgaaagccaagaattttttgcaggctttaagctacagcctgaattgagcactatatcagaggatgggaaagaatactacctgaggatagaaagcacagttcctattatttgttctgaatttagtgagcttgatcaagaatgcaaaatctcattaaaactgaaaactattggtcaagatctggttttcttctggggcatttatccgtgctgatcttggtgaatggggcatgagtctaacgatcagagcccctagtgtagattacagaaacactctgggactttgtggaacctttgatgaaaatccggaaaatgatttccatgacaaaaatgggatgcaaattgatcaaaattttaacaattatgttgcttttattaatgaatggaggattttaccaggaaaaagcatgtctgacacactgccagtttctatgacatcacctggaaagccatcctattgtagctgttcattggacactgcagcgtatccgtcttccgaagatctggacagtgtttctcgatcagaaattgccttgggttgcaaagacctcaatcatgtcagcttatcttctttgataccagaactagatgtcacctccgaatatattaattcagacactcttgtcagagagataaacaagcatacatctccagaagaatataatctaaatttatttctgcaagaaaaaaaacacataaacctgactaaactcggcttaaatgtacaaaaacatcctggaaatgagaaagaagattcactacaatatttggccaataagaaatatacacaaggccggggaagccacagccaagaaatgaggtacaatcgacaaaacagatggaaacggcagaactttcatgagtttcctcctttgtttgctttcccgagtctcagccaaacggatctggaagaacttacttattttttcccagaggaccatgctgaggatgtacagcaagagtttttcccctcttggcccactccctctggcctcaccgagtatagcaccttgaccctctgtcaggagactctagccaactccagcataggaaggctgtgtcttgcttttcttggcaagagattagacagtgttatagagatgtgtgtgaaggatgttctgttaaaagatgatcttagttgggcagaagcaggtgtggcccttttagaaaatgaatgtgaaaagaggattgtggaggaggggaaatataacacagaagagtatggcacatcaattgaagacattctctcagtattaaaatgccccaatttatgcagcggcaatgggcagtgcatggaatgggggtgtgcgtgttccccaagctttagttcctatgactgcagtgattcctatgacaaagctcctgaaattacagagcttgggaatgctggattctgtgatgttcaaaaatataattgtatgatggtgagagtttttggcaaaggcttcaaagaattaccttcaattaaatgtgaagttactaagctacagtataatagcagtgaatggatgcctggagaacccatctatacacagactgttttccacaatagcagagctgttgattgtcagctgcccactgatgttcagcagtttgataccatggatctggtgggtgggaaaccaactgggaagtggcagttgaaggtatctaatgatggttataaattcagtaatcccaaaataacggtcatatatgatggtgcttgccaagtttgtggtctctataaaaatgactcatgtactataaaggaaaatgtttgcattattgatggactctgctatgttgaaggagacaaaaatccaaccagcccttgtttgatttgtagacccaaaatttcaagatttacttggtcatttttagaaaacaaccagcccccagtgattcaagcattgcaagacaaattacagacattttatggtgaaaactttgagtatcagttcgtggccttcgatccagaaggttctgacatccattttacgttggactctggtcctgaaggggcaagtgtttcctctgcagggctttttatgtggaaaacagatttactaactacccaacaaattactgtacgccttaatgatgactgcgatgctgaaactagagtcacgattgaggtgactgtgaagtcttgtgattgcttgaatggtggatcatgtgtatctgataggaacttttctccagggagtggagtgtacctgtgtgtctgcttgcctggcttccatggcagcctttgtgaagtggacattagtgggtgccaatccaacccttgtggtcttggcagctatattagtggttttcacagttattcctgtgattgtccacctgagctcaaagttgaaacacagtttgtaaatcaatttactacacaaactgtggttctcacaagatctgataaaagtgtaaataaagaagaggatgataaaaatgcccaagggagaaagaggcatgttaagccaacaagtggaaatgccttcaccatttgtaaatatccatgtggaaaaagtagggagtgtgttgccccaaacatctgcaaatgtaaacctggttacattggttctaactgccaaactgctctttgtgaccctgattgcaaaaaccatggaaaatgtattaagcctaacatttgtcagtgtcttccaggacatggtggagcaacctgtgatgaagaacattgtaacccaccttgtcaacatggtggcacatgcttggctgggaatctctgcacttgtccttatggttttgtaggaccaaggtgtgaaacaatggtttgtaacaggcactgtgaaaatggaggccagtgtcttacaccagatatttgccagtgcaaacctggctggtatggacccacctgtagtacagctttgtgcgaccctgtctgcctcaatggtggttcgtgtaataagccaaatacttgcctctgtccaaatggattctttggggaacactgtcagaatgctttctgtcaccctccctgtaagaatggtggccactgcatgagaaataatgtgtgcgtctgtcgtgaaggatacactggtaggagattccaaaaaaggcatctgtgatcctacgtgcatgaatggaggaaaatgtgtgggaccaagcacttgctcttgtccttctggttggagtgggaaacgatgcaacacacctatctgcttgcagaaatgtaaaaacggtggtgaatgcattgcgcccagcatatgccattgtccttcctcctgggaaggagtgcggtgtcaaataccaatttgcaacccaaaatgtctttatggaggcagatgcatatttcccaatgtgtgttcctgccgcactgaatactctggagtcaaatgtgagaagaaaatacagataagacgccattgagtagcatcaagtatatgaattacaagcctgtatcttaagaatggaaatattttgttcagaaaaagttggagataacttggagtttatttgaacatcattcaaaaaatatcttaaagactgaagaaactaataaaatacataatgatctctgttgtaatcatagagaaaagcaaagaagaaatccaggtaatctaaatttgatgttgagatgggataggatatttacatattgagatgatgtatctgatattccacccattcacaa

SEQ ID NO: 199387 - DNA, 4114 bp, Homo sapiens
  Payload ID: 19338
  Gene Name: Vpr (HIV-1) binding protein
  Uniprot ID: Q9Y4B6
  ENST ID: ENST00000335891
  CDS Start-End: 11-3187
aggcaaagccatgactacagtagtggtacatgtggactccaaagctgagctcactaccctgctggagcagtgggaaaaggaacatggcagtgggcaggacatggtacctatccttaccaggatgtctcaattgattgaaaaagaaactgaagagtatcgtaaaggggatccagacccatttgatgatcgacatcctggtcgagctgatccagagtgtatgctgggccacttgctgagaatactcttcaagaatgatgatttcatgaatgcactggtgaatgcatatgtgatgacaagccgagagccccctttaaacactgcagcttgcagactcctattagacatcatgccagggctggaaactgctgtcgtctttcaagaaaaggagggaattgtcgagaatcttttcaaatgggcccgagaggccgatcaaccattgaggacatattctactggactgttaggaggtgctatggaaaatcaagacattgctgccaactatagagatgaaaattcacagctggtggcaatagtgcttcgaagactgagggagctacagctacaggaagtggctttgcggcaggaaaacaagcgtcccagtccacggaagctctcttctgaaccccttttgcctctggatgaggaggctgtggatatggactatggtgacatggctgtagatgatgctgaaattcagaagtcagcacttcagattatcatcaattgtgtgtgtggcccagataaccgaatatccagtattggtaaatttatctctggtactcctcggagaaagctgcctcagaaccctaaaagcagtgagcacaccctggccaagatgtggaatgtggttcagtccaacaacggcatcaaggtgctcctgtccttactgtccattaagatgcccatcacagatgcagaccaaatccgggccctggcctgcaaagccctagtgggcctgtctcgcagtagcactgtccggcagatcatcagtaaactgccccttttcagcagctgccagatccagcagctgatgaaggagcctgtgctgcaggacaagcgcagtgaccatgtcaagttctgcaagtatgctgctgaactcattgaacgggtgtcaggaaaaccacttctcattggcactgatgtttccctagcacgactgcagaaagcagatgttgttgcccagtcaaggatctccttccctgagaaagagctgcttttgttgatacgaaaccatcttatttctaaagggcttggagaaacagcaaccgtgctgacaaaagaggctgacctgcccatgactgctgcctcccattcttctgcctttaccccagtcactgctgctgcttctcctgtctctctaccccgaacccctcgtatcgctaatggcattgcaactcgtctgggcagccatgctgctgtgggtgcctctgcgccttctgcccctactgctcatcctcagccacggcccccccagggtccgctagctctgcccggcccatcttatgcaggcaactcccctttgattggtagaatcagttttatcagagagaggccatcaccctgcaatggcaggaaaatcagagtgttgcggcagaagtcggaccatggtgcctacagccaaagcccagccataaaaaaacagctggacagacatcttccttccccacctacgctggacagtataatcacagagtatcttagagaacaacatgctcgctgcaagaatccagttgccacctgcccacctttctccctctttactcctcaccaatgtcctgagccaaaacagaggcggcaagcgccaataaactttacgtcaaggctaaaccgcagggcatcatttccaaagtatggaggggtggatggcggatgctttgataggcaccttatctttagcagattccgtcctatttcagtgttccgggaagccaatgaagatgagagtggcttcacctgctgtgcattctcagcacgggagcggttcctgatgcttggcacctgcacagggcagctgaagctctataatgtgtttagtggacaggaggaggccagctataactgtcacaactcagccatcacacatcttgaaccttccagggatgggtccttgctgctgacatctgctacttggagccagcctttgtctgcactttggggaatgaagtcagtatttgatatgaagcattccttcacagaagatcactatgttgagttcagtaagcactcccaggatcgggtcatcggcacaaaaggagacattgcccacatttatgatattcagactggcaacaagctgttgactctgtttaacccagatcttgccaacaactacaagaggaactgtgccacctttaatcctacagatgatcttgtcttaaatgatggcgtcctctgggatgtccgctctgcacaggccatccacaagtttgacaagttcaatatgaacatcagtggtgttttccatccaaatggactggaggtgatcattaatactgagatttgggaccttcgaacttttcatcttttgcatactgttcccgctctggatcagtgtcgcgtggtgttcaatcacacgggaacagtgatgtatggagctatgttgcaggcagatgatgaagatgacttaatggaagagaggatgaaaagcccctttgggtcatccttccgaacatttaatgcaactgactacaaacctatagcaaccattgatgtgaaacggaacatctttgacctgtgtacagacaccaaagactgctatcttgctgtcattgagaatcaaggcagcatggatgccctgaacatggacacagtatgcaggctgtatgaagtgggcaggcagcgtctggcagaggatgaggatgaagaggaggaccaggaagaggaagaacaggaggaagaagatgatgatgaagatgatgatgacaccgatgatttagatgagcttgacactgaccagttgctggaggcggagttggaggaggacgacaataatgagaacgcaggggaagatggggacaatgacttctctccctctgatgaggagctagcaaaccttctagaggagggagaggacggggaggatgaagactctgatgcagatgaggaggtggaactgatcctgggggacactgacagctctgacaactctgatttggaagatgacatcatcttatctctgaatgagtgaggagccatcactgcttggaagagattcttggcaggcgagaaactgagtcaaatgaattcagaacatattcccttctctttctcccagggctgtctgtcttttaaggagctgcatgccctgcattcagaagattatggcttagagagcctcattggcacccgagggtccttccagaatcaataaccaccacaaaaatgacaacagggactaggccctactctgcaccccccacatccaccccccaccatttcctaggatggacatatctttcaaggggaaaaaaaaaccatgtctctggggtatttcacaatatattttctttgtatagtgttctttacttaaagaacaagaaatagttttttataaaactttaaaaaggaaaaaaaaacaggcatttataactgagggtatgaacttatatccaccaggtctcttgtccctgcacttcattttctttggaagaaaatgatgtctaaagaacaatatagaggcatttttacatacgtatttaaatgaaaaggaaaatcgtggtttcttaaattgataaggattaagaatattttattataaatataatatatgattttttaacctgttttgttgcctcatatgctgtcaggttaatttgttttccttcgtgccagaggtggggaggaaggcactctgtctgctgggtaaatgcctaaattcactcaccttcatggtttgggggcagcatggtcattgtggatattggttttgtggagttgagggaacttaggatataagttcactccctctatttttctttgtgattcagtttttcaaaaatctttttttcttccctttctccccattgtggaaattacaaatcaaaggcctttttctttaatgtaaagtgtatttatttaaaaaaaatacaaaataaactacaagtctgtctttgtt

SEQ ID NO: 199388 - DNA, 5946 bp, Homo sapiens
  Payload ID: 19338
  Gene Name: Vpr (HIV-1) binding protein
  Uniprot ID: Q9Y4B6
  ENST ID: ENST00000423656
  CDS Start-End: 131-4654
agccgtggtcgcgctgtgtgtgtgtgtgagtggagagtgagtgcgggacctgaggctgtgtgtgtgtgaactgtggccactggcggggtcgggggggggcagcggcggagccgcctcggacggcaaagccatgactacagtagtggtacatgtggactccaaagctgagctcactaccctgctggagcagtgggaaaaggaacatggcagtgggcaggacatggtacctatccttaccaggatgtctcaattgattgaaaaagaaactgaagagtatcgtaaaggggatccagacccatttgatgatcgacatcctggtcgagctgatccagagtgtatgctgggccacttgctgagaatactcttcaagaatgatgatttcatgaatgcactggtgaatgcatatgtgatgacaagccgagagccccctttaaacactgcagcttgcagactcctattagacatcatgccagggctggaaactgctgtcgtctttcaagaaaaggagggaattgtcgagaatcttttcaaatgggcccgagaggccgatcaaccattgaggacatattctactggactgttaggaggtgctatggaaaatcaagacattgctgccaactatagagatgaaaattcacagctggtggcaatagtgcttcgaagactgagggagctacagctacaggaagtggctttgcggcaggaaaacaagcgtcccagtccacggaagctctcttctgaaccccttttgcctctggatgaggaggctgtggatatggactatggtgacatggctgtagatgtagtggatggagaccaagaggaagcttctggagacatggagatctcctttcatcttgattcaggccacaagactagtagcagagtgaactcaacaaccaaacctgaggatggaggattaaagaaaaacaagtcagcaaaacagggtgacagagagaactttaggaaagccaagcaaaagttgggtttctcatcttctgatccagatcgcatgtttgttgagctgtctaatagcagttggtcagaaatgtctccctgggtgattggcaccaattataccctttatcctatgactcctgctatcgagcagcgactcattctccaatatttgacccctctaggagaatatcaggagctacttcccatattcatgcaacttggatcacgggagctgatgatgttctatattgacctgaagcaaactaatgatgtcctgcttacatttgaggcactaaagcacctagcatctctcctgctccataacaaatttgccacagaatttgttgcgcatggtggagtacagaaattactggaaatacctcgtccttctatggctgcaaccggtgtgtctatgtgtttgtattacctatcctacaatcaggatgccatggaaagagtttgcatgcatccccacaatgttctgtctgatgtggtgaactataccctgtggttaatggagtgttctcatgcttcaggatgctgccatgctaccatgtttttttcaatttgcttctcatttcgggccgtcttggagctctttgaccgctatgatggtcttcgtcgtctggtgaacttgatcagtactttggagattctaaatttggaagatcagggtgcacttctgagtgatgatgaaatatttgctagccgccaaactgggaaacatacctgcatggccttgcgcaaatactttgaggctcacctggccattaaattggaacaagtgaagcagtcacttcagaggactgagggtggcattcttgtccacccacaacccccgtacaaggcatgctcatatactcatgaacagattgtggaaatgatggaatttttgatagaatatggcccagcgcagctatattgggaaccagctgaagttttcctcaaactttcttgtgtgcaactcttgttgcagcttatttctattgcctgcaattggaagacctattatgcaaggaatgacactgtgcgctttgctttggatgtcctggctattcttactgtggtgccaaaaatccagctccagttggcagaatcagtggacgtgttggatgaggctggatctacagtctctactgtaggtatcagcattattttgggagtggctgagggtgagttcttcatccatgatgctgaaattcagaagtcagcacttcagattatcatcaattgtgtgtgtggcccagataaccgaatatccagtattggtaaatttatctctggtactcctcggagaaagctgcctcagaaccctaaaagcagtgagcacaccctggccaagatgtggaatgtggttcagtccaacaacggcatcaaggtgctcctgtccttactgtccattaagatgcccatcacagatgcagaccaaatccgggccctggcctgcaaagccctagtgggcctgtctcgcagtagcactgtccggcagatcatcagtaaactgccccttttcagcagctgccagatccagcagctgatgaaggagcctgtgctgcaggacaagcgcagtgaccatgtcaagttctgcaagtatgctgctgaactcattgaacgggtgtcaggaaaaccacttctcattggcactgatgtttccctagcacgactgcagaaagcagatgttgttgcccagtcaaggatctccttccctgagaaagagctgcttttgttgatacgaaaccatcttatttctaaagggcttggagaaacagcaaccgtgctgacaaaagaggctgacctgcccatgactgctgcctcccattcttctgcctttaccccagtcactgctgctgcttctcctgtctctctaccccgaacccctcgtatcgctaatggcattgcaactcgtctgggcagccatgctgctgtgggtgcctctgcgccttctgcccctactgctcatcctcagccacggcccccccagggtccgctagctctgcccggcccatcttatgcaggcaactcccctttgattggtagaatcagttttatcagagagaggccatcaccctgcaatggcaggaaaatcagagtgttgcggcagaagtcggaccatggtgcctacagccaaagcccagccataaaaaaacagctggacagacatcttccttccccacctacgctggacagtataatcacagagtatcttagagaacaacatgctcgctgcaagaatccagttgccacctgcccacctttctccctctttactcctcaccaatgtcctgagccaaaacagaggcggcaagcgccaataaactttacgtcaaggctaaaccgcagggcatcatttccaaagtatggaggggtggatggcggatgctttgataggcaccttatctttagcagattccgtcctatttcagtgttccgggaagccaatgaagatgagagtggcttcacctgctgtgcattctcagcacgggagcggttcctgatgcttggcacctgcacagggcagctgaagctctataatgtgtttagtggacaggaggaggccagctataactgtcacaactcagccatcacacatcttgaaccttccagggatgggtccttgctgctgacatctgctacttggagccagcctttgtctgcactttggggaatgaagtcagtatttgatatgaagcattccttcacagaagatcactatgttgagttcagtaagcactcccaggatcgggtcatcggcacaaaaggagacattgcccacatttatgatattcagactggcaacaagctgttgactctgtttaacccagatcttgccaacaactacaagaggaactgtgccacctttaatcctacagatgatcttgtcttaaatgatggcgtcctctgggatgtccgctctgcacaggccatccacaagtttgacaagttcaatatgaacatcagtggtgttttccatccaaatggactggaggtgatcattaatactgagatttgggaccttcgaacttttcatcttttgcatactgttcccgctctggatcagtgtcgcgtggtgttcaatcacacgggaacagtgatgtatggagctatgttgcaggcagatgatgaagatgacttaatggaagagaggatgaaaagcccctttgggtcatccttccgaacatttaatgcaactgactacaaacctatagcaaccattgatgtgaaacggaacatctttgacctgtgtacagacaccaaagactgctatcttgctgtcattgagaatcaaggcagcatggatgccctgaacatggacacagtatgcaggctgtatgaagtgggcaggcagcgtctggcagaggatgaggatgaagaggaggaccaggaagaggaagaacaggaggaagaagatgatgatgaagatgatgatgacaccgatgatttagatgagcttgacactgaccagttgctggaggcggagttggaggaggacgacaataatgagaacgcaggggaagatggggacaatgacttctctccctctgatgaggagctagcaaaccttctagaggagggagaggacggggaggatgaagactctgatgcagatgaggaggtggaactgatcctgggggacactgacagctctgacaactctgatttggaagatgacatcatcttatctctgaatgagtgaggagccatcactgcttggaagagattcttggcagagagaagaggggacaaatttggttgtgaagtaaacaagaaacacaagacggctaaaactctccaggggcaggtaaagccctgctgggctcagaagcactatagaatttgctgtacacactgaagtgggtctgtgtcacacaggtatttcttggtcctctggagagcagaggactcactcagctctttgcttcatgcctcgctttaatggtagtaaacacttaaccagtggaatagtctgactgctggtactgatggcatcagaagaaaacaggttaacaatcaagtagtgaaagcactatattctagtcattaactcaacggagccagtctcaactctgctgggagcacccacaggtctctgtgggggagacagggactataacagggaggcagaattcaggttggcttgacaacacaccttaggaacatgtgctaaggggctaaggaggcatcagctgtcttccttattctaccagggctgaaaatcggagtcacttaggaggcagcatgagaacagtggcacaccaccagtgaggcacatgttgcctttttgtctttaagcaacaccttagacagggcctgaaccctgggtgggggcactggatgcctgaagtaagtaagttttctcagtggggcagtctcataaaatcaccaggacattgaccacctgacctcccctaactagtgctggccaaggcctgagagttcacagaacctgctaggtcttaagagccaaaggaaggaagtggttgagggccaggaaagagaaggaatgtcatgccagggtgttactcctcaccaaaacttggcagttctttttggggccatgggacacctttctctgaagaggggttggataaggcaaaggttgaagtgtcttctctaggcacgttttctagcatgtttccttttacttggttctgtctcacaaagctgggaggtagatgattcttccgggtcctgagcacctgcttcatgaaggaagataggtagcccagagaagaagttttggacttaacaacataccaaggcagctctggcctgtgactcaggcgtttgttggagagctgcaggaaaaccactgcagtgtgcctgcaacaggacaagacccactcctgtttctggcggtaccagctaccctggaatggtggcgtgtcctgctgtacccaactgacttgcttaggtacctggcagctgtgaccacagctcaagtaaaaaaacaaaaacaggcaaataaataaacatgcttaacatgtc

SEQ ID NO: 199389 - DNA, 5951 bp, Homo sapiens
  Payload ID: 19338
  Gene Name: Vpr (HIV-1) binding protein
  Uniprot ID: Q9Y4B6
  ENST ID: ENST00000504652
  CDS Start-End: 139-4659
cgctgtggagccgtggtcgcgctgtgtgtgtgtgtgagtggagagtgagtgcgggacctgaggctgtgtgtgtgtgaactgtggccactggcggggtcgggggggggcagcggcggagccgcctcggacggcaaagccatgactacagtagtggtacatgtggactccaaagctgagctcactaccctgctggagcagtgggaaaaggaacatggcagtgggcaggacatggtacctatccttaccaggatgtctcaattgattgaaaaagaaactgaagagtatcgtaaaggggatccagacccatttgatgatcgacatcctggtcgagctgatccagagtgtatgctgggccacttgctgagaatactcttcaagaatgatgatttcatgaatctggtgaatgcatatgtgatgacaagccgagagccccctttaaacactgcagcttgcagactcctattagacatcatgccagggctggaaactgctgtcgtctttcaagaaaaggagggaattgtcgagaatcttttcaaatgggcccgagaggccgatcaaccattgaggacatattctactggactgttaggaggtgctatggaaaatcaagacattgctgccaactatagagatgaaaattcacagctggtggcaatagtgcttcgaagactgagggagctacagctacaggaagtggctttgcggcaggaaaacaagcgtcccagtccacggaagctctcttctgaaccccttttgcctctggatgaggaggctgtggatatggactatggtgacatggctgtagatgtagtggatggagaccaagaggaagcttctggagacatggagatctcctttcatcttgattcaggccacaagactagtagcagagtgaactcaacaaccaaacctgaggatggaggattaaagaaaaacaagtcagcaaaacagggtgacagagagaactttaggaaagccaagcaaaagttgggtttctcatcttctgatccagatcgcatgtttgttgagctgtctaatagcagttggtcagaaatgtctccctgggtgattggcaccaattataccctttatcctatgactcctgctatcgagcagcgactcattctccaatatttgacccctctaggagaatatcaggagctacttcccatattcatgcaacttggatcacgggagctgatgatgttctatattgacctgaagcaaactaatgatgtcctgcttacatttgaggcactaaagcacctagcatctctcctgctccataacaaatttgccacagaatttgttgcgcatggtggagtacagaaattactggaaatacctcgtccttctatggctgcaaccggtgtgtctatgtgtttgtattacctatcctacaatcaggatgccatggaaagagtttgcatgcatccccacaatgttctgtctgatgtggtgaactataccctgtggttaatggagtgttctcatgcttcaggatgctgccatgctaccatgtttttttcaatttgcttctcatttcgggccgtcttggagctctttgaccgctatgatggtcttcgtcgtctggtgaacttgatcagtactttggagattctaaatttggaagatcagggtgcacttctgagtgatgatgaaatatttgctagccgccaaactgggaaacatacctgcatggccttgcgcaaatactttgaggctcacctggccattaaattggaacaagtgaagcagtcacttcagaggactgagggtggcattcttgtccacccacaacccccgtacaaggcatgctcatatactcatgaacagattgtggaaatgatggaatttttgatagaatatggcccagcgcagctatattgggaaccagctgaagttttcctcaaactttcttgtgtgcaactcttgttgcagcttatttctattgcctgcaattggaagacctattatgcaaggaatgacactgtgcgctttgctttggatgtcctggctattcttactgtggtgccaaaaatccagctccagttggcagaatcagtggacgtgttggatgaggctggatctacagtctctactgtaggtatcagcattattttgggagtggctgagggtgagttcttcatccatgatgctgaaattcagaagtcagcacttcagattatcatcaattgtgtgtgtggcccagataaccgaatatccagtattggtaaatttatctctggtactcctcggagaaagctgcctcagaaccctaaaagcagtgagcacaccctggccaagatgtggaatgtggttcagtccaacaacggcatcaaggtgctcctgtccttactgtccattaagatgcccatcacagatgcagaccaaatccgggccctggcctgcaaagccctagtgggcctgtctcgcagtagcactgtccggcagatcatcagtaaactgccccttttcagcagctgccagatccagcagctgatgaaggagcctgtgctgcaggacaagcgcagtgaccatgtcaagttctgcaagtatgctgctgaactcattgaacgggtgtcaggaaaaccacttctcattggcactgatgtttccctagcacgactgcagaaagcagatgttgttgcccagtcaaggatctccttccctgagaaagagctgcttttgttgatacgaaaccatcttatttctaaagggcttggagaaacagcaaccgtgctgacaaaagaggctgacctgcccatgactgctgcctcccattcttctgcctttaccccagtcactgctgctgcttctcctgtctctctaccccgaacccctcgtatcgctaatggcattgcaactcgtctgggcagccatgctgctgtgggtgcctctgcgccttctgcccctactgctcatcctcagccacggcccccccagggtccgctagctctgcccggcccatcttatgcaggcaactcccctttgattggtagaatcagttttatcagagagaggccatcaccctgcaatggcaggaaaatcagagtgttgcggcagaagtcggaccatggtgcctacagccaaagcccagccataaaaaaacagctggacagacatcttccttccccacctacgctggacagtataatcacagagtatcttagagaacaacatgctcgctgcaagaatccagttgccacctgcccacctttctccctctttactcctcaccaatgtcctgagccaaaacagaggcggcaagcgccaataaactttacgtcaaggctaaaccgcagggcatcatttccaaagtatggaggggtggatggcggatgctttgataggcaccttatctttagcagattccgtcctatttcagtgttccgggaagccaatgaagatgagagtggcttcacctgctgtgcattctcagcacgggagcggttcctgatgcttggcacctgcacagggcagctgaagctctataatgtgtttagtggacaggaggaggccagctataactgtcacaactcagccatcacacatcttgaaccttccagggatgggtccttgctgctgacatctgctacttggagccagcctttgtctgcactttggggaatgaagtcagtatttgatatgaagcattccttcacagaagatcactatgttgagttcagtaagcactcccaggatcgggtcatcggcacaaaaggagacattgcccacatttatgatattcagactggcaacaagctgttgactctgtttaacccagatcttgccaacaactacaagaggaactgtgccacctttaatcctacagatgatcttgtcttaaatgatggcgtcctctgggatgtccgctctgcacaggccatccacaagtttgacaagttcaatatgaacatcagtggtgttttccatccaaatggactggaggtgatcattaatactgagatttgggaccttcgaacttttcatcttttgcatactgttcccgctctggatcagtgtcgcgtggtgttcaatcacacgggaacagtgatgtatggagctatgttgcaggcagatgatgaagatgacttaatggaagagaggatgaaaagcccctttgggtcatccttccgaacatttaatgcaactgactacaaacctatagcaaccattgatgtgaaacggaacatctttgacctgtgtacagacaccaaagactgctatcttgctgtcattgagaatcaaggcagcatggatgccctgaacatggacacagtatgcaggctgtatgaagtgggcaggcagcgtctggcagaggatgaggatgaagaggaggaccaggaagaggaagaacaggaggaagaagatgatgatgaagatgatgatgacaccgatgatttagatgagcttgacactgaccagttgctggaggcggagttggaggaggacgacaataatgagaacgcaggggaagatggggacaatgacttctctccctctgatgaggagctagcaaaccttctagaggagggagaggacggggaggatgaagactctgatgcagatgaggaggtggaactgatcctgggggacactgacagctctgacaactctgatttggaagatgacatcatcttatctctgaatgagtgaggagccatcactgcttggaagagattcttggcagagagaagaggggacaaatttggttgtgaagtaaacaagaaacacaagacggctaaaactctccaggggcaggtaaagccctgctgggctcagaagcactatagaatttgctgtacacactgaagtgggtctgtgtcacacaggtatttcttggtcctctggagagcagaggactcactcagctctttgcttcatgcctcgctttaatggtagtaaacacttaaccagtggaatagtctgactgctggtactgatggcatcagaagaaaacaggttaacaatcaagtagtgaaagcactatattctagtcattaactcaacggagccagtctcaactctgctgggagcacccacaggtctctgtgggggagacagggactataacagggaggcagaattcaggttggcttgacaacacaccttaggaacatgtgctaaggggctaaggaggcatcagctgtcttccttattctaccagggctgaaaatcggagtcacttaggaggcagcatgagaacagtggcacaccaccagtgaggcacatgttgcctttttgtctttaagcaacaccttagacagggcctgaaccctgggtgggggcactggatgcctgaagtaagtaagttttctcagtggggcagtctcataaaatcaccaggacattgaccacctgacctcccctaactagtgctggccaaggcctgagagttcacagaacctgctaggtcttaagagccaaaggaaggaagtggttgagggccaggaaagagaaggaatgtcatgccagggtgttactcctcaccaaaacttggcagttctttttggggccatgggacacctttctctgaagaggggttggataaggcaaaggttgaagtgtcttctctaggcacgttttctagcatgtttccttttacttggttctgtctcacaaagctgggaggtagatgattcttccgggtcctgagcacctgcttcatgaaggaagataggtagcccagagaagaagttttggacttaacaacataccaaggcagctctggcctgtgactcaggcgtttgttggagagctgcaggaaaaccactgcagtgtgcctgcaacaggacaagacccactcctgtttctggcggtaccagctaccctggaatggtggcgtgtcctgctgtacccaactgacttgcttaggtacctggcagctgtgaccacagctcaagtaaaaaaacaaaaacaggcaaataaataaacatgcttaacatgtc

SEQ ID NO: 199390 - DNA, 3313 bp, Homo sapiens; identical to SEQ ID NO: 198578
  Payload ID: 19339
  Gene Name: VPS11, CORVET/HOPS core subunit
  ENST ID: ENST00000626621
  CDS Start-End: 133-2958

SEQ ID NO: 199391 - DNA, 3388 bp, Homo sapiens; identical to SEQ ID NO: 198579
  Payload ID: 19339
  Gene Name: VPS11, CORVET/HOPS core subunit
  ENST ID: ENST00000629865
  CDS Start-End: 249-3044

SEQ ID NO: 199392 - DNA, 542 bp, Homo sapiens; identical to SEQ ID NO: 198580
  Payload ID: 19339
  Gene Name: VPS11, CORVET/HOPS core subunit
  ENST ID: ENST00000629256
  CDS Start-End: 1-542

SEQ ID NO: 199393 - DNA, 2739 bp, Homo sapiens; identical to SEQ ID NO: 198577
  Payload ID: 19339
  Gene Name: VPS11, CORVET/HOPS core subunit
  ENST ID: ENST00000630977
  CDS Start-End: 1206-2660

SEQ ID NO: 199394 - DNA, 2697 bp, Homo sapiens
  Payload ID: 19340
  Gene Name: VPS26 retromer complex component A
  Uniprot ID: O75436
  ENST ID: ENST00000263559
  CDS Start-End: 127-1110
gagcggtcacgtgtgaggggcggcccgaggtcacgtgacggagcgccggagcggagggagccggggctgggagttctcctgagggaagaggagtggagtaggggggacgcggcggcggcgttgacaatgagttttcttggaggcttttttggtccaatttgtgagatcgatattgttcttaatgatggggaaaccaggaaaatggcagaaatgaaaactgaagatggcaaagtagaaaaacactatctcttctatgacggagaatccgtttcaggaaaggtaaacctagcctttaagcaacctggaaagaggctagaacaccaaggaattagaattgaatttgtaggtcaaattgaacttttcaatgacaagagtaatactcatgaatttgtaaacctagtgaaagaactagccttacctggagaactgactcagagcagaagttatgattttgaatttatgcaagttgaaaagccatatgaatcttacatcggtgccaatgtccgcttgaggtattttcttaaagtgacaatagtgagaagactgacagatttggtaaaagagtatgatcttattgttcaccagcttgccacctatcctgatgttaacaactctattaagatggaagtgggcattgaagattgtctacatatagaatttgaatataataaatcaaagtatcatttaaaggatgtgattgttggaaaaatttacttcttattagtaagaataaaaatacaacatatggagttacagctgatcaaaaaagagatcacaggaattggacccagtaccacaacagaaacagaaacaatcgccaaatatgaaataatggatggtgcaccagtaaaaggtgaatcaattccaataaggctatttttagcaggatatgacccaactccaacaatgagagatgtgaacaaaaaattttcagtaaggtactttttgaatttagtgcttgttgatgaggaagaccggaggtacttcaaacagcaggagataattttatggagaaaagctcctgaaaaactgaggaaacagagaacaaactttcaccagcgatttgaatctccagaatcacaggcatctgccgaacagcctgaaatgtgaactgaacaggagaaaaaaagaaaagcaaaaaactcctgtaacccttgagattaagttcagcaggttaaagatggttgcagctggagggggcggaaaaaggccaaaactccatatatgttagtcttcctttatcttacagcgcagcatttattttatgatataatgaaatgttcgttcatgtatatacatttttaaaagtgctttctttgaaacactggaactttgttaagctgcctttttttttttaacttcctactttgatgataagcactcagatatatatcagcgtaaacatgaaaaattttcatgtgagtaggctggtatttgtaattttgctttctttctgcataatgttgattataaatcctctcttttcaggctaatgattacctcttattctctacatgcaaaaaattaaatattttgtgttcaaataaaattagaaaacctgagtggcctcttgtgtcctgcagagatttaaaacatggcatctcaatatttttgagaactacatttgtttttaacatatgtgtttgagaaaagcatatggagtgtttcaccgcaggcacttctgagtaccattccatggcttccagaattttatcctctttgaggtcttctgtgctatgaatattagatttctttccccaagggattatgtggcaggtcattatggccttcttttttttggccatattaagtaacagttttgctatattccagtagtaccgttgtgtgttttctgcaatgtggagttgacttagcttggcattttagatttgttaaaactattttttccataaatactttgaaacatatttatatatttcaatttaaggaatctttttgccatgtgtatgcaaatattattttcttcatacattcattttcttttcaggggaaaattttgggatgggggactcaggaggacctgtgaagcatgtagttatctagatctgggtaatttcatgtttattaaactcgaactttggctagttaaactcatattgaaacttcatctagtctcttaattttttaacactaaattcaagtcatttgttttaagtctctaaaaaagaagattgcagtcatccattcatatgcatggggtctgatcgcaaatacactaaatgtggagtgtaggaaccaaaatgaaacctgctgtatggaaactactttcacttatggttcattggtttttgtaccaatattttttatgcacttcagtgcaagtcttgtcagttaaccttactttatgagtaagctaaataacccaaattacatttctttaaacctgttttactactatggcactttgataaaatggtcaggaaccaactttactggcaaaagggtccatgtaccaccatgtgctggagcatctgttctacatgtggatatctatgaatggtaatgttttccttcatgtaagtgcctattcagagtttcagaattttaaaatgccaaatattttcatggtcatttgcatgtagtaagccagaaaatattcaaagagattttgaaaaccaattgtatttaaccagcctcaaattgtgcaaccatgatgtataataaagaatttgaaac

SEQ ID NO: 199395 - DNA, 3229 bp, Homo sapiens
  Payload ID: 19340
  Gene Name: VPS26 retromer complex component A
  Uniprot ID: O75436
  ENST ID: ENST00000373382
  CDS Start-End: 654-1637
gcgcctttgccctctcagaacggctgggcggaacgaggcgagaaagccaagttaagaaaacccagactcagaaggaggtggagcgggactgcgttcaggcaaggtggcagaacgcctcgccgtggacgaagagagcacatctcttcttgcgaggcctaaggaagtagggctcccactcgcctcggcaacccaaggacccagccaaggagagagcctccagatgaatccttcctctcctccttccttcccagccgctcaaactttcacaaagaggaactgggtgcggtaaagaggccggacacggaaccgctcgtccggtgaccgaagagacggcgaggaggagcccgcgaacccgcctctgttcaggccccgcccactcgacgtaatttgcccgcccctctccaccctccgaagggtggagcctgaggccccgcctccaagcggcctctccccggagtgcctggcggccagcagggcggggcaggaggctgggagagggacgggtgcgggggtgggggagaggaagggagcggtcacgtgtgaggggcggcccgaggtcacgtgacggagcgccggagcggagggagccggggctgggagttctcctgagggaagaggagtggagtaggggggacgcggcggcggcgttgacaatgagttttcttggaggcttttttggtccaatttgtgagatcgatattgttcttaatgatggggaaaccaggaaaatggcagaaatgaaaactgaagatggcaaagtagaaaaacactatctcttctatgacggagaatccgtttcaggaaaggtaaacctagcctttaagcaacctggaaagaggctagaacaccaaggaattagaattgaatttgtaggtcaaattgaacttttcaatgacaagagtaatactcatgaatttgtaaacctagtgaaagaactagccttacctggagaactgactcagagcagaagttatgattttgaatttatgcaagttgaaaagccatatgaatcttacatcggtgccaatgtccgcttgaggtattttcttaaagtgacaatagtgagaagactgacagatttggtaaaagagtatgatcttattgttcaccagcttgccacctatcctgatgttaacaactctattaagatggaagtgggcattgaagattgtctacatatagaatttgaatataataaatcaaagtatcatttaaaggatgtgattgttggaaaaatttacttcttattagtaagaataaaaatacaacatatggagttacagctgatcaaaaaagagatcacaggaattggacccagtaccacaacagaaacagaaacaatcgccaaatatgaaataatggatggtgcaccagtaaaaggtgaatcaattccaataaggctatttttagcaggatatgacccaactccaacaatgagagatgtgaacaaaaaattttcagtaaggtactttttgaatttagtgcttgttgatgaggaagaccggaggtacttcaaacagcaggagataattttatggagaaaagctcctgaaaaactgaggaaacagagaacaaactttcaccagcgatttgaatctccagaatcacaggcatctgccgaacagcctgaaatgtgaactgaacaggagaaaaaaagaaaagcaaaaaactcctgtaacccttgagattaagttcagcaggttaaagatggttgcagctggagggggcggaaaaaggccaaaactccatatatgttagtcttcctttatcttacagcgcagcatttattttatgatataatgaaatgttcgttcatgtatatacatttttaaaagtgctttctttgaaacactggaactttgttaagctgcctttttttttttaacttcctactttgatgataagcactcagatatatatcagcgtaaacatgaaaaattttcatgtgagtaggctggtatttgtaattttgctttctttctgcataatgttgattataaatcctctcttttcaggctaatgattacctcttattctctacatgcaaaaaattaaatattttgtgttcaaataaaattagaaaacctgagtggcctcttgtgtcctgcagagatttaaaacatggcatctcaatatttttgagaactacatttgtttttaacatatgtgtttgagaaaagcatatggagtgtttcaccgcaggcacttctgagtaccattccatggcttccagaattttatcctctttgaggtcttctgtgctatgaatattagatttctttccccaagggattatgtggcaggtcattatggccttcttttttttggccatattaagtaacagttttgctatattccagtagtaccgttgtgtgttttctgcaatgtggagttgacttagcttggcattttagatttgttaaaactattttttccataaatactttgaaacatatttatatatttcaatttaaggaatctttttgccatgtgtatgcaaatattattttcttcatacattcattttcttttcaggggaaaattttgggatgggggactcaggaggacctgtgaagcatgtagttatctagatctgggtaatttcatgtttattaaactcgaactttggctagttaaactcatattgaaacttcatctagtctcttaattttttaacactaaattcaagtcatttgttttaagtctctaaaaaagaagattgcagtcatccattcatatgcatggggtctgatcgcaaatacactaaatgtggagtgtaggaaccaaaatgaaacctgctgtatggaaactactttcacttatggttcattggtttttgtaccaatattttttatgcacttcagtgcaagtcttgtcagttaaccttactttatgagtaagctaaataacccaaattacatttctttaaacctgttttactactatggcactttgataaaatggtcaggaaccaactttactggcaaaagggtccatgtaccaccatgtgctggagcatctgttctacatgtggatatctatgaatggtaatgttttccttcatgtaagtgcctattcagagtttcagaattttaaaatgccaaatattttcatggtcatttgcatgtagtaagccagaaaatattcaaagagattttgaaaaccaattgtatttaaccagcctcaaattgtgcaaccatgatgtataataaagaatttgaaacagaaa

SEQ ID NO: 199396 - DNA, 2554 bp, Homo sapiens
  Payload ID: 19340
  Gene Name: VPS26 retromer complex component A
  Uniprot ID: O75436
  ENST ID: ENST00000395098
  CDS Start-End: 127-882
gagcggtcacgtgtgaggggcggcccgaggtcacgtgacggagcgccggagcggagggagccggggctgggagttctcctgagggaagaggagtggagtaggggggacgcggcggcggcgttgacaatgagttttcttggaggcttttttggtccaatttgtgagatcgatattgttcttaatgatggggaaaccaggaaaatggcagaaatgaaaactgaagatggcaaagtagaaaaacactatctcttctatgacggagaatccgtttcaggaaaggtaaacctagcctttaagcaacctggaaagaggctagaacaccaaggaattagaattgaatttgtaggtcaaattgaacttttcaatgacaagagtaatactcatgaatttgtaaacctagtgaaagaactagccttacctggagaactgactcagagcagaagttatgattttgaatttatgcaagttgaaaagccatatgaatcttacatcggtgccaatgtccgcttgaggtattttcttaaagtgacaatagtgagaagactgacagatttggtaaaagagtatgatcttattgttcaccagcttgccacctatcctgatgttaacaactctattaagatggaagtgggcattgaagattgtctacatatagaatttgaatataataaatcaaagtatcatttaaaggatgtgattgttggaaaaatttacttcttattagtaagaataaaaatacaacatatggagttacagctgatcaaaaaagagatcacaggaattggacccagtaccacaacagaaacagaaacaatcgccaaatatgaaataatggatggtgcaccagtaaaaggagataattttatggagaaaagctcctgaaaaactgaggaaacagagaacaaactttcaccagcgatttgaatctccagaatcacaggcatctgccgaacagcctgaaatgtgaactgaacaggagaaaaaaagaaaagcaaaaaactcctgtaacccttgagattaagttcagcaggttaaagatggttgcagctggagggggcggaaaaaggccaaaactccatatatgttagtcttcctttatcttacagcgcagcatttattttatgatataatgaaatgttcgttcatgtatatacatttttaaaagtgctttctttgaaacactggaactttgttaagctgcctttttttttttaacttcctactttgatgataagcactcagatatatatcagcgtaaacatgaaaaattttcatgtgagtaggctggtatttgtaattttgctttctttctgcataatgttgattataaatcctctcttttcaggctaatgattacctcttattctctacatgcaaaaaattaaatattttgtgttcaaataaaattagaaaacctgagtggcctcttgtgtcctgcagagatttaaaacatggcatctcaatatttttgagaactacatttgtttttaacatatgtgtttgagaaaagcatatggagtgtttcaccgcaggcacttctgagtaccattccatggcttccagaattttatcctctttgaggtcttctgtgctatgaatattagatttctttccccaagggattatgtggcaggtcattatggccttcttttttttggccatattaagtaacagttttgctatattccagtagtaccgttgtgtgttttctgcaatgtggagttgacttagcttggcattttagatttgttaaaactattttttccataaatactttgaaacatatttatatatttcaatttaaggaatctttttgccatgtgtatgcaaatattattttcttcatacattcattttcttttcaggggaaaattttgggatgggggactcaggaggacctgtgaagcatgtagttatctagatctgggtaatttcatgtttattaaactcgaactttggctagttaaactcatattgaaacttcatctagtctcttaattttttaacactaaattcaagtcatttgttttaagtctctaaaaaagaagattgcagtcatccattcatatgcatggggtctgatcgcaaatacactaaatgtggagtgtaggaaccaaaatgaaacctgctgtatggaaactactttcacttatggttcattggtttttgtaccaatattttttatgcacttcagtgcaagtcttgtcagttaaccttactttatgagtaagctaaataacccaaattacatttctttaaacctgttttactactatggcactttgataaaatggtcaggaaccaactttactggcaaaagggtccatgtaccaccatgtgctggagcatctgttctacatgtggatatctatgaatggtaatgttttccttcatgtaagtgcctattcagagtttcagaattttaaaatgccaaatattttcatggtcatttgcatgtagtaagccagaaaatattcaaagagattttgaaaaccaattgtatttaaccagcctcaaattgtgcaaccatgatgtataataaagaatttgaaac

SEQ ID NO: 199397 - DNA, 817 bp, Homo sapiens
  Payload ID: 19340
  Gene Name: VPS26 retromer complex component A
  ENST ID: ENST00000489656
  CDS Start-End: 123-314
ggtcacgtgtgaggggcggcccgaggtcacgtgacggagcgccggagcggagggagccggggctgggagttctcctgagggaagaggagtggagtaggggggacgcggcggcggcgttgacaatgagttttcttggaggcttttttggtccaatttgtgagatcgatattgttcttaatgatggggaaaccaggaaaatggcagaaatgaaaactgaagatggcaaagtagaaaaacactatctcttctatgacggagaatccgtttcaggaaagaacttttcaatgacaagagtaatactcatgaatttgtaaacctagtgaaagaactagccttacctggagaactgactcagagcagaagttatgattttgaatttatgcaagttgaaaagccatatgaatcttacatcggtgccaatgtccgcttgaggtattttcttaaagtgacaatagtgagaagactgacagatttggtaaaagagtatgatcttattgttcaccagcttgccacctatcctgatgttaacaactctattaagatggaagtgggcattgaagattgtctacatatagaatttgaatataataaatcaaagtatcatttaaaggatgtgattgttggaaaaatttacttcttattagtaagaataaaaatacaacatatggagttacagctgatcaaaaaagagatcacaggaattggacccagtaccacaacagaaacagaaacaatcgccaaatatgaaataatggatggtgcaccagtaaaaggtgaatcaattccaataaggctatttttagcaggatatgaccca

SEQ ID NO: 199398 - DNA, 928 bp, Homo sapiens
  Payload ID: 19340
  Gene Name: VPS26 retromer complex component A
  ENST ID: ENST00000489794
  CDS Start-End: 73-753
agttttcttggaggcttttttggtccaatttgtgagatcgatattgttcttaatgatggggaaaccaggaaaatggcagaaatgaaaactgaagatggcaaagtagaaaaacactatctcttctatgacggagaatccgtttcaggaaaggtaaacctagcctttaagcaacctggaaagaggctagaacaccaaggaattagaattgaatttgtaggtcaaattgaacttttcaatgacaagagtaatactcatgaatttgtaaacctagtgaaagaactagccttacctggagaactgactcagagcagaagttatgattttgaatttatgcaagttgaaaagccatatgaatcttacatcggtgccaatgtccgcttgaggtattttcttaaagtgacaatagtgagaagactgacagatttggtaaaagagtatgatcttattgttcaccagcttgccacctatcctgatgttaacaactctattaagatggaagtgggcattgaagattgtctacatatagaatttgaatataataaatcaaagtatcatttaaaggatgtgattgttggaaaaatttacttcttattagtaagaataaaaatacaacatatggagttacagctgatcaaaaaagagatcacaggaattggacccagtaccacaacagaaacagaaacaatcgccaaatatgaaataatggatggtgcaccagtaaaaggagataattttatggagaaaagctcctgaaaaactgaggaaacagagaacaaactttcaccagcgatttgaatctccagaatcacaggcatctgccgaacagcctgaaatgtgaactgaacaggagaaaaaaagaaaagcaaaaaactcctgtaacccttgagattaagttcagcaggttaaagatggttgcagctggaggggg

SEQ ID NO: 199399 - DNA, 3691 bp, Homo sapiens
  Payload ID: 19341
  Gene Name: VPS26 retromer complex component B
  Uniprot ID: Q4G0F5
  ENST ID: ENST00000281187
  CDS Start-End: 479-1489
gagctcgcccgccccctcccccgcccggagccgccgaagcgcctcggtgcgttgcaccgccggaggctgggcagctcgcagcgctgctcggcgctggaccccacccggcaggcgcaggccacccacacccggctctgtgcggctgccccccgcagcattgcacggccgaccctcgcccgcccactgccaccggccgcgggactggctgggactggctcggccgagggcactgctcctcggtgcattgctgctcgggcgccgcagcccgcagccgccagcctcccccggccgtgcccctcccccgtggagccggctgtccgtcggcgcccactgcccggcggcagcggcggagccaggcagccccgcggcggccgagcgcgctcgcgcatcgggccctctggccttctttacctagggcagcccgcgccccggtgcgagggagcggtccttaccgagacccgcccggcccggcggtgcgatgagcttcttcggcttcgggcagagcgtggaggtggaaatccttctgaacgatgcagagagtaggaagcgggccgagcacaagacggaggacgggaagaaggagaaatatttcctcttctacgacggggagacggtctccgggaaggtgagccttgccctcaagaaccccaacaagcggctggagcaccagggcatcaagatcgagttcatcgggcagatcgaactctactacgatcgcgggaaccaccatgagtttgtgtccctggtgaaggacctggcccggcctggagagatcacccagtcgcaggccttcgactttgagtttacccacgtggagaagccgtatgagtcctacacagggcagaatgtgaagctacgctatttccttcgtgctaccatcagccgccgcctcaatgatgttgtcaaagagatggacattgtagttcacacactcagcacatacccagagctgaactcttccatcaagatggaggttgggattgaggactgtctgcacattgaatttgagtacaataaatccaaataccacttgaaagatgtcattgtagggaagatatacttcctgctggtgagaatcaaaatcaagcacatggagatagacatcatcaagcgagaaacgacgggtacaggccccaacgtgtaccatgagaatgacacgatagccaagtacgagatcatggacggggcaccagtgcgaggagagtccatcccgatccggctcttcctggccgggtatgagctcacgcccaccatgcgggacatcaacaagaagttctctgtgcgctattacctcaacctggtgctgatagacgaggaggagcggcgctacttcaagcagcaggaagtggtgttgtggcggaagggtgacatcgtacggaagagcatgtcccaccaggcggccatcgcctcacagcgctttgagggcaccacctccctgggtgaggtgcggacccccagccagctgtctgacaacaactgcaggcagtaggcccccagggccgagaagatgctgggcacccacccagcacccccatctaccaacaccagcggctgggggcgggggcggaccttgtgaggctcagttgacccgttacttgcaacctgaaaacaaatcatgtttttgacttaaattcttttctctggagaacccaaggggcttggggtgggaagcagtctctccttgggattctgcggccgatgtgggatagaagaggtagcatcctggaagccagcctctctggggaacatgagcccccttcctcggggggctgccttgcgtcttagaggagggagagcagagagcacgcatccttggctcctggctctctgagcttcctgatacaggatctgagcatgtccctgggattctgagctgccaacagggccctgggtagtcacatcttgtactcccctttgctgtcccggaggtagtggcaggagttgggccagcccccactaagtggcaggggaagactcacgattgggaagctacctctttgggaatcttggatgtggtgatctcaagttcccacaggccacctccttctggccactcactgctgggacccaggcacctcccttctccatcctctctggattgtcagtaatgtcctggaacagaagcctgtgggatggccttgggcacggagaagccctggggtcagtgtcgtgcacggatggcggcagtgttgaacccaggaggctgaacccggcccaccacggaagatgagtgcatggcaaccgcctgccttcacgtcgctccacttggtaaccccaaggtctgggctgttctaggtattgcttcacgtgccccagcaagcccttaacaagagggcctggttccctgaagaaccaatcccaggaaggggccttgatccctccgccttgctgagagtgaaccctcgtctctcctcaccctccatttcatttctgggaattggggcttagtttcgaacctttggcaaggctgttcttactaatgcccaagcccctttacccctctccctataggttacacaggggagaccagggcctcggcagaagactgctgccacacttccgaatcattctgcttgccaaataggtcatcttcaccagttgactgacccaagtttaggaccattggtatcgtgtgtttaaaaaacacatataaaaaaactcttgtgaatattcttgttatgctagagaggaaggtacttctccctctacggctctgcgctggggcctatggtagtaaagttgtttactgtcctttttctgcttcccctggaaatgacaggcattactctcccattggcctcccttccctttatagaaagaccaagcaggccccactggccaagaggtacggtatttggcagtctgagttctcagtaatttggaaagttaaggagttggttcctgtgtcacctttcagttagtgtgggaaaggaagacttctgttttcctgagatcagtgcagtctcaggcctttggcagggctcatggatcagagctgagactggagggagaggcattttgggtagcctaggagggcgactggcggcagcagaaccgaggaaggcaaggttgtttcccccacgctgtgtcctgtgttcaggtgcgacacacaatcctcatgggaacaggatcacccatgcgctgcccttgatgatcaaggttggggcttaagtggataagggaggcaagttctgggttccttgccttttcagagcatgaggtcaggctctgtatccctccttttcctagctgatattctaactagaagcatttgtcaattcctttgcctcccaactgacaacacacgttcattttccaaccttcctaacatcttaaacctttcttctgggagaactagaagacagaatttgctttgattctctcaggcgctgtgcacaagccaggtcttctgttttctctttcttactctacccacattcttgccttctctatccaactgtgaaagtgaggggaggctcctgtccccctctcttaaggtccccaaacctgggagtgcataggtactaaatcaagcagtgcaacttgtaattaagcagctgcagtgtttacatgtttcttaatgtgtcatcttttcaatggctgtattaaaagaagaacgtttgttttaatggtctttctgattaaagaaagcccctgtggctttggaggcattgtgcccacggtccaccaa

SEQ ID NO: 199400 - DNA, 800 bp, Homo sapiens
  Payload ID: 19341
  Gene Name: VPS26 retromer complex component B
  ENST ID: ENST00000527586
  CDS Start-End: 1-217
ggccgagcacaagacggaggacgggaagaaggagaaatatttcctcttctacgacggggagacggtctccgggaaggtgagccttgccctcaagaaccccaacaagcggctggagcaccagggcatcaagatcgagttcatcgggcagatcgctatttccttcgtgctaccatcagccgccgcctcaatgatgttgtcaaagagatggacattgtagttcacacactcagcacatacccagagctgaactcttccatcaagatggaggttgggattgaggactgtctgcacattgaatttgagtacaataaatccaaataccacttgaaagatgtcattgtagggaagatatacttcctgctggtgagaatcaaaatcaagcacatggagatagacatcatcaagcgagaaacgacgggtacaggccccaacgtgtaccatgagaatgacacgatagccaagtacgagatcatggacggggcaccagtgcgagtttacaccgtgggtggccataaggaagaaaaggaaggctgagtgtgtagaacttgaggctactatcccatcttcaccctgaaaagttgcacttagacttggattatatatcgggcttgtactgaagattgaacctcaagcgtcactttggaaggtccaggtttagcagatgtggtttgaaaacgtttctgcttcttcctgttgacattctggcattctctgctgctcaggagcaagggatgcatgcacagcagcctgtctgtgacttggctctagctccgatttattttctgaattcacttgtcagg

SEQ ID NO: 199401 - DNA, 1558 bp, Homo sapiens
  Payload ID: 19341
  Gene Name: VPS26 retromer complex component B
  Uniprot ID: Q4G0F5
  ENST ID: ENST00000525095
  CDS Start-End: 409-1419
gccgaagcgcctcggtgcgttgcaccgccggaggctgggcagctcgcagcgctgctcggcgctggaccccacccggcaggcgcagcattgcacggccgaccctcgcccgcccactgccaccggccgcgggactggctgggactggctcggccgagggcactgctcctcggtgcattgctgctcgggcgccgcagcccgcagccgccagcctcccccggccgtgcccctcccccgtggagccggctgtccgtcggcgcccactgcccggcggcagcggcggagccaggcagccccgcggcggccgagcgcgctcgcgcatcgggccctctggccttctttacctagggcagcccgcgccccggtgcgagggagcggtccttaccgagacccgcccggcccggcggtgcgatgagcttcttcggcttcgggcagagcgtggaggtggaaatccttctgaacgatgcagagagtaggaagcgggccgagcacaagacggaggacgggaagaaggagaaatatttcctcttctacgacggggagacggtctccgggaaggtgagccttgccctcaagaaccccaacaagcggctggagcaccagggcatcaagatcgagttcatcgggcagatcgaactctactacgatcgcgggaaccaccatgagtttgtgtccctggtgaaggacctggcccggcctggagagatcacccagtcgcaggccttcgactttgagtttacccacgtggagaagccgtatgagtcctacacagggcagaatgtgaagctacgctatttccttcgtgctaccatcagccgccgcctcaatgatgttgtcaaagagatggacattgtagttcacacactcagcacatacccagagctgaactcttccatcaagatggaggttgggattgaggactgtctgcacattgaatttgagtacaataaatccaaataccacttgaaagatgtcattgtagggaagatatacttcctgctggtgagaatcaaaatcaagcacatggagatagacatcatcaagcgagaaacgacgggtacaggccccaacgtgtaccatgagaatgacacgatagccaagtacgagatcatggacggggcaccagtgcgaggagagtccatcccgatccggctcttcctggccgggtatgagctcacgcccaccatgcgggacatcaacaagaagttctctgtgcgctattacctcaacctggtgctgatagacgaggaggagcggcgctacttcaagcagcaggaagtggtgttgtggcggaagggtgacatcgtacggaagagcatgtcccaccaggcggccatcgcctcacagcgctttgagggcaccacctccctgggtgaggtgcggacccccagccagctgtctgacaacaactgcaggcagtaggcccccagggccgagaagatgctgggcacccacccagcacccccatctaccaacaccagcggctgggggcgggggcggaccttgtgaggctcagttgacccgttacttgcaacctgaaaacaaatcatgtttttgactt

SEQ ID NO: 199402 - DNA, 740 bp, Homo sapiens
  Payload ID: 19341
  Gene Name: VPS26 retromer complex component B
  ENST ID: ENST00000530402
  CDS Start-End: 1-147
ggagagatcacccagtcgcaggccttcgactttgagtttacccacgtggagaagccgtatgagtcctacacagggcagaatgtgaagctacgtggatttgtcttaagcgtttgtacggcagaaagaaaggtgttgaaaccagtatagcagtgcctcaaaaaattaaacagaattaccatatgatctagcaattcctcttttggatccagaagcggatccaaaagaatggaaaacaggatctcgaacggatatctgtacacccatattcacagcagcattattcgcaataaccaaaaggtagaagcaacccaagtgtccatcagtgggtaaatggacacaggaaatgtgttttgtccgtacagtggactgttatacagccttcaaaaggaaggacattctgtcctatgctacaacatgggtgaacctaaaggacattgtgctacgtgaaagaagcctgtcacaaaaggacaaatactgtctgattccatatatatgagctatttccttcgtgctaccatcagccgccgcctcaatgatgttgtcaaagagatggacattgtagttcacacactcagcacatacccagagctgaactcttccatcaagatggaggttgggattgaggactgtctgcacattgaatttgagtacaataaatccaaataccacttgaaagatgtcattgtagggaagatatacttcctgctggtgagaatcaaaatcaagcacatggagataga

SEQ ID NO: 199403 - DNA, 1091 bp, Homo sapiens
  Payload ID: 19342
  Gene Name: VPS29 retromer complex component
  Uniprot ID: Q9UBQ0
  ENST ID: ENST00000360579
  CDS Start-End: 49-609
gaagagggcggcgacggtggtggtgactgagcggagcccggtgacaggatggctgggcacagattggtgttggtattaggagatctgcacatcccacaccggtgcaacagtttgccagctaaattcaaaaaactcctggtgccaggaaaaattcagcacattctctgcacaggaaacctttgcaccaaagagagttatgactatctcaagactctggctggtgatgttcatattgtgagaggagacttcgatgagaatctgaattatccagaacagaaagttgtgactgttggacagttcaaaattggtctgatccatggacatcaagttattccatggggagatatggccagcttagccctgttgcagaggcaatttgatgtggacattcttatctcgggacacacacacaaatttgaagcatttgagcatgaaaataaattctacattaatccaggttctgccactggggcatataatgccttggaaacaaacattattccatcatttgtgttgatggatatccaggcttctacagtggtcacctatgtgtatcagctaattggagatgatgtgaaagtagaacgaatcgaatacaaaaaaccttaaagccaggcctgtcttgatgatttttggttttttttcattgtcctgttgaaatcaagtaattaaacatttaagagccacaaaattgtatcacttttataatattttgcagtaaaatataataccatcttctctgttaatacataattgctccaagcttcctgtaaactataagaatatatttagtttacagtatatggattctatgaaaaaatgtccacaacacagtaattggtcacttgttaagaaaaatttatccttgtaagtatcttcaaagttgatatttggaactttattccaaaagtagtgcatgtggagaaagaatctagactttcttgtatacatttttctcttctccagtaataaacaattacctttcatttatactttgataacctgtatttaatttaaaaaaaaacataaaaatgaggaaccaagtgaaactacggatataaatattaaagtggacgagatgacctttcaga

SEQ ID NO: 199404 - DNA, 996 bp, Homo sapiens
  Payload ID: 19342
  Gene Name: VPS29 retromer complex component
  ENST ID: ENST00000447578
  CDS Start-End: 353-616
ggtgactgagcggagcccggtgacaggatgaaggaatccccctctaaaatgaagattgttctatatccagttggtgttggtattaggagatctgcacatcccacaccggtgcaacagtttgccagctaaattcaaaaaactcctggtgccaggaaaaattcagcacattctctgcacaggaaacctttgcaccaaagagagttatgactatctcaagactctggctggtgatgttcatattgtgagaggagacttcgatgagaatctgaattatccagaacagaaagttgtgactgttggacagttcaaaattggtctgatccatggacatcaagttattccatggggagatatggccagcttagccctgttgcagaggcaatttgatgtggacattcttatctcgggacacacacacaaatttgaagcatttgagcatgaaaataaattctacattaatccaggttctgccactggggcatataatgccttggaaacaaacattattccatcatttgtgttgatggatatccaggcttctacagtggtcacctatgtgtatcagctaattggagatgatgtgaaagtagaacgaatcgaatacaaaaaaccttaaagccaggcctgtcttgatgatttttggttttttttcattgtcctgttgaaatcaagtaattaaacatttaagagccacaaaattgtatcacttttataatattttgcagtaaaatataataccatcttctctgttaatacataattgctccaagcttcctgtaaactataagaatatatttagtttacagtatatggattctatgaaaaaatgtccacaacacagtaattggtcacttgttaagaaaaatttatccttgtaagtatcttcaaagttgatatttggaactttattccaaaagtagtgcatgtggagaaagaatctagactttcttgtatacatttttctcttctccagtaataaacaattacctttcattt

SEQ ID NO: 199405 - DNA, 1523 bp, Homo sapiens
  Payload ID: 19342
  Gene Name: VPS29 retromer complex component
  Uniprot ID: Q9UBQ0
  ENST ID: ENST00000549578
  CDS Start-End: 67-615
gtcgccgaggagcctgaggaagagggcggcgacggtggtggtgactgagcggagcccggtgacaggatgttggtgttggtattaggagatctgcacatcccacaccggtgcaacagtttgccagctaaattcaaaaaactcctggtgccaggaaaaattcagcacattctctgcacaggaaacctttgcaccaaagagagttatgactatctcaagactctggctggtgatgttcatattgtgagaggagacttcgatgagaatctgaattatccagaacagaaagttgtgactgttggacagttcaaaattggtctgatccatggacatcaagttattccatggggagatatggccagcttagccctgttgcagaggcaatttgatgtggacattcttatctcgggacacacacacaaatttgaagcatttgagcatgaaaataaattctacattaatccaggttctgccactggggcatataatgccttggaaacaaacattattccatcatttgtgttgatggatatccaggcttctacagtggtcacctatgtgtatcagctaattggagatgatgtgaaagtagaacgaatcgaatacaaaaaaccttaaagccaggcctgtcttgatgatttttggttttttttcattgtcctgttgaaatcaagtaattaaacatttaagagccacaaaattgtatcacttttataatattttgcagtaaaatataataccatcttctctgttaatacataattgctccaagcttcctgtaaactataagaatatatttagtttacagtatatggattctatgaaaaaatgtccacaacacagtaattggtcacttgttaagaaaaatttatccttgtaagtatcttcaaagttgatatttggaactttattccaaaagtagtgcatgtggagaaagaatctagactttcttgtatacatttttctcttctccagtaataaacaattacctttcatttatactttgataacctgtatttaatttaaaaaaaaacataaaaatgaggaaccaagtgaaactacggatataaatattaaagtggacgagatgacctttcagagctcttctcttacattgtgtcataatgttggactcagattttatttgctaaataatataccatgccgacattaacagtgattcttcaaactgttgctatttccatttttcaaggtttaataaaagttttaaaaatacaagtttaggggccgggcacagtggctcacaccctaatcccaacactttgggaggctgaggcaggtggatcacctgaggtcaggagttcaagaccagcctggccaacatggtgaaaccctgtctgtactaaaaatacaaaattagccagcatggtgctacatgcctgtattcccagctactcgggaggctgaggcagtagaatcacttgaatcctggagttggaggttgcagtgagccgagatcacaccattgcactccagcctggtcaacaagagcataactccgtctc

SEQ ID NO: 199406 - DNA, 818 bp, Homo sapiens
  Payload ID: 19342
  Gene Name: VPS29 retromer complex component
  ENST ID: ENST00000549970
  CDS Start-End: 436-699
gaggagcctgaggaagagggcggcgacggtggtggtgactgagcggagcccggtgacaggatggctgggcacagagtaagtttcttcacttagctcctactaacagtggtggttgggtggctgtttactgactggatttcttacccttttaagttggtgttggtattaggagatctgcacatcccacaccggtgcaacagtttgccagctaaattcaaaaaactcctggtgccaggaaaaattcagcacattctctgcacaggaaacctttgcaccaaagagagttatgactatctcaagactctggctggtgatgttcatattgtgagaggagacttcgatgagaatctgaattatccagaacagaaagttgtgactgttggacagttcaaaattggtctgatccatggacatcaagttattccatggggagatatggccagcttagccctgttgcagaggcaatttgatgtggacattcttatctcgggacacacacacaaatttgaagcatttgagcatgaaaataaattctacattaatccaggttctgccactggggcatataatgccttggaaacaaacattattccatcatttgtgttgatggatatccaggcttctacagtggtcacctatgtgtatcagctaattggagatgatgtgaaagtagaacgaatcgaatacaaaaaaccttaaagccaggcctgtcttgatgatttttggttttttttcattgtcctgttgaaatcaagtaattaaacatttaagagccacaaaattgtatcacttttataatattttgcagtaaaatataa

SEQ ID NO: 199407 - DNA, 1059 bp, Homo sapiens
  Payload ID: 19342
  Gene Name: VPS29 retromer complex component
  ENST ID: ENST00000546588
  CDS Start-End: 101-745
gcggcgacggtggtggtgactgagcggagcccggtgacaggatgggaaagggaataaaccaccctcctcgctcctgaaataacatctagctgccattgagatgagcaggtgtgctctcagagggcgggatttggcgcttgcaattgctggaactgtttctttccacgggttgctacgcctctttagggctgggcacagattggtgttggtattaggagatctgcacatcccacaccggtgcaacagtttgccagctaaattcaaaaaactcctggtgccaggaaaaattcagcacattctctgcacaggaaacctttgcaccaaagagagttatgactatctcaagactctggctggtgatgttcatattgtgagaggagacttcgatgagaatctgaattatccagaacagaaagttgtgactgttggacagttcaaaattggtctgatccatggacatcaagttattccatggggagatatggccagcttagccctgttgcagaggcaatttgatgtggacattcttatctcgggacacacacacaaatttgaagcatttgagcatgaaaataaattctacattaatccaggttctgccactggggcatataatgccttggaaacaaacattattccatcatttgtgttgatggatatccaggcttctacagtggtcacctatgtgtatcagctaattggagatgatgtgaaagtagaacgaatcgaatacaaaaaaccttaaagccaggcctgtcttgatgatttttggttttttttcattgtcctgttgaaatcaagtaattaaacatttaagagccacaaaattgtatcacttttataatattttgcagtaaaatataataccatcttctctgttaatacataattgctccaagcttcctgtaaactataagaatatatttagtttacagtatatggattctatgaaaaaatgtccacaacacagtaattggtcacttgttaagaaaaatttatccttgtaagtatcttcaaagttgatatttggaactttattccaaaagtagtgcatgtgga

SEQ ID NO: 199408 - DNA, 1057 bp, Homo sapiens
  Payload ID: 19342
  Gene Name: VPS29 retromer complex component
  ENST ID: ENST00000552130
  CDS Start-End: 413-676
gctgggcacagagtaagtttcttcacttagctcctactaacagtggtggttgggtggctgtttactgactggatttcttacccttttaagaaggaatccccctctaaaatgaagattgttctatatccagttggtgttggtattaggagatctgcacatcccacaccggtgcaacagtttgccagctaaattcaaaaaactcctggtgccaggaaaaattcagcacattctctgcacaggaaacctttgcaccaaagagagttatgactatctcaagactctggctggtgatgttcatattgtgagaggagacttcgatgagaatctgaattatccagaacagaaagttgtgactgttggacagttcaaaattggtctgatccatggacatcaagttattccatggggagatatggccagcttagccctgttgcagaggcaatttgatgtggacattcttatctcgggacacacacacaaatttgaagcatttgagcatgaaaataaattctacattaatccaggttctgccactggggcatataatgccttggaaacaaacattattccatcatttgtgttgatggatatccaggcttctacagtggtcacctatgtgtatcagctaattggagatgatgtgaaagtagaacgaatcgaatacaaaaaaccttaaagccaggcctgtcttgatgatttttggttttttttcattgtcctgttgaaatcaagtaattaaacatttaagagccacaaaattgtatcacttttataatattttgcagtaaaatataataccatcttctctgttaatacataattgctccaagcttcctgtaaactataagaatatatttagtttacagtatatggattctatgaaaaaatgtccacaacacagtaattggtcacttgttaagaaaaatttatccttgtaagtatcttcaaagttgatatttggaactttattccaaaagtagtgcatgtggagaaagaatctagactttcttgtatacatttttctcttctccagtaataaacaattacctttcattta

SEQ ID NO: 199409 - DNA, 1124 bp, Homo sapiens
  Payload ID: 19342
  Gene Name: VPS29 retromer complex component
  ENST ID: ENST00000621131
  CDS Start-End: 1-645
atgagcaggtgtgctctcagagggcgggatttggcgcttgcaattgctggaactgtttctttccacgggttgctacgcctctttagggctgggcacagattggtgttggtattaggagatctgcacatcccacaccggtgcaacagtttgccagctaaattcaaaaaactcctggtgccaggaaaaattcagcacattctctgcacaggaaacctttgcaccaaagagagttatgactatctcaagactctggctggtgatgttcatattgtgagaggagacttcgatgagaatctgaattatccagaacagaaagttgtgactgttggacagttcaaaattggtctgatccatggacatcaagttattccatggggagatatggccagcttagccctgttgcagaggcaatttgatgtggacattcttatctcgggacacacacacaaatttgaagcatttgagcatgaaaataaattctacattaatccaggttctgccactggggcatataatgccttggaaacaaacattattccatcatttgtgttgatggatatccaggcttctacagtggtcacctatgtgtatcagctaattggagatgatgtgaaagtagaacgaatcgaatacaaaaaaccttaaagccaggcctgtcttgatgatttttggttttttttcattgtcctgttgaaatcaagtaattaaacatttaagagccacaaaattgtatcacttttataatattttgcagtaaaatataataccatcttctctgttaatacataattgctccaagcttcctgtaaactataagaatatatttagtttacagtatatggattctatgaaaaaatgtccacaacacagtaattggtcacttgttaagaaaaatttatccttgtaagtatcttcaaagttgatatttggaactttattccaaaagtagtgcatgtggagaaagaatctagactttcttgtatacatttttctcttctccagtaataaacaattacctttcatttatactttgataacctgtatttaatttaaaaaaaaacataaaaatgaggaaccaagtgaaactacggatataaatattaaagtggacgagatgacctttc

SEQ ID NO: 199410 - DNA, 2614 bp, Homo sapiens
  Payload ID: 19343
  Gene Name: VPS33B interacting protein, apical-basolateral polarity regulator, spe-39 homolog
  Uniprot ID: Q9H9C1
  ENST ID: ENST00000327028
  CDS Start-End: 339-1673
agaagggctggtccagcggcggcggaggctggcgctgtcctgagagggagggctctgtgcggaagagtcagggcgacccttgggcgctggagtacgcttgggactggggctgcgagtgagcaccagcgattggttcggaagcggacatttggttcagaacgagcatttaactctgccagggatccgctgggctctgacgactgcggtagatccatggcttcctggacgttcacccgtagagtcatcctagcttaactcttgttccctggtctcagttcacaagcctcacctgtatcttcctggctcggaagataattgaaaccaagtctgacttctcaatgaatcggacaaagggtgatgaggaggagtattggaacagctccaagttcaaggcttttacctttgacgatgaagacgatgagctttcacagttaaaggagtccaagcgggcggtgaacagcctccgagacttcgtggatgatgatgacgatgatgacctggagcgagtcagctggagtggggaacctgtgggaagtagaactagacctggaagtttccagtccctttctgatgctctgtcagacacacctgccaaaagctatgctccagagctggggagacccaaaggggagtatagggattacagcaatgactggagccccagtgatacagtgcgacgtctccggaagggcaaggtttgctcactagagagattccgctccttacaggacaaactacaactcctagaagaggcagtaagcatgcatgatggaaacgtcattactgcagttctgattttcctgaagaggacactgagcaaagagatcctcttccgagagctggaggtgcgacaggttgccctgagacatcttattcacttccttaaggaaataggggatcaaaagttgcttttagacctcttcaggttcctagatagaacagaagagcttgcgctatctcattatcgagagcatttgaacattcaggaccctgacaaacgaaaagaatttcttaaaacctgtgttggtttgccattttcagcagaagattccgcacacatacaggaccattacacgctcctggaacgtcagatcattattgaggcaaatgatcgccatctagaatcagcaggacagactgagatcttccgaaagcacccccgcaaagcctccatcctcaacatgccactagtgacaacacttttctactcctgcttctatcactacacagaggctgaggggacattcagcagtcccgtcaacctgaagaagacatttaagatcccagataaacagtatgtgctgacagccctggctgctcgtgccaagcttcgagcctggaatgatgtagatgccctattcaccacaaagaactggctgggctataccaagaagagagcacccattggcttccatcgggttgtcgaaattttgcacaagaacaatgcccctgtgcagatattacaggagtatgtcaatctggtggaagatgtggacacgaagttgaacttagccactaagttcaagtgccatgatgtcgtcattgatacctaccgggacctgaaggatcgtcaacagttgctagcatacaggagtaaggtagataaaggatcagcagaggaggagaagattgatgctcttctcagcagctcgcaaattcgatggaagaattaagtggcattgactaccttgaagcctgcctcatttcctcctctcctgcctgtgaaagcagagagagctcttctttgggagagctgcggcatcacatcgcttgggcccattacccatgggcagtgccagctactcttgacacagataacttcagactgatcttctgtccaaggaacatcatctgaggatcgagatctaaagctttgagtcatgagaatgattctctccacctggtgctcatatgaaggtgggagtgatttctagattgggcccctactgggtaagatctcacttggtctgagaaaagtgactgctccagaaaggaagaggtatgggagtcatagggtggctactgcattccactcagctaattatgatccaggacttggcgctggacattggcagttctgctctgaatgaagtcagaacagaaccaaaatggcctcaggaaggaatgccagtgtttcccaagacctcctggagatgcactcacaccagactgcacagacccctccacattatgccacacatggcctagacgttgtgtttcctcagccattttccctctgctgccccagtttactctgtccaaaaccctaaggttcttctctcacttgaacacagacgaccttgcttgggtgatgagacatcccctttatctcttcctctactgctggccaagacccgtcactttataagaagctcagatgcagcagtgctggagagctctctctttatgcaaaaatctcatttcaccaggagctttcagaagtttcacctgggctaaattcagcagcatttctgttaggatatttagatggaggttttattttcacacttggattcttgctctgtaccaatatttgcctccttttctgtgactgaactgggtttttctgacatgcctagactcctaataaaggtatttcttccttggtgccttc

SEQ ID NO: 199411 - DNA, 2761 bp, Homo sapiens
  Payload ID: 19343
  Gene Name: VPS33B interacting protein, apical-basolateral polarity regulator, spe-39 homolog
  Uniprot ID: Q9H9C1
  ENST ID: ENST00000343765
  CDS Start-End: 339-1820
agaagggctggtccagcggcggcggaggctggcgctgtcctgagagggagggctctgtgcggaagagtcagggcgacccttgggcgctggagtacgcttgggactggggctgcgagtgagcaccagcgattggttcggaagcggacatttggttcagaacgagcatttaactctgccagggatccgctgggctctgacgactgcggtagatccatggcttcctggacgttcacccgtagagtcatcctagcttaactcttgttccctggtctcagttcacaagcctcacctgtatcttcctggctcggaagataattgaaaccaagtctgacttctcaatgaatcggacaaagggtgatgaggaggagtattggaacagctccaagttcaaggcttttacctttgacgatgaagacgatgagctttcacagttaaaggagtccaagcgggcggtgaacagcctccgagacttcgtggatgatgatgacgatgatgacctggagcgagtcagctggagtggggaacctgtgggaagtatctcatggtccatcagagagactgctggtaatagcggctcaacccacgaggggcgtgaacagctaaagagccgaaacagcttctcctcctatgcacaactacccaagcctacttctacctactccctgagcagcttttttagaggtagaactagacctggaagtttccagtccctttctgatgctctgtcagacacacctgccaaaagctatgctccagagctggggagacccaaaggggagtatagggattacagcaatgactggagccccagtgatacagtgcgacgtctccggaagggcaaggtttgctcactagagagattccgctccttacaggacaaactacaactcctagaagaggcagtaagcatgcatgatggaaacgtcattactgcagttctgattttcctgaagaggacactgagcaaagagatcctcttccgagagctggaggtgcgacaggttgccctgagacatcttattcacttccttaaggaaataggggatcaaaagttgcttttagacctcttcaggttcctagatagaacagaagagcttgcgctatctcattatcgagagcatttgaacattcaggaccctgacaaacgaaaagaatttcttaaaacctgtgttggtttgccattttcagcagaagattccgcacacatacaggaccattacacgctcctggaacgtcagatcattattgaggcaaatgatcgccatctagaatcagcaggacagactgagatcttccgaaagcacccccgcaaagcctccatcctcaacatgccactagtgacaacacttttctactcctgcttctatcactacacagaggctgaggggacattcagcagtcccgtcaacctgaagaagacatttaagatcccagataaacagtatgtgctgacagccctggctgctcgtgccaagcttcgagcctggaatgatgtagatgccctattcaccacaaagaactggctgggctataccaagaagagagcacccattggcttccatcgggttgtcgaaattttgcacaagaacaatgcccctgtgcagatattacaggagtatgtcaatctggtggaagatgtggacacgaagttgaacttagccactaagttcaagtgccatgatgtcgtcattgatacctaccgggacctgaaggatcgtcaacagttgctagcatacaggagtaaggtagataaaggatcagcagaggaggagaagattgatgctcttctcagcagctcgcaaattcgatggaagaattaagtggcattgactaccttgaagcctgcctcatttcctcctctcctgcctgtgaaagcagagagagctcttctttgggagagctgcggcatcacatcgcttgggcccattacccatgggcagtgccagctactcttgacacagataacttcagactgatcttctgtccaaggaacatcatctgaggatcgagatctaaagctttgagtcatgagaatgattctctccacctggtgctcatatgaaggtgggagtgatttctagattgggcccctactgggtaagatctcacttggtctgagaaaagtgactgctccagaaaggaagaggtatgggagtcatagggtggctactgcattccactcagctaattatgatccaggacttggcgctggacattggcagttctgctctgaatgaagtcagaacagaaccaaaatggcctcaggaaggaatgccagtgtttcccaagacctcctggagatgcactcacaccagactgcacagacccctccacattatgccacacatggcctagacgttgtgtttcctcagccattttccctctgctgccccagtttactctgtccaaaaccctaaggttcttctctcacttgaacacagacgaccttgcttgggtgatgagacatcccctttatctcttcctctactgctggccaagacccgtcactttataagaagctcagatgcagcagtgctggagagctctctctttatgcaaaaatctcatttcaccaggagctttcagaagtttcacctgggctaaattcagcagcatttctgttaggatatttagatggaggttttattttcacacttggattcttgctctgtaccaatatttgcctccttttctgtgactgaactgggtttttctgacatgcctagactcctaataaaggtatttcttccttggtgccttc

SEQ ID NO: 199412 - DNA, 1623 bp, Homo sapiens
  Payload ID: 19343
  Gene Name: VPS33B interacting protein, apical-basolateral polarity regulator, spe-39 homolog
  Uniprot ID: Q9H9C1
  ENST ID: ENST00000448935
  CDS Start-End: 93-1427
cttctctaagctgcacagcctgaatagaagggctggtccagcggcggcggaggctggcgctgtcctgagagggagggctctgtgcggaagagatgaatcggacaaagggtgatgaggaggagtattggaacagctccaagttcaaggcttttacctttgacgatgaagacgatgagctttcacagttaaaggagtccaagcgggcggtgaacagcctccgagacttcgtggatgatgatgacgatgatgacctggagcgagtcagctggagtggggaacctgtgggaagtagaactagacctggaagtttccagtccctttctgatgctctgtcagacacacctgccaaaagctatgctccagagctggggagacccaaaggggagtatagggattacagcaatgactggagccccagtgatacagtgcgacgtctccggaagggcaaggtttgctcactagagagattccgctccttacaggacaaactacaactcctagaagaggcagtaagcatgcatgatggaaacgtcattactgcagttctgattttcctgaagaggacactgagcaaagagatcctcttccgagagctggaggtgcgacaggttgccctgagacatcttattcacttccttaaggaaataggggatcaaaagttgcttttagacctcttcaggttcctagatagaacagaagagcttgcgctatctcattatcgagagcatttgaacattcaggaccctgacaaacgaaaagaatttcttaaaacctgtgttggtttgccattttcagcagaagattccgcacacatacaggaccattacacgctcctggaacgtcagatcattattgaggcaaatgatcgccatctagaatcagcaggacagactgagatcttccgaaagcacccccgcaaagcctccatcctcaacatgccactagtgacaacacttttctactcctgcttctatcactacacagaggctgaggggacattcagcagtcccgtcaacctgaagaagacatttaagatcccagataaacagtatgtgctgacagccctggctgctcgtgccaagcttcgagcctggaatgatgtagatgccctattcaccacaaagaactggctgggctataccaagaagagagcacccattggcttccatcgggttgtcgaaattttgcacaagaacaatgcccctgtgcagatattacaggagtatgtcaatctggtggaagatgtggacacgaagttgaacttagccactaagttcaagtgccatgatgtcgtcattgatacctaccgggacctgaaggatcgtcaacagttgctagcatacaggagtaaggtagataaaggatcagcagaggaggagaagattgatgctcttctcagcagctcgcaaattcgatggaagaattaagtggcattgactaccttgaagcctgcctcatttcctcctctcctgcctgtgaaagcagagagagctcttctttgggagagctgcggcatcacatcgcttgggcccattacccatgggcagtgccagctactcttgacacagataacttcagactgatcttctgtccaaggaacatcatctgaggatcgagatctaa

SEQ ID NO: 199413 - DNA, 1832 bp, Homo sapiens
  Payload ID: 19343
  Gene Name: VPS33B interacting protein, apical-basolateral polarity regulator, spe-39 homolog
  ENST ID: ENST00000556412
  CDS Start-End: 171-1730
gaatagaagggctggtccagcggcggcggaggctggcgctgtcctgagagggagggctctgtgcggaagaggtgagggtgtcccaagccccttgggtcgcgtatctggctggatccagcctctccgcatcttgatcttttcccctcttctaggaggcatccctacaccctatgactacaggcctgattctcttctttcagtcagggcgacccttgggcgctggagtacgcttgggactggggctgcgaatgaatcggacaaagggtgatgaggaggagtattggaacagctccaagttcaaggcttttacctttgacgatgaagacgatgagctttcacagttaaaggagtccaagcgggcggtgaacagcctccgagacttcgtggatgatgatgacgatgatgacctggagcgagtcagctggagtggggaacctgtgggaagtatctcatggtccatcagagagactgctggtaatagcggctcaacccacgaggggcgtgaacagctaaagagccgaaacagcttctcctcctatgcacaactacccaagcctacttctacctactccctgagcagcttttttagaggtagaactagacctggaagtttccagtccctttctgatgctctgtcagacacacctgccaaaagctatgctccagagctggggagacccaaaggggagtatagggattacagcaatgactggagccccagtgatacagtgcgacgtctccggaagggcaaggtttgctcactagagagattccgctccttacaggacaaactacaactcctagaagaggcagtaagcatgcatgatggaaacgtcattactgcagttctgattttcctgaagaggacactgagcaaagagatcctcttccgagagctggaggtgcgacaggttgccctgagacatcttattcacttccttaaggaaataggggatcaaaagttgcttttagacctcttcaggttcctagatagaacagaagagcttgcgctatctcattatcgagagcatttgaacattcaggaccctgacaaacgaaaagaatttcttaaaacctgtgttggtttgccattttcagcagaagattccgcacacatacaggaccattacacgctcctggaacgtcagatcattattgaggcaaatgatcgccatctagaatcagcaggacagactgagatcttccgaaagcacccccgcaaagcctccatcctcaacatgccactagtgacaacacttttctactcctgcttctatcactacacagaggctgaggggacattcagcagtcccgtcaacctgaagaagacatttaagatcccagataaacagtatgtgctgacagccctggctgctcgtgccaagcttcgagcctggaatgatgtagatgccctattcaccacaaagaactggctgggctataccaagaagagagcacccattggcttccatcgggttgtcgaaattttgcacaagaacaatgcccctgtgcagatattacaggagtatgtcaatctggtggaagatgtggacacgaagttgaacttagccactaagttcaagtgccatgatgtcgtcattgatacctaccgggacctgaaggatcgtcaacagttgctagcatacaggagtaaggtagataaaggatcagcagaggaggagaagattgatgctcttctcagcagctcgcaaattcgatggaagaattaagtggcattgactaccttgaagcctgcctcatttcctcctctcctgcctgtgaaagcagagagagctcttctttgggagagctgcggcatcacatcgcttggg

SEQ ID NO: 199414 - DNA, 533 bp, Homo sapiens
  Payload ID: 19343
  Gene Name: VPS33B interacting protein, apical-basolateral polarity regulator, spe-39 homolog
  ENST ID: ENST00000557466
  CDS Start-End: 398-533
acagcctgaatagaagggctggtccagcggcggcggaggctggcgctgtcctgagagggagggctctgtgcggaagaggaggcatccctacaccctatgactacaggcctgattctcttctttcagtcagggcgacccttgggcgctggagtacgcttgggactggggctgcgagtgagcaccagcgattggttcggaagcggacatttggttcagaacgagcatttaactctgccagggatccgctgggctctgacgactgcggtagatccatggcttcctggacgttcacccgtagagtcatcctagcttaactcttgttccctggtctcagttcacaagcctcacctgtatcttcctggctcggaagataattgaaaccaagtctgacttctcaatgaatcggacaaagggtgatgaggaggagtattggaacagctccaagttcaaggcttttacctttgacgatgaagacgatgagctttcacagttaaaggagtccaagcgggcggtgaacagcctccgagacttcg

SEQ ID NO: 199415 - DNA, 2934 bp, Homo sapiens
  Payload ID: 19343
  Gene Name: VPS33B interacting protein, apical-basolateral polarity regulator, spe-39 homolog
  Uniprot ID: Q9H9C1
  ENST ID: ENST00000553888
  CDS Start-End: 512-1993
gattattcccttccgcccccttctctaagctgcacagcctgaatagaagggctggtccagcggcggcggaggctggcgctgtcctgagagggagggctctgtgcggaagaggtgagggtgtcccaagccccttgggtcgcgtatctggctggatccagcctctccgcatcttgatcttttcccctcttctaggaggcatccctacaccctatgactacaggcctgattctcttctttcagtcagggcgacccttgggcgctggagtacgcttgggactggggctgcgagtgagcaccagcgattggttcggaagcggacatttggttcagaacgagcatttaactctgccagggatccgctgggctctgacgactgcggtagatccatggcttcctggacgttcacccgtagagtcatcctagcttaactcttgttccctggtctcagttcacaagcctcacctgtatcttcctggctcggaagataattgaaaccaagtctgacttctcaatgaatcggacaaagggtgatgaggaggagtattggaacagctccaagttcaaggcttttacctttgacgatgaagacgatgagctttcacagttaaaggagtccaagcgggcggtgaacagcctccgagacttcgtggatgatgatgacgatgatgacctggagcgagtcagctggagtggggaacctgtgggaagtatctcatggtccatcagagagactgctggtaatagcggctcaacccacgaggggcgtgaacagctaaagagccgaaacagcttctcctcctatgcacaactacccaagcctacttctacctactccctgagcagcttttttagaggtagaactagacctggaagtttccagtccctttctgatgctctgtcagacacacctgccaaaagctatgctccagagctggggagacccaaaggggagtatagggattacagcaatgactggagccccagtgatacagtgcgacgtctccggaagggcaaggtttgctcactagagagattccgctccttacaggacaaactacaactcctagaagaggcagtaagcatgcatgatggaaacgtcattactgcagttctgattttcctgaagaggacactgagcaaagagatcctcttccgagagctggaggtgcgacaggttgccctgagacatcttattcacttccttaaggaaataggggatcaaaagttgcttttagacctcttcaggttcctagatagaacagaagagcttgcgctatctcattatcgagagcatttgaacattcaggaccctgacaaacgaaaagaatttcttaaaacctgtgttggtttgccattttcagcagaagattccgcacacatacaggaccattacacgctcctggaacgtcagatcattattgaggcaaatgatcgccatctagaatcagcaggacagactgagatcttccgaaagcacccccgcaaagcctccatcctcaacatgccactagtgacaacacttttctactcctgcttctatcactacacagaggctgaggggacattcagcagtcccgtcaacctgaagaagacatttaagatcccagataaacagtatgtgctgacagccctggctgctcgtgccaagcttcgagcctggaatgatgtagatgccctattcaccacaaagaactggctgggctataccaagaagagagcacccattggcttccatcgggttgtcgaaattttgcacaagaacaatgcccctgtgcagatattacaggagtatgtcaatctggtggaagatgtggacacgaagttgaacttagccactaagttcaagtgccatgatgtcgtcattgatacctaccgggacctgaaggatcgtcaacagttgctagcatacaggagtaaggtagataaaggatcagcagaggaggagaagattgatgctcttctcagcagctcgcaaattcgatggaagaattaagtggcattgactaccttgaagcctgcctcatttcctcctctcctgcctgtgaaagcagagagagctcttctttgggagagctgcggcatcacatcgcttgggcccattacccatgggcagtgccagctactcttgacacagataacttcagactgatcttctgtccaaggaacatcatctgaggatcgagatctaaagctttgagtcatgagaatgattctctccacctggtgctcatatgaaggtgggagtgatttctagattgggcccctactgggtaagatctcacttggtctgagaaaagtgactgctccagaaaggaagaggtatgggagtcatagggtggctactgcattccactcagctaattatgatccaggacttggcgctggacattggcagttctgctctgaatgaagtcagaacagaaccaaaatggcctcaggaaggaatgccagtgtttcccaagacctcctggagatgcactcacaccagactgcacagacccctccacattatgccacacatggcctagacgttgtgtttcctcagccattttccctctgctgccccagtttactctgtccaaaaccctaaggttcttctctcacttgaacacagacgaccttgcttgggtgatgagacatcccctttatctcttcctctactgctggccaagacccgtcactttataagaagctcagatgcagcagtgctggagagctctctctttatgcaaaaatctcatttcaccaggagctttcagaagtttcacctgggctaaattcagcagcatttctgttaggatatttagatggaggttttattttcacacttggattcttgctctgtaccaatatttgcctccttttctgtgactgaactgggtttttctgacatgcctagactcctaataaaggtatttcttccttggtgccttc

SEQ ID NO: 199416 - DNA, 2562 bp, Homo sapiens
  Payload ID: 19343
  Gene Name: VPS33B interacting protein, apical-basolateral polarity regulator, spe-39 homolog
  Uniprot ID: Q9H9C1
  ENST ID: ENST00000557658
  CDS Start-End: 147-1628
gcggtctcgttattcgtgttttctctccgccctacgattattcccttccgcccccttctctaagctgcacagcctgaatagaagggctggtccagcggcggcggaggctggcgctgtcctgagagggagggctctgtgcggaagagatgaatcggacaaagggtgatgaggaggagtattggaacagctccaagttcaaggcttttacctttgacgatgaagacgatgagctttcacagttaaaggagtccaagcgggcggtgaacagcctccgagacttcgtggatgatgatgacgatgatgacctggagcgagtcagctggagtggggaacctgtgggaagtatctcatggtccatcagagagactgctggtaatagcggctcaacccacgaggggcgtgaacagctaaagagccgaaacagcttctcctcctatgcacaactacccaagcctacttctacctactccctgagcagcttttttagaggtagaactagacctggaagtttccagtccctttctgatgctctgtcagacacacctgccaaaagctatgctccagagctggggagacccaaaggggagtatagggattacagcaatgactggagccccagtgatacagtgcgacgtctccggaagggcaaggtttgctcactagagagattccgctccttacaggacaaactacaactcctagaagaggcagtaagcatgcatgatggaaacgtcattactgcagttctgattttcctgaagaggacactgagcaaagagatcctcttccgagagctggaggtgcgacaggttgccctgagacatcttattcacttccttaaggaaataggggatcaaaagttgcttttagacctcttcaggttcctagatagaacagaagagcttgcgctatctcattatcgagagcatttgaacattcaggaccctgacaaacgaaaagaatttcttaaaacctgtgttggtttgccattttcagcagaagattccgcacacatacaggaccattacacgctcctggaacgtcagatcattattgaggcaaatgatcgccatctagaatcagcaggacagactgagatcttccgaaagcacccccgcaaagcctccatcctcaacatgccactagtgacaacacttttctactcctgcttctatcactacacagaggctgaggggacattcagcagtcccgtcaacctgaagaagacatttaagatcccagataaacagtatgtgctgacagccctggctgctcgtgccaagcttcgagcctggaatgatgtagatgccctattcaccacaaagaactggctgggctataccaagaagagagcacccattggcttccatcgggttgtcgaaattttgcacaagaacaatgcccctgtgcagatattacaggagtatgtcaatctggtggaagatgtggacacgaagttgaacttagccactaagttcaagtgccatgatgtcgtcattgatacctaccgggacctgaaggatcgtcaacagttgctagcatacaggagtaaggtagataaaggatcagcagaggaggagaagattgatgctcttctcagcagctcgcaaattcgatggaagaattaagtggcattgactaccttgaagcctgcctcatttcctcctctcctgcctgtgaaagcagagagagctcttctttgggagagctgcggcatcacatcgcttgggcccattacccatgggcagtgccagctactcttgacacagataacttcagactgatcttctgtccaaggaacatcatctgaggatcgagatctaaagctttgagtcatgagaatgattctctccacctggtgctcatatgaaggtgggagtgatttctagattgggcccctactgggtaagatctcacttggtctgagaaaagtgactgctccagaaaggaagaggtatgggagtcatagggtggctactgcattccactcagctaattatgatccaggacttggcgctggacattggcagttctgctctgaatgaagtcagaacagaaccaaaatggcctcaggaaggaatgccagtgtttcccaagacctcctggagatgcactcacaccagactgcacagacccctccacattatgccacacatggcctagacgttgtgtttcctcagccattttccctctgctgccccagtttactctgtccaaaaccctaaggttcttctctcacttgaacacagacgaccttgcttgggtgatgagacatcccctttatctcttcctctactgctggccaagacccgtcactttataagaagctcagatgcagcagtgctggagagctctctctttatgcaaaaatctcatttcaccaggagctttcagaagtttcacctgggctaaattcagcagcatttctgttaggatatttagatggaggttttattttcacacttggattcttgctctgtaccaatatttgcctccttttctgtgactgaactgggtttttctgacatgcctagactcctaataaaggtatttcttccttgg

SEQ ID NO: 199417 - DNA, 6790 bp, Homo sapiens
  Payload ID: 19344
  Gene Name: VPS35 retromer complex component
  Uniprot ID: Q96QK1
  ENST ID: ENST00000299138
  CDS Start-End: 60-2450
gaccgcgggaggctacgcgcggggcgggtgctgcttgctgcaggctctggggagtcgccatgcctacaacacagcagtcccctcaggatgagcaggaaaagctcttggatgaagccatacaggctgtgaaggtccagtcattccaaatgaagagatgcctggacaaaaacaagcttatggatgctctaaaacatgcttctaatatgcttggtgaactccggacttctatgttatcaccaaagagttactatgaactttatatggccatttctgatgaactgcactacttggaggtctacctgacagatgagtttgctaaaggaaggaaagtggcagatctctacgaacttgtacagtatgctggaaacattatcccaaggctttaccttttgatcacagttggagttgtatatgtcaagtcatttcctcagtccaggaaggatattttgaaagatttggtagaaatgtgccgtggtgtgcaacatcccttgaggggtctgtttcttcgaaattaccttcttcagtgtaccagaaatatcttacctgatgaaggagagccaacagatgaagaaacaactggtgacatcagtgattccatggattttgtactgctcaactttgcagaaatgaacaagctctgggtgcgaatgcagcatcagggacatagccgagatagagaaaaaagagaacgagaaagacaagaactgagaattttagtgggaacaaatttggtgcgcctcagtcagttggaaggtgtaaatgtggaacgttacaaacagattgttttgactggcatattggagcaagttgtaaactgtagggatgctttggctcaagaatatctcatggagtgtattattcaggttttccctgatgaatttcacctccagactttgaatccttttcttcgggcctgtgctgagttacaccagaatgtaaatgtgaagaacataatcattgctttaattgatagattagctttatttgctcaccgtgaagatggacctggaatcccagcggatattaaactttttgatatattttcacagcaggtggctacagtgatacagtctagacaagacatgccttcagaggatgttgtatctttacaagtctctctgattaatcttgccatgaaatgttaccctgatcgtgtggactatgttgataaagttctagaaacaacagtggagatattcaataagctcaaccttgaacatattgctaccagtagtgcagtttcaaaggaactcaccagacttttgaaaataccagttgacacttacaacaatattttaacagtcttgaaattaaaacattttcacccactctttgagtactttgactacgagtccagaaagagcatgagttgttatgtgcttagtaatgttctggattataacacagaaattgtctctcaagaccaggtggattccataatgaatttggtatccacgttgattcaagatcagccagatcaacctgtagaagaccctgatccagaagattttgctgatgagcagagccttgtgggccgcttcattcatctgctgcgctctgaggaccctgaccagcagtacttgattttgaacacagcacgaaaacattttggagctggtggaaatcagcggattcgcttcacactgccacctttggtatttgcagcttaccagctggcttttcgatataaagagaattctaaagtggatgacaaatgggaaaagaaatgccagaagattttttcatttgcccaccagactatcagtgctttgatcaaagcagagctggcagaattgcccttaagactttttcttcaaggagcactagctgctggggaaattggttttgaaaatcatgagacagtcgcatatgaattcatgtcccaggcattttctctgtatgaagatgaaatcagcgattccaaagcacagctagctgccatcaccttgatcattggcacttttgaaaggatgaagtgcttcagtgaagagaatcacgaacctctgaggactcagtgtgcccttgctgcatccaaacttctaaagaaacctgatcagggccgagctgtgagcacctgtgcacatctcttctggtctggcagaaacacggacaaaaatggggaggagcttcacggaggcaagagggtaatggagtgcctaaaaaaagctctaaaaatagcaaatcagtgcatggacccctctctacaagtgcagctttttatagaaattctgaacagatatatctatttttatgaaaaggaaaatgatgcggtaacaattcaggttttaaaccagcttatccaaaagattcgagaagacctcccgaatcttgaatccagtgaagaaacagagcagattaacaaacattttcataacacactggagcatttgcgcttgcggcgggaatcaccagaatccgaggggccaatttatgaaggtctcatcctttaaaaaggaaatagctcaccatactcctttccatgtacatccagtgagggttttattacgctaggtttcccttccatagattgtgcctttcagaaatgctgaggtaggtttcccatttcttacctgtgatgtgttttacccagcacctccggacactcaccttcaggaccttaataaaattattcacttggtaagtgttcaagtctttctgatcaccccaagtagcatgactgatctgcaatttaaaattcctgtgatctgtaaaaaaaaaaaaaaaaaaaaacacaaaacccacaagcacttatcttggctactaatgaagctctccttttttttgtttgtttgtttgcttcattgttgattgtgtattttcttcattcctggggagtactaacccaaaagcgtctgtctcttgttttctagtccagtttgagattaatttagaagaaaggaatactgtatgtgaaattcatcttgggctttcccctaaattgcaagataaggccatgtgtaagattttccctaaaactagaatatattaatgcatgtttgagaattttaaagcaccatggtcaaaaccagaagctatattttgcatatttggactcagccatccattaagaacccatgttgtcctctggacatatttatcaatataattgggttttaaatagtataaaagaaaacttgtgatctatataatttatgtatcaccttcattgtaaatttagcaggaaatgcatcacaattatgatttttttttttgcaccagtgaaacaataaagatgctattaacaattttggagctttttttcccctttcatactatctttaattgataaaaagtactagtagtatggctatagagtttaatagtcattctcatatattcacagagctcacttaactctagttttaagcacttgttgaacaaggcagcatctactcttttagtcatttataccccttttctttcctcaactttaccctgcttttcccaaggcatgatgaattcacataaaccccccaaaggctcaccaccgatactagttacctactatataataaaccatcccaaaacttactgtcttaaaacagcaaacatttatctcacaggtctctggatcaggaatttgggagcagcttagctggtggttctggcaaagagtgtggtgtaaggttgcaaacaagatactggttggggctgcagtcatctgatgctttgactggggctgacttttctgctcactgacctggctgttaggcagaggccccagttcctcttcttgagggcagaggccccagttcctctccttgagggcagaggcctaagttcctttccttgagggcagaggccccagttcctctccttgacggcccttccatagagtgtcctcacagcatggtggctggctttcccctgagtatgaaagcaagaaggaaaccacagtgcctttcagtggcctccctgtggaagtgacatgctcatttttgccttattctgtaagtggggagtcactaagtctagcctatattcaagggtaaggagaattaagctccacctcttaaagggaaaatttatagacattttcaaatgactacatcacttaacccctcaccatctgccctcccattgctagcacttgatgactagcccttgctgggctttacatgaacagatgtttcccaaagttataaaattagtaccactaaaatgtatcaaatgttaagccattctgtggtatgtcatagtccagcaaaccctttctgttctttgtaggtgttagtttaccccgtataaacctgattatggcttgacatgtccatattatttacatgttttgtgaaatacaactggaatagtagaaaagacatgagtcaagaacacttgagttggagagcttggtttgcaagtaaggtaatgtcagtacagtgtgtaaattatctcttattttctgggttgaggtaaacccaattttaaaaataataaaccaacaaaagtaaataaaagtgaaacaaaagcactgctagtatccttaacttacagattttttttgttgaacaaaaactgggtaccagatatagttaggcactgaatctaaaggtgaagaagatcatagcctctagcttcaagaacgttagtctgctgtgaagacagacctgtagttacagaagatggtaagggtttgtgcaggagagcagtgaagaagagctttgagggattggggatggggaagttctgcagagggttgtatgaattctcatggaacatcaagtccaatagtttatttagccttctgaggccagtgctttggcctgcagtcccaggctcctcagacccatgggctgaagcaagttatactcttggctgcctgtagtgaaatagatatttagaaattgacttagcatttaaaaccctttatagcaatttgacagagtaattttatgtctattggatgtaataaatatttggctttgtgctttgtgtgtctgctattccctgttctccttttttagtaatttttattgtgtcttacaaaaaagtacctgtccttaattggggtgtggtggggaatccctcacaggtggatggaaacgctgaaccagggcaggcttggtgctgaatggcattaaattccaagactaggggatagtttggggggacacatctaggaagatgctgtgactggatgagagatgcctgccgtgttagactttcctaccctccctttcctgcctctacccaggaaaccagtgattcttagagtccagatgatcccttctttgcctagaaattcatgtttctgactcatcctcaagcctgaaattggtggtcatcaggttaatgaactgcaaaaacagcccctgctgatagacactgctcaaagagagaggcgtttgagttgatcaggcaccagagcacctagaaggagaatgatgagcacttgtgtacagttcgtgtgcagctctcaaaggcattgagaaatgtgacagacctcaaggaataaatgcaccaccacaggcactgaggggatttaaacacaaagtctaggttccagaggggtcttctgttaacatttgctctctcattcagagacctcaaggtaataagctcaagcagaaaggatttcccaacagaattgtctttgacaatgggaattccagactgcatattgtaaatgaaaggtagagaaatctgtgcaggagaccttcctgtttgctggggtttgtcctatggggatgctgtaggcatggacaacagacactgattcaggtgccagtatctacacatttaccatacacttgaattcccaagagtagtgacttgccttaggtttgattaaagacaaatgtttcctggcttgtggtcttgtattgctgattactccagtagggcaccctgcattgtccaacaaaatggtccatgcttccaaaatctctggagagggactgtatattttatttttttgagacggagtcttgctctgtcacccaagcaggagtgcagtggtgcgatcttggctcactgcaacctccgcctccccagttcaagcaattctcctgcctcagcctcccgagtagctgggattacaggcgtgcaccaccatgcctggctaatttttgtatttttagtacagatgggggtttcaccatgttggccaggctggtcacgaacttctgaccttgtgatccacctggctcagcctcccaaagtgctggaattacaggcatgagccaccttgcccagccagattgtatattgtaccactcattgctgtgttcaggcttgcatcagtagtgtcttcaaataagtaaaatcttaggctgtgacttaaatccattttcacttagagaaatagaaacacaaggaaacctttggacgcttcataactgctgggaaaggggtattatcaattgtgtttgagagtcaaactataaattacttcccaaggttagttctacctatgcccaggaatgaacaaggacagcttaaaggttagaagcaagatggagtcatttgggtctgatctctttcactgtcataatttcctcagttacaatttttgtaaaggtggtttcaaatgctttgctgacctcccataaacaaggatgtgccaattgtaacttcagttctgcaattcaagtctgctcccaaaactaaagtccattgaattgcatactgattgataatgttcattacgagtttatcttcccatgtgcagagcaaagacaagaggagatcagccattcctccacctacccagagacgttgcattggaaaggagccgtatcttctagtatggttttgcaaatgtaaaatgtaaaatctatgcacgctcaca

SEQ ID NO: 199418 - DNA, 4017 bp, Homo sapiens
  Payload ID: 19344
  Gene Name: VPS35 retromer complex component
  ENST ID: ENST00000568784
  CDS Start-End: 15-161
tctggggagtcgccatggtgagtgctgagggggcagtggcacctgggtcgaccctccttgtagcccctgctctctcccaccgccccgcactccagcgagtggagaaggggccccacagaccgttcgggattaagaccagcccgatttggcctgcgggataggggacagcaggaggaaggccgcgggcaggctgatccgggccggggtgggcggcggctcttggctgcggccgttgctgagagacggggcggcctctctgtggggttgacttggcatgtaggctttggggtccatgaaggcctgcggcctcctttaagtggaatcggtcacctgcctaccacgaggggaccggtagtcctaggtctgagcgtctggcccccggggcgcgtggaggccctgagactcggaggtggcgccgggacccgcccagatgttgcgtttctacctttgtgcctagttgtgctcggccgtccccacgccctcctggaggggtcgcagtgattccttggcctttcttggcctcatacccgccttcggctgcagtgtttgtcagcgagttctggggacctgcttacatgaatttcctggaaggactcaggctgtcttctaatcctgacggtcgcaaaggagactgattgtttactttagcatttgtgcattgggcgcaccttgcctcttttgtctcgccattgataaaatccaagtatttgacttgctggaagcagtacttctccttagggcccgtctatgacggcagcaaatcgtggtgtggctgttggccggtaaacttgaacttcctcaaaatgtgaatctttgtgtctggttcccacaaagcctacaacacagcagtcccctcaggatgagcaggaaaagctcttggatgaagccatacaggctgtgaaggtccagtcattccaaatgaagagatgcctggacaaaaacaagcttatggatgctctaaaacatgcttctaatatgcttggtgaactccggacttctatgttatcaccaaagagttactatgaactttatatggccatttctgatgaactgcactacttggaggtctacctgacagatgagtttgctaaaggaaggaaagtggcagatctctacgaacttgtacagtatgctggaaacattatcccaaggctttaccttttgatcacagttggagttgtatatgtcaagtcatttcctcagtccaggaaggatattttgaaagatttggtagaaatgtgccgtggtgtgcaacatcccttgaggggtctgtttcttcgaaattaccttcttcagtgtaccagaaatatcttacctgatgaaggagagccaacagatgaagaaacaactggtgacatcagtgattccatggattttgtactgctcaactttgcagaaatgaacaagctctgggtgcgaatgcagcatcagggacatagccgagatagagaaaaaagagaacgagaaagacaagaactgagaattttagtgggaacaaatttggtgcgcctcagtcagttggaaggtgtaaatgtggaacgttacaaacagattgttttgactggcatattggagcaagttgtaaactgtagggatgctttggctcaagaatatctcatggagtgtattattcaggttttccctgatgaatttcacctccagactttgaatccttttcttcgggcctgtgctgagttacaccagaatgtaaatgtgaagaacataatcattgctttaattgatagattagctttatttgctcaccgtgaagatggacctggaatcccagcggatattaaactttttgatatattttcacagcaggtggctacagtgatacagtctagacaagacatgccttcagaggatgttgtatctttacaagtctctctgattaatcttgccatgaaatgttaccctgatcgtgtggactatgttgataaagttctagaaacaacagtggagatattcaataagctcaaccttgaacatattgctaccagtagtgcagtttcaaaggaactcaccagacttttgaaaataccagttgacacttacaacaatattttaacagtcttgaaattaaaacattttcacccactctttgagtactttgactacgagtccagaaagagcatgagttgttatgtgcttagtaatgttctggattataacacagaaattgtctctcaagaccaggtggattccataatgaatttggtatccacgttgattcaagatcagccagatcaacctgtagaagaccctgatccagaagattttgctgatgagcagagccttgtgggccgcttcattcatctgctgcgctctgaggaccctgaccagcagtacttgattttgaacacagcacgaaaacattttggagctggtggaaatcagcggattcgcttcacactgccacctttggtatttgcagcttaccagctggcttttcgatataaagagaattctaaagtggatgacaaatgggaaaagaaatgccagaagattttttcatttgcccaccagactatcagtgctttgatcaaagcagagctggcagaattgcccttaagactttttcttcaaggagcactagctgctggggaaattggttttgaaaatcatgagacagtcgcatatgaattcatgtcccaggcattttctctgtatgaagatgaaatcagcgattccaaagcacagctagctgccatcaccttgatcattggcacttttgaaaggatgaagtgcttcagtgaagagaatcacgaacctctgaggactcagtgtgcccttgctgcatccaaacttctaaagaaacctgatcagggccgagctgtgagcacctgtgcacatctcttctggtctggcagaaacacggacaaaaatggggaggagcttcacggaggcaagagggtaatggagtgcctaaaaaaagctctaaaaatagcaaatcagtgcatggacccctctctacaagtgcagctttttatagaaattctgaacagatatatctatttttatgaaaaggaaaatgatgcggtaacaattcaggttttaaaccagcttatccaaaagattcgagaagacctcccgaatcttgaatccagtgaagaaacagagcagattaacaaacattttcataacacactggagcatttgcgcttgcggcgggaatcaccagaatccgaggggccaatttatgaaggtctcatcctttaaaaaggaaatagctcaccatactcctttccatgtacatccagtgagggttttattacgctaggtttcccttccatagattgtgcctttcagaaatgctgaggtaggtttcccatttcttacctgtgatgtgttttacccagcacctccggacactcaccttcaggaccttaataaaattattcacttggtaagtgttcaagtctttctgatcaccccaagtagcatgactgatctgcaatttaaaattcctgtgatctgtaaaaaaaaaaaaaaaaaaaaacacaaaacccacaagcacttatcttggctactaatgaagctctccttttttttgtttgtttgtttgcttcattgttgattgtgtattttcttcattcctggggagtactaacccaaaagcgtctgtctcttgttttctagtccagtttgagattaatttagaagaaaggaatactgtatgtgaaattcatcttgggctttcccctaaattgcaagataaggccatgtgtaagattttccctaaaactagaatatattaatgcatgtttgagaattttaaagcaccatggtcaaaaccagaagctatattttgcatatttggactcagccatccattaagaacccatgttgtcctctggacatatttatcaatataattgggttttaaatagtataaaagaaaacttgtgatctatataatttatgtatcaccttcattgtaaatttagcaggaaatgcatcacaattatgatttttttttttgcaccagtgaaacaataaagatgctattaacaa

SEQ ID NO: 199419 - DNA, 589 bp, Homo sapiens
  Payload ID: 19344
  Gene Name: VPS35 retromer complex component
  ENST ID: ENST00000561713
  CDS Start-End: 62-205
atgaccgcgggaggctacgcgcggggcgggtgctgcttgctgcaggctctggggagtcgccatgcctacaacacagcagtcccctcaggatgagcaggaaaagctcttggatgaagccatacaggctgtgaaggtccagtcattccaaatgaagagatgcctgtgtttcctctatctcaaggaattgcttgcatttctgagttaagtggaacatatgggcattgtgagggcttgaagaatgcaagaggaaagcaaacttacatggatagtcatttcagacagctctgaagagtctttaacccatgacaaagccatgtcaggatagtatcttccttcacctgaatcagtatgccagttctcttgattgcaggacaaaaacaagcttatggatgctctaaaacatgcttctaatatgcttggtgaactccggacttctatgttatcaccaaagagttactatgaactttatatggccatttctgatgaactgcactacttggaggtctacctgacagatgagtttgctaaaggaaggaaagtggcagatctctacgaacttgtacagtatgctggaaacattatcccaagg

SEQ ID NO: 199420 - DNA, 697 bp, Homo sapiens
  Payload ID: 19344
  Gene Name: VPS35 retromer complex component
  ENST ID: ENST00000568612
  CDS Start-End: 19-144
aggctctggggagtcgccatgcctacaacacagcagtcccctcaggatgagcaggaaaagctcttggatgaagccatacaggctgtgaaggtccagtcattccaaatgaagagatgcctggaattgcttgcatttctgagttaagtggaacatatgggcattgtgagggcttgaagaatgcaagaggaaagcaaacttacatggatagtcatttcagacagctctgaagagtctttaacccatgacaaagccatgtcaggatagtatcttccttcacctgaatcagtatgccagttctcttgattgcaggacaaaaacaagcttatggatgctctaaaacatgcttctaatatgcttggtgaactccggacttctatgttatcaccaaagagttactatgaactttatatggccatttctgatgaactgcactacttggaggtctacctgacagatgagtttgctaaaggaaggaaagtggcagatctctacgaacttgtacagtatgctggaaacattatcccaaggctttaccttttgatcacagttggagttgtatatgtcaagtcatttcctcagtccaggaaggatattttgaaagatttggtagaaatgtgccgtggtgtgcaacatcccttgaggggtctgtttcttcgaaattaccttcttcagtgtaccagaaatatcttacctgatg

SEQ ID NO: 199421 - DNA, 1193 bp, Homo sapiens
  Payload ID: 19345
  Gene Name: VPS50 EARP/GARPII complex subunit
  Uniprot ID: Q96JG6
  ENST ID: ENST00000251739
  CDS Start-End: 129-1112
aggataccctgggtcggctcctccacgtgaccacccactatggcttcctagtgtcagggccagctgtgtagtggctcggtgtgatttgttagctctttgaggcagggtaccctcctcaggatttcgatatgcaaaaaatcaaatctctcatgacccgacagggtctgaaaagccctcaagaaagcctcagtgatcttggtgccatagagagtctccgggtccctggaaaggaagaattcagggaacttcgagaacagccaagtgaccctcaagctgaacaagagcttattaatagtattgaacaagtatatttttctgtggattcatttgatattgttaaatatgagctggagaagcttccacctgttctcaatttgcaagaattagaggcgtatagagacaaattgaaacaacagcaagctgcagtatctaaaaaagtggcagatttaatccttgaaaaacagcctgcttatgtaaaggaacttgaaagagttacctcattgcagacaggtcttcaattagctgctgttatctgtacaaatgggagaagacacttgaatattgcaaaggaaggttttactcaagctagtttaggccttcttgcaaatcaaaggaaacgtcagttgctgattggacttctgaaatctctgagaactataaaaacattgcaaagaacagatgtacggttaagtgaaatgctggaggaggaagattatccaggagctattcagttgtgccttgaatgtcaaaaagctgccagcacttttaaacattacagttgtataagtgaactgaattcaaagctgcaagatactttggaacagattgaggaacagctggacgtagctctttccaaaatctgcaagaattttgacattaaccattataccaaggttcaacaagcttatcgacttcttggaaaaacacagacagcaatggatcaacttcatatgcacttcacccaagccattcacaacaccgtgtttcaagttgttcttggttatgtggaactatgtgcaggaaacacagacacaaaattccaaaagctgcaatataaggatctctgtacagtatgtagtgacttaattactattcatatatctctcctttagattttaaatttatatttcctttatcttggtacatacctatttgaaaatgctactaaaataaaaataaatctttgccaaaaa

SEQ ID NO: 199422 - DNA, 3613 bp, Homo sapiens
  Payload ID: 19345
  Gene Name: VPS50 EARP/GARPII complex subunit
  Uniprot ID: Q96JG6
  ENST ID: ENST00000305866
  CDS Start-End: 129-3023
aggataccctgggtcggctcctccacgtgaccacccactatggcttcctagtgtcagggccagctgtgtagtggctcggtgtgatttgttagctctttgaggcagggtaccctcctcaggatttcgatatgcaaaaaatcaaatctctcatgacccgacagggtctgaaaagccctcaagaaagcctcagtgatcttggtgccatagagagtctccgggtccctggaaaggaagaattcagggaacttcgagaacagccaagtgaccctcaagctgaacaagagcttattaatagtattgaacaagtatatttttctgtggattcatttgatattgttaaatatgagctggagaagcttccacctgttctcaatttgcaagaattagaggcgtatagagacaaattgaaacaacagcaagctgcagtatctaaaaaagtggcagatttaatccttgaaaaacagcctgcttatgtaaaggaacttgaaagagttacctcattgcagacaggtcttcaattagctgctgttatctgtacaaatgggagaagacacttgaatattgcaaaggaaggttttactcaagctagtttaggccttcttgcaaatcaaaggaaacgtcagttgctgattggacttctgaaatctctgagaactataaaaacattgcaaagaacagatgtacggttaagtgaaatgctggaggaggaagattatccaggagctattcagttgtgccttgaatgtcaaaaagctgccagcacttttaaacattacagttgtataagtgaactgaattcaaagctgcaagatactttggaacagattgaggaacagctggacgtagctctttccaaaatctgcaagaattttgacattaaccattataccaaggttcaacaagcttatcgacttcttggaaaaacacagacagcaatggatcaacttcatatgcacttcacccaagccattcacaacaccgtgtttcaagttgttcttggttatgtggaactatgtgcaggaaacacagacacaaaattccaaaagctgcaatataaggatctctgtacacatgttacaccagacagctatattccatgccttgcagacctgtgcaaagcactatgggaagttatgctcagctattataggactatggaatggcatgaaaagcatgacaatgaggatactgcttcagcttctgaagggagtaatatgataggtactgaagaaactaattttgatcgtggctacataaaaaagaaattagaacatggacttacacgaatatggcaggatgttcagctaaaagtaaaaacctacttgcttggaactgatttgtctatattcaaatatgatgatttcatctttgttttggatataatcagcaggttgatgcaagttggagaagaattttgtggtagcaagtctgaagttttacaggaatctattagaaaacaaagtgtcaattatttcaagaattaccatagaacacggctcgatgaactgagaatgttcttagagaatgagacttgggaactttgtcctgttaagtcaaatttcagcatcttgcaacttcatgaatttaaattcatggaacagtctcgctccccatcagtttcacctagtaaacagccagtctcaacttcttcaaaaacagtgaccttgtttgagcagtactgtagtggtgggaatccatttgaaattcaggccaaccacaaagatgaagaaacagaagatgtcttagcttctaatgggtatgaatctgatgaacaagaaaagagtgcctatcaagagtatgacagtgacagtgatgttcctgaggaactcaaacgagactatgtggatgagcagacaggagatggtcctgtgaaaagtgtttctcgggaaactctaaaaagcaggaagaaatcagattacagtctaaataaagtgaatgcacctatcttaacaaatacaacattgaacgtcataagacttgttggaaaatatatgcagatgatgaacattcttaagccaattgcctttgatgttattcatttcatgtctcaactatttgattattacttgtatgcaatatataccttttttggtcggaatgattcattggaatcaactggactcggccttagtagtagtagactaagaacaactctaaacagaatacaagaaagccttattgatctagaagtttcagctgatcctactgccacactcacagcagcagaagaaagaaaggagaaggtgccaagtccacacctcagtcacctagtggttttgacatctggggatacgctgtatgggttggcagaaagagtggtagccacggaatccttggtattcttggctgaacagtttgagttccttcagccacatctggatgctgtgatgcctgcagtcaaaaagccctttcttcagcagttctattctcagacagtctcaaccgccagtgaactacggaaaccaatttactggattgtagctggtaaagcccttgattatgaacagatgctgcttctcatggctaatgtgaaatgggatgtaaaagaaattatgtcacagcacaacatatatgtagatgcactattaaaggaatttgagcagtttaacaggaggctaaatgaagtttctaagagagttcgcatacccttgcctgtgtctaatatactttgggaacattgtatacgattggctaatcgaactattgtagaaggatatgccaatgtcaagaaatgcagtaatgagggtcgtgccctgatgcaattggattttcaacagtttttaatgaaacttgaaaaactaacagatattagacccattcctgataaagaatttgtagaaacttatattaaagcttattacctaactgagaatgacatggaacggtggatcaaagagcacagggaatattcaacgaagcagctgaccaatctggtgaatgtttgcctgggatcccatatcaataagaaagcaagacaaaaacttctagcagctatagatgatatagacagacctaaaagataatgaacacagctctctttcctcaatggcattgatcctcactcaacatatatgacctgaaagccagtttttttatgcacttctgacaactatctgctaagaaaactttgtgcatgtttttttgactggaaagtggaaaatattgaaatgtgtgtggtgttctcatgacttttatatgctgtggtctcttcaacttttggtctcatttgttgtaatctgaaatgatgttgccgccttgtcataacaatggttatgtgactacagttatacattttacagaagaatgtaccataagtatataattagaagaacagtggcttaatatatgtatgggaagtttatggaaaatgaagttggcacttttctaccctctgagcttggttcttaataagcataatgtgagggtgaatatgtagtatctcctaattatgagcactgcatgagaattaaaaaacacatgtaagtaaaatagttgaaaaatcagtatgttctctgtttttaaaatgtcaaagtttatgtcagggttaatttagttataacaaagtgatcataatggtgaaatttaataaatatactctagtatgatcagccta

SEQ ID NO: 199423 - DNA, 554 bp, Homo sapiens
  Payload ID: 19345
  Gene Name: VPS50 EARP/GARPII complex subunit
  ENST ID: ENST00000443443
  CDS Start-End: 1-466
acggaaaccaatttactggattgtagctggtaaagcccttgattatgaacagatgctgcttctcatggctaatgtgaaatgggatgtaaaagaaattatgtcacagcacaacatatatgtagatgcactattaaaggaatttgagcagtttaacaggaggctaaatgaagtttctaagagagttcgcatacccttgcctgtgtctaatatactttgggaacattgtatacgattggctaatcgaactattgtagaaggatatgccaatgtcaagaaatgcagtaatgagggtcgtgccctgatgcaattggattttcaacagtttttaatgaaacttgaaaaactaacagatattagacccattcctgataaagaatttgtagaaacttatattaaagcttattacctaactgagaatgacatggaacggtggatcaaagagcacagggtgagagctggaaaatagttaattaagtttttattcctttttctttgtgctgttcttgttgggtgtgttatttaattcaaaatcatgagagtgaaatataaagaaa

SEQ ID NO: 199424 - DNA, 538 bp, Homo sapiens
  Payload ID: 19345
  Gene Name: VPS50 EARP/GARPII complex subunit
  ENST ID: ENST00000438395
  CDS Start-End: 103-216
gtgaccacccactatggcttcctagtgtcagggccagctgtgtagtggctcggtgtgatttgttagctctttgaggcagggtaccctcctcaggatttcgatatgcaaaaaatcaaatctctcatgacccgacagggtctgaaaagccctcaagaaagcctcagtgatcttggtgccatagagagtctccgggtccctggaaagttagagccctaacgtgatgttaactttggaagaattcagggaacttcgagaacagccaagtgaccctcaagctgaacaagagcttattaatagtattgaacaagtatatttttctgtggattcatttgatattgttaaatatgagctggagaagcttccacctgttctcaatttgcaagaattagaggcgtatagagacaaattgaaacaacagcaagctgcagtatctaaaaaagtggcagatttaatccttgaaaaacagcctgcttatgtaaaggaacttgaaagagttacctcattgcagacaggtcttcaattagctgctgttatctgt

SEQ ID NO: 199425 - DNA, 667 bp, Homo sapiens
  Payload ID: 19345
  Gene Name: VPS50 EARP/GARPII complex subunit
  ENST ID: ENST00000458530
  CDS Start-End: 100-667
accacccactatggcttcctagtgtcagggccagctgtgtagtggctcggtgtgatttgttagctctttgaggcagggtaccctcctcaggatttcgatatgcaaaaaatcaaatctctcatgacccgacagggtctgaaaagccctcaagaaagcctcagtgatcttggtgccatagagagtctccgggtccctggaaaggaagaattcagggaacttcgagaacagccaagtgaccctcaagctgaacaagagcttattaatagtattgaacaagtatatttttctgtggattcatttgatattgttaaatatgagctggagcttccacctgttctcaatttgcaagaattagaggcgtatagagacaaattgaaacaacagcaagctgcagtatctaaaaaagtggcagatttaatccttgaaaaacagcctgcttatgtaaaggaacttgaaagagttacctcattgcagacaggtcttcaattagctgctgttatctgtacaaatgggagaagacacttgaatattgcaaaggaaggttttactcaagctagtttaggccttcttgcaaatcaaaggaaacgtcagttgctgattggacttctgaaatctctgagaactataaaaacattgcaaagaacagatgtacggttaagtgaaatgc

SEQ ID NO: 199426 - DNA, 603 bp, Homo sapiens
  Payload ID: 19345
  Gene Name: VPS50 EARP/GARPII complex subunit
  ENST ID: ENST00000436177
  CDS Start-End: 93-212
actatggcttcctagtgtcagggccagctgtgtagtggctcggtgtgatttgttagctctttgaggcagggtaccctcctcaggatttcgatatgcaaaaaatcaaatctctcatgacccgacagggtctgaaaagccctcaagaaagcctcagtgatcttggtgccatagagagtctccgggtccctggaaaggtattgagctacacgtgaagaattcagggaacttcgagaacagccaagtgaccctcaagctgaacaagagcttattaatagtattgaacaagtatatttttctgtggattcatttgatattgttaaatatgagctggagaagcttccacctgttctcaatttgcaagaattagaggcgtatagagacaaattgaaacaacagcaagctgcagtatctaaaaaagtggcagatttaatccttgaaaaacagcctgcttatgtaaaggaacttgaaagagttacctcattgcagacaggtcttcaattagctgctgttatctgtacaaatgggagaagacacttgaatattgcaaaggaaggttttactcaagctagtttaggccttcttgcaaatcaaaggaaacgtcag

SEQ ID NO: 199427 - DNA, 1898 bp, Homo sapiens
  Payload ID: 19345
  Gene Name: VPS50 EARP/GARPII complex subunit
  ENST ID: ENST00000458707
  CDS Start-End: 1-1409
aacattacagttgtataagtgaactgaattcaaagctgcaagatactttggaacagattgaggaacagctggacgtagctctttccaaaatctgcaagaattttgacattaaccattataccaaggttcaacaagcttatcgacttcttggaaaaacacagacagcaatggatcaacttcatatgcacttcacccaagccattcacaacaccgtgtttcaagttgttcttggttatgtggaactatgtgcaggaaacacagacacaaaattccaaaagctgcaatataaggatctctgtacacatgttacaccagacagctatattccatgccttgcagacctgtgcaaagcactatgggaagttatgctcagctattataggactatggaatggcatgaaaagcatgacaatgaggatactgcttcagcttctgaagggagtaatatgataggtactgaagaaactaattttgatcgtggctacataaaaaagaaattagaacatggacttacacgaatatggcaggatgttcagctaaaagtaaaaacctacttgcttggaactgatttgtctatattcaaatatgatgatttcatctttgttttggatataatcagcaggttgatgcaagttggagaagaattttgtggtagcaagtctgaagttttacaggaatctattagaaaacaaagtgtcaattatttcaagaattaccatagaacacggctcgatgaactgagaatgttcttagagaatgagacttgggaactttgtcctgttaagtcaaatttcagcatcttgcaacttcatgaatttaaattcatggaacagtctcgctccccatcagtttcacctagtaaacagccagtctcaacttcttcaaaaacagtgaccttgtttgagcagtactgtagtggtgggaatccatttgaaattcaggccaaccacaaagatgaagaaacagaagatgtcttagcttctaatgggtatgaatctgatgaacaagaaaagagtgcctatcaagagtatgacagtgacagtgatgttcctgaggaactcaaacgagactatgtggatgagcagacaggagatggtcctgtgaaaagtgtttctcgggaaactctaaaaagcaggaagaaatcagattacagtctaaataaagtgaatgcacctatcttaacaaatacaacattgaacgtcataagacttgttgacggagtctcactctgttgcctaggctggagtacagtggcgcatctccactcactgcaagctccgcctcccgggttcaagccattctcctgcctcagcctcccgcgtagctgggactacaggcgcccgccaccacgcccggctaattttttgtattttcttttttttagtagagacggggtttcaccgtgttagcggggatggtctctatctatctcctgacctcgtgatccgcccgcctcggcctcccaaagtgctgggattacaggcatgaaccaccgctcccagcttatcatttcttttagagaggaaccttaagggtttctattttgttttatgggtaaattctagcagcctacacctctaactgctggagaggagaggggaatggtggtggtggggaatgcagactgttacagtttgtcccatatgtgaacctgtagcttgatcgtttttcagccccgtttctgactcctgcagttccagcttgattctaagtagttactgtcctagtgaatagcttccacctcctttttggccctcttatggttttattggcttatgtttttccatcaacgtgttcccatctactgtctgtcatctacaacagacgttttgagatgtcaaatgttttgagctgctggctgcttgtttttgtaaataaagttttattggcacacccat

SEQ ID NO: 199428 - DNA, 3474 bp, Homo sapiens
  Payload ID: 19345
  Gene Name: VPS50 EARP/GARPII complex subunit
  ENST ID: ENST00000441602
  CDS Start-End: 103-222
gtgaccacccactatggcttcctagtgtcagggccagctgtgtagtggctcggtgtgatttgttagctctttgaggcagggtaccctcctcaggatttcgatatgcaaaaaatcaaatctctcatgacccgacagggtctgaaaagccctcaagaaagcctcagtgatcttggtgccatagagagtctccgggtccctggaaaggtattgagctacacgtaagcttccacctgttctcaatttgcaagaattagaggcgtatagagacaaattgaaacaacagcaagctgcagtatctaaaaaagtggcagatttaatccttgaaaaacagcctgcttatgtaaaggaacttgaaagagttacctcattgcagacaggtcttcaattagctgctgttatctgtacaaatgggagaagacacttgaatattgcaaaggaaggttttactcaagctagtttaggccttcttgcaaatcaaaggaaacgtcagttgctgattggacttctgaaatctctgagaactataaaaacattgcaaagaacagatgtacggttaagtgaaatgctggaggaggaagattatccaggagctattcagttgtgccttgaatgtcaaaaagctgccagcacttttaaacattacagttgtataagtgaactgaattcaaagctgcaagatactttggaacagattgaggaacagctggacgtagctctttccaaaatctgcaagaattttgacattaaccattataccaaggttcaacaagcttatcgacttcttggaaaaacacagacagcaatggatcaacttcatatgcacttcacccaagccattcacaacaccgtgtttcaagttgttcttggttatgtggaactatgtgcaggaaacacagacacaaaattccaaaagctgcaatataaggatctctgtacacatgttacaccagacagctatattccatgccttgcagacctgtgcaaagcactatgggaagttatgctcagctattataggactatggaatggcatgaaaagcatgacaatgaggatactgcttcagcttctgaagggagtaatatgataggtactgaagaaactaattttgatcgtggctacataaaaaagaaattagaacatggacttacacgaatatggcaggatgttcagctaaaagtaaaaacctacttgcttggaactgatttgtctatattcaaatatgatgatttcatctttgttttggatataatcagcaggttgatgcaagttggagaagaattttgtggtagcaagtctgaagttttacaggaatctattagaaaacaaagtgtcaattatttcaagaattaccatagaacacggctcgatgaactgagaatgttcttagagaatgagacttgggaactttgtcctgttaagtcaaatttcagcatcttgcaacttcatgaatttaaattcatggaacagtctcgctccccatcagtttcacctagtaaacagccagtctcaacttcttcaaaaacagtgaccttgtttgagcagtactgtagtggtgggaatccatttgaaattcaggccaaccacaaagatgaagaaacagaagatgtcttagcttctaatgggtatgaatctgatgaacaagaaaagagtgcctatcaagagtatgacagtgacagtgatgttcctgaggaactcaaacgagactatgtggatgagcagacaggagatggtcctgtgaaaagtgtttctcgggaaactctaaaaagcaggaagaaatcagattacagtctaaataaagtgaatgcacctatcttaacaaatacaacattgaacgtcataagacttgttggaaaatatatgcagatgatgaacattcttaagccaattgcctttgatgttattcatttcatgtctcaactatttgattattacttgtatgcaatatataccttttttggtcggaatgattcattggaatcaactggactcggccttagtagtagtagactaagaacaactctaaacagaatacaagaaagccttattgatctagaagtttcagctgatcctactgccacactcacagcagcagaagaaagaaaggagaaggtgccaagtccacacctcagtcacctagtggttttgacatctggggatacgctgtatgggttggcagaaagagtggtagccacggaatccttggtattcttggctgaacagtttgagttccttcagccacatctggatgctgtgatgcctgcagtcaaaaagccctttcttcagcagttctattctcagtctcaaccgccagtgaactacggaaaccaatttactggattgtagctggtaaagcccttgattatgaacagatgctgcttctcatggctaatgtgaaatgggatgtaaaagaaattatgtcacagcacaacatatatgtagatgcactattaaaggaatttgagcagtttaacaggaggctaaatgaagtttctaagagagttcgcatacccttgcctgtgtctaatatactttgggaacattgtatacgattggctaatcgaactattgtagaaggatatgccaatgtcaagaaatgcagtaatgagggtcgtgccctgatgcaattggattttcaacagtttttaatgaaacttgaaaaactaacagatattagacccattcctgataaagaatttgtagaaacttatattaaagcttattacctaactgagaatgacatggaacggtggatcaaagagcacagggaatattcaacgaagcagctgaccaatctggtgaatgtttgcctgggatcccatatcaataagaaagcaagacaaaaacttctagcagctatagatgatatagacagacctaaaagataatgaacacagctctctttcctcaatggcattgatcctcactcaacatatatgacctgaaagccagtttttttatgcacttctgacaactatctgctaagaaaactttgtgcatgtttttttgactggaaagtggaaaatattgaaatgtgtgtggtgttctcatgacttttatatgctgtggtctcttcaacttttggtctcatttgttgtaatctgaaatgatgttgccgccttgtcataacaatggttatgtgactacagttatacattttacagaagaatgtaccataagtatataattagaagaacagtggcttaatatatgtatgggaagtttatggaaaatgaagttggcacttttctaccctctgagcttggttcttaataagcataatgtgagggtgaatatgtagtatctcctaattatgagcactgcatgagaattaaaaaacacatgtaagtaaaatagttgaaaaatcagtatgttctctgtttttaaaatgtcaaagtttatgtcagggttaatttagttataacaaagtgatcataatggtgaaatttaataaatatactctagtatgatcagcc

SEQ ID NO: 199429 - DNA, 5736 bp, Homo sapiens
  Payload ID: 19345
  Gene Name: VPS50 EARP/GARPII complex subunit
  Uniprot ID: Q96JG6
  ENST ID: ENST00000544910
  CDS Start-End: 247-3051
aggataccctgggtcggctcctccacgtgaccacccactatggcttcctagtgtcagggccagctgtgtagtggctcggtgtgatttgttagctctttgaggcagggtaccctcctcaggatttcgatatgcaaaaaatcaaatctctcatgacccgacagggtctgaaaagccctcaagaaagcctcagtgatcttggtgccatagagagtctccgggtccctggaaagttagagccctaacgtgatgttaactttggaagaattcagggaacttcgagaacagccaagtgaccctcaagctgaacaagagcttattaatagtattgaacaagtatatttttctgtggattcatttgatattgttaaatatgagctggagaagcttccacctgttctcaatttgcaagaattagaggcgtatagagacaaattgaaacaacagcaagctgcagtatctaaaaaagtggcagatttaatccttgaaaaacagcctgcttatgtaaaggaacttgaaagagttacctcattgcagacaggtcttcaattagctgctgttatctgtacaaatgggagaagacacttgaatattgcaaaggaaggttttactcaagctagtttaggccttcttgcaaatcaaaggaaacgtcagttgctgattggacttctgaaatctctgagaactataaaaacattgcaaagaacagatgtacggttaagtgaaatgctggaggaggaagattatccaggagctattcagttgtgccttgaatgtcaaaaagctgccagcacttttaaacattacagttgtataagtgaactgaattcaaagctgcaagatactttggaacagattgaggaacagctggacgtagctctttccaaaatctgcaagaattttgacattaaccattataccaaggttcaacaagcttatcgacttcttggaaaaacacagacagcaatggatcaacttcatatgcacttcacccaagccattcacaacaccgtgtttcaagttgttcttggttatgtggaactatgtgcaggaaacacagacacaaaattccaaaagctgcaatataaggatctctgtacacatgttacaccagacagctatattccatgccttgcagacctgtgcaaagcactatgggaagttatgctcagctattataggactatggaatggcatgaaaagcatgacaatgaggatactgcttcagcttctgaagggagtaatatgataggtactgaagaaactaattttgatcgtggctacataaaaaagaaattagaacatggacttacacgaatatggcaggatgttcagctaaaagtaaaaacctacttgcttggaactgatttgtctatattcaaatatgatgatttcatctttgttttggatataatcagcaggttgatgcaagttggagaagaattttgtggtagcaagtctgaagttttacaggaatctattagaaaacaaagtgtcaattatttcaagaattaccatagaacacggctcgatgaactgagaatgttcttagagaatgagacttgggaactttgtcctgttaagtcaaatttcagcatcttgcaacttcatgaatttaaattcatggaacagtctcgctccccatcagtttcacctagtaaacagccagtctcaacttcttcaaaaacagtgaccttgtttgagcagtactgtagtggtgggaatccatttgaaattcaggccaaccacaaagatgaagaaacagaagatgtcttagcttctaatgggtatgaatctgatgaacaagaaaagagtgcctatcaagagtatgacagtgacagtgatgttcctgaggaactcaaacgagactatgtggatgagcagacaggagatggtcctgtgaaaagtgtttctcgggaaactctaaaaagcaggaagaaatcagattacagtctaaataaagtgaatgcacctatcttaacaaatacaacattgaacgtcataagacttgttggaaaatatatgcagatgatgaacattcttaagccaattgcctttgatgttattcatttcatgtctcaactatttgattattacttgtatgcaatatataccttttttggtcggaatgattcattggaatcaactggactcggccttagtagtagtagactaagaacaactctaaacagaatacaagaaagccttattgatctagaagtttcagctgatcctactgccacactcacagcagcagaagaaagaaaggagaaggtgccaagtccacacctcagtcacctagtggttttgacatctggggatacgctgtatgggttggcagaaagagtggtagccacggaatccttggtattcttggctgaacagtttgagttccttcagccacatctggatgctgtgatgcctgcagtcaaaaagccctttcttcagcagttctattctcagacagtctcaaccgccagtgaactacggaaaccaatttactggattgtagctggtaaagcccttgattatgaacagatgctgcttctcatggctaatgtgaaatgggatgtaaaagaaattatgtcacagcacaacatatatgtagatgcactattaaaggaatttgagcagtttaacaggaggctaaatgaagtttctaagagagttcgcatacccttgcctgtgtctaatatactttgggaacattgtatacgattggctaatcgaactattgtagaaggatatgccaatgtcaagaaatgcagtaatgagggtcgtgccctgatgcaattggattttcaacagtttttaatgaaacttgaaaaactaacagatattagacccattcctgataaagaatttgtagaaacttatattaaagcttattacctaactgagaatgacatggaacggtggatcaaagagcacagggaatattcaacgaagcagctgaccaatctggtgaatgtttgcctgggatcccatatcaataagaaagcaagacaaaaacttctagcagctatagatgatatagacagacctaaaagataatgaacacagctctctttcctcaatggcattgatcctcactcaacatatatgacctgaaagccagtttttttatgcacttctgacaactatctgctaagaaaactttgtgcatgtttttttgactggaaagtggaaaatattgaaatgtgtgtggtgttctcatgacttttatatgctgtggtctcttcaacttttggtctcatttgttgtaatctgaaatgatgttgccgccttgtcataacaatggttatgtgactacagttatacattttacagaagaatgtaccataagtatataattagaagaacagtggcttaatatatgtatgggaagtttatggaaaatgaagttggcacttttctaccctctgagcttggttcttaataagcataatgtgagggtgaatatgtagtatctcctaattatgagcactgcatgagaattaaaaaacacatgtaagtaaaatagttgaaaaatcagtatgttctctgtttttaaaatgtcaaagtttatgtcagggttaatttagttataacaaagtgatcataatggtgaaatttaataaatatactctagtatgatcagcctatgtgagactacattttgattttttgtgtggcatgcagatgtcatgaactatagtgcagcttttagtgtgttctaattttaattgttttatatcctgaaaccaatggtgaaaagtaatttcattgagggtaccttttcaatgcctgagtagcatacagaatcatgattatgagactttcttttatctttctttataaaaatatgtggtttttttgttgaaagttttggtctctttaaattcagattttgtcttaggacagtaaaacccaggttgactgactcaggaaacagttgtctgctagtcactcataaatgtacggtcatatgttcactcttcttaaatatccaccttttataacacaaatgtaaaatagtatcagtctagccaatgatgaactctggaatccacttagtcttcagtaagtatgtgctgttcctctaaactttgccctgaagccagggatcttctcctaatgtatgtgacataaaaatccattttccatgtactcttgccaactgtctgataaggaattttgtgtgtgttctttctgactggagagtggaggacatctaagcttgtgtggcattggtccaatgattgccatgcatgacctgtaacatcaacagctcacagaatcctaaggaatcatgtgagaaacaggccttgggtcttatgagtcttctgggacctaaggtgataaaatggatggcacagaatggcatgtgatcaagcatggaggtgataaggaaacaattgctactctgtgtccatcagtccctgcgatgtctgtaaatgcacagtgtaatgtgaagcactttcagaatatgtttgtgtgtgtctgtatgctgagtgttttcttttcatcctctcatgtcggagttcatttactgtcaatttaaaactttcctcttgtaaaaaggtatgagtttggtgccattatgatttggttgtggctagattatatacttgtgaagtagattctgcctgtagccattatttatatgcagccacttgaagaaaacaaacatgagataagcttggtccttgagtttaaatggcatatttagctgggcacataaagagctaatcaatcttttaaaatttgcagttgatgaagagctgcttatttttctcttctacatggattttatagttggtttcctttaatttctactttagttggccctagataatatgaacaggaatcacctgcctggtagagcccagtgttttccaaggtaataggaattgatacaaaagaattacttatcttgttagagactcgaccatgcaatctgacagaccttttaacctacccttactttgctttctccatcttcaaaatgaaatggtggatctttttaatgctttttgaaaaaggttttttttttttttttttttcattaaaaggtagcttaataagtgctagctagcatcaaaacagtaacaggaggtttgagtcatgaagttacctaatcacaagagagttaccagacatttctcaaatactttatacagtaatattgagttataaccatgtaacattttatgaaactaattttcagataaatacaattgaaaagctgagaatgtaaatggaattatacgtgttccaaaaactatcattaccaaaaatttattatttttgagtctaaactttccttaactttgacattttccatgaaagtttcctgtagaatttaccatgggagcatggtaaattagcattccctgagaaagaatgatcatttctacaaatacattgtcttgcatttaaaaatgctaggggggcacatagcaattcaaatgaactagtttgctttggtttataaaaccaacagagattttgtaagttcactttaactaataaactcatttacacaacttattaaatgaatttctcttgaaaccagggccatatggtattttatcatatctttaaataaaatttcgaaatttctatttagctgagtgctaaagtgaaactttgttagattaaatagctttttcttaactcaccaaaaagtagtaaaaggcttgtaattcaattcaccttgtaagcatagttgtcttttgtaataaaaaactagatctg

SEQ ID NO: 199430 - DNA, 2748 bp, Homo sapiens
  Payload ID: 19346
  Gene Name: VPS9 domain containing 1
  Uniprot ID: Q9Y2B5
  ENST ID: ENST00000389386
  CDS Start-End: 126-2021
gcggccgcgtcccttcctgcggtccgctgctcgggcggctccagcaccagcgccggctgcgttccgggcctccggtcgcccgtccagcccctcggctaccgccgccgcctcccccgctcggcgccatggccgctgcggccggggacggcacggtgaagccgctgcagagcgccatgaagcttgccaacggggccatcgagctggacaccggcaaccggccccgggaggcatacacggaatacctgaggagcatccactatatctcccaggtgttactagaagaagtggaaaccactaaagaagctggggaaactgtgccccccgacacctccaagatgctgaagctagcacagcagtgtctggagagggcccagtcgacggccgccaagcttgggaaaacacgcctgaagccaaccatgcctgcagctgctcccattccccagcctgccggccgacaccgccgtgtatactccgatgaaggaggaaagctctctccttttctgccacccgagatcttccagaagcttcagggggcagagtcacaaagctgtaagaaagagctgacgccactggaggaggcctccctgcagaatcagaagctgaaggctgcgtatgaggcccgaatggcgcggctagaccccagccaggccatgcagaagacatccctgaccctctctctacagcggcagatgatggagaacctagtgattgccaaagcccgggaggagacactccagagaaagatggaggagcgccggctgcggctccaggaggccgccaacaggaggttttgcagccaagtcgccctgaccccggaggaacgggagcagcgggccctttacgccgccatcctggagtacgaacaggaccatgactggccgaagcactggaaggccaagctcaagaggaatccgggggacctgtcactcgtgaccagcctggtctcacacctgctcagcctccccgaccacccgatcgcgcagctcctgaggcggctgcagtgctccgtgtacagcgccctgtatcccgccgtgagcagagcagccgcgccagccccaggctgctgccccccgacccccaaccccggaagccgacggctgcggccctcgcagagcctccattgcatgctgtccccgcccgagcccagcgcagccccgcggccccaggacagtccccccacgcccccactccaacccggccccgtggggtctccctcacccctgggggacaccgcatctggattgccagacaaggacagctcgttcgaggacctggagcagttcctggggacgtctgagcggcagggccggggccgtggggtacagccggagccccagctgcagcagctgaagaccgcggtggaggagatccacaatgccgtagacaggctgctctcgctgacccttctggccttcgaaggcctaaacacagctgcctccaaggaccgctgcctggcctgcattgaggaaccctttttctccccgctgtggcctctgctgctggccctgtacaggagcgtgcaccgagcccgggaggctgccctgagcaggagcatggagctctacaggaatgcaccccccaccgccattggcatccccaccaagctcctcccccagaaccctgaggccaagggggccactggctacccctactgcgcggcggcccaggagctcggactgctggtcctggagagctgcccccagaagaagctggagtgcatagtgcggaccctgcggatcatctgtgtctgtgcggaagactactgccccaccccagaggccacaccccaggccgggcccccgcccatcgctgcagctgccattggtgccgatgacctgctgcccatcctgtccttcgtggtgctgaggagcggcctccctcagctggtgtcggagtgcgcggccctggaggagttcatccacgaggggtacctgatcggagaggagggctactgcctcacatcactgcagagtgccctgagctacgtggagctgctgccccggggaggcctggccaagtagtacagctagagcccagggtccctgcagggcctggcctcgcctcccagggctgtctctcctacacctggagccatgggatctactgaggaccatcctggagcctcacgctgctctgcacatggtgggggcttgtccactgtggtgtgctctccagctcttcaccttcctcacctcacatctgaccctggagcttggggttggcacctctgccccgacagaatggggctgaatcagctccaggaggaaccaggccctgctctcctgtgtaggcctcagagaggccaagaagggaagctttgggcttcggtgggtgcaggctcagcgatgaacatctggctggggcagctcctggggagcatcagggaagagggggccatgagccggccagcagtggagacggcagtccagtttctctcccctctgacccctagaaggggagttgtagccccatgaactagtttcttgtctgggtcaggaacaagggccggctggggcctggggtgcagctggtgtcagggtatgctgtttgctgatgggcagggacacccctgcagggtctcgggctctgagcccaggacattccctgccccttactcaccttggctgtgggctgtgaacattccgggaccctgggcatcttatctaggtccgtgcagcccaagggtcagccctcttgactgtcacatgctgcccccacccagcctaaaataaagagctcactgctgtg

SEQ ID NO: 199431 - DNA, 2791 bp, Homo sapiens
  Payload ID: 19346
  Gene Name: VPS9 domain containing 1
  ENST ID: ENST00000561976
  CDS Start-End: 379-2064
atgaggtccagctcgtccctggctctctctctctctcaggtcctgatgtcttttccaagtctggagagcagcgatgctgcctgtgccctgcgcagaaaaccgtgttccggctgcagctaaccaccgcaggctcaatgtctctgggtgtatctcagagataagcaggtggtggtgttccttgcttatcccacaagggcacctggccggaataatggagtcacttccctccactggcctgaccccactctttctctttcctggacacaggaggcatacacggaatacctgaggagcatccactatatctcccaggtgttactagaagaagtggaaaccactaaagaagctggggaaactgtgccccccgacacctccaagatgctgaagctagcacagcagtgtctggagagggcccagtcgacggccgccaagcttgggaaaacacgcctgaagccaaccatgcctgcagctgctcccattccccagcctgccggccgacaccgccgtgtatactccgatgaaggaggaaagctctctccttttctgccacccgagatcttccagaagcttcagggggcagagtcacaaagctgtaagaaagagctgacgccactggaggaggcctccctgcagaatcagaagctgaaggctgcgtatgaggcccgaatggcgcggctagaccccagccaggccatgcagaagacatccctgaccctctctctacagcggcagatgatggagaacctagtgattgccaaagcccgggaggagacactccagagaaagatggaggagcgccggctgcggctccaggaggccgccaacaggaggttttgcagccaagtcgccctgaccccggaggaacgggagcagcgggccctttacgccgccatcctggagtacgaacaggaccatgactggccgaagcactggaaggccaagctcaagaggaatccgggggacctgtcactcgtgaccagcctggtctcacacctgctcagcctccccgaccacccgatcgcgcagctcctgaggcggctgcagtgctccgtgtacagcgccctgtatcccgccgtgagcagagcagccgcgccagccccaggctgctgccccccgacccccaaccccggaagccgacggctgcggccctcgcagagcctccattgcatgctgtccccgcccgagcccagcgcagccccgcggccccaggacagtccccccacgcccccactccaacccggccccgtggggtctccctcacccctgggggacaccgcatctggattgccagacaaggacagctcgttcgaggacctggagcagttcctggggacgtctgagcggcagggccggggccgtggggtacagccggagccccagctgcagcagctgaagaccgcggtggaggagatccacaatgccgtagacaggctgctctcgctgacccttctggccttcgaaggcctaaacacagctgcctccaaggaccgctgcctggcctgcattgaggaaccctttttctccccgctgtggcctctgctgctggccctgtacaggagcgtgcaccgagcccgggaggctgccctgagcaggagcatggagctctacaggaatgcaccccccaccgccattggcatccccaccaagctcctcccccagaaccctgaggccaagggggccactggctacccctactgcgcggcggcccaggagctcggactgctggtcctggagagctgcccccagaagaagctggagtgcatagtgcggaccctgcggatcatctgtgtctgtgcggaagactactgccccaccccagaggccacaccccaggccgggcccccgcccatcgctgcagctgccattggtgccgatgacctgctgcccatcctgtccttcgtggtgctgaggagcggcctccctcagctggtgtcggagtgcgcggccctggaggagttcatccacgaggggtacctgatcggagaggagggctactgcctcacatcactgcagagtgccctgagctacgtggagctgctgccccggggaggcctggccaagtagtacagctagagcccagggtccctgcagggcctggcctcgcctcccagggctgtctctcctacacctggagccatgggatctactgaggaccatcctggagcctcacgctgctctgcacatggtgggggcttgtccactgtggtgtgctctccagctcttcaccttcctcacctcacatctgaccctggagcttggggttggcacctctgccccgacagaatggggctgaatcagctccaggaggaaccaggccctgctctcctgtgtaggcctcagagaggccaagaagggaagctttgggcttcggtgggtgcaggctcagcgatgaacatctggctggggcagctcctggggagcatcagggaagagggggccatgagccggccagcagtggagacggcagtccagtttctctcccctctgacccctagaaggggagttgtagccccatgaactagtttcttgtctgggtcaggaacaagggccggctggggcctggggtgcagctggtgtcagggtatgctgtttgctgatgggcagggacacccctgcagggtctcgggctctgagcccaggacattccctgccccttactcaccttggctgtgggctgtgaacattccgggaccctgggcatcttatctaggtccgtgcagcccaagggtcagccctcttgactgtcacatgctgcccccacccagcctaaaataaagagctcactgctgtg

SEQ ID NO: 199432 - DNA, 459 bp, Homo sapiens
  Payload ID: 19346
  Gene Name: VPS9 domain containing 1
  ENST ID: ENST00000563798
  CDS Start-End: 25-183
ccgccgcctcccccgctcggcgccatggccgctgcggccggggacggcacggtgaagccgctgcagagcgccatgaagcttgccaacggggccatcgagctggacaccggcaaccggccccggagagctgacgccactggaggaggcctccctgcagaatcagaagctgaaggctgcgtatgaggcccgaatggcgcggctagaccccagccaggccatgcagaagacatccctgaccctctctctacagcggcagatgatggagaacctagtgattgccaaagcccgggaggagacactccagagaaagatggaggagcgccggctgcggctccaggaggccgccaacaggaggttttgcagccaagtcgccctgaccccggaggaacgggagcagcgggccctttacgccgccatcctggagtacgaacaggaccatgactggccgaagcactggaa

SEQ ID NO: 199433 - DNA, 775 bp, Homo sapiens
  Payload ID: 19346
  Gene Name: VPS9 domain containing 1
  ENST ID: ENST00000565023
  CDS Start-End: 1-698
cggagccccagctgcagcagctgaagaccgcggtggaggagatccacaatgccgtagcagacaggctgctctcgctgacccttctggccttcgaaggcctaaacacagctgcctccaaggaccgctgcctggcctgcattgaggaaccctttttctccccgctgtggcctctgctgctggccctgtacaggagcgtgcaccgagcccgggaggctgccctgagcaggagcatggagctctacaggaatgcaccccccaccgccattggcatccccaccaagctcctcccccagaaccctgaggccaagggggccactggctacccctactgcgcggcggcccaggagctcggactgctggtcctggagagctgcccccagaagaagctggagtgcatagtgcggaccctgcggatcatctgtgtctgtgcggaagactactgccccaccccagaggccacaccccaggccgggcccccgcccatcgctgcagctgccattggtgccgatgacctgctgcccatcctgtccttcgtggtgctgaggagcggcctccctcagctggtgtcggagtgcgcggccctggaggagttcatccacgaggggtacctgatcggagaggagggctactgcctcacatcactgcagagtgccctgagctacgtggagctgctgccccggggaggcctggccaagtagtacagctagagcccagggtccctgcagggcctggcctcgcctcccagggctgtctctcctacacctggagccatggg

SEQ ID NO: 199434 - DNA, 2788 bp, Homo sapiens
  Payload ID: 19346
  Gene Name: VPS9 domain containing 1
  ENST ID: ENST00000614968
  CDS Start-End: 74-1390
atgaggtccagctcgtccctggctctctctctctctcaggtcctgatgtcttttccaagtctggagagcagcgatgctgctgtgccctgcgcagaaaaccgtgttccggctgcagctaaccaccgcagctcaatgtctctgggtgtatctcagagataagcaggtggtggtgttccttgcttatcccacaagggcacctggccggaataatggagtcacttccctccactggcctgaccccactctttctctttcctggacacaggaggcatacacggaatacctgaggagcatccactatatctcccaggtgttactagaagaagtggaaaccactaaagaagctggggaaactgtgccccccgacacctccaagatgctgaagctagcacagcagtgtctggagagggcccagtcgacggccgccaagcttgggaaaacacgcctgaagccaaccatgcctgcagctgctcccattccccagcctgccggccgacaccgccgtgtatactccgatgaaggaggaaagctctctccttttctgccacccgagatcttccagaagcttcagggggcagagtcacaaagctgtaagaaagagctgacgccactggaggaggcctccctgcagaatcagaagctgaaggctgcgtatgaggcccgaatggcgcggctagaccccagccaggccatgcagaagacatccctgaccctctctctacagcggcagatgatggagaacctagtgattgccaaagcccgggaggagacactccagagaaagatggaggagcgccggctgcggctccaggaggccgccaacaggaggttttgcagccaagtcgccctgaccccggaggaacgggagcagcgggccctttacgccgccatcctggagtacgaacaggaccatgactggccgaagcactggaaggccaagctcaagaggaatccgggggacctgtcactcgtgaccagcctggtctcacacctgctcagcctccccgaccacccgatcgcgcagctcctgaggcggctgcagtgctccgtgtacagcgccctgtatcccgccgtgagcagagcagccgcgccagccccaggctgctgccccccgacccccaaccccggaagccgacggctgcggccctcgcagagcctccattgcatgctgtccccgcccgagcccagcgcagccccgcggccccaggacagtccccccacgcccccactccaacccggcccgtggggtctccctcacccctgggggacaccgcatctggattgccagacaaggacagctcgttcgaggacctggagcagttcctggggacgtctgagcggcagggccggggccgtggggtacagccggagccccagctgcagcagctgaagaccgcggtggaggagatccacaatgccgtagacaggctgctctcgctgacccttctggccttcgaaggcctaaacacagctgcctccaaggaccgctgcctggcctgcattgaggaaccctttttctccccgctgtggcctctgctgctggccctgtacaggagcgtgcaccgagcccgggaggctgccctgagcaggagcatggagctctacaggaatgcaccccccaccgccattggcatccccaccaagctcctcccccagaaccctgaggccaagggggccactggctacccctactgcgcggcggcccaggagctcggactgctggtcctggagagctgcccccagaagaagctggagtgcatagtgcggaccctgcggatcatctgtgtctgtgcggaagactactgccccaccccagaggccacaccccaggccgggcccccgcccatcgctgcagctgccattggtgccgatgacctgctgcccatcctgtccttcgtggtgctgaggagcggcctccctcagctggtgtcggagtgcgcggccctggaggagttcatccacgaggggtacctgatcggagaggagggctactgcctcacatcactgcagagtgccctgagctacgtggagctgctgccccggggaggcctggccaagtagtacagctagagcccagggtccctgcagggcctggcctcgcctcccagggctgtctctcctacacctggagccatgggatctactgaggaccatcctggagcctcacgctgctctgcacatggtgggggcttgtccactgtggtgtgctctccagctcttcaccttcctcacctcacatctgaccctggagcttggggttggcacctctgccccgacagaatggggctgaatcagctccaggaggaaccaggccctgctctcctgtgtaggcctcagagaggccaagaagggaagctttgggcttcggtgggtgcaggctcagcgatgaacatctggctggggcagctcctggggagcatcagggaagagggggccatgagccggccagcagtggagacggcagtccagtttctctcccctctgacccctagaaggggagttgtagccccatgaactagtttcttgtctgggtcaggaacaagggccggctggggcctggggtgcagctggtgtcagggtatgctgtttgctgatgggcagggacacccctgcagggtctcgggctctgagcccaggacattccctgccccttactcaccttggctgtgggctgtgaacattccgggaccctgggcatcttatctaggtccgtgcagcccaagggtcagccctcttgactgtcacatgctgcccccacccagcctaaaataaagagctcactgctgtg

SEQ ID NO: 199435 - DNA, 2880 bp, Homo sapiens
  Payload ID: 19347
  Gene Name: v-ral simian leukemia viral oncogene homolog A (ras related)
  Uniprot ID: P11233
  ENST ID: ENST00000005257
  CDS Start-End: 381-1001
aggcccatgatcaccctcctctcagcccacggacaggaagtcgctccccagctgccccgccccgctccccagcgccccggaagtgatctgtggcggctgctgcagagccgccaggaggagggtggatctccccagagcaaagcgtcggagtcctcctcctccttctcctcctcctcctcctcctcctccagccgcccaggctcccccgccacccgtcagactcctccttcgaccgctcccggcgcggggccttccaggcgacaaggaccgagtaccctccggccggagccacgcagccgcggcttccggagccctcggggcggcggactggctcgcggtgcagattcttcttaatcctttggtgaaaactgagacacaaaatggctgcaaataagcccaagggtcagaattctttggctttacacaaagtcatcatggtgggcagtggtggcgtgggcaagtcagctctgactctacagttcatgtacgatgagtttgtggaggactatgagcctaccaaagcagacagctatcggaagaaggtagtgctagatggggaggaagtccagatcgatatcttagatacagctgggcaggaggactacgctgcaattagagacaactacttccgaagtggggaggggttcctctgtgttttctctattacagaaatggaatcctttgcagctacagctgacttcagggagcagattttaagagtaaaagaagatgagaatgttccatttctactggttggtaacaaatcagatttagaagataaaagacaggtttctgtagaagaggcaaaaaacagagctgagcagtggaatgttaactacgtggaaacatctgctaaaacacgagctaatgttgacaaggtattttttgatttaatgagagaaattcgagcgagaaagatggaagacagcaaagaaaagaatggaaaaaagaagaggaaaagtttagccaagagaatcagagaaagatgctgcattttataatcaaagcccaaactcctttcttatcttgaccatactaataaatataatttataagcattgccattgaaggcttaattgactgaaattactttaacattttggaaattgttgtatatcactaaaagcatgaattggaactgcaatgaaagtcaaatttactttaaaaagaaattaatatggcttcaccaagaagcaaagttcaacttatttcataattgcctacatttatcatggtcctgaatgtagcgtgtaagcttgtgtttcttgggcagtctttcttgaaattgaagaggtgaaatgggggtggggagtgggaggaaaggtgacttcctctggtgtttattataaagcttaaattttatatcattttaaaatgtcttggtcttctactgccttgaaaaatgacaattgtgaacatgatagttaaactaccactttttttaaccattattatgcaaaatttagaagaaaagttattggcatggttgttgcatatagttaaactgagagtaattcatctgtgaatctgctttaattacctggtgagtaacttagaaaagtggtgtaaacttgtacatggaattttttgaatatgccttaatttagaaactgaaaaatatctggttatatcattctgggtgtgttcttactgacaccaggggtccgctgccccatgtgtcctggtgagaaaatatatgcctggcacagcttttgtatagaaaattcttgagaagtaactgtccgctagaagtctgtccaaatttaaaatgtgtgccatattctggttcttgaaaataagattccagagctctttgatcgcttttaataaactgcaagttcattttaaatgaagggccagcatatatacttgcaagataattttcagctgcaaggattcagcaccagttatgtttgaatgaaccctccttttctctgagattctggtccctggaaatccctttctgctagtggtgagcatgtaagtgttaagtttttaatctgggagcagggcataggaagaaaatgtcagtagtgctaatgcattttgcactagaacgcttcgggaaaatattcatgcttgccatctgttcatttctaaatttatattcataaagttacagtttgatacaggaattattaggagtaattcttttctgtttctgtttataatgaagaacactgtagctacattttcagaagttaacatcaagccatcaaacctgggtatagtgcagaaaacgtggcacacactgaccacacattaggctgtgtcaccattgtgtggtgtacctgctggaagaattctagcatgctacttggggacataatttcagtgggaaatatgccactgaccgattttttttttttcctctttgcagtggggctaggacagttgattcaacaaagtatttttttcttttttctcagtcctaatttgaacaggtcaaagatgtgttcaggcattccaggtaacaggtgtgtatgtaaagttaaaaataggctttttaggaactcactctttagatatttacatccagcttctcatgttaaatatttgtccttaaagggtttgagatgtacatctttcatttcgtatttctcataggctatgccatgtgcggaattcaagttaccaatgtaacactggccagcgggcccagcaatctccatgtgtacttattacagtcttatttaaccaggggtcctaaccactaacattgtgactttgctttgagacctttcctctcctgggtactgaggtgctatgaagccaactgacaaagatgcatcacgtgtcttaggctgatgccactacccgatttgtttatttgcaatttgagccatttaaagaccaataaacttccttttttaaaatgtt

SEQ ID NO: 199436 - DNA, 882 bp, Homo sapiens
  Payload ID: 19347
  Gene Name: v-ral simian leukemia viral oncogene homolog A (ras related)
  ENST ID: ENST00000436179
  CDS Start-End: 580-882
ggtgtgtccgggcggcggcgggccgaggccctgacgcgggttcgggctgccgagattgcacatcccacgttctgcccggggacgagctgcgagatgagcccggctggaatccggggcaccgcgttcgccgctgtggggcgagtgagcccccgagagtgagcggctgcggagaggtcccctgcgcccggcagccggtctcagttggcctcgtccgaaggtcaccccgcacctttcgtccacggcgcccaagttcccgcccgggcggtgcccgcgacctggggcaacccgctgccgccgcagtccccgcgcctcactccacccctctcccctccttccctttctttccactccttgcctgtgctagagccgctgctttttaagcatctccgccagggttttttgtttgtttgttttgtttgtttgtgtttttttttttttttgccagttaaaggaatggtttttcagacttaaagtcattagactctccgcactgaactgaatacctggccttgggcgcttgcacagctttagcccattttcagattcttcttaatcctttggtgaaaactgagacacaaaatggctgcaaataagcccaagggtcagaattctttggctttacacaaagtcatcatggtgggcagtggtggcgtgggcaagtcagctctgactctacagttcatgtacgatgagtttgtggaggactatgagcctaccaaagcagacagctatcggaagaaggtagtgctagatggggaggaagtccagatcgatatcttagatacagctgggcaggaggactacgctgcaattagagacaactacttccgaagtggggaggggttcctctgtgttttctctattacagaaatggaatccttt

SEQ ID NO: 199437 - DNA, 768 bp, Homo sapiens
  Payload ID: 19347
  Gene Name: v-ral simian leukemia viral oncogene homolog A (ras related)
  ENST ID: ENST00000434466
  CDS Start-End: 1-494
agggtcagaattctttggctttacacaaagtcatcatggtgggcagtggtggcgtgggcaagtcagctctgactctacagttcatgtacgatgagtttgtggaggactatgagcctaccaaagcagacagctatcggaagaaggtagtgctagatggggaggaagtccagatcgatatcttagatacagctgggcaggaggactacgctgcaattagagacaactacttccgaagtggggaggggttcctctgtgttttctctattacagaaatggaatcctttgcagctacagctgacttcagggagcagattttaagagtaaaagaagatgagaatgttccatttctactggttggtaacaaatcagatttagaagataaaagacaggtttctgtagaagaggcaaaaaacagagctgagcagtggaatgttaactacgtggaaacatctgctaaaacacgagctaatgttgacaagagtggcccttcctgaagaccagatgtggaacacctgcaagtacatttcatcccactgccctagaccagctccagtatctagaaagactgctcactgggctgaggtattttttgatttaatgagagaaattcgagcgagaaagatggaagacagcaaagaaaagaatggaaaaaagaagaggaaaagtttagccaagagaatcagagaaagatgctgcattttataatcaaagcccaaactcctttcttatcttgaccatactaataaatataatttataagcattgcca

SEQ ID NO: 199438 - DNA, 2344 bp, Homo sapiens
  Payload ID: 19348
  Gene Name: v-ral simian leukemia viral oncogene homolog B
  Uniprot ID: P11234
  ENST ID: ENST00000272519
  CDS Start-End: 271-891
gtggcttccgaggagagggcaagaacggaagcgagggcgcgctctcgagaggaggggttgcctaggcgacgccggaggcgcgctcggggggtgggaaagcgagcccggcagctcaatgacaaatcggtggaggacggctggggtccggccccgggagggggcggggcgcgtttaagagctgcgggccgggtgcggacggcggaggcggcgggactggtccctgctcttcagtgggtcatctgtgtgtcacagcctcagaagaccagcgagatggctgccaacaagagtaagggccagagctccttggccctccacaaggtgatcatggttggcagcggaggcgttggcaagtcagccctgacgcttcagttcatgtatgacgagtttgtagaagactatgaacctaccaaagctgacagttatagaaagaaagtggttcttgatggggaagaagttcagatagatattctggacaccgctgggcaagaggactacgcagccattcgagataactactttcggagtggggaagggtttcttcttgtgttctcaatcacagaacatgaatcctttacagcaactgccgaattcagggaacagattctccgtgtgaaggctgaagaagataaaattccactgctcgtcgtgggaaacaagtctgacctagaggagcggaggcaggtgcctgtggaggaggccaggagtaaagccgaagagtggggcgtgcagtacgtggagacgtcagcgaagacccgggccaacgtggacaaggtgttctttgacctaatgagagaaatcagaacaaagaagatgtcagaaaacaaagacaagaatggcaagaaaagcagcaagaacaagaaaagttttaaagaaagatgttgcttactatgagtgtcaaggtgacggatgaagccagctgctcctaaggacacagggctgggttggtaaagagaaggctatggttgacttcttgcttgtgcttcccactctccccgacttcattcactcaaacttctttaaatggggaaaaatatttgtgactctgtggctggcagaagaaataagcccatgcaagtggaagggctgctttgtcaggaggttgtggaatttctttcttctccccttcttccctcccaaaagcttagctatgtataaagtgccacagataggaaacagctgttaattacaaagagaaagaattgtcatagcatcttattttgttcctagttttataacattaccatccttcgttttgaactacagatgttgtagtgggttttggaggagggagtggagtaagatgccctcccacttttatcagtttagtagtagtactgagaaaaatcccttcagctctaagaacactgaaaaatccaccgattttttgggtaagcttcttggcaataccctgtggatctgaaacagctaaaaaaatgaatttgaattgcgccagataggtcaataccaagcttctgattcctcctcacatatgaaaagtgaaagttgtgagttgttttcctcttatttaaacattggcctattataatctgtgttggttatttttctcctgtaagcatcctgatttttctgtaggaacttttctttggcagaccaagtgaagactcaggaatggtgtgcattataaatgacacacattgccacttgtgtagatatttttaagttctttggctaagtcctctcctaactgcctgtcctctggttaggcccctccctctccactagtggtgaatgcatgtgtctgtctgatcagcatcactgcacacggaggtctagtgagcctcttgctaagtgtcacacacactcttcccaaagacgtgatgagttaaagttgtattctgaaatcatgaagccagagcctgtgccagaccttctgctacctctcatagaattgctctgtaattctaaatttaaaattagaagtagagagagataagccatcgcccctttgcctctgagaattggctgctgtttctaatataattattttctaagatagccagatagttagaaaaagattttcattgatgacatatctttaaactttcttgcatcagtattctaaattgagcaaactgaaagattttcatcaggaaaggagcactgtgggaagagcccagtattcacattttttccccatttttcagaagcgacatttcatatataggtgccaaaagtgaatcggggtgcggagagtgggaaccttttgaatttatgattgtcacagagatggtagaaattatgatctgactggaaaacaatcctgtatcccctcccaaagaatcatgggctttttttttgaataaaaaagcagacaaatagactt

SEQ ID NO: 199439 - DNA, 767 bp, Homo sapiens
  Payload ID: 19348
  Gene Name: v-ral simian leukemia viral oncogene homolog B
  ENST ID: ENST00000431732
  CDS Start-End: 179-319
gggaaagcgagcccggcagctcaatgacaaatcggtggaggacggctggggtccggccccgggagggggcggggcgcgtttaagagctgcgggccgggtgcggacggcggaggcggcgggactggtccctgctcttcagtgggtcatctgtgtgtcacagcctcagaagaccagcgagatggctgccaacaagagtaagggccagagctccttggccctccacaaggtgatcatggttggcagcggaggcgttggcaagtcagccctgacgcttcagttcatgtatgacgaggaatgtttcaaaatcattggcatatgacaagaaaaagtatacagcaaacaaaaaagtagaaggtattctagagtttgtagaagactatgaacctaccaaagctgacagttatagaaagaaagtggttcttgatggggaagaagttcagatagatattctggacaccgctgggcaagaggactacgcagccattcgagataactactttcggagtggggaagggtttcttcttgtgttctcaatcacagaacatgaatcctttacagcaactgccgaattcagggaacagattctccgtgtgaaggctgaagaagataaaattccactgctcgtcgtgggaaacaagtctgacctagaggagcggaggcaggtgcctgtggaggaggccaggagtaaagccgaagagtggggcgtgcagtacgtggagacgtcagcgaagacccgggccaacgtggacaaggtgttctttgaccta

SEQ ID NO: 199440 - DNA, 981 bp, Homo sapiens
  Payload ID: 19348
  Gene Name: v-ral simian leukemia viral oncogene homolog B
  ENST ID: ENST00000412383
  CDS Start-End: 481-981
ctcccgctcgggaccgtccacttcctcagtcctccggccgcggcttgggcagggtcagggctgggaagtgttgcaaaaacttaactgccctcggaacttgcacgcgccgtgaactgggcggtgttcctaaagggcttcggtttgctggttttgttttggtcctgtcttgcaaatgagcataaagttgtttctcccccagcctcctcccctttcctttctgataggggccagcggcgaaggggcttctaaggggaagcgcctggactgggcatcgccgtcccggttcttgccgcctgtgggagtgtgaggttaaccgtgctcggtgcagggttgcggggcgcggagcttgctgcgtccacactgcttgtgtgagcagtgtcctctctgtgctcatttccaacgagaaacgttggaactttggtgttcttatcagctcttcagtgggtcatctgtgtgtcacagcctcagaagaccagcgagatggctgccaacaagagtaagggccagagctccttggccctccacaaggtgatcatggttggcagcggaggcgttggcaagtcagccctgacgcttcagttcatgtatgacgagtttgtagaagactatgaacctaccaaagctgacagttatagaaagaaagtggttcttgatggggaagaagttcagatagatattctggacaccgctgggcaagaggactacgcagccattcgagataactactttcggagtggggaagggtttcttcttgtgttctcaatcacagaacatgaatcctttacagcaactgccgaattcagggaacagattctccgtgtgaaggctgaagaagataaaattccactgctcgtcgtgggaaacaagtctgacctagaggagcggaggcaggtgcctgtggaggaggccaggagtaaagccgaagagtggggcgtgcagtacgtggagacgtcagcgaagacccgggccaacgtggacaag

SEQ ID NO: 199441 - DNA, 558 bp, Homo sapiens
  Payload ID: 19348
  Gene Name: v-ral simian leukemia viral oncogene homolog B
  ENST ID: ENST00000447591
  CDS Start-End: 44-558
gatttcagcagcgggagagcgggtggcaggaggaggtctctgcatgaaacagcggcagtcagctcttcagtgggtcatctgtgtgtcacagcctcagaagaccagcgagatggctgccaacaagagtaagggccagagctccttggccctccacaaggtgatcatggttggcagcggaggcgttggcaagtcagccctgacgcttcagttcatgtatgacgagtttgtagaagactatgaacctaccaaagctgacagttatagaaagaaagtggttcttgatggggaagaagttcagatagatattctggacaccgctgggcaagaggactacgcagccattcgagataactactttcggagtggggaagggtttcttcttgtgttctcaatcacagaacatgaatcctttacagcaactgccgaattcagggaacagattctccgtgtgaaggctgaagaagataaaattccactgctcgtcgtgggaaacaagtctgacctagaggagcggaggcaggtgcctgtggaggaggccaggagtaaagccgaagagtg

SEQ ID NO: 199442 - DNA, 667 bp, Homo sapiens
  Payload ID: 19348
  Gene Name: v-ral simian leukemia viral oncogene homolog B
  ENST ID: ENST00000449649
  CDS Start-End: 332-667
gttttggtcctgtcttgcaaatgagcataaagttgtttctcccccagcctcctcccctttcctttctgataggggccagcggcgaaggggcttctaaggggaagcgcctggactgggcatcgccgtcccggttcttgccgcctgtgggagtgtgaggttaaccgtgctcggtgcagggttgcggggcgcggagcttgctgcgtccacactgcttgtgtgagcagtgtcctctctgtgctcatttccaacgagaaacgttggaactttggtgttcttatcagcagctcttcagtgggtcatctgtgtgtcacagcctcagaagaccagcgagatggctgccaacaagagtaagggccagagctccttggccctccacaaggtgatcatggttggcagcggaggcgttggcaagtcagccctgacgcttcagttcatgtatgacgagtttgtagaagactatgaacctaccaaagctgacagttatagaaagaaagtggttcttgatggggaagaagttcagatagatattctggacaccgctgggcaagaggactacgcagccattcgagataactactttcggagtggggaagggtttcttcttgtgttctcaatcacagaacatgaatcctttacagcaactgccgaattcagggaacagattctc

SEQ ID NO: 199443 - DNA, 1252 bp, Homo sapiens
  Payload ID: 19348
  Gene Name: v-ral simian leukemia viral oncogene homolog B
  Uniprot ID: P11234
  ENST ID: ENST00000420510
  CDS Start-End: 227-847
agaggaggggttgcctaggcgacgccggaggcgcgctcggggggtgggaaagcgagcccggcagctcaatgacaaatcggtggaggacggctggggtccggccccgggagggggcggggcgcgtttaagagctgcgggccgggtgcggacggcggaggcggcgggactggtccctgcagctcttcagtgggtcatctgtgtgtcacagcctcagaagaccagcgagatggctgccaacaagagtaagggccagagctccttggccctccacaaggtgatcatggttggcagcggaggcgttggcaagtcagccctgacgcttcagttcatgtatgacgagtttgtagaagactatgaacctaccaaagctgacagttatagaaagaaagtggttcttgatggggaagaagttcagatagatattctggacaccgctgggcaagaggactacgcagccattcgagataactactttcggagtggggaagggtttcttcttgtgttctcaatcacagaacatgaatcctttacagcaactgccgaattcagggaacagattctccgtgtgaaggctgaagaagataaaattccactgctcgtcgtgggaaacaagtctgacctagaggagcggaggcaggtgcctgtggaggaggccaggagtaaagccgaagagtggggcgtgcagtacgtggagacgtcagcgaagacccgggccaacgtggacaaggtgttctttgacctaatgagagaaatcagaacaaagaagatgtcagaaaacaaagacaagaatggcaagaaaagcagcaagaacaagaaaagttttaaagaaagatgttgcttactatgagtgtcaaggtgacggatgaagccagctgctcctaaggacacagggctgggttggtaaagagaaggctatggttgacttcttgcttgtgcttcccactctccccgacttcattcactcaaacttctttaaatggggaaaaatatttgtgactctgtggctggcagaagaaataagcccatgcaagtggaagggctgctttgtcaggaggttgtggaatttctttcttctccccttcttccctcccaaaagcttagctatgtataaagtgccacagataggaaacagctgttaattacaaagagaaagaattgtcatagcatcttattttgttcctagttttataacattaccatccttcgttttgaactacagatgttgtagtgggttttggaggagggagtggag

SEQ ID NO: 199444 - DNA, 311 bp, Homo sapiens
  Payload ID: 19348
  Gene Name: v-ral simian leukemia viral oncogene homolog B
  ENST ID: ENST00000631312
  CDS Start-End: 171-311
gagcccggcagctcaatgacaaatcggtggaggacggctggggtccggccccgggagggggcggggcgcgtttaagagctgcgggccgggtgcggacggcggaggcggcgggactggtccctgctcttcagtgggtcatctgtgtgtcacagcctcagaagaccagcgagatggctgccaacaagagtaagggccagagctccttggccctccacaaggtgatcatggttggcagcggaggcgttggcaagtcagccctgacgcttcagttcatgtatgacgaggaatgtttcaaaatcattggcatatga

SEQ ID NO: 199445 - DNA, 11255 bp, Homo sapiens
  Payload ID: 19349
  Gene Name: v-rel avian reticuloendotheliosis viral oncogene homolog
  Uniprot ID: Q04864
  ENST ID: ENST00000295025
  CDS Start-End: 321-2180
agccgcgggaaattcccctcccgccaggctgctcgcctctcggctgggccagcactcggctctccccgctccgccccctgcccctggctcccgtacggtggacggcgacgctgggtgacccggggtgcaagaattcaggggttgggaaggtgtgagccgcaaacccagcggagggcgggaagaaggaggaggcctctagggtggtcgggggactgggggccccgccggcagaggtccctcggcctcctgactgactgactgcggccgcctccggccaggacgctgggagctgcctgcgggaaggtgcggggagcggagccatggcctccggtgcgtataacccgtatatagagataattgaacaacccaggcagaggggaatgcgttttagatacaaatgtgaagggcgatcagcaggcagcattccaggggagcacagcacagacaacaaccgaacatacccttctatccagattatgaactattatggaaaaggaaaagtgagaattacattagtaacaaagaatgacccatataaacctcatcctcatgatttagttggaaaagactgcagagacggctactatgaagcagaatttggacaagaacgcagacctttgtttttccaaaatttgggtattcgatgtgtgaagaaaaaagaagtaaaagaagctattattacaagaataaaggcaggaatcaatccattcaatgtccctgaaaaacagctgaatgatattgaagattgtgacctcaatgtggtgagactgtgttttcaagtttttctccctgatgaacatggtaatttgacgactgctcttcctcctgttgtctcgaacccaatttatgacaaccgtgctccaaatactgcagaattaaggatttgtcgtgtaaacaagaattgtggaagtgtcagaggaggagatgaaatatttctactttgtgacaaagttcagaaagatgacatagaagttcgttttgtgttgaacgattgggaagcaaaaggcatcttttcacaagctgatgtacaccgtcaagtagccattgttttcaaaactccaccatattgcaaagctatcacagaacccgtaacagtaaaaatgcagttgcggagaccttctgaccaggaagttagtgaatctatggattttagatatctgccagatgaaaaagatacttacggcaataaagcaaagaaacaaaagacaactctgcttttccagaaactgtgccaggatcacgtagaaacagggtttcgccatgttgaccaggatggtcttgaactcctgacatcaggtgatccacccaccttggcctcccaaagtgctgggattacagttaattttcctgagagaccaagacctggtctcctcggttcaattggagaaggaagatacttcaaaaaagaaccaaacttgttttctcatgatgcagttgtgagagaaatgcctacaggggtttcaagtcaagcagaatcctactatccctcacctgggcccatctcaagtggattgtcacatcatgcctcaatggcacctctgccttcttcaagctggtcatcagtggcccaccccaccccacgctcaggcaatacaaacccactgagtagtttttcaacaaggacacttccttctaattcgcaaggtatcccaccattcctgagaatacctgttgggaatgatttaaatgcttctaatgcttgcatttacaacaatgccgatgacatagtcggaatggaagcgtcatccatgccatcagcagatttatatggtatttctgatcccaacatgctgtctaattgttctgtgaatatgatgacaaccagcagtgacagcatgggagagactgataatccaagacttctgagcatgaatcttgaaaacccctcatgtaattcagtgttagacccaagagacttgagacagctccatcagatgtcctcttccagtatgtcagcaggcgccaattccaatactactgtttttgtttcacaatcagatgcatttgagggatctgacttcagttgtgcagataacagcatgataaatgagtcgggaccatcaaacagtactaatccaaacagtcatggttttgttcaagatagtcagtattcaggtattggcagtatgcaaaatgagcaattgagtgactcctttccatatgaattttttcaagtataacttgcaagatttaaatccttttaaatcttgataccacctatatagatgcagcattttgtatttgtctaactggggatataatactatatttatactgtatatataatactgactgagaatataatactgtatttgagaatataaaaaacttttttcagggaagaagcatacaactttggacatagcgaatacaaaattggaagctgtcataaaaagacaactcagaggccaggcgcaggggctcacacctgtaatcctagcactttgggaggccaaggcgggtggatcacttgagaccaggaattcgagaccagcctggccaacatggtgaaaccccgtctctactaaaaatacaaaaattagctgagcatggtggtacgtgcctgtactgtcagctacttgggaggctgaggcacaataattgtttgaacccaggaagcagaggttgcagtgagctgagatcacaccaccgcactccagcctgggtgacagagtgagactctgtctcaaaaaaaaaaaaacaaaaaaaacacacttttttatatttctttttataatgttttaatgtattcttaaatttcaagcaaatttaagataaaacttgtaatggctatgccattgaaaaacttaattttttatttttgaggcccatgggccaaggtaacccctaaggggttttcttaggcttcttggagcttagatttgtatgtatatcaaaatgtctttaaaatgttaagttgggcagaaggcagttgaagtgagctttcaaggtatgggaggttttctacattttatactatttcaatctatgcctttaaagttgcttatgattttagctgtacactcattttttaaggggaagaagtttccttggaccattcgcctttcttagatgtcctcactccctgtgatctcataaaactgcctatttgacatctctatctagaaatctaattaaagctcacactcagcatatccaaaactgaattcttggtcttccctcccaaacttgcttctccttcagtcttctccaactcagtaaatggcaatgccatacttctggttgctcaggccaaaaaccctgaagtcatccttgattcttcttttagcacccatatccaatccattagcaaatctggtagaccctaccttcacaatatatctaaagctgaccacctcttttgacctctactattaacgccctattccaagccaccatcatctcttccctggattgaagctgtcatctacaaaaattcttcttatatccttgcattcctacagtctgttccccataaagtagccagaatgattatttttaaaacaagtcaactcataccattcatctgctcaaaaccattcattggcttctcatctcactcagagcagtcaaagtccttaaaagttgcaggcctagactccctgtcctacctcaggtaccaccatatcccacctcctcatgcagctccaggcaccttggcctcagtgctcctcaaagcatcaagtatgcacttgccttggacagtctgtacttggtattccctctgccttgaatgttgttctcccagaaaaatgcatagttcactcttacatccttcaggtgtcactccactgttacctgagcaggtcgtccttgaatatatacatcagcattccctttcccccctgctttatgtatgtccatagcactcaccacgatctgactttactaagtatttattcatttactgtttgttttcccataccgaaatataaactttctaaggacagaaatttttgtgctttattgttgaatctccaatttgtagaaaaatgcctaccttatattaaacactcagtaaatgtttattgaacattaaaagtattactaatagaactttggtttttgaaagaaataataactttaattataagacgtatatgatttttgcagttttacttagtgtgacattgggtttatgagaatcgtgtacattcaagtccaggaataataatggtcatccaaattgtttgaaaggaaaataatcccagtggcaaaatgatggtagaatttgggtaatcttttttttccttttatgaaaagagattttattgaaggtaaaacattagaggttcattgagaatctctaaatccatgttttgacattgtcaagctcattgcaacttccagattgagtaacacttataacacatttccttttcaaagtgcaagatttttaaaagagacttgtcacatattcatttggctggtttcaaatggtgagctgaatgctgggtaatctctactagctccttaatcagatttaaaattctcagtgtttcctagttgtttctgcatactttatgtgagttgttatagctgtaacattacactttatttgctgtttgtgtttcgtgacttttggtaattctggcatttagaaacctttcactttgcttcaaaacgtagttatattttggagttttcatttgatatataattatttattttgcccttttatttcccaaagacattgtaagggttaattagatcattatattttattattacagattaaagttgggcagtaatcttaattatgatggaattatcattatgctaagtaattaactttacctagtttgttttacaactagaacctgccctaaatgttgaatatcttcctagcaagaaacagtctgtcattttacttacacgatgtctaaccaaaccataactttacataaactagtcgtttcggtcaaatagaaaaatgtgtgaatgccataaaaacaaaaattctcagttaaatgatactgggaaatagggaagacagcaaagtgagacttgggctcaggatggttcaggaagaaaaaaaaagaaagacccctgagtaccattaatattcctcagaaattattatttcaaaaggaaatatttctgtattataaatttttcatgagcagccattatgaaatctcacaagaatcatagaattcaataaaaaaggtagaaagtaatttttttacttaaaaatataaattaaaataaatttttaaaatcataagcacataaatagaacttaccagggagaaagaaaaacctgaaggcacaatttcttttctgttcaaaatgtgaacccaggatgtctctagatgatgatggatgataggtggggagattttttttttttttaatacagaatctcatagttttggattaattagcaccaatcagtttaaacactgactgttagaatagctgcatgggtttttttctttaaactaattaagcgttggctacttagtataagtaagtataagccgaattaaggttctgctacatctgtgtttagaatatttttttaaaactaaataagtgttggctagttttgcggtgtaagcagaattaaggttctgctacctctgtgtgtagaatattcccaatggatttttcatttttcaggtgctattttttgaccctgtatagactttaatttaaaatgaatttggtaacgtttctcctctgtctctacatatattcatgctttcacctgctcttttaacacctgcttttagtatctgaggcactttttctgaactctacttgtgcactggatccctcctcctttctctgccaggctgtgtttactttatccttacatcaccacttagtgattcctttctttgtataaacatggtaaatgtcttcattagcctaaaaggaaagaccaaataaaacctttcctaccacttggatgcatttgcatcctgacttctgaaatgcctccagcctccattttctcccttcccagttattccttagcccagccatctctgtctttagctcctacaattttcttaggatattctgggaaagatgagcggagactgcccgccttgtcaaatctagtgtctttttttcagtcctcacactgcttgacctatgtataacctcctatacttccctctttgcatactcctctgggttttctgtggtagtcaagattcctccctgagatttatttcccatgagtcttgacccctcccctcagttggtgctatttccccctacccgccctccgatgatcttatcagagcccacaggttcagttttctttcatgctacctgaatgtcctgataaactggctcgctctcttctttaccttccataatggcattaccatttaccacgccacccaagatacttactaggaacctcaaagtattgtattctttttctccatcacactcatacttaatcatcaagtccttttgagcttgtctcctcttgaatatgtcccttcttaattcctgctgccttcttagtaaaggccttcattcttttttccctagtaataatcttttccatatgttccagttaaaataccatgttctccctattccttattacatagctagcattccttgaaaaaaaacaattctctcaggcctccatacctttagcatgttacccactctgcctctgctcttctggaactagaacactcatccttgaaggctgggcttctgtatgaaggttggtcctgcctccttacttgaggtgaagctttgtacatgcctgtattacggacatcctcttatttaagtgtttgtctctttcgtcattgggactccagcacccagcatagtccctagtatactagttggtgctgaataaatagtagctattattagaaaaggaagggtgaaattgacatgggagttagtaaaatgtatatggaaatgatttttaaagggaaaggtaatgattttctggcaggaaaagcagcaatgacaagattacttaagtcttgtgaaataacacttctcttccttgacctgctgcttcccttttttaccacacacacacgcacacataccacagccctttgagactgaaagcagctctattgagaatagtagtgtcaactgtattatgtagaaattctaaagtttttgggattatttcatagccctgaccttgctacttctctccactttatgtggcaggtttaatctcaggtctccctcatacacttctcagcctcagcacctaaccctcacacaacactccagtattgatgcagtcaatcttgtataacattttttgaatgtccaatgtgcaaagcacgatgttggaaattatacagaggtgaataagacaaaaactcttgctctcaaagatgtcagtctttttctttgcaaggataacacatgtagagtaaaatgcataaaggggactaattttaaatgtacagcttaattaatttttatgtatgttaacacccatgtcaccaccatgtttaggacatttccagcacccctgaaatttccttcatgccccttcccagtctgtacctacacctctaaatctattttcaatcttaatggccttttaaataactgggcttctcacaaccatagtgaacagaaacagctgggttgtcaacgtctaacctaatacttcaggaaaactcatgatggtttccatgttaagagagacatggagcagggcactggcatggtggatggatcacgcctgtaatcccagcactttgggaggccgaggtagggggattgcttgagcccaggagttcaagactagcctgggtaatataaggaaaacctgtctctgcaaaaaaaaaaaaaaaaagaggatacaaccaaatggaagaacattccatgctcatgggtaggaagaatcaatatcgtgaaaatggccatactgcccaaggtaatttacagattcagtgccatccccatcaagctaccaatgcctttcttcacagaattggaaaaaactactttaaagttcatatggaaccaaaaaagagcccatatcgccaagtcaatcctaagccaaaagaacaaagctggaggcatcacactacctgacttcaaactatactacaaggctacagtaaccaaaacagcatggtactggtaccaaaacagagatatagatcactggaacagaacagagccctcagaaataacgccgcatatctacaactatctgatctttgacaaacctgagaaaaacaagcaatggggaaaggattccctatttaataaatggtgctgggaaaactggctagccatatgtagaaagctgaaactggatcccttccttacaccttatacaaaaatcaattcaagatggattaaagacttaaacgttagacctaaaaccataaaaaccctagaagaaaacctaggcattaccattcaggacataggcatgggcaaggacttcatgtctaaaacaccaaaagcaatggcaacaaaagccaaaattgacaaatgggatctaattaaactaaagagctgctgcacagcaaaagaaactaccatcagagtgaacaggcaacctacaaaatgggagaaaattttcgcaacctacttatctgacaaagggctaatatccagaatctacaatgaactcaaacaaatttacaagaaaaaaacaaccccatcaaaaagtgggcgaaggacatgaacagacacttctcaaaagaagacatttatgcagccaaaaaacacatgaaaaaatgctcatcatgactggccatcagagaaatgcaaatcaaaaccacaatgagataccatctcacaccagttagaatggcaatcattaaaaagtcaggagacaacaggtgctggagaggatgtggagaaataggaacacttttacactgttggtgggactgtaaactagttcaaccattgtggaagtcagtgtggcgattcctcagggatgtagaactggaaataccgtttgacccagccatcccattactgggtatatacccaaaggactataaatcatgctgctataaagacacatgcacacgtatgtttattgcggcattattcacaatagcaaagacttggaaccaacccaaatgtccaacaatgatagactggattaagaaaatgtggcacatatacaccatggaatactatgcagccataaaaaatgatgaattcatgtcctttgtagggacatggatgaaattggaaaacatcattctcagtaaactatcgcaagaacaagaaaccaaacaccacatattctcactcataggtgggaattgaacaatgagaacacatggacacaggaaggggaatatcacactggggactgttgtggggtggggggaggggggagggatagcattgggagatatacctaatgctagatgacgagttagtgggtgcagtgcaccagcatggcacatgtatacatatgtaagtaacctgcacaatgtgcacatgtaccctaaagcttaaagtataataaaaaataaataaataaataaataagaaaaagaaagccaggcatggtgacatgtgcctgtggtcccagctattagggaggctgaggtgggaggatcccttgaacccaggaggttgagtctgtagtgagcagtgattacgccactgcactccagcctgggcaagaccctgtctcaaaaaaaaaaaagacttagaattggtgatccaggccgcctaatggcatcaaataatttgttatatctttaatttattgaaggatcaccacatgcttttaaatagcatggagaaatggaaagaatagggactttttactcaggtaatacccagcctgctacctaacaggttgtgttgtactaaataaaatggtacataagaagaaacactgtaaattatatagtgcgaatcaaatattgttaataaaccaatatctgtatatcctatgtcccggattaatctttaatttagatactccttctagttatctaatacacagcagagtgagaaaaatcattatggattaggttctttagtaagaaacctgagatggacttctcattagcattaactagttattgcccagctttggagagccttcttttggcttatcatttattataagcccagaaataggtgactaatcagagataaatgtatgggttgtctgtatctagttttatgccttttttttgcctaagacgtagtcaaattaatattttaactaatacatcttagcagagtttagttaagcacaaagttaacagtgggtaggattgaatcttgaaagtaatcatgtctgtaatgtttttcatgcatgcaaaaagcacagacaaaaccactcatgccctattaataaacaaaatacagatcaaagttttcaaaagtaatcactctatttattctaaatgtctgtggctttaggaaaataccaccagctagtacttacctatttaaagatgtagaatttattatcctctaatattcttatcagttgtttccacaactttagtttactattggactttcaaaaatttaaagaattacaagtaaaattcattaaacacttgtgtgtgaatagtaatacacagtaattagtacagcatgttgcttcttcaacaaattgagttttcagggaaatcagcaagtaaatgaaatataaatttttggtaaaagtatcaaacattcatcttgcccatttttcctcttaaactttattatctaatcaaacatagttttccataagatgtaataaaatatagataaggttggaatatttgaggatccatttgtggaactgaatttaatgagacttcattggtgatacactcaatttttactgggtaattagctaataatgttggtcactgtctcacagttcaagtagctttaagatgatgtggcaaggaaaacacaaagcttttgggtaaccagcgttcttaaatgtatggtttttgaccaggtgaaccctttagaagtgatttctgttttaaaagtatgtacttaaaatacctttggctgtgatgaatgtagatcccagcagaataccaaaatcctattttttttgactgagtatttgtagatgcttaatgactgaaatgaatttggaggcactgatgaaagtgatttttttaaagttctcaggtactgttcaattatttaatgttaagtttagtatcaagatacagttgtttttaaaatgccaaaatgctgtttattatacagaatattttattacatttgcaatatctttgtatatagtgatttttttcttgataataaatggaaaaattctaaaa

SEQ ID NO: 199446 - DNA, 2398 bp, Homo sapiens
  Payload ID: 19349
  Gene Name: v-rel avian reticuloendotheliosis viral oncogene homolog
  Uniprot ID: Q04864
  ENST ID: ENST00000394479
  CDS Start-End: 186-1949
caggggttgggaaggtgtgagccgcaaacccagcggagggcgggaagaaggaggaggcctctagggtggtcgggggactgggggccccgccggcagaggtccctcggcctcctgactgactgactgcggccgcctccggccaggacgctgggagctgcctgcgggaaggtgcggggagcggagccatggcctccggtgcgtataacccgtatatagagataattgaacaacccaggcagaggggaatgcgttttagatacaaatgtgaagggcgatcagcaggcagcattccaggggagcacagcacagacaacaaccgaacatacccttctatccagattatgaactattatggaaaaggaaaagtgagaattacattagtaacaaagaatgacccatataaacctcatcctcatgatttagttggaaaagactgcagagacggctactatgaagcagaatttggacaagaacgcagacctttgtttttccaaaatttgggtattcgatgtgtgaagaaaaaagaagtaaaagaagctattattacaagaataaaggcaggaatcaatccattcaatgtccctgaaaaacagctgaatgatattgaagattgtgacctcaatgtggtgagactgtgttttcaagtttttctccctgatgaacatggtaatttgacgactgctcttcctcctgttgtctcgaacccaatttatgacaaccgtgctccaaatactgcagaattaaggatttgtcgtgtaaacaagaattgtggaagtgtcagaggaggagatgaaatatttctactttgtgacaaagttcagaaagatgacatagaagttcgttttgtgttgaacgattgggaagcaaaaggcatcttttcacaagctgatgtacaccgtcaagtagccattgttttcaaaactccaccatattgcaaagctatcacagaacccgtaacagtaaaaatgcagttgcggagaccttctgaccaggaagttagtgaatctatggattttagatatctgccagatgaaaaagatacttacggcaataaagcaaagaaacaaaagacaactctgcttttccagaaactgtgccaggatcacgttaattttcctgagagaccaagacctggtctcctcggttcaattggagaaggaagatacttcaaaaaagaaccaaacttgttttctcatgatgcagttgtgagagaaatgcctacaggggtttcaagtcaagcagaatcctactatccctcacctgggcccatctcaagtggattgtcacatcatgcctcaatggcacctctgccttcttcaagctggtcatcagtggcccaccccaccccacgctcaggcaatacaaacccactgagtagtttttcaacaaggacacttccttctaattcgcaaggtatcccaccattcctgagaatacctgttgggaatgatttaaatgcttctaatgcttgcatttacaacaatgccgatgacatagtcggaatggaagcgtcatccatgccatcagcagatttatatggtatttctgatcccaacatgctgtctaattgttctgtgaatatgatgacaaccagcagtgacagcatgggagagactgataatccaagacttctgagcatgaatcttgaaaacccctcatgtaattcagtgttagacccaagagacttgagacagctccatcagatgtcctcttccagtatgtcagcaggcgccaattccaatactactgtttttgtttcacaatcagatgcatttgagggatctgacttcagttgtgcagataacagcatgataaatgagtcgggaccatcaaacagtactaatccaaacagtcatggttttgttcaagatagtcagtattcaggtattggcagtatgcaaaatgagcaattgagtgactcctttccatatgaattttttcaagtataacttgcaagatttaaatccttttaaatcttgataccacctatatagatgcagcattttgtatttgtctaactggggatataatactatatttatactgtatatataatactgactgagaatataatactgtatttgagaatataaaaaacttttttcagggaagaagcatacaactttggacatagcgaatacaaaattggaagctgtcataaaaagacaactcagaggccaggcgcaggggctcacacctgtaatcctagcactttgggaggccaaggcgggtggatcacttgagaccaggaattcgagaccagcctggccaacatggtgaaaccccgtctctactaaaaatacaaaaattagctgagcatggtggtacgtgcctgtactgtcagctacttgggaggctgaggcacaataattgtttgaacccaggaagcagaggttgc

SEQ ID NO: 199447 - DNA, 2681 bp, Homo sapiens
  Payload ID: 19350
  Gene Name: v-rel avian reticuloendotheliosis viral oncogene homolog A
  Uniprot ID: Q04206
  ENST ID: ENST00000308639
  CDS Start-End: 259-1905
cgtcctcggcgaggcgcgcacttggccccgacccccggcagcggctgtgcgtgcagcctcttcgtcctccgcgcggcgtgcacttgctcccggcccctgcgccgggcggcggcggggcagcgcgcaggcgcggccggattccgggcagtgacgcgacggcgggccgcgcggcgcatttccgcctctggcgaatggctcgtctgtagtgcacgccgcgggcccagctgcgaccccggccccgcccccgggaccccggccatggacgaactgttccccctcatcttcccggcagagccagcccaggcctctggcccctatgtggagatcattgagcagcccaagcagcggggcatgcgcttccgctacaagtgcgaggggcgctccgcgggcagcatcccaggcgagaggagcacagataccaccaagacccaccccaccatcaagatcaatggctacacaggaccagggacagtgcgcatctccctggtcaccaaggaccctcctcaccggcctcacccccacgagcttgtaggaaaggactgccgggatggcttctatgaggctgagctctgcccggaccgctgcatccacagtttccagaacctgggaatccagtgtgtgaagaagcgggacctggagcaggctatcagtcagcgcatccagaccaacaacaaccccttccaagaagagcagcgtggggactacgacctgaatgctgtgcggctctgcttccaggtgacagtgcgggacccatcaggcaggcccctccgcctgccgcctgtcctttctcatcccatctttgacaatcgtgcccccaacactgccgagctcaagatctgccgagtgaaccgaaactctggcagctgcctcggtggggatgagatcttcctactgtgtgacaaggtgcagaaagaggacattgaggtgtatttcacgggaccaggctgggaggcccgaggctccttttcgcaagctgatgtgcaccgacaagtggccattgtgttccggacccctccctacgcagaccccagcctgcaggctcctgtgcgtgtctccatgcagctgcggcggccttccgaccgggagctcagtgagcccatggaattccagtacctgccagatacagacgatcgtcaccggattgaggagaaacgtaaaaggacatatgagaccttcaagagcatcatgaagaagagtcctttcagcggacccaccgacccccggcctccacctcgacgcattgctgtgccttcccgcagctcagcttctgtccccaagccagcaccccagccctatccctttacgtcatccctgagcaccatcaactatgatgagtttcccaccatggtgtttccttctgggcagatcagccaggcctcggccttggccccggcccctccccaagtcctgccccaggctccagcccctgcccctgctccagccatggtatcagctctggcccaggccccagcccctgtcccagtcctagccccaggccctcctcaggctgtggccccacctgcccccaagcccacccaggctggggaaggaacgctgtcagaggccctgctgcagctgcagtttgatgatgaagacctgggggccttgcttggcaacagcacagacccagctgtgttcacagacctggcatccgtcgacaactccgagtttcagcagctgctgaaccagggcatacctgtggccccccacacaactgagcccatgctgatggagtaccctgaggctataactcgcctagtgacaggggcccagaggccccccgacccagctcctgctccactgggggccccggggctccccaatggcctcctttcaggagatgaagacttctcctccattgcggacatggacttctcagccctgctgagtcagatcagctcctaagggggtgacgcctgccctccccagagcactgggttgcaggggattgaagccctccaaaagcacttacggattctggtggggtgtgttccaactgcccccaactttgtggatgtcttccttggaggggggagccatattttattcttttattgtcagtatctgtatctctctctctttttggaggtgcttaagcagaagcattaacttctctggaaaggggggagctggggaaactcaaacttttcccctgtcctgatggtcagctcccttctctgtagggaactctggggtcccccatccccatcctccagcttctggtactctcctagagacagaagcaggctggaggtaaggcctttgagcccacaaagccttatcaagtgtcttccatcatggattcattacagcttaatcaaaataacgccccagataccagcccctgtatggcactggcattgtccctgtgcctaacaccagcgtttgaggggctggccttcctgccctacagaggtctctgccggctctttccttgctcaaccatggctgaaggaaaccagtgcaacagcactggctctctccaggatccagaaggggtttggtctgggacttccttgctctccctcttctcaagtgccttaatagtagggtaagttgttaagagtgggggagagcaggctggcagctctccagtcaggaggcatagtttttactgaacaatcaaagcacttggactcttgctctttctactctgaactaataaatctgttgccaagctg

SEQ ID NO: 199448 - DNA, 2700 bp, Homo sapiens
  Payload ID: 19350
  Gene Name: v-rel avian reticuloendotheliosis viral oncogene homolog A
  Uniprot ID: Q04206
  ENST ID: ENST00000406246
  CDS Start-End: 263-1918
tcttcgtcctcggcgaggcgcgcacttggccccgacccccggcagcggctgtgcgtgcagcctcttcgtcctccgcgcggcgtgcacttgctcccggcccctgcgccgggcggcggcggggcagcgcgcaggcgcggccggattccgggcagtgacgcgacggcgggccgcgcggcgcatttccgcctctggcgaatggctcgtctgtagtgcacgccgcgggcccagctgcgaccccggccccgcccccgggaccccggccatggacgaactgttccccctcatcttcccggcagagccagcccaggcctctggcccctatgtggagatcattgagcagcccaagcagcggggcatgcgcttccgctacaagtgcgaggggcgctccgcgggcagcatcccaggcgagaggagcacagataccaccaagacccaccccaccatcaagatcaatggctacacaggaccagggacagtgcgcatctccctggtcaccaaggaccctcctcaccggcctcacccccacgagcttgtaggaaaggactgccgggatggcttctatgaggctgagctctgcccggaccgctgcatccacagtttccagaacctgggaatccagtgtgtgaagaagcgggacctggagcaggctatcagtcagcgcatccagaccaacaacaaccccttccaagttcctatagaagagcagcgtggggactacgacctgaatgctgtgcggctctgcttccaggtgacagtgcgggacccatcaggcaggcccctccgcctgccgcctgtcctttctcatcccatctttgacaatcgtgcccccaacactgccgagctcaagatctgccgagtgaaccgaaactctggcagctgcctcggtggggatgagatcttcctactgtgtgacaaggtgcagaaagaggacattgaggtgtatttcacgggaccaggctgggaggcccgaggctccttttcgcaagctgatgtgcaccgacaagtggccattgtgttccggacccctccctacgcagaccccagcctgcaggctcctgtgcgtgtctccatgcagctgcggcggccttccgaccgggagctcagtgagcccatggaattccagtacctgccagatacagacgatcgtcaccggattgaggagaaacgtaaaaggacatatgagaccttcaagagcatcatgaagaagagtcctttcagcggacccaccgacccccggcctccacctcgacgcattgctgtgccttcccgcagctcagcttctgtccccaagccagcaccccagccctatccctttacgtcatccctgagcaccatcaactatgatgagtttcccaccatggtgtttccttctgggcagatcagccaggcctcggccttggccccggcccctccccaagtcctgccccaggctccagcccctgcccctgctccagccatggtatcagctctggcccaggccccagcccctgtcccagtcctagccccaggccctcctcaggctgtggccccacctgcccccaagcccacccaggctggggaaggaacgctgtcagaggccctgctgcagctgcagtttgatgatgaagacctgggggccttgcttggcaacagcacagacccagctgtgttcacagacctggcatccgtcgacaactccgagtttcagcagctgctgaaccagggcatacctgtggccccccacacaactgagcccatgctgatggagtaccctgaggctataactcgcctagtgacaggggcccagaggccccccgacccagctcctgctccactgggggccccggggctccccaatggcctcctttcaggagatgaagacttctcctccattgcggacatggacttctcagccctgctgagtcagatcagctcctaagggggtgacgcctgccctccccagagcactgggttgcaggggattgaagccctccaaaagcacttacggattctggtggggtgtgttccaactgcccccaactttgtggatgtcttccttggaggggggagccatattttattcttttattgtcagtatctgtatctctctctctttttggaggtgcttaagcagaagcattaacttctctggaaaggggggagctggggaaactcaaacttttcccctgtcctgatggtcagctcccttctctgtagggaactctggggtcccccatccccatcctccagcttctggtactctcctagagacagaagcaggctggaggtaaggcctttgagcccacaaagccttatcaagtgtcttccatcatggattcattacagcttaatcaaaataacgccccagataccagcccctgtatggcactggcattgtccctgtgcctaacaccagcgtttgaggggctggccttcctgccctacagaggtctctgccggctctttccttgctcaaccatggctgaaggaaaccagtgcaacagcactggctctctccaggatccagaaggggtttggtctgggacttccttgctctccctcttctcaagtgccttaatagtagggtaagttgttaagagtgggggagagcaggctggcagctctccagtcaggaggcatagtttttactgaacaatcaaagcacttggactcttgctctttctactctgaactaataaatctgttgccaagctggctaga

SEQ ID NO: 199449 - DNA, 567 bp, Homo sapiens
  Payload ID: 19350
  Gene Name: v-rel avian reticuloendotheliosis viral oncogene homolog A
  ENST ID: ENST00000532879
  CDS Start-End: 84-567
tttccgcctctggcgaatggctcgtctgtagtgcacgccgcgggcccagctgcgaccccggccccgcccccgggaccccggccatggacgaactgttccccctcatcttcccggcagagccagcccaggcctctggcccctatgtggagatcattgagcagcccaagcagcggggcatgcgcttccgctacaagtgcgaggggcgctccgcgggcagcatcccaggcgagaggagcacagataccaccaagacccaccccaccatcaagatcaatggctacacaggaccagggacagtgcgcatctccctggtcaccaaggaccctcctcaccggcctcacccccacgagcttgtaggaaaggactgccgggatggcttctatgaggctgagctctgcccggaccgctgcatccacagtttccagaacctgggaatccagtgtgtgaagaagcgggacctggagcaggctatcagtcagcgcatccagaccaacaacaaccccttccaaggtgacagtgcgggacccatcaggcaggcccctccgcctgccgcctgtcctttctcat

SEQ ID NO: 199450 - DNA, 215 bp, Homo sapiens
  Payload ID: 19350
  Gene Name: v-rel avian reticuloendotheliosis viral oncogene homolog A
  ENST ID: ENST00000526257
  CDS Start-End: 1-215
tccaggtgacagtgcgggacccatcaggcaggcccctccgcctgccgcctgtcctttctcatcccatctttgacaatcacgatcgtcaccggattgaggagaaacgtaaaaggacatatgagaccttcaagagcatcatgaagaagagtcctttcagcggacccaccgacccccggcctccacctcgacgcattgctgtgccttcccgcagctca

SEQ ID NO: 199451 - DNA, 3183 bp, Homo sapiens
  Payload ID: 19350
  Gene Name: v-rel avian reticuloendotheliosis viral oncogene homolog A
  ENST ID: ENST00000525693
  CDS Start-End: 64-1197
ctcgtctgtagtgcacgccgcgggcccagctgcgaccccggccccgcccccgggaccccggccatggacgaactgttccccctcatcttcccggcagagccagcccaggcctctggcccctatgtggagatcattgagcagcccaagcagcggggcatgcgcttccgctacaagtgcgaggggcgctccgcgggcagcatcccaggcgagaggagcacagataccaccaagacccaccccaccatcaagatcaatggctacacaggaccagggacagtgcgcatctccctggtcaccaaggaccctcctcaccggcctcacccccacgagcttgtaggaaaggactgccgggatggcttctatgaggctgagctctgcccggaccgctgcatccacagtttccagaacctgggaatccagtgtgtgaagaagcgggacctggagcaggctatcagtcagcgcatccagaccaacaacaaccccttccaagttcctatagaagagcagcgtggggactacgacctgaatgctgtgcggctctgcttccaggtgacagtgcgggacccatcaggcaggcccctccgcctgccgcctgtcctttctcatcccatctttgacaatcgtgcccccaacactgccgagctcaagatctgccgagtgaaccgaaactctggcagctgcctcggtggggatgagatcttcctactgtgtgacaaggtgcagaaagaggacattgaggtgtatttcacgggaccaggctgggaggcccgaggctccttttcgcaagctgatgtgcaccgacaagtggccattgtgttccggacccctccctacgcagaccccagcctgcaggctcctgtgcgtgtctccatgcagctgcggcggccttccgaccgggagctcagtgagcccatggaattccagtacctgccagatacagacgatcgtcaccggattgaggagaaacgtaaaaggacatatgagaccttcaagagcatcatgaagaagagtcctttcagcggacccaccgacccccggcctccacctcgacgcattgctgtgccttcccgcagctcagcttctgtccccaagccaggtaaggatttccttttgtcccactggaacgacaggttcagctctgttcagctgaggagcagtggagatgaagactcctgggccccattacagacctactgaatcagaggctttgaaaggatggcgcaggaaccagcgacttcctgggatgctaatgcacactgaagcctgggaaccaccgtgccacttaaattctatattgggtatcttgggaatcagaagttaaaaatgcagaatctctgctctcatctctcacttgaattgggggaacaaaaatcacctctaaattagcaagatgtgtgtgcctgtgcgaggctcaaaaactgacaagctctgcacttcaggccgctgctcacttggtgctccatgggctcattgcctctcaggacttagtttttcagctgtaaactgaggagtccagcttatctctccaagtgtcccttcctctaaaaggctggaagagtttcgtgggcttgagtagtcagggaggactccaaggtggaggtgtggctagaactggaccctacaggctgggtcagatggggtaagaggaaggagatagggtgttggcagtgactccctagagagggattgagcctgagcaccatgaagaggggctggggtacagaggacggggtggatctctagggctttctctgacccctgcctctctgtctctctcctccagcaccccagccctatccctttacgtcatccctgagcaccatcaactatgatgagtttcccaccatggtgtttccttctgggcagatcagccaggcctcggccttggccccggcccctccccaagtcctgccccaggctccagcccctgcccctgctccagccatggtatcagctctggcccaggccccagcccctgtcccagtcctagccccaggccctcctcaggctgtggccccacctgcccccaagcccacccaggctggggaaggaacgctgtcagaggccctgctgcagctgcagtttgatgatgaagacctgggggccttgcttggcaacagcacagacccagctgtgttcacagacctggcatccgtcgacaactccgagtttcagcagctgctgaaccagggcatacctgtggccccccacacaactgagcccatgctgatggagtaccctgaggctataactcgcctagtgacaggggcccagaggccccccgacccagctcctgctccactgggggccccggggctccccaatggcctcctttcaggagatgaagacttctcctccattgcggacatggacttctcagccctgctgagtcagatcagctcctaagggggtgacgcctgccctccccagagcactgggttgcaggggattgaagccctccaaaagcacttacggattctggtggggtgtgttccaactgcccccaactttgtggatgtcttccttggaggggggagccatattttattcttttattgtcagtatctgtatctctctctctttttggaggtgcttaagcagaagcattaacttctctggaaaggggggagctggggaaactcaaacttttcccctgtcctgatggtcagctcccttctctgtagggaactctggggtcccccatccccatcctccagcttctggtactctcctagagacagaagcaggctggaggtaaggcctttgagcccacaaagccttatcaagtgtcttccatcatggattcattacagcttaatcaaaataacgccccagataccagcccctgtatggcactggcattgtccctgtgcctaacaccagcgtttgaggggctggccttcctgccctacagaggtctctgccggctctttccttgctcaaccatggctgaaggaaaccagtgcaacagcactggctctctccaggatccagaaggggtttggtctgggacttccttgctctccctcttctcaagtgccttaatagtagggtaagttgttaagagtgggggagagcaggctggcagctctccagtcaggaggcatagtttttactgaacaatcaaagcacttggactcttgctctttctactctgaactaataaatctgttgccaagctgg

SEQ ID NO: 199452 - DNA, 591 bp, Homo sapiens
  Payload ID: 19350
  Gene Name: v-rel avian reticuloendotheliosis viral oncogene homolog A
  ENST ID: ENST00000527909
  CDS Start-End: 77-481
ctctggcgaatggctcgtctgtagtgcacgccgcgggcccagctgcgaccccggccccgcccccgggaccccggccatggacgaactgttccccctcatcttcccggcagagccagcccaggcctctggcccctatgtggagatcattgagcagcccaagcagcggggcatgcgcttccgctacaagtgcgaggggcgctccgcgggcagcatcccaggcgagaggagcacagataccaccaagacccaccccaccatcaagtttccagaacctgggaatccagtgtgtgaagaagcgggacctggagcaggctatcagtcagcgcatccagaccaacaacaaccccttccaagttcctatagaagagcagcgtggggactacgacctgaatgctgtgcggctctgcttccaggtgacagtgcgggacccatcaggcaggcccctccgcctgccgcctgtcctttctcatcccatctttgacaatcgtgcccccaacactgccgagctcaagatctgccgagtgaaccgaaactctggcagctgcctcggtggggatgagatcttcctactgtgtgacaaggtgcagaaag

SEQ ID NO: 199453 - DNA, 569 bp, Homo sapiens
  Payload ID: 19350
  Gene Name: v-rel avian reticuloendotheliosis viral oncogene homolog A
  ENST ID: ENST00000533546
  CDS Start-End: 77-271
ctctggcgaatggctcgtctgtagtgcacgccgcgggcccagctgcgaccccggccccgcccccgggaccccggccatggacgaactgttccccctcatcttcccggcagagccagcccaggcctctggcccctatgtggagatcattgagcagcccaagcagcggggcatgcgcttccgctacaagtgcgaggggcgctccgcgggcagcatcccaggcgagaggagcacagataccaccaagacccaccccaccatcaagttcctatagaagagcagcgtggggactacgacctgaatgctgtgcggctctgcttccaggtgacagtgcgggacccatcaggcaggcccctccgcctgccgcctgtcctttctcatcccatctttgacaatcgtgcccccaacactgccgagctcaagatctgccgagtgaaccgaaactctggcagctgcctcggtggggatgagatcttcctactgtgtgacaaggtgcagaaagaggacattgaggtgtatttcacgggaccaggctgggaggcccgaggctccttttcgcaagctgatgtgca

SEQ ID NO: 199454 - DNA, 1341 bp, Homo sapiens
  Payload ID: 19350
  Gene Name: v-rel avian reticuloendotheliosis viral oncogene homolog A
  ENST ID: ENST00000532999
  CDS Start-End: 87-1341
gcatttccgcctctggcgaatggctcgtctgtagtgcacgccgcgggcccagctgcgaccccggccccgcccccgggaccccggccatggacgaactgttccccctcatcttcccggcagagccagcccaggcctctggcccctatgtggagatcattgagcagcccaagcagcggggcatgcgcttccgctacaagtgcgaggggcgctccgcgggcagcatcccaggcgagaggagcacagataccaccaagacccaccccaccatcaaggtttggatgtctgggcctctgtactttggacagatcaatggctacacaggaccagggacagtgcgcatctccctggtcaccaaggaccctcctcaccggcctcacccccacgagcttgtaggaaaggactgccgggatggcttctatgaggctgagctctgcccggaccgctgcatccacagtttccagaacctgggaatccagtgtgtgaagaagcgggacctggagcaggctatcagtcagcgcatccagaccaacaacaaccccttccaagttcctatagaagagcagcgtggggactacgacctgaatgctgtgcggctctgcttccaggtgacagtgcgggacccatcaggcaggcccctccgcctgccgcctgtcctttctcatcccatctttgacaatcgtgcccccaacactgccgagctcaagatctgccgagtgaaccgaaactctggcagctgcctcggtggggatgagatcttcctactgtgtgacaaggtgcagaaagaggacattgaggtgtatttcacgggaccaggctgggaggcccgaggctccttttcgcaagctgatgtgcaccgacaagtggccattgtgttccggacccctccctacgcagaccccagcctgcaggctcctgtgcgtgtctccatgcagctgcggcggccttccgaccgggagctcagtgagcccatggaattccagtacctgccagatacagacgatcgtcaccggattgaggagaaacgtaaaaggacatatgagaccttcaagagcatcatgaagaagagtcctttcagcggacccaccgacccccggcctccacctcgacgcattgctgtgccttcccgcagctcagcttctgtccccaagccagcaccccagccctatccctttacgtcatccctgagcaccatcaactatgatgagtttcccaccatggtgtttccttctgggcagatcagccaggcctcggccttggccccggcccctccccaagtcctgccccaggctccagcccctgcccctgctccagccatggtatcagctctggcccaggccccag

SEQ ID NO: 199455 - DNA, 575 bp, Homo sapiens
  Payload ID: 19350
  Gene Name: v-rel avian reticuloendotheliosis viral oncogene homolog A
  ENST ID: ENST00000534283
  CDS Start-End: 489-575
cgcggctgtggcgggagcccccgcgccgctttccgccccttcctgcgccgacgggcgctgcgcagggagcggtcggcctgccggatggtggcgcggggcggggcaggcggggaggggtctgactcagtttcccctctgggtggagggggtggcccttgactcagcatcctccctgggtgggggagcagagggaaccttgactcagtttccctccacaccgtccatgggggcagctctggcttcgtttccctattaggggagaacgcatctgattcagtttcctctctggagggaggtggggcgtgccctccctcaattttccttaagaaagtacaacaggccctgattcagcttccctctggagaagaaggattccttaccccgttttccctcaagaagcagaactgttccccctcatcttcccggcagagccagcccaggcctctggcccctatgtggagatcattgagcagcccaagcagcggggcatgcgcttccgctacaagtgcgaggggcgctccgcgggcagcatcccaggcgagaggagcacagataccaccaagacccaccccacc

SEQ ID NO: 199456 - DNA, 808 bp, Homo sapiens
  Payload ID: 19350
  Gene Name: v-rel avian reticuloendotheliosis viral oncogene homolog A
  ENST ID: ENST00000525658
  CDS Start-End: 84-233
tttccgcctctggcgaatggctcgtctgtagtgcacgccgcgggcccagctgcgaccccggccccgcccccgggaccccggccatggacgaactgttccccctcatcttcccggcagatcaatggctacacaggaccagggacagtgcgcatctccctggtcaccaaggaccctcctcaccggcctcacccccacgagcttgtaggaaaggactgccgggatggcttctatgaggctgagctctgcccggaccgctgcatccacagtttccagaacctgggaatccagtgtgtgaagaagcgggacctggagcaggctatcagtcagcgcatccagaccaacaacaaccccttccaagttcctatagaagagcagcgtggggactacgacctgaatgctgtgcggctctgcttccaggtgacagtgcgggacccatcaggcaggcccctccgcctgccgcctgtcctttctcatcccatctttgacaatcgtgcccccaacactgccgagctcaagatctgccgagtgaaccgaaactctggcagctgcctcggtggggatgagatcttcctactgtgtgacaaggtgcagaaagaggacattgaggtgtatttcacgggaccaggctgggaggcccgaggctccttttcgcaagctgatgtgcaccgacaagtggccattgtgttccggacccctccctacgcagaccccagcctgcaggctcctgtgcgtgtctccatgcagctgcggcggccttccgaccgggagctcagtgagcccatggaattccagtacctgccagatacag

SEQ ID NO: 199457 - DNA, 456 bp, Homo sapiens
  Payload ID: 19350
  Gene Name: v-rel avian reticuloendotheliosis viral oncogene homolog A
  ENST ID: ENST00000533187
  CDS Start-End: 171-456
tcgccggggccgccgcggctgtggcgggagcccccgcgccgctttccgccccttcctgcgccgacgggcgctgcgcagggagcgaactgttccccctcatcttcccggcagagccagcccaggcctctggcccctatgtggagatcattgagcagcccaagcagcggggcatgcgcttccgctacaagtgcgaggggcgctccgcgggcagcatcccaggcgagaggagcacagataccaccaagacccaccccaccatcaagatcaatggctacacaggaccagggacagtgcgcatctccctggtcaccaaggaccctcctcaccggcctcacccccacgagcttgtaggaaaggactgccgggatggcttctatgaggctgagctctgcccggaccgctgcatccacagtttccagaacctgggaatccagtgtgtgaagaagcgggacctgg

SEQ ID NO: 199458 - DNA, 692 bp, Homo sapiens
  Payload ID: 19350
  Gene Name: v-rel avian reticuloendotheliosis viral oncogene homolog A
  ENST ID: ENST00000534558
  CDS Start-End: 68-692
atggctcgtctgtagtgcacgccgcgggcccagctgcgaccccggccccgcccccgggaccccggccatggacgagccagcccaggcctctggcccctatgtggagatcattgagcagcccaagcagcggggcatgcgcttccgctacaagtgcgaggggcgctccgcgggcagcatcccaggcgagaggagcacagataccaccaagacccaccccaccatcaagatcaatggctacacaggaccagggacagtgcgcatctccctggtcaccaaggaccctcctcaccggcctcacccccacgagcttgtaggaaaggactgccgggatggcttctatgaggctgagctctgcccggaccgctgcatccacagtttccagaacctgggaatccagtgtgtgaagaagcgggacctggagcaggctatcagtcagcgcatccagaccaacaacaaccccttccaagttcctatagaagagcagcgtggggactacgacctgaatgctgtgcggctctgcttccaggtgacagtgcgggacccatcaggcaggcccctccgcctgccgcctgtcctttctcatcccatctttgacaatcgtgcccccaacactgccgagctcaagatctgccgagtgaaccgaaactctggcagctgcctcggtggggatgagatcttcctactgtgtgaca

SEQ ID NO: 199459 - DNA, 541 bp, Homo sapiens
  Payload ID: 19350
  Gene Name: v-rel avian reticuloendotheliosis viral oncogene homolog A
  ENST ID: ENST00000531238
  CDS Start-End: 77-334
ctctggcgaatggctcgtctgtagtgcacgccgcgggcccagctgcgaccccggccccgcccccgggaccccggccatggacgaactgttccccctcatcttcccggcagagccagcccaggcctctggcccctatgtggagatcattgagcagcccaagcagcggggcatgcgcttccgctacaagtgcgaggggcgctccgcgggcagcatcccaggcgagaggagcacagataccaccaagacccaccccaccatcaaggaccagggacagtgcgcatctccctggtcaccaaggaccctcctcaccggcctcacccccacgagcttgtaggaaaggactgccgggatggcttctatgaggctgagctctgcccggaccgctgcatccacagtttccagaacctgggaatccagtgtgtgaagaagcgggacctggagcaggctatcagtcagcgcatccagaccaacaacaaccccttccaagttcctatagaagagcagcgtggggactacgacctgaatgctgtgcggctctgct

SEQ ID NO: 199460 - DNA, 2004 bp, Homo sapiens
  Payload ID: 19350
  Gene Name: v-rel avian reticuloendotheliosis viral oncogene homolog A
  ENST ID: ENST00000526283
  CDS Start-End: 64-777
ctcgtctgtagtgcacgccgcgggcccagctgcgaccccggccccgcccccgggaccccggccatggacgaactgttccccctcatcttcccggcagagccagcccaggcctctggcccctatgtggagatcattgagcagcccaagcagcggggcatgcgcttccgctacaagtgcgaggggcgctccgcgggcagcatcccaggcgagaggagcacagataccaccaagacccaccccaccatcaagatcaatggctacacaggaccagggacagtgcgcatctccctggtcaccaaggaccctcctcaccggcctcacccccacgagcttgtaggaaaggactgccgggatggcttctatgaggctgagctctgcccggaccgctgcatccacagtttccagaacctgggaatccagtgtgtgaagaagcgggacctggagcaggctatcagtcagcgcatccagaccaacaacaaccccttccaagttcctatagaagagcagcgtggggactacgacctgaatgctgtgcggctctgcttccaggtgacagtgcgggacccatcaggcaggcccctccgcctgccgcctgtcctttctcatcccatctttgacaatcgtgcccccaacactgccgagctcaagatctgccgagtgaaccgaaactctggcagctgcctcggtggggatgagatcttcctactgtgtgacaaggtgcagaaagcccatggaattccagtacctgccagatacagacgatcgtcaccggattgaggagaaacgtaaaaggacatatgagaccttcaagagcatcatgaagaagagtcctttcagcggacccaccgacccccggcctccacctcgacgcattgctgtgccttcccgcagctcagcttctgtccccaagccagcaccccagccctatccctttacgtcatccctgagcaccatcaactatgatgagtttcccaccatggtgtttccttctgggcagatcagccaggcctcggccttggccccggcccctccccaagtcctgccccaggctccagcccctgcccctgctccagccatggtatcagctctggcccagaggccccccgacccagctcctgctccactgggggccccggggctccccaatggcctcctttcaggagatgaagacttctcctccattgcggacatggacttctcagccctgctgagtcagatcagctcctaagggggtgacgcctgccctccccagagcactgggttgcaggggattgaagccctccaaaagcacttacggattctggtggggtgtgttccaactgcccccaactttgtggatgtcttccttggaggggggagccatattttattcttttattgtcagtatctgtatctctctctctttttggaggtgcttaagcagaagcattaacttctctggaaaggggggagctggggaaactcaaacttttcccctgtcctgatggtcagctcccttctctgtagggaactctggggtcccccatccccatcctccagcttctggtactctcctagagacagaagcaggctggaggtaaggcctttgagcccacaaagccttatcaagtgtcttccatcatggattcattacagcttaatcaaaataacgccccagataccagcccctgtatggcactggcattgtccctgtgcctaacaccagcgtttgaggggctggccttcctgccctacagaggtctctgccggctctttccttgctcaaccatggctgaaggaaaccagtgcaacagcactggctctctccaggatccagaaggggtttggtctgggacttccttgctctccctcttctcaagtgccttaatagtagggtaagttgttaagagtgggggagagcaggctggcagctctccagtcaggaggcatagtttttactgaacaatcaaagcacttggactcttgctctttctactctgaactaataaatctgttgccaagctg

SEQ ID NO: 199461 - DNA, 578 bp, Homo sapiens
  Payload ID: 19350
  Gene Name: v-rel avian reticuloendotheliosis viral oncogene homolog A
  ENST ID: ENST00000527874
  CDS Start-End: 310-578
ttccctctggagaagaaggattccttaccccgttttccctcaagaagcaggtgtttctggttcctttcctccaccccttagtttcaccgcaggttctagggagcaggtcctgactcagttcccctgggagggagcctggcttctcctctccgtggagagcagattcctccttgtgagaatgggcattgggtgtgtgctgaccctgatctccctcccctttcagaactgttccccctcatcttcccggcagagccagcccaggcctctggcccctatgtggagatcattgagcagcccaagcagcggggcatgcgcttccgctacaagtgcgaggggcgctccgcgggcagcatcccaggcgagaggagcacagataccaccaagacccaccccaccatcaagatcaatggctacacaggaccagggacagtgcgcatctccctggtcaccaaggaccctcctcaccggcctcacccccacgagcttgtaggaaaggactgccgggatggcttctatgaggctgagctctgcccggaccgctgcatccacagtttccagaacctgggaatccagtgtgt

SEQ ID NO: 199462 - DNA, 771 bp, Homo sapiens
  Payload ID: 19350
  Gene Name: v-rel avian reticuloendotheliosis viral oncogene homolog A
  ENST ID: ENST00000527749
  CDS Start-End: 215-771
cgccggggccgccgcggctgtggcgggagcccccgcgccgctttccgccccttcctgcgccgacgggcgctgcgcagggagcggtcggcctgccggatggtggcgcggggcggggcaggcggggagggaactgttccccctcatcttcccggcagagccagcccaggcctctggcccctatgtggagatcattgagcagcccaagcagcggggcatgcgcttccgctacaagtgcgaggggcgctccgcgggcagcatcccaggcgagaggagcacagataccaccaagacccaccccaccatcaagatcaatggctacacaggaccagggacagtgcgcatctccctggtcaccaaggaccctcctcaccggcctcacccccacgagcttgtaggaaaggactgccgggatggcttctatgaggctgagctctgcccggaccgctgcatccacagtttccagaacctgggaatccagtgtgtgaagaagcgggacctggagcaggctatcagtcagcgcatccagaccaacaacaaccccttccaagttcctatagaagagcagcgtggggactacgacctgaatgctgtgcggctctgcttccaggtgacagtgcgggacccatcaggcaggcccctccgcctgccgcctgtcctttctcatcccatctttgacaatcgtgcccccaacactgccgagctcaagatctgccgagtgaaccgaaactctggcagctgcctcggtggggatgagatcttcctactgtgtga

SEQ ID NO: 199463 - DNA, 992 bp, Homo sapiens
  Payload ID: 19350
  Gene Name: v-rel avian reticuloendotheliosis viral oncogene homolog A
  ENST ID: ENST00000529389
  CDS Start-End: 129-590
cggccggattccgggcagtgacgcgacggcgggccgcgcggcgcatttccgcctctggcgaatggctcgtctgtagtgcacgccgcgggcccagctgcgaccccggccccgcccccgggaccccggccatggacgaactgttccccctcatcttcccggcagagccagcccaggcctctggcccctatgtggagatcattgagcagcccaagcagcggggcatgcgcttccgctacaagtgcgaggggcgctccgcgggcagcatcccaggcgagaggagcacagataccaccaagacccaccccaccatcaagatcaatggctacacaggaccagggacagtgcgcatctccctggtcaccaaggaccctcctcaccggcctcacccccacgagcttgtaggaaaggactgccgggatggcttctatgaggctgagctctgcccggaccgctgcatccacagttcctatagaagagcagcgtggggactacgacctgaatgctgtgcggctctgcttccaggtgacagtgcgggacccatcaggcaggcccctccgcctgccgcctgtcctttctcatcccatctttgacaatcgtgcccccaacactgccgagctcaagatctgccgagtgaaccgaaactctggcagctgcctcggtggggatgagatcttcctactgtgtgacaaggtgcagaaagaggacattgaggtgtatttcacgggaccaggctgggaggcccgaggctccttttcgcaagctgatgtgcaccgacaagtggccattgtgttccggacccctccctacgcagaccccagcctgcaggctcctgtgcgtgtctccatgcagctgcggcggccttccgaccgggagctcagtgagcccatggaattccagtacctgccagatacagacgatcgtcaccggattgaggagaaacgtaaaaggacatatgagaccttcaagagcatcatgaagaagagtcctttcag

SEQ ID NO: 199464 - DNA, 2236 bp, Homo sapiens
  Payload ID: 19350
  Gene Name: v-rel avian reticuloendotheliosis viral oncogene homolog A
  ENST ID: ENST00000615805
  CDS Start-End: 141-881
agcgcgcaggcgcggccggattccgggcagtgacgcgacggcgggccgcgcggcgcatttccgcctctggcgaatggctcgtctgtagtgcacgccgcgggcccagctgcgaccccggccccgcccccgggaccccggccatggacgaactgttccccctcatcttcccggcagagccagcccaggcctctggcccctatgtggagatcattgagcagcccaagcagcggggcatgcgcttccgctacaagtgcgaggggcgctccgcgggcagcatcccaggcgagaggagcacagataccaccaagacccaccccaccatcaagatcaatggctacacaggaccagggacagtgcgcatctccctggtcaccaaggaccctcctcaccggcctcacccccacgagcttgtaggaaaggactgccgggatggcttctatgaggctgagctctgcccggaccgctgcatccacagtttccagaacctgggaatccagtgtgtgaagaagcgggacctggagcaggctatcagtcagcgcatccagaccaacaacaaccccttccaagttcctatagaagagcagcgtggggactacgacctgaatgctgtgcggctctgcttccaggtgacagtgcgggacccatcaggcaggcccctccgcctgccgcctgtcctttctcatcccatctttgacaatcgtgcccccaacactgccgagctcaagatctgccgagtgaaccgaaactctggcagctgcctcggtggggatgagatcttcctactgtgtgacaaggtgcagaaagaggacattgagttctgtccccaagccagcaccccagccctatccctttacgtcatccctgagcaccatcaactatgatgagtttcccaccatggtgtttccttctgggcagatcagccaggcctcggccttggccccggcccctccccaagtcctgccccaggctccagcccctgcccctgctccagccatggtatcagctctggcccaggccccagcccctgtcccagtcctagccccaggccctcctcaggctgtggccccacctgcccccaagcccacccaggctggggaaggaacgctgtcagaggccctgctgcagctgcagtttgatgatgaagacctgggggccttgcttggcaacagcacagacccagctgtgttcacagacctggcatccgtcgacaactccgagtttcagcagctgctgaaccagggcatacctgtggccccccacacaactgagcccatgctgatggagtaccctgaggctataactcgcctagtgacaggggcccagaggccccccgacccagctcctgctccactgggggccccggggctccccaatggcctcctttcaggagatgaagacttctcctccattgcggacatggacttctcagccctgctgagtcagatcagctcctaagggggtgacgcctgccctccccagagcactgggttgcaggggattgaagccctccaaaagcacttacggattctggtggggtgtgttccaactgcccccaactttgtggatgtcttccttggaggggggagccatattttattcttttattgtcagtatctgtatctctctctctttttggaggtgcttaagcagaagcattaacttctctggaaaggggggagctggggaaactcaaacttttcccctgtcctgatggtcagctcccttctctgtagggaactctggggtcccccatccccatcctccagcttctggtactctcctagagacagaagcaggctggaggtaaggcctttgagcccacaaagccttatcaagtgtcttccatcatggattcattacagcttaatcaaaataacgccccagataccagcccctgtatggcactggcattgtccctgtgcctaacaccagcgtttgaggggctggccttcctgccctacagaggtctctgccggctctttccttgctcaaccatggctgaaggaaaccagtgcaacagcactggctctctccaggatccagaaggggtttggtctgggacttccttgctctccctcttctcaagtgccttaatagtagggtaagttgttaagagtgggggagagcaggctggcagctctccagtcaggaggcatagtttttactgaacaatcaaagcacttggactcttgctctttctactctgaactaataaatctgttgccaagctggctag

SEQ ID NO: 199465 - DNA, 2266 bp, Homo sapiens
  Payload ID: 19350
  Gene Name: v-rel avian reticuloendotheliosis viral oncogene homolog A
  ENST ID: ENST00000612991
  CDS Start-End: 141-1487
agcgcgcaggcgcggccggattccgggcagtgacgcgacggcgggccgcgcggcgcatttccgcctctggcgaatggctcgtctgtagtgcacgccgcgggcccagctgcgaccccggccccgcccccgggaccccggccatggacgaactgttccccctcatcttcccggcagagccagcccaggcctctggcccctatgtggagatcattgagcagcccaagcagcggggcatgcgcttccgctacaagtgcgaggggcgctccgcgggcagcatcccaggcgagaggagcacagataccaccaagacccaccccaccatcaagatcaatggctacacaggaccagggacagtgcgcatctccctggtcaccaaggaccctcctcaccggcctcacccccacgagcttgtaggaaaggactgccgggatggcttctatgaggctgagctctgcccggaccgctgcatccacagtttccagaacctgggaatccagtgtgtgaagaagcgggacctggagcaggctatcagtcagcgcatccagaccaacaacaaccccttccaagttcctatagaagagcagcgtggggactacgacctgaatgctgtgcggctctgcttccaggtgacagtgcgggacccatcaggcaggcccctccgcctgccgcctgtcctttctcatcccatctttgacaatcgtgcccccaacactgccgagctcaagatctgccgagtgaaccgaaactctggcagctgcctcggtggggatgagatcttcctactgtgtgacaaggtgcagaaagaggacattgaggtgtatttcacgggaccaggctgggaggcccgaggctccttttcgcaagctgatgtgcaccgacaagtggccattgtgttccggacccctccctacgcagaccccagcctgcaggctcctgtgcgtgtctccatgcagctgcggcggccttccgaccgggagctcagtgagcccatggaattccagtacctgccagatacagacgatcgtcaccggattgaggagaaacgtaaaaggacatatgagaccttcaagagcatcatgaagaagagtcctttcagcggacccaccgacccccggcctccacctcgacgcattgctgtgccttcccgcagctcagcttctgtccccaagccagcaccccagccctatccctttacgtcatccctgagcaccatcaactatgatgagtttcccaccatggtgtttccttctgggcagatcagccaggcctcggccttggccccggcccctccccaagtcctgccccaggctccagcccctgcccctgctccagccatggtatcagctctggcccagaggccccccgacccagctcctgctccactgggggccccggggctccccaatggcctcctttcaggagatgaagacttctcctccattgcggacatggacttctcagccctgctgagtcagatcagctcctaagggggtgacgcctgccctccccagagcactgggttgcaggggattgaagccctccaaaagcacttacggattctggtggggtgtgttccaactgcccccaactttgtggatgtcttccttggaggggggagccatattttattcttttattgtcagtatctgtatctctctctctttttggaggtgcttaagcagaagcattaacttctctggaaaggggggagctggggaaactcaaacttttcccctgtcctgatggtcagctcccttctctgtagggaactctggggtcccccatccccatcctccagcttctggtactctcctagagacagaagcaggctggaggtaaggcctttgagcccacaaagccttatcaagtgtcttccatcatggattcattacagcttaatcaaaataacgccccagataccagcccctgtatggcactggcattgtccctgtgcctaacaccagcgtttgaggggctggccttcctgccctacagaggtctctgccggctctttccttgctcaaccatggctgaaggaaaccagtgcaacagcactggctctctccaggatccagaaggggtttggtctgggacttccttgctctccctcttctcaagtgccttaatagtagggtaagttgttaagagtgggggagagcaggctggcagctctccagtcaggaggcatagtttttactgaacaatcaaagcacttggactcttgctctttctactctgaactaataaatctgttgccaagctggct

SEQ ID NO: 199466 - DNA, 2294 bp, Homo sapiens
  Payload ID: 19351
  Gene Name: v-rel avian reticuloendotheliosis viral oncogene homolog B
  Uniprot ID: Q01201
  ENST ID: ENST00000221452
  CDS Start-End: 151-1890
cccgccgcccgcccggcccggccccgcgccccgcgcagccccgggcgccgcgcgtcctgcccggcctgcggccccagcccttgcgccgctcgtccgacccgcgatcgtccaccagaccgtgcctcccggccgcccggccggcccgcgtgcatgcttcggtctgggccagcctctgggccgtccgtccccactggccgggccatgccgagtcgccgcgtcgccagaccgccggctgcgccggagctgggggccttagggtcccccgacctctcctcactctcgctcgccgtttccaggagcacagatgaattggagatcatcgacgagtacatcaaggagaacggcttcggcctggacgggggacagccgggcccgggcgaggggctgccacgcctggtgtctcgcggggctgcgtccctgagcacggtcaccctgggccctgtggcgcccccagccacgccgccgccttggggctgccccctgggccgactagtgtccccagcgccgggcccgggcccgcagccgcacctggtcatcacggagcagcccaagcagcgcggcatgcgcttccgctacgagtgcgagggccgctcggccggcagcatccttggggagagcagcaccgaggccagcaagacgctgcccgccatcgagctccgggattgtggagggctgcgggaggtggaggtgactgcctgcctggtgtggaaggactggcctcaccgagtccacccccacagcctcgtggggaaagactgcaccgacggcatctgcagggtgcggctccggcctcacgtcagcccccggcacagttttaacaacctgggcatccagtgtgtgaggaagaaggagattgaggctgccattgagcggaagattcaactgggcattgacccctacaacgctgggtccctgaagaaccatcaggaagtagacatgaatgtggtgaggatctgcttccaggcctcatatcgggaccagcagggacagatgcgccggatggatcctgtgctttccgagcccgtctatgacaagaaatccacaaacacatcagagctgcggatttgccgaattaacaaggaaagcgggccgtgcaccggtggcgaggagctctacttgctctgcgacaaggtgcagaaagaggacatatcagtggtgttcagcagggcctcctgggaaggtcgggctgacttctcccaggccgacgtgcaccgccagattgccattgtgttcaagacgccgccctacgaggacctggagattgtcgagcccgtgacagtcaacgtcttcctgcagcggctcaccgatggggtctgcagcgagccattgcctttcacgtacctgcctcgcgaccatgacagctacggcgtggacaagaagcggaaacgggggatgcccgacgtccttggggagctgaacagctctgacccccatggcatcgagagcaaacggcggaagaaaaagccggccatcctggaccacttcctgcccaaccacggctcaggcccgttcctcccgccgtcagccctgctgccagaccctgacttcttctctggcaccgtgtccctgcccggcctggagccccctggcgggcctgacctcctggacgatggctttgcctacgaccctacggcccccacactcttcaccatgctggacctgctgcccccggcaccgccacacgctagcgctgttgtgtgcagcggaggtgccggggccgtggttggggagacccccggccctgaaccactgacactggactcgtaccaggccccgggccccggggatggaggcaccgccagccttgtgggcagcaacatgttccccaatcattaccgcgaggcggcctttgggggcggcctcctatccccggggcctgaagccacgtagccccgcgatgccagaggaggggcactgggtggggagggaggtggaggagccgtgcaatcccaaccaggatgtctagcacccccatccccttggcccttcctcatgcttctgaagtggacatattcagccttggcgagaagctccgttgcacgggtttccccttgagcccattttacagatgaggaaactgagtccggagaggaaaagggacatggctcccgtgcactagcttgttacagctgcctctgtccccacatgtgggggcaccttctccagtaggattcggaaaagattgtacatatgggaggagggggcagattcctggccctccctccccagacttgaaggtggggggtaggttggttgttcagagtcttcccaataaagatgagtttttgagcctc

SEQ ID NO: 199467 - DNA, 2219 bp, Homo sapiens
  Payload ID: 19351
  Gene Name: v-rel avian reticuloendotheliosis viral oncogene homolog B
  ENST ID: ENST00000505236
  CDS Start-End: 120-1850
cgcgcagccccgggcgccgcgcgtcctgcccggcctgcggccccagcccttgcgccgctcgtccgacccgcgatcgtccaccagaccgtgcctcccggccgcccggccggcccgcgtgcatgcttcggtctgggccagcctctgggccgtccgtccccactggccgggccatgccgagtcgccgcgtcgccagaccgccggctgcgccggagctgggggccttagggtcccccgacctctcctcactctcgctcgccgtttccaggagcacagagatcatcgacgagtacatcaaggagaacggcttcggcctggacgggggacagccgggcccgggcgaggggctgccacgcctggtgtctcgcggggctgcgtccctgagcacggtcaccctgggccctgtggcgcccccagccacgccgccgccttggggctgccccctgggccgactagtgtccccagcgccgggcccgggcccgcagccgcacctggtcatcacggagcagcccaagcagcgcggcatgcgcttccgctacgagtgcgagggccgctcggccggcagcatccttggggagagcagcaccgaggccagcaagacgctgcccgccatcgagctccgggattgtggagggctgcgggaggtggaggtgactgcctgcctggtgtggaaggactggcctcaccgagtccacccccacagcctcgtggggaaagactgcaccgacggcatctgcagggtgcggctccggcctcacgtcagcccccggcacagttttaacaacctgggcatccagtgtgtgaggaagaaggagattgaggctgccattgagcggaagattcaactgggcattgacccctacaacgctgggtccctgaagaaccatcaggaagtagacatgaatgtggtgaggatctgcttccaggcctcatatcgggaccagcagggacagatgcgccggatggatcctgtgctttccgagcccgtctatgacaagaaatccacaaacacatcagagctgcggatttgccgaattaacaaggaaagcgggccgtgcaccggtggcgaggagctctacttgctctgcgacaaggtgcagaaagaggacatatcagtggtgttcagcagggcctcctgggaaggtcgggctgacttctcccaggccgacgtgcaccgccagattgccattgtgttcaagacgccgccctacgaggacctggagattgtcgagcccgtgacagtcaacgtcttcctgcagcggctcaccgatggggtctgcagcgagccattgcctttcacgtacctgcctcgcgaccatgacagctacggcgtggacaagaagcggaaacgggggatgcccgacgtccttggggagctgaacagctctgacccccatggcatcgagagcaaacggcggaagaaaaagccggccatcctggaccacttcctgcccaaccacggctcaggcccgttcctcccgccgtcagccctgctgccagaccctgacttcttctctggcaccgtgtccctgcccggcctggagccccctggcgggcctgacctcctggacgatggctttgcctacgaccctacggcccccacactcttcaccatgctggacctgctgcccccggcaccgccacacgctagcgctgttgtgtgcagcggaggtgccggggccgtggttggggagacccccggccctgaaccactgacactggactcgtaccaggccccgggccccggggatggaggcaccgccagccttgtgggcagcaacatgttccccaatcattaccgcgaggcggcctttgggggcggcctcctatccccggggcctgaagccacgtagccccgcgatgccagaggaggggcactgggtggggagggaggtggaggagccgtgcaatcccaaccaggatgtctagcacccccatccccttggcccttcctcatgcttctgaagtggacatattcagccttggcgagaagctccgttgcacgggtttccccttgagcccattttacagatgaggaaactgagtccggagaggaaaagggacatggctcccgtgcactagcttgttacagctgcctctgtccccacatgtgggggcaccttctccagtaggattcggaaaagattgtacatatgggaggagggggcagattcctggccctccctccccagacttgaaggtggggggtaggttggttgttc

SEQ ID NO: 199468 - DNA, 840 bp, Homo sapiens
  Payload ID: 19351
  Gene Name: v-rel avian reticuloendotheliosis viral oncogene homolog B
  ENST ID: ENST00000509480
  CDS Start-End: 120-296
cgcgcagccccgggcgccgcgcgtcctgcccggcctgcggccccagcccttgcgccgctcgtccgacccgcgatcgtccaccagaccgtgcctcccggccgcccggccggcccgcgtgcatgcttcggtctgggccagcctctgggccgtccgtccccactggccgggccatgccgagtcgccgcgtcgccagaccgccggctgcgccggagctgggggccttagggtcccccgacctctcctcactctcgctcgccgtttccaggagcacaggttcatccagcacagatgcctaagaaggattttcccagttcaagtgacttgaggttggccctgccactgacctagagcgtgtcccttcctctctgccagcctcagtatccccatctgccaaattggggggaccttggcaccctactggcttcacagatcccatgagataaggggtgcaggaaaactacctttcaaggggcaaaggtctggctgccaggagccactccctgagaacagaggaggacagatctagcagcggaacagatgaattggagatcatcgacgagtacatcaaggagaacggcttcggcctggacgggggacagccgggcccgggcgaggggctgccacgcctggtgtctcgcggggctgcgtccctgagcacggtcaccctgggccctgtggcgcccccagccacgccgccgccttggggctgccccctgggccgactagtgtccccagcgccgggcccgggcccgcagccgcacctggtcatcacggagcagcccaagcagcgcggcatgcgcttccgctacgagtgcgagggccgctcggccggcagcatcc

SEQ ID NO: 199469 - DNA, 760 bp, Homo sapiens
  Payload ID: 19351
  Gene Name: v-rel avian reticuloendotheliosis viral oncogene homolog B
  ENST ID: ENST00000589972
  CDS Start-End: 1-428
gcagcgagccattgcctttcacgtacctgcctcgcgaccatggcccgttcctcccgccgtcagccctgctgccagaccctgacttcttctctggcaccgtgtccctgcccggcctggagccccctggcgggcctgacctcctggacgatggctttgcctacgaccctacggcccccacactcttcaccatgctggacctgctgcccccggcaccgccacacgctagcgctgttgtgtgcagcggaggtgccggggccgtggttggggagacccccggccctgaaccactgacactggactcgtaccaggccccgggccccggggatggaggcaccgccagccttgtgggcagcaacatgttccccaatcattaccgcgaggcggcctttgggggcggcctcctatccccggggcctgaagccacgtagccccgcgatgccagaggaggggcactgggtggggagggaggtggaggagccgtgcaatcccaaccaggatgtctagcacccccatccccttggcccttcctcatgcttctgaagtggacatattcagccttggcgagaagctccgttgcacgggtttccccttgagcccattttacagatgaggaaactgagtccggagaggaaaagggacatggctcccgtgcactagcttgttacagctgcctctgtccccacatgtgggggcaccttctccagtaggattcggaaaagattgtacatatgggaggagggggcagattcctggccctccc

SEQ ID NO: 199470 - DNA, 2279 bp, Homo sapiens
  Payload ID: 19351
  Gene Name: v-rel avian reticuloendotheliosis viral oncogene homolog B
  Uniprot ID: Q01201
  ENST ID: ENST00000625761
  CDS Start-End: 132-1871
ggccccgcgccccgcgcagccccgggcgccgcgcgtcctgcccggcctgcggccccagcccttgcgccgctcgtccgacccgcgatcgtccaccagaccgtgcctcccggccgcccggccggcccgcgtgcatgcttcggtctgggccagcctctgggccgtccgtccccactggccgggccatgccgagtcgccgcgtcgccagaccgccggctgcgccggagctgggggccttagggtcccccgacctctcctcactctcgctcgccgtttccaggagcacagatgaattggagatcatcgacgagtacatcaaggagaacggcttcggcctggacgggggacagccgggcccgggcgaggggctgccacgcctggtgtctcgcggggctgcgtccctgagcacggtcaccctgggccctgtggcgcccccagccacgccgccgccttggggctgccccctgggccgactagtgtccccagcgccgggcccgggcccgcagccgcacctggtcatcacggagcagcccaagcagcgcggcatgcgcttccgctacgagtgcgagggccgctcggccggcagcatccttggggagagcagcaccgaggccagcaagacgctgcccgccatcgagctccgggattgtggagggctgcgggaggtggaggtgactgcctgcctggtgtggaaggactggcctcaccgagtccacccccacagcctcgtggggaaagactgcaccgacggcatctgcagggtgcggctccggcctcacgtcagcccccggcacagttttaacaacctgggcatccagtgtgtgaggaagaaggagattgaggctgccattgagcggaagattcaactgggcattgacccctacaacgctgggtccctgaagaaccatcaggaagtagacatgaatgtggtgaggatctgcttccaggcctcatatcgggaccagcagggacagatgcgccggatggatcctgtgctttccgagcccgtctatgacaagaaatccacaaacacatcagagctgcggatttgccgaattaacaaggaaagcgggccgtgcaccggtggcgaggagctctacttgctctgcgacaaggtgcagaaagaggacatatcagtggtgttcagcagggcctcctgggaaggtcgggctgacttctcccaggccgacgtgcaccgccagattgccattgtgttcaagacgccgccctacgaggacctggagattgtcgagcccgtgacagtcaacgtcttcctgcagcggctcaccgatggggtctgcagcgagccattgcctttcacgtacctgcctcgcgaccatgacagctacggcgtggacaagaagcggaaacgggggatgcccgacgtccttggggagctgaacagctctgacccccatggcatcgagagcaaacggcggaagaaaaagccggccatcctggaccacttcctgcccaaccacggctcaggcccgttcctcccgccgtcagccctgctgccagaccctgacttcttctctggcaccgtgtccctgcccggcctggagccccctggcgggcctgacctcctggacgatggctttgcctacgaccctacggcccccacactcttcaccatgctggacctgctgcccccggcaccgccacacgctagcgctgttgtgtgcagcggaggtgccggggccgtggttggggagacccccggccctgaaccactgacactggactcgtaccaggccccgggccccggggatggaggcaccgccagccttgtgggcagcaacatgttccccaatcattaccgcgaggcggcctttgggggcggcctcctatccccggggcctgaagccacgtagccccgcgatgccagaggaggggcactgggtggggagggaggtggaggagccgtgcaatcccaaccaggatgtctagcacccccatccccttggcccttcctcatgcttctgaagtggacatattcagccttggcgagaagctccgttgcacgggtttccccttgagcccattttacagatgaggaaactgagtccggagaggaaaagggacatggctcccgtgcactagcttgttacagctgcctctgtccccacatgtgggggcaccttctccagtaggattcggaaaagattgtacatatgggaggagggggcagattcctggccctccctccccagacttgaaggtggggggtaggttggttgttcagagtcttcccaataaagatgagtttttgagcctccggg

SEQ ID NO: 199471 - DNA, 2997 bp, Homo sapiens
  Payload ID: 19352
  Gene Name: V-set and immunoglobulin domain containing 1
  Uniprot ID: Q86XK7
  ENST ID: ENST00000217957
  CDS Start-End: 118-1281
ggcgatgcccagcagataagccaggcaaacctcggtgtgatcgaagaagccaatttgagactcagcctagtccaggcaagctactggcacctgctgctctcaactaacctccacacaatggtgttcgcattttggaaggtctttctgatcctaagctgccttgcaggtcaggttagtgtggtgcaagtgaccatcccagacggtttcgtgaacgtgactgttggatctaatgtcactctcatctgcatctacaccaccactgtggcctcccgagaacagctttccatccagtggtctttcttccataagaaggagatggagccaatttctatttacttttctcaaggtggacaagctgtagccatcgggcaatttaaagatcgaattacagggtccaacgatccaggtaatgcatctatcactatctcgcatatgcagccagcagacagtggaatttacatctgcgatgttaacaaccccccagactttctcggccaaaaccaaggcatcctcaacgtcagtgtgttagtgaaaccttctaagcccctttgtagcgttcaaggaagaccagaaactggccacactatttccctttcctgtctctctgcgcttggaacaccttcccctgtgtactactggcataaacttgagggaagagacatcgtgccagtgaaagaaaacttcaacccaaccaccgggattttggtcattggaaatctgacaaattttgaacaaggttattaccagtgtactgccatcaacagacttggcaatagttcctgcgaaatcgatctcacttcttcacatccagaagttggaatcattgttggggccttgattggtagcctggtaggtgccgccatcatcatctctgttgtgtgcttcgcaaggaataaggcaaaagcaaaggcaaaagaaagaaattctaagaccatcgcggaacttgagccaatgacaaagataaacccaaggggagaaagcgaagcaatgccaagagaagacgctacccaactagaagtaactctaccatcttccattcatgagactggccctgataccatccaagaaccagactatgagccaaagcctactcaggagcctgccccagagcctgccccaggatcagagcctatggcagtgcctgaccttgacatcgagctggagctggagccagaaacgcagtcggaattggagccagagccagagccagagccagagtcagagcctggggttgtagttgagcccttaagtgaagatgaaaagggagtggttaaggcataggctggtggcctaagtacagcattaatcattaaggaacccattactgccatttggaattcaaataacctaaccaacctccacctcctccttccattttgaccaaccttcttctaacaaggtgctcattcctactatgaatccagaataaacacgccaagataacagctaaatcagcaagggttcctgtattaccaatatagaatactaacaattttactaacacgtaagcataacaaatgacagggcaagtgatttctaacttagttgagttttgcaacagtacctgtgttgttatttcagaaaatattatttctctctttttaactactctttttttttattttagacagagtcttgctccgtcgcgcaggctgtgatcgtagtggtgcgatctcggctcactgcaacctccgctccctgggttcaagcgattctcctgcctgagcctcctgagtagctgggactacaggcacgtgccaccacgcccggctaattttttgtatttttagtagagatggggtttcacgttgttagccaggatggtctccatctcctgacctcatgatccgcccaccttggcctcccaaaatgctgggattacaggcatgagccactgcgcccggcctctttttagctactcttatgttccacatgcacatatgacaaggtggcattaattagattcaatattatttctaggaatagttcctcattcatttttatattgaccactaagaaaataattcatcagcattatctcatagattggaaaattttctccaaatacaatagaggagaatatgtaaagggtatacattaattggtacgtagcatttaaaatcaggtcttataattaatgcttcattcctcatattagatttcccaagaaatcaccctggtatccaatatctgagcatggcaaatttaaaaaataacacaatttcttgcctgtaaccctagcactttgggaggccgaggcaggtggatcacctgaggtcaggagttcgagaccagcctggccaacatggcgaaaccccttctctactaaaaatacaaaaattagctgggcgtggtagtgcatgcctgtaatcccagctacttgggaggctgaggcaggagaatcgcttgaacccaggaggtggaggttgcagtgagccgagattgtgccactgcactccaacctgggtgacagagtgagattccatctgaaaaacaaaaacaaaaacagaaaacaaacaaacaaaaaacaaaaaatccccacaactttgtcaaataatgtacaggcaaacactttcaaatataatttccttcagtgaatacaaaatgttgatatcataggtgatgtacaatttagttttgaatgagttattatgttatcactgtgtctgatgttatctactttgaaaggcagtccagaaaagtgttctaagtgaactcttaagatctattttagataatttcaactaattaaataacctgttttactgcctgtacattccacattaataaagcgataccaatcttatatgaatgctaatattactaaaatgcactgatatcacttcttcttcccctgttgaaaagctttctcatgatcatatttcacccacatctcaccttgaagaaacttacaggtagacttaccttttcacttgtggaattaatcatatttaaatcttactttaaggctcaataaataatactcataatgtctca

SEQ ID NO: 199472 - DNA, 3236 bp, Homo sapiens
  Payload ID: 19352
  Gene Name: V-set and immunoglobulin domain containing 1
  Uniprot ID: Q86XK7
  ENST ID: ENST00000415430
  CDS Start-End: 162-1433
aaagtctatacgcaataagtaagcccaaagaggcatgtttgcttggcgatgcccagcagataagccaggcaaacctcggtgtgatcgaagaagccaatttgagactcagcctagtccaggcaagctactggcacctgctgctctcaactaacctccacacaatggtgttcgcattttggaaggtctttctgatcctaagctgccttgcaggtcaggttagtgtggtgcaagtgaccatcccagacggtttcgtgaacgtgactgttggatctaatgtcactctcatctgcatctacaccaccactgtggcctcccgagaacagctttccatccagtggtctttcttccataagaaggagatggagccaatttctcacagctcgtgcctcagtactgagggtatggaggaaaaggcagtcagtcagtgtctaaaaatgacgcacgcaagagacgctcggggaagatgtagctggacctctgagatttacttttctcaaggtggacaagctgtagccatcgggcaatttaaagatcgaattacagggtccaacgatccaggtaatgcatctatcactatctcgcatatgcagccagcagacagtggaatttacatctgcgatgttaacaaccccccagactttctcggccaaaaccaaggcatcctcaacgtcagtgtgttagtgaaaccttctaagcccctttgtagcgttcaaggaagaccagaaactggccacactatttccctttcctgtctctctgcgcttggaacaccttcccctgtgtactactggcataaacttgagggaagagacatcgtgccagtgaaagaaaacttcaacccaaccaccgggattttggtcattggaaatctgacaaattttgaacaaggttattaccagtgtactgccatcaacagacttggcaatagttcctgcgaaatcgatctcacttcttcacatccagaagttggaatcattgttggggccttgattggtagcctggtaggtgccgccatcatcatctctgttgtgtgcttcgcaaggaataaggcaaaagcaaaggcaaaagaaagaaattctaagaccatcgcggaacttgagccaatgacaaagataaacccaaggggagaaagcgaagcaatgccaagagaagacgctacccaactagaagtaactctaccatcttccattcatgagactggccctgataccatccaagaaccagactatgagccaaagcctactcaggagcctgccccagagcctgccccaggatcagagcctatggcagtgcctgaccttgacatcgagctggagctggagccagaaacgcagtcggaattggagccagagccagagccagagccagagtcagagcctggggttgtagttgagcccttaagtgaagatgaaaagggagtggttaaggcataggctggtggcctaagtacagcattaatcattaaggaacccattactgccatttggaattcaaataacctaaccaacctccacctcctccttccattttgaccaaccttcttctaacaaggtgctcattcctactatgaatccagaataaacacgccaagataacagctaaatcagcaagggttcctgtattaccaatatagaatactaacaattttactaacacgtaagcataacaaatgacagggcaagtgatttctaacttagttgagttttgcaacagtacctgtgttgttatttcagaaaatattatttctctctttttaactactctttttttttattttagacagagtcttgctccgtcgcgcaggctgtgatcgtagtggtgcgatctcggctcactgcaacctccgctccctgggttcaagcgattctcctgcctgagcctcctgagtagctgggactacaggcacgtgccaccacgcccggctaattttttgtatttttagtagagatggggtttcacgttgttagccaggatggtctccatctcctgacctcatgatccgcccaccttggcctcccaaaatgctgggattacaggcatgagccactgcgcccggcctctttttagctactcttatgttccacatgcacatatgacaaggtggcattaattagattcaatattatttctaggaatagttcctcattcatttttatattgaccactaagaaaataattcatcagcattatctcatagattggaaaattttctccaaatacaatagaggagaatatgtaaagggtatacattaattggtacgtagcatttaaaatcaggtcttataattaatgcttcattcctcatattagatttcccaagaaatcaccctggtatccaatatctgagcatggcaaatttaaaaaataacacaatttcttgcctgtaaccctagcactttgggaggccgaggcaggtggatcacctgaggtcaggagttcgagaccagcctggccaacatggcgaaaccccttctctactaaaaatacaaaaattagctgggcgtggtagtgcatgcctgtaatcccagctacttgggaggctgaggcaggagaatcgcttgaacccaggaggtggaggttgcagtgagccgagattgtgccactgcactccaacctgggtgacagagtgagattccatctgaaaaacaaaaacaaaaacagaaaacaaacaaacaaaaaacaaaaaatccccacaactttgtcaaataatgtacaggcaaacactttcaaatataatttccttcagtgaatacaaaatgttgatatcataggtgatgtacaatttagttttgaatgagttattatgttatcactgtgtctgatgttatctactttgaaaggcagtccagaaaagtgttctaagtgaactcttaagatctattttagataatttcaactaattaaataacctgttttactgcctgtacattccacattaataaagcgataccaatcttatatgaatgctaatattactaaaatgcactgatatcacttcttcttcccctgttgaaaagctttctcatgatcatatttcacccacatctcaccttgaagaaacttacaggtagacttaccttttcacttgtggaattaatcatatttaaatcttactttaaggctcaataaataatactcataatgtctcattttagtgactcctaaggctagtccttttataaacaactttttctgacatagcatttatgtataataaaccagacatttaaagtgta

SEQ ID NO: 199473 - DNA, 570 bp, Homo sapiens
  Payload ID: 19352
  Gene Name: V-set and immunoglobulin domain containing 1
  ENST ID: ENST00000458383
  CDS Start-End: 67-570
aatttgagactcagcctagtccaggcaagctactggcacctgctgctctcaactaacctccacacaatggtgttcgcattttggaaggtctttctgatcctaagctgccttgcaggtcaggttagtgtggtgcaagtgaccatcccagacggtttcgtgaacgtgactgttggatctaatgtcactctcatctgcatctacaccaccactgtggcctcccgagaacagctttccatccagtggtctttcttccataagaaggagatggagccaatttctcacagctcgtgcctcagtactgagggtatggaggaaaaggcagtcagtcagtgtctaaaaatgacgcacgcaagagacgctcggggaagatgtagctggacctctgagatttacttttctcaaggtggacaagctgtagccatcgggcaatttaaagatcgaattacagggtccaacgatccaggtaatgcatctatcactatctcgcatatgcagccagcagacagtggaatttacatctgcgatgttaacaaccccccagactttctcggccaaaaccaaggcatcctc

SEQ ID NO: 199474 - DNA, 4946 bp, Homo sapiens
  Payload ID: 19353
  Gene Name: V-set and immunoglobulin domain containing 10
  Uniprot ID: Q8N0Z9
  ENST ID: ENST00000359236
  CDS Start-End: 278-1900
cggcaggagtaggctggcgggcgcagggggcggggtgcgccctccctccccggccagggcgctcgggagcggggacccgagcctgcagccgagctccgctgccggccctggacactcggctcagccaagcatccttcctgggggccgaggaagtggggccactctgccgttccgaggacctgggaggagccctcggtaccccgggccccggggccctggggcacacacgtccagcccagcccgagcctgcgtttcctgagccgggatctggggcgagatggccgcaggcggcagtgcgcccgagccccgcgtcctcgtctgcctcggggcgctcctggccggctgggtcgccgtaggattggaggctgttgtcattggagaagttcatgagaatgttactctgcactgtggcaacatctcgggactgaggggccaggtgacctggtaccggaacaactcggagcctgtcttccttctctcgtccaactctagcctccggccagctgagcctcgcttctctctagtggatgccacctccctgcacattgaatcgctgagcctgggagatgagggaatctacacctgccaggagatcctgaatgtgactcagtggttccaagtgtggctgcaggtggccagcggcccctatcagattgaggtccacatcgtggccaccggcacactccccaacggcaccctctacgcagccaggggctcccaggtggacttcagctgcaacagcagctccaggccaccacccgtggttgaatggtggttccaggccctgaattccagcagcgagtcctttggccacaacctgacagtcaactttttctcactgttactgatatcgccaaacctccaagggaactacacctgtttagccttgaatcagctcagcaagagacatcgaaaggtgaccaccgagctcctggtctactatccccctccatcagctccccagtgctgggcacagatggcatcaggatcgttcatgttgcagcttacctgtcgctgggatgggggataccctgaccctgacttcctgtggatagaagagccaggaggtgtaatcgtggggaagtcaaagctgggggtggaaatgctgagcgagtcccagctgtcggatggcaagaagttcaagtgtgttacaagccacatagttgggccagagtcgggcgccagctgcatggtgcagatcaggggtccctcccttctctctgagcccatgaagacttgcttcactgggggcaatgtgacgcttacatgccaggtgtctggggcctacccccctgccaagatcctgtggctgaggaaccttacccagcccgaggtgatcatccagcctagcagccgccatctcattacccaggatggccagaactccaccctcactatccacaactgctcccaggacctggatgagggctactacatctgccgagctgacagccctgtaggggtgagggagatggaaatctggctgagtgtgaaagaacctttaaatatcggggggattgtgggaaccattgtgagcctccttctgctgggactggccattatctcagggcttctgttgcattatagccctgtgttctgctggaaagtaggaaacacttccaggggacaaaacatggatgatgtcatggttttggtggattcagaagaggaagaggaggaggaggaggaggaggaggaagatgctgcagtaggggaacaggagggagcacgtgagagagaggagttgccaaaagaaatacctaagcaggaccacattcacagagtgaccgccttggtgaatgggaacatagaacagatgggaaatggattccaggatcttcaagatgacagcagtgaggagcaaagtgacattgttcaagaagaagacaggccagtctgaagaagaggatggtccatggttgtcttgctctgaaagcttggagagctacattgaagacgagctcttcattcagctttgactccacctgcacccctggcgggggcttgcactaacaatgtttgggtctcagcaaaaaacaaaaccaagcacacacatctttccttccatgtattgaaaaacattggtttgatttgctctaagttttcccaatgatgtttaaaagctttgagaaggaaagctgctttggtgtctgaggtgccacttctgctgtgaatcctggctttatccaggttgatctactgtgatagatgctgatttagagggaacagaggtcagggaagcactgggtcttggtgccttttgccgcttttttttttttttttttttttttttgagacggagtctccctctattgcccaggctggagtgcaatggcacgatcttggctcaccacaacttctgcctcccaggttcaagcgattctcctgcctcagccacggcaccttgcaaatatcagctccttggaacaggtgaagttccaggtaccaatgccaatcagaggaaggcagtttggttcaggctttggagttagaaacacctgaagttgaatctgggctctgttgcttccttctttcatgggctagagcacgactctttacctctctcttggcctcaatttcctcacctgtaaaatagatgaggaagctgctcacttattattgtctcgttctgaaagcttggaaagctacatcgaagatgagctcttcattcagctttgatttgacctgtacccctggtgggggattgcactggcaacatttgggtctcagcaaaaaaaccaagcacacacatctttccttccatttattgaaaaacatctttgtaagatccattcattgaaaaacataatccatttattgaaaaatatctttgtaagatcacctgctaaatatgaaaatctgacttgaatttgtactctttaaagttgcgtatctgctctagtgggcaggacctagggcttaaaggggaacttcctttctccatttctaagaactgggactctaaaatgagaagctggttgtctgaagtaaccctgcaggtgtggttggggaaggtctgttttcttggatgaaggaactaaactaagcatatcagagcactgtcttaaccagttttatttccctggagatagaattcttttaaaaagagttagggagctggtaataggaagtgcctttcattataactacattttgcagagcttcatatttatatacaagcctcctaggtgatacactgttagcttgcagactttcctatgcttcatttctcctgttgctttcaaagaaggcaggagacacgtttaataacggagtatctggtgataagaattgcttgggcaaaccagctcatctggactctttctcagtcttggaagtgggaagaggaaaacttgtttccttcctgcttcttaaggatattctgagggtacactgatcaataacactaaatttggaatgaaaataccatgtgatgagtttagcctgctgatgcttccagtagatccttgtatagtttcaagatttaagttttccgatttcatataaatttcttaaagtcgaggaccttataagggtgcaatggatgtttgctaaatatgaaaaactgacttgaatttgcactctttaatgttgcgtatctgctctagtgggcaggacctagggcttaaaggggaacttcctttctccaattctaggaactgggactctaaaatgagaagctggttgtctgaagtaaccctgcaggtgtggttggggaaggtctgttttcttggatgaagggattaaactgagcaaatcactagaagtatgccctgtcccctgctcagaacactggggagctcaagagtgggctgcaatgtgcacccctcaggaatagctgtgaattgcaggtctactggctttttgctttttgtcttttgctgcaaggtaccccacgtacttaaccattctcaacagtgtaaatcagtgtcattttagaatgagatactcagcttgcttctaaagtcactgaattactgagtgagtctctcctttagagtcttcggcaaccaaattccagaattgaagagtctactactcagaggcaacaagattaaaaaaagaaaacacaaaaactgttgaggtgaaaaaaaaaaaaaaccctagctaggaacacagagaatgttttgtaggatcactgggatattttccacaacttcctcttctctagcacacacatctgttgataggaaatatttgagggtttttccactaccaaatgggagcttcatggtcctggtgtcaaacactataaacctttgaccagctgagctgtgactgctgtcacatatctgagtcctgtgtgcacagtaatatcctgggtcaggtaaaatccaggtcttcaagttttaaggattttttgaagaattcgggcttctttaagacgatccatgcccaaatccacaagcttgttgacagtggattacagtttgtgtggcaaagtccaagttgttacactgtgctttaaaaaaaatcttatctgcatgtattgttaacttagagaccatgagatctatttatcaggaccaggaagatacacacttcaggtccattgcaactgacttttttcttgtttttctcaaaccctggtggagcctgggaagggggcctccacaattctgtggctttgatattagccccaattctcacaagcacatacaagccccataattgccgcaggaaaacacaagatggaaaattgcaataacccatgcactgagacttagaaaatcatccttactaggcaaaatgtattatgatgcaataagtgccaactgatatttctcacgttgggactggccaggaactgctgcaaagaaaaataagcagctccttctccattatttacattttaagatgtggtggggggaggttgggagaaattagttctgaggttatcatatgccttttttaaaagataatggaataaagctatttttaagtaa

SEQ ID NO: 199475 - DNA, 802 bp, Homo sapiens
  Payload ID: 19353
  Gene Name: V-set and immunoglobulin domain containing 10
  ENST ID: ENST00000538357
  CDS Start-End: 234-802
cctccccggccagggcgctcgggagcggggacccgagcctgcagccgagctccgctgccggccctggacactcggctcagccaagcatccttcctgggggccgaggaagtggggccactctgccgttccgaggacctgggaggagccctcggtaccccgggccccggggccctggggcacacacgtccagcccagcccgagcctgcgtttcctgagccgggatctggggcgagatggccgcaggcggcagtgcgcccgagccccgcgtcctcgtctgcctcggggcgctcctggccggctgggtcgccgtaggattggaggctgttgtcattggagaagttcatgagaatgttactctgcactgtggcaacatctcgggactgaggggccaggtgacctggtaccggaacaactcggagcctgtcttccttctctcgtccaactctagcctccggccagctgagcctcgcttctctctagtggatgccacctccctgcacattgaatcgctgagcctgggagatgagggaatctacacctgccaggagatcctgaatgtgactcagtggttccaagtgtggctgcaggtggccaatccccctccatcagctccccagtgctgggcacagatggcatcaggatcgttcatgttgcagcttacctgtcgctgggatgggggataccctgaccctgacttcctgtggatagaagagccaggaggtgtaatcgtggggaagtcaaagctgggggtggaaatgctgagcgagtcccagctgtcggatggcaagaagttcaagtgtgt

SEQ ID NO: 199476 - DNA, 3397 bp, Homo sapiens
  Payload ID: 19354
  Gene Name: V-set and immunoglobulin domain containing 10 like
  Uniprot ID: Q86VR7
  ENST ID: ENST00000335624
  CDS Start-End: 1-2604
atggacaacccacaggctctgccactcttcctactcctggcctccttggtagggatcctcaccctcagagcctcttctggacttcagcaaaccaacttctcctctgccttctcttcagactcaaagagctcttcccaggggctgggtgtggaagttccctccatcaaacctcccagctggaaagttccagatcagttcctggattcaaaagcctctgctggaatctctgattccagctggtttcctgaggccctgagttccaacatgtctgggtccttctggtcaaatgtttctgctgagggccaagatttgagcccggtttcccccttctctgaaacccctggttctgaagtatttcctgatatttcggatcctcaagttcctgccaaagaccccaagccttccttcactgttaagaccccagcttcaaacatttctactcaagtctcccataccaaactgtctgttgaggccccagattcaaaattctccccggatgatatggatcttaaactctctgcccagagccctgaatccaaattttctgcagagacccactcagctgcaagctttccccagcaggtggggggcccactcgctgtgctggtggggaccaccatccggctccccctagtcccaatccccaaccctgggccccccacctctctggtggtctggcgccggggctcaaaggtgctggcagctgggggcctggggccaggggcacctctgatcagcctggaccctgctcaccgagaccacctgcgatttgaccaggcccggggggttctggagctcgcctctgcccagctggacgatgcaggggtctacacggctgaggtcatccgggcaggggtctcccagcagactcacgagttcacggtgggtgtgtatgagcccctaccccagctgtcggttcagcccaaggctccagagacagaggagggggcggccgagctccggctgcgctgcctggggtgggggccaggtcgcggggagctgagctggagccgggacggacgcgccctggaggcggcggaatcggagggagccgagacgccccggatgcgctcagagggcgaccagctgctcatcgtgcgccctgtgcgcagcgaccacgcccggtacacttgccgcgtccgcagccccttcggccacagggaggctgccgccgacgtcagcgtcttctacggcccggacccgccgaccatcacggtctcctcggaccgcgacgccgcgcctgcccgctttgtcaccgcgggcagtaacgtgaccttgcgctgcgccgccgcctcgcggccgcccgccgacatcacgtggagcctggcggacccggccgaggccgcggtgcccgcggggtcgcgcctcctgctgcccgcggtcggaccgggccacgcaggcacctacgcctgcctggcggcgaacccgcgtaccggccgccgccgccgctcgctgctcaaccttacagtggcggacctgccccccggggccccacagtgctcagttgaagggggtcccggggaccgcagcctccgcttccgctgctcgtggcccggcggggcccctgctgcctccctgcagttccagggtctccccgaaggcatccgcgccgggccagtgtcctctgtgctgctggcggccgtccccgcccacccccggctcagcggcgtccccatcacctgccttgctcgccacctggtggccacgcgtacctgcacagtcacgccggaggccccccgagaggtgctgctgcatccgctggtggcagagacacggttgggggaggcagaggtggcactggaggcctctggttgtcccccaccctcacgggcatcctgggcccgggaagggaggcccctggctccaggaggcgggagtcgcctgcggctcagtcaagatgggcggaaactccacatcggcaacttcagcctggattgggacctgggaaattactccgtgctgtgcagtggggcgctgggtgctggcggtgaccagatcaccctcattggaccctccatatcctcgtggaggcttcagagagccagagatgcagccgtgctgacttgggatgtggagcgcggggccctgatcagcagttttgagatccaggcatggccagatgggcctgctctgggcaggacttccacctacagggactgggtctccctgctcatcctggggcctcaggagcggtcagccgtggtgccccttccacctcggaacccagggacctggacctttcggatcctgcccatcctggggggccagccagggactccatcacaaagccgggtctaccgggccggccccacgttgagccatggggccatcgctggcatcgtcctgggctccctgctgggcctggcgctgctagccgtacttctcctcctttgcatctgctgcctgtgccgctttcgtggaaagactcctgagaaaaagaagcatccttctaccttggtccccgtggtcaccccctcagaaaagaagatgcatagtgtgaccccagtggagatttcatggcctctggacctcaaagtccctctggaggaccacagctcaactagggcctaccaagcacagaccccagttcagttgtctctgtaggcggaggctcaaagactgttcgcgcagccacacaggtgtgatcagagccagtggtctgccctgcacagggcgttttgggccagaacttcctatttcactccagcagcagccagggcctgctatgactgagggttggaccctgaaagtgggactttctgtctccctctcttgctgcagaagaagagtcttcctgtatttgtgcaagtaaggagatgtgacttcttggctgggaaactcttgctgatctaactgtgtggtttgcacaacctccaagcctctgcagcagacaggcagggcttgctgtgttgctctgagctagagagggagcttggccatgttctctgaaaaggtccccttacattcactttgccacctgtaggccacaccccatccagctcccagcatcttcatcttaaaacagatcagatcatgtcactcttctctttaaacgcttctacggcctgtgcatttcccttcagatattatccaaactcatcgtcgtgaccttcaaaaccttgtggtctggcctctgttggcctccctgacctcccctcccaattctttctctgcccccggactccagtatcacagtctgtctctcagccacaatttattttgcccctagagtttgctgtgcttataacacttctttttcccatatgtcattcatttctcaagtctaagagtagcagttaccatcttagacgaccgttcccttacccctcccttagtcttgggttaagtcccagaatccttgaatttgccgttcctgatacataaatatgtaatttct

SEQ ID NO: 199477 - DNA, 2297 bp, Homo sapiens
  Payload ID: 19354
  Gene Name: V-set and immunoglobulin domain containing 10 like
  ENST ID: ENST00000600663
  CDS Start-End: 90-680
gatgaccaggactgacgggccggcccagcactgagagggcggacattcctgggcatggaacactcgacaaagtcgacaagcggagttaaatgacctgccccccggggccccacagtgctcagttgaagggggtcccggggaccgcagcctccgcttccgctgctcgtggcccggcggggcccctgctgcctccctgcagttccagggtctccccgaaggcatccgcgccgggccagtgtcctctgtgctgctggcggccgtccccgcccacccccggctcagcggcgtccccatcacctgccttgctcgccacctggtggccacgcgtacctgcacagtcacgccggaggccccccgagaggtgctgctgcatccgctggtggcagagacacggttgggggaggcagaggtggcactggaggcctctggttgtcccccaccctcacgggcatcctgggcccgggaagggaggcccctggctccaggaggcgggagtcgcctgcggctcagtcaagatgggcggaaactccacatcggcaacttcagcctggattgggacctgggaaattactccgtgctgtgcagtggggcgctgggtgctggcggtgaccagatcaccctcattggaccctccatatcctcgtggaggcttcagagagccagagatgcagccgtgctgacttgggatgtggagcgcggggccctgatcagcagttttgagatccaggcatggccagatgggcctgctctgggcaggacttccacctacagggactgggtctccctgctcatcctggggcctcaggagcggtcagccgtggtgccccttccacctcggaacccagggacctggacctttcggatcctgcccatcctggggggccagccagggactccatcacaaagccgggtctaccgggccggccccacgttgagccatggggccatcgctggcatcgtcctgggctccctgctgggcctggcgctgctagccgtacttctcctcctttgcatctgctgcctgtgccgctttcgtggaaagactcctgagaaaaagaagcatccttctaccttggtccccgtggtcaccccctcagaaaagaagatgcatagtgtgaccccagtggagatttcatggcctctggacctcaaagtccctctggaggaccacagctcaactagggcctaccaagcacagaccccagttcagttgtctctgtaggcggaggctcaaagactgttcgcgcagccacacaggtgtgatcagagccagtggtctgccctgcacagggcgttttgggccagaacttcctatttcactccagcagcagccagggcctgctatgactgagggttggaccctgaaagtgggactttctgtctccctctcttgctgcagaagaagagtcttcctgtatttgtgcaagtaaggagatgtgacttcttggctgggaaactcttgctgatctaactgtgtggtttgcacaacctccaagcctctgcagcagacaggcagggcttgctgtgttgctctgagctagagagggagcttggccatgttctctgaaaaggtccccttacattcactttgccacctgtaggccacaccccatccagctcccagcatcttcatcttaaaacagatcagatcatgtcactcttctctttaaacgcttctacggcctgtgcatttcccttcagatattatccaaactcatcgtcgtgaccttcaaaaccttgtggtctggcctctgttggcctccctgacctcccctcccaattctttctctgcccccggactccagtatcacagtctgtctctcagccacaatttattttgcccctagagtttgctgtgcttataacacttctttttcccatatgtcattcatttctcaagtctaagagtagcagttaccatcttagacgaccgttcccttacccctcccttagtcttgggttaagtcccagaatccttgaatttgccgttcctgatacataaatatgtaatttcttgtgtggcctgagactctctctctaaactaagggctttacaaaagcagagaccacatcattaactcagcacttaacccagagcctcacacacagcaggcaatcaataaatatttgttgactgatcaaatgttttggtgccagtgaagagttgggcttgctgctgctgtcttcagcgtaagtcttgctttttcagctgggtttctaattgagaatttagagagtgcattggtgaggattcttttgactgcaagtaacaaaataaaatggtggcaagaactatg

SEQ ID NO: 199478 - DNA, 1148 bp, Homo sapiens
  Payload ID: 19355
  Gene Name: V-set and immunoglobulin domain containing 2
  Uniprot ID: Q96IQ7
  ENST ID: ENST00000326621
  CDS Start-End: 102-1085
gcccgggcggctgcccttgggtgctcccttccctgcccgacacccagaccgaccttgaccgcccacctggcaggagcaggacaggacggccggacgcggccatggccgagctcccggggccctttctctgcggggccctgctaggcttcctgtgcctgagtgggctggccgtggaggtgaaggtacccacagagccgctgagcacgcccctggggaagacagccgagctgacctgcacctacagcacgtcggtgggagacagcttcgccctggagtggagctttgtgcagcctgggaaacccatctctgagtcccatccaatcctgtacttcaccaatggccatctgtatccaactggttctaagtcaaagcgggtcagcctgcttcagaacccccccacagtgggggtggccacactgaaactgactgacgtccacccctcagatactggaacctacctctgccaagtcaacaacccaccagatttctacaccaatgggttggggctaatcaaccttactgtgctggttccccccagtaatcccttatgcagtcagagtggacaaacctctgtgggaggctctactgcactgagatgcagctcttccgagggggctcctaagccagtgtacaactgggtgcgtcttggaacttttcctacaccttctcctggcagcatggttcaagatgaggtgtctggccagctcattctcaccaacctctccctgacctcctcgggcacctaccgctgtgtggccaccaaccagatgggcagtgcatcctgtgagctgaccctctctgtgaccgaaccctcccaaggccgagtggccggagctctgattggggtgctcctgggcgtgctgttgctgtcagttgctgcgttctgcctggtcaggttccagaaagagagggggaagaagcccaaggagacatatgggggtagtgaccttcgggaggatgccatcgctcctgggatctctgagcacacttgtatgagggctgattctagcaaggggttcctggaaagaccctcgtctgccagcaccgtgacgaccaccaagtccaagctccctatggtcgtgtgacttctcccgatccctgagggcggtgagggggaatatcaataattaaagtctgtgggtaccata

SEQ ID NO: 199479 - DNA, 1191 bp, Homo sapiens
  Payload ID: 19355
  Gene Name: V-set and immunoglobulin domain containing 2
  Uniprot ID: Q96IQ7
  ENST ID: ENST00000403470
  CDS Start-End: 57-911
agaccgaccttgaccgcccacctggcaggagcaggacaggacggccggacgcggccatggccgagctcccggggccctttctctgcggggccctgctaggcttcctgtgcctgagtgggctggccgtggaggtgaaggtacccacagagccgctgagcacgcccctggggaagacagccgagctgacctgcacctacagcacgtcggtgggagacagcttcgccctggagtggagctttgtgcagcctgggaaacccatctctgagtcccatccaatcctgtacttcaccaatggccatctgtatccaactggttctaagtcaaagcgggtcagcctgcttcagaacccccccacagtgggggtggccacactgaaactgactgacgtccacccctcagatactggaacctacctctgccaagtcaacaacccaccagatttctacaccaatgggttggggctaatcaaccttactgtgctggttccccccagtaatcccttatgcagtcagagtggacaaacctctgtgggaggctctactgcactgagatgcagctcttccgagggggctcctaagccagtgtacaactgggtgcgtcttggaacttttcctacaccttctcctggcagcatggttcaagatgaggtgtctggccagctcattctcaccaacctctccctgacctcctcgggcacctaccgctgtgtggccaccaaccagatgggcagtgcatcctgtgagctgaccctctctgtgaccgaaccctcccaaggccgagtggccggagctctgattggggtgctcctgggcgtgctgttgctgtcagttgctgcgttctgcctggtcaggttccagaaagagagggggaagaagcccaaggagacatatgggggtagtgaccttcggtgagcaggagggctggggggtggcgcaaggagggaggaaagggcttgagttaaaagcgggtgcctgcaaccctcaaactccgacatcattcagtgtgtttaggggcaggaggtgttgttcagccgtggaatttgctggtggcagcagtgtaacctgtgtatttgagggtacaggcaagcggtacagggtggagtggctggtccacaagctgtggcagggaagctgtttgcaggactgccctgcccctcctcatatttaataaagtttacttttctgttccgaa

SEQ ID NO: 199480 - DNA, 1834 bp, Homo sapiens
  Payload ID: 19356
  Gene Name: V-set and immunoglobulin domain containing 4
  Uniprot ID: Q9Y279
  ENST ID: ENST00000374737
  CDS Start-End: 110-1309
atagggaaggaagggaagtaagcagtcacagacgctggcggccaccagaagtttgagcctctttggtagcaggaggctggaagaaaggacagaagtagctctggctgtgatggggatcttactgggcctgctactcctggggcacctaacagtggacacttatggccgtcccatcctggaagtgccagagagtgtaacaggaccttggaaaggggatgtgaatcttccctgcacctatgaccccctgcaaggctacacccaagtcttggtgaagtggctggtacaacgtggctcagaccctgtcaccatctttctacgtgactcttctggagaccatatccagcaggcaaagtaccagggccgcctgcatgtgagccacaaggttccaggagatgtatccctccaattgagcaccctggagatggatgaccggagccactacacgtgtgaagtcacctggcagactcctgatggcaaccaagtcgtgagagataagattactgagctccgtgtccagaaactctctgtctccaagcccacagtgacaactggcagcggttatggcttcacggtgccccagggaatgaggattagccttcaatgccaggctcggggttctcctcccatcagttatatttggtataagcaacagactaataaccaggaacccatcaaagtagcaaccctaagtaccttactcttcaagcctgcggtgatagccgactcaggctcctatttctgcactgccaagggccaggttggctctgagcagcacagcgacattgtgaagtttgtggtcaaagactcctcaaagctactcaagaccaagactgaggcacctacaaccatgacataccccttgaaagcaacatctacagtgaagcagtcctgggactggaccactgacatggatggctaccttggagagaccagtgctgggccaggaaagagcctgcctgtctttgccatcatcctcatcatctccttgtgctgtatggtggtttttaccatggcctatatcatgctctgtcggaagacatcccaacaagagcatgtctacgaagcagccagggcacatgccagagaggccaacgactctggagaaaccatgagggtggccatcttcgcaagtggctgctccagtgatgagccaacttcccagaatctgggcaacaactactctgatgagccctgcataggacaggagtaccagatcatcgcccagatcaatggcaactacgcccgcctgctggacacagttcctctggattatgagtttctggccactgagggcaaaagtgtctgttaaaaatgccccattaggccaggatctgctgacataattgcctagtcagtccttgccttctgcatggccttcttccctgctacctctcttcctggatagcccaaagtgtccgcctaccaacactggagccgctgggagtcactggctttgccctggaatttgccagatgcatctcaagtaagccagctgctggatttggctctgggcccttctagtatctctgccgggggcttctggtactcctctctaaataccagagggaagatgcccatagcactaggacttggtcatcatgcctacagacactattcaactttggcatcttgccaccagaagacccgagggaggctcagctctgccagctcagaggaccagctatatccaggatcatttctctttcttcagggccagacagcttttaattgaaattgttatttcacaggccagggttcagttctgctcctccactataagtctaatgttctgactctctcctggtgctcaataaatatctaatcataacagcaa

SEQ ID NO: 199481 - DNA, 1170 bp, Homo sapiens
  Payload ID: 19356
  Gene Name: V-set and immunoglobulin domain containing 4
  ENST ID: ENST00000427538
  CDS Start-End: 1-823
agaccatatccagcaggcaaagtaccagggccgcctgcatgtgagccacaaggttccaggagatgtatccctccaattgagcaccctggagatggatgaccggagccactacacgtgtgaagtcacctggcagactcctgatggcaaccaagtcgtgagagataagattactgagctccgtgtccagaaactctctgtctccaagcccacagtgacaactggcagcggttatggcttcacggtgccccagggaatgaggattagccttcaatgccaggctcggggttctcctcccatcagttatatttggtataagcaacagactaataaccaggaacccatcaaagtagcaaccctaagtaccttactcttcaagcctgcggtgatagccgactcaggctcctatttctgcactgccaagggccaggttggctctgagcagcacagcgacattgtgaagtttgtggtcaaagactcctcaaagctactcaagaccaagactgaggcacctacaaccatgacataccccttgaaagcaacatctacagtgaagcagtcctgggactggaccactgacatggatggctaccttggagagaccagtgctgggccaggaaagagcctgcctgtctttgccatcatcctcatcatctccttgtgctgtatggtggtttttaccatggcctatatcatgctctgtcggaagacatcccaacaagagcatgtctacgaagcagccagcccaaagtgtccgcctaccaacactggagccgctgggagtcactggctttgccctggaatttgccagatgcatctcaagtaagccagctgctggatttggctctgggcccttctagtatctctgccgggggcttctggtactcctctctaaataccagagggaagatgcccatagcactaggacttggtcatcatgcctacagacactattcaactttggcatcttgccaccagaagacccgagggaggctcagctctgccagctcagaggaccagctatatccaggatcatttctctttcttcagggccagacagcttttaattgaaattgttatttcacaggccagggttcagttctgctcctccactataagtctaatgttctgactctctcctggtgctcaataaatatctaatcataacagcaa

SEQ ID NO: 199482 - DNA, 1474 bp, Homo sapiens
  Payload ID: 19356
  Gene Name: V-set and immunoglobulin domain containing 4
  Uniprot ID: Q9Y279
  ENST ID: ENST00000412866
  CDS Start-End: 63-980
gaagtttgagcctctttggtagcaggaggctggaagaaaggacagaagtagctctggctgtgatggggatcttactgggcctgctactcctggggcacctaacagtggacacttatggccgtcccatcctggaagtgccagagagtgtaacaggaccttggaaaggggatgtgaatcttccctgcacctatgaccccctgcaaggctacacccaagtcttggtgaagtggctggtacaacgtggctcagaccctgtcaccatctttctacgtgactcttctggagaccatatccagcaggcaaagtaccagggccgcctgcatgtgagccacaaggttccaggagatgtatccctccaattgagcaccctggagatggatgaccggagccactacacgtgtgaagtcacctggcagactcctgatggcaaccaagtcgtgagagataagattactgagctccgtgtccagaaacactcctcaaagctactcaagaccaagactgaggcacctacaaccatgacataccccttgaaagcaacatctacagtgaagcagtcctgggactggaccactgacatggatggctaccttggagagaccagtgctgggccaggaaagagcctgcctgtctttgccatcatcctcatcatctccttgtgctgtatggtggtttttaccatggcctatatcatgctctgtcggaagacatcccaacaagagcatgtctacgaagcagccagggcacatgccagagaggccaacgactctggagaaaccatgagggtggccatcttcgcaagtggctgctccagtgatgagccaacttcccagaatctgggcaacaactactctgatgagccctgcataggacaggagtaccagatcatcgcccagatcaatggcaactacgcccgcctgctggacacagttcctctggattatgagtttctggccactgagggcaaaagtgtctgttaaaaatgccccattaggccaggatctgctgacataattgcctagtcagtccttgccttctgcatggccttcttccctgctacctctcttcctggatagcccaaagtgtccgcctaccaacactggagccgctgggagtcactggctttgccctggaatttgccagatgcatctcaagtaagccagctgctggatttggctctgggcccttctagtatctctgccgggggcttctggtactcctctctaaataccagagggaagatgcccatagcactaggacttggtcatcatgcctacagacactattcaactttggcatcttgccaccagaagacccgagggaggctcagctctgccagctcagaggaccagctatatccaggatcatttctctttcttcagggccagacagcttttaattgaaattgttatttcacaggccagggttcagttctgctcctccactataagtctaatgttctgactctctcctg

SEQ ID NO: 199483 - DNA, 2190 bp, Homo sapiens
  Payload ID: 19356
  Gene Name: V-set and immunoglobulin domain containing 4
  Uniprot ID: Q9Y279
  ENST ID: ENST00000455586
  CDS Start-End: 128-1093
ggagtttgagtgagagatatagggaaggaagggaagtaagcagtcacagacgctggcggccaccagaagtttgagcctctttggtagcaggaggctggaagaaaggacagaagtagctctggctgtgatggggatcttactgggcctgctactcctggggcacctaacagtggacacttatggccgtcccatcctggaagtgccagagagtgtaacaggaccttggaaaggggatgtgaatcttccctgcacctatgaccccctgcaaggctacacccaagtcttggtgaagtggctggtacaacgtggctcagaccctgtcaccatctttctacgtgactcttctggagaccatatccagcaggcaaagtaccagggccgcctgcatgtgagccacaaggttccaggagatgtatccctccaattgagcaccctggagatggatgaccggagccactacacgtgtgaagtcacctggcagactcctgatggcaaccaagtcgtgagagataagattactgagctccgtgtccagaaactctctgtctccaagcccacagtgacaactggcagcggttatggcttcacggtgccccagggaatgaggattagccttcaatgccaggctcggggttctcctcccatcagttatatttggtataagcaacagactaataaccaggaacccatcaaagtagcaaccctaagtaccttactcttcaagcctgcggtgatagccgactcaggctcctatttctgcactgccaagggccaggttggctctgagcagcacagcgacattgtgaagtttgtggtcaaagactcctcaaagctactcaagaccaagactgaggcacctacaaccatgacataccccttgaaagcaacatctacagtgaagcagtcctgggactggaccactgacatggatggctaccttggagagaccagtgctgggccaggaaagagcctgcctgtctttgccatcatcctcatcatctccttgtgctgtatggtggtttttaccatggcctatatcatgctctgtcggaagacatcccaacaagagcatgtctacgaagcagccaggtaagaaagtctctcctcttccatttttgaccccgtccctgccctcaattttgattactggcaggaaatgtggaggaaggggggtgtggcacagacccaatcctaaggccggaggccttcagggtcaggacatagctgccttccctctctcaggcaccttctgaggttgttttggccctctgaacacaaaggataatttagatccatctgccttctgcttccagaatccctgggtggtaggatcctgataattaattggcaagaattgaggcagaagggtgggaaaccaggaccacagccccaagtcccttcttatgggtggtgggctcttgggccatagggcacatgccagagaggccaacgactctggagaaaccatgagggtggccatcttcgcaagtggctgctccagtgatgagccaacttcccagaatctgggcaacaactactctgatgagccctgcataggacaggagtaccagatcatcgcccagatcaatggcaactacgcccgcctgctggacacagttcctctggattatgagtttctggccactgagggcaaaagtgtctgttaaaaatgccccattaggccaggatctgctgacataattgcctagtcagtccttgccttctgcatggccttcttccctgctacctctcttcctggatagcccaaagtgtccgcctaccaacactggagccgctgggagtcactggctttgccctggaatttgccagatgcatctcaagtaagccagctgctggatttggctctgggcccttctagtatctctgccgggggcttctggtactcctctctaaataccagagggaagatgcccatagcactaggacttggtcatcatgcctacagacactattcaactttggcatcttgccaccagaagacccgagggaggctcagctctgccagctcagaggaccagctatatccaggatcatttctctttcttcagggccagacagcttttaattgaaattgttatttcacaggccagggttcagttctgctcctccactataagtctaatgttctgactctctcctggtgctcaataaatatctaatcataacagc

SEQ ID NO: 199484 - DNA, 1818 bp, Homo sapiens
  Payload ID: 19357
  Gene Name: V-set and immunoglobulin domain containing 8
  Uniprot ID: Q5VU13
  ENST ID: ENST00000368100
  CDS Start-End: 137-1381
actcattgcaccttcctgccaccccaggcagtgtctgggccctcagctccccctccctccacctaccccctcacacccaccactacgaccccacgggatacccagcccagacggaggaaacaccgagcctagagacatgagagttggaggagcattccaccttctactcgtgtgcctgagcccagcactgctgtctgctgtgcggatcaacggggatggacaggaggtcctgtacctggcagaaggtgataatgtgaggctgggctgcccctacgtcctggaccctgaggactatggtcccaatgggctggacatcgagtggatgcaggtcaactcagaccccgcccaccaccgagagaacgtgttccttagttaccaggacaagaggatcaaccatggcagccttccccatctgcagcagagggtccgctttgcagcctcagacccaagccagtacgatgcctccatcaacctcatgaacctgcaggtatctgatacagccacttatgagtgccgggtgaagaagaccaccatggccacccggaaggtcattgtcactgtccaagcacgacctgcagtgcccatgtgctggacagagggccacatgacatatggcaacgatgtggtgctgaagtgctatgccagtgggggctcccagcccctctcctacaagtgggccaagatcagtgggcaccattacccctatcgagctgggtcttacacctcccagcacagctaccactcagagctgtcctaccaggagtccttccacagctccataaaccaaggcctgaacaatggggacctggtgttgaaggatatctccagagcagatgatgggctgtatcagtgcacagtggccaacaacgtgggctacagtgtttgtgtggtggaggtgaaggtctcagactcccggcgtataggcgtgatcatcggcatcgtcctgggctctctgctcgcgctgggctgcctggccgtaggcatctgggggctcgtctgctgctgctgcgggggctccggggctggcggcgcccgcggtgccttcggctacggcaacggcggcggggtcggcggaggggcctgcggcgacttggctagtgagatcagagaggacgccgtggcgcccgggtgcaaggccagcgggcgcggcagccgcgtcacccacctcctggggtacccgacgcagaacgtcagccgctccctgcgccgcaagtacgcgcctcccccctgcggcggccccgaggacgtggccctggcgccctgcaccgccgccgccgcctgcgaagcgggcccctccccggtctacgtcaaggtcaagagcgcggagccggctgactgcgccgaggggccggtgcagtgcaagaacggcctcttggtgtgagcgcgcgcgccgggccgggctgcgccccagccaggaggagggcgcggggctctctgtctgcagctggggacacgtcggggctggggacgacctcgctcgccccaggctgccaggcggctgggggtgaaggcatttccctaaggaaatgcgtagggaggcagagcctcctccccaaaagtgggaaggggcgggcgagggcggaggaaggcgatcctgagccttctccgcacccccgggaccgaaggcttgggggagagggagggaggaggaggctgagtgtcctagagcggctgaggccggaggcctggtgtccccagcctaagcagagggccccgggggccgggtgggtgggggtctgtctggacgaattgttctgtgtgtgaggtctgagctctgaggcagcagtgttagcacaataaagaaacattgagacgtga

SEQ ID NO: 199485 - DNA, 1023 bp, Homo sapiens
  Payload ID: 19358
  Gene Name: V-set and transmembrane domain containing 1
  Uniprot ID: Q6UX27
  ENST ID: ENST00000338372
  CDS Start-End: 177-887
gtgagaaggaaactgcaagagtggggcagagaaccagagtgtcagagcaaaacctcctctatctgcacatcctggggacgaaccgggcagccggagagctgcggccggcccagtcccgctccgcctttgaagggtaaaacccaaggcggggccttggttctggcagaagggacgctatgaccgcagaattcctctccctgctttgcctcgggctgtgtctgggctacgaagatgagaaaaagaatgagaaaccgcccaagccctccctccacgcctggcccagctcggtggttgaagccgagagcaatgtgaccctgaagtgtcaggctcattcccagaatgtgacatttgtgctgcgcaaggtgaacgactctgggtacaagcaggaacagagctcggcagaaaacgaagctgaattccccttcacggacctgaagcctaaggatgctgggaggtacttttgtgcctacaagacaacagcctcccatgagtggtcagaaagcagtgaacacttgcagctggtggtcacagataaacacgatgaacttgaagctccctcaatgaaaacagacaccagaaccatctttgtcgccatcttcagctgcatctccatccttctcctcttcctctcagtcttcatcatctacagatgcagccagcacagttcatcatctgaggaatccaccaagagaaccagccattccaaacttccggagcaggaggctgccgaggcagatttatccaatatggaaagggtatctctctcgacggcagacccccaaggagtgacctatgctgagctaagcaccagcgccctgtctgaggcagcttcagacaccacccaggagcccccaggatctcatgaatatgcggcactgaaagtgtagcaagaagacagccctggccactaaaggaggggggatcgtgctggccaaggttatcggaaatctggagatgcagatactgtgtttccttgctcttcgtccatatcaataaaattaagtttctcgtcttaaaaagaaa

SEQ ID NO: 199486 - DNA, 922 bp, Homo sapiens
  Payload ID: 19358
  Gene Name: V-set and transmembrane domain containing 1
  Uniprot ID: Q6UX27
  ENST ID: ENST00000376626
  CDS Start-End: 177-794
gtgagaaggaaactgcaagagtggggcagagaaccagagtgtcagagcaaaacctcctctatctgcacatcctggggacgaaccgggcagccggagagctgcggccggcccagtcccgctccgcctttgaagggtaaaacccaaggcggggccttggttctggcagaagggacgctatgaccgcagaattcctctccctgctttgcctcgggctgtgtctgggctacgaagatgagaaaaagaatgagaaaccgcccaagccctccctccacgcctggcccagctcggtggttgaagccgagagcaatgtgaccctgaagtgtcaggctcattcccagaatgtgacatttgtgctgcgcaaggtgaacgactctgggtacaagcaggaacagagctcggcagaaaacgaagctgaattccccttcacggacctgaagcctaaggatgctgggaggtacttttgtgcctacaagacaacagcctcccatgagtggtcagaaagcagtgaacacttgcagctggtggtcacagataaacacgatgaacttgaagctccctcaatgaaaacaggttcatcatctgaggaatccaccaagagaaccagccattccaaacttccggagcaggaggctgccgaggcagatttatccaatatggaaagggtatctctctcgacggcagacccccaaggagtgacctatgctgagctaagcaccagcgccctgtctgaggcagcttcagacaccacccaggagcccccaggatctcatgaatatgcggcactgaaagtgtagcaagaagacagccctggccactaaaggaggggggatcgtgctggccaaggttatcggaaatctggagatgcagatactgtgtttccttgctcttcgtccatatcaataaaattaagtttctcgtctta

SEQ ID NO: 199487 - DNA, 1041 bp, Homo sapiens
  Payload ID: 19358
  Gene Name: V-set and transmembrane domain containing 1
  Uniprot ID: Q6UX27
  ENST ID: ENST00000447872
  CDS Start-End: 177-701
gtgagaaggaaactgcaagagtggggcagagaaccagagtgtcagagcaaaacctcctctatctgcacatcctggggacgaaccgggcagccggagagctgcggccggcccagtcccgctccgcctttgaagggtaaaacccaaggcggggccttggttctggcagaagggacgctatgaccgcagaattcctctccctgctttgcctcgggctgtgtctgggctacgaagatgagaaaaagaatgagaaaccgcccaagccctccctccacgcctggcccagctcggtggttgaagccgagagcaatgtgaccctgaagtgtcaggctcattcccagaatgtgacatttgtgctgcgcaaggtgaacgactctgggtacaagcaggaacagagctcggcagaaaacgaagctgaattccccttcacggacctgaagcctaaggatgctgggaggtacttttgtgcctacaagacaacagcctcccatgagtggtcagaaagcagtgaacacttgcagctggtggtcacagataaacacgatgaacttgaagctccctcaatgaaaacagacaccagaaccatctttgtcgccatcttcagctgcatctccatccttctcctcttcctctcagtcttcatcatctacagatgcagccagcacagtgagctcagagaacgcaaagggagagagggggagtgaaggattttctcgaaccagccattccaaacttccggagcaggaggctgccgaggcagatttatccaatatggaaagggtatctctctcgacggcagacccccaaggagtgacctatgctgagctaagcaccagcgccctgtctgaggcagcttcagacaccacccaggagcccccaggatctcatgaatatgcggcactgaaagtgtagcaagaagacagccctggccactaaaggaggggggatcgtgctggccaaggttatcggaaatctggagatgcagatactgtgtttccttgctcttcgtccatatcaataaaattaagtttctcgtcttaaaaa

SEQ ID NO: 199488 - DNA, 517 bp, Homo sapiens
  Payload ID: 19358
  Gene Name: V-set and transmembrane domain containing 1
  ENST ID: ENST00000419106
  CDS Start-End: 1-381
gaattccccttcacggacctgaagcctaaggatgctgggaggtacttttgtgcctacaagacaacagcctcccatgagtggtcagaaagcagtgaacacttgcagctggtggtcacagataaacacgatgaacttgaagctccctcaatgaaaacaggttcatcatctgaggaatccaccaagagaaccagccattccaaacttccggagcaggaggctgccgaggcagatttatccaatatggaaagggtatctctctcgacggcagacccccaaggagtgacctatgctgagctaagcaccagcgccctgtctgaggcagcttcagacaccacccaggagcccccaggatctcatgaatatgcggcactgaaagtgtagcaagaagacagccctggccactaaaggaggggggatcgtgctggccaaggttatcggaaatctggagatgcagatactgtgtttccttgctcttcgtccatatcaataaaattaagtttctcgtcttaaaaagaaa

SEQ ID NO: 199489 - DNA, 608 bp, Homo sapiens
  Payload ID: 19358
  Gene Name: V-set and transmembrane domain containing 1
  ENST ID: ENST00000425006
  CDS Start-End: 177-608
gtgagaaggaaactgcaagagtggggcagagaaccagagtgtcagagcaaaacctcctctatctgcacatcctggggacgaaccgggcagccggagagctgcggccggcccagtcccgctccgcctttgaagggtaaaacccaaggcggggccttggttctggcagaagggacgctatgaccgcagaattcctctccctgctttgcctcgggctgtgtctgggctacgaagatgagaaaaagaatgagaaaccgcccaagccctccctccacgcctggcccagctcggtggttgaagccgagagcaatgtgaccctgaagtgtcaggctcattcccagaatgtgacatttgtgctgcgcaaggtgaacgactctgggtacaagcaggaacagagctcggcagaaaacgaagctgaattccccttcacggacctgaagcctaaggatgctgggaggtacttttgtgcctacaagacaacagcctcccatgagtggtcagaaagcagtgaacacttgcagctggtggtcacagataaacacgatgaacttgaagctccctcaatgaaaacagtggctcacgtctgtaataccaggactttgggaagatga

SEQ ID NO: 199490 - DNA, 654 bp, Homo sapiens
  Payload ID: 19358
  Gene Name: V-set and transmembrane domain containing 1
  ENST ID: ENST00000366170
  CDS Start-End: 177-527
gtgagaaggaaactgcaagagtggggcagagaaccagagtgtcagagcaaaacctcctctatctgcacatcctggggacgaaccgggcagccggagagctgcggccggcccagtcccgctccgcctttgaagggtaaaacccaaggcggggccttggttctggcagaagggacgctatgaccgcagaattcctctccctgctttgcctcgacaccagaaccatctttgtcgccatcttcagctgcatctccatccttctcctcttcctctcagtcttcatcatctacagatgcagccagcacagttcatcatctgaggaatccaccaagagaaccagccattccaaacttccggagcaggaggctgccgaggcagatttatccaatatggaaagggtatctctctcgacggcagacccccaaggagtgacctatgctgagctaagcaccagcgccctgtctgaggcagcttcagacaccacccaggagcccccaggatctcatgaatatgcggcactgaaagtgtagcaagaagacagccctggccactaaaggaggggggatcgtgctggccaaggttatcggaaatctggagatgcagatactgtgtttccttgctcttcgtccatatcaataaaattaagtttctcgtctt

SEQ ID NO: 199491 - DNA, 373 bp, Homo sapiens
  Payload ID: 19358
  Gene Name: V-set and transmembrane domain containing 1
  ENST ID: ENST00000615538
  CDS Start-End: 12-362
gaagggacgctatgaccgcagaattcctctccctgctttgcctcgacaccagaaccatctttgtcgccatcttcagctgcatctccatccttctcctcttcctctcagtcttcatcatctacagatgcagccagcacagttcatcatctgaggaatccaccaagagaaccagccattccaaacttccggagcaggaggctgccgaggcagatttatccaatatggaaagggtatctctctcgacggcagacccccaaggagtgacctatgctgagctaagcaccagcgccctgtctgaggcagcttcagacaccacccaggagcccccaggatctcatgaatatgcggcactgaaagtgtagcaagaagacag

SEQ ID NO: 199492 - DNA, 608 bp, Homo sapiens; identical to SEQ ID NO: 199489
  Payload ID: 19358
  Gene Name: V-set and transmembrane domain containing 1
  ENST ID: ENST00000613106
  CDS Start-End: 177-608

SEQ ID NO: 199493 - DNA, 1015 bp, Homo sapiens
  Payload ID: 19358
  Gene Name: V-set and transmembrane domain containing 1
  ENST ID: ENST00000610794
  CDS Start-End: 177-887
gtgagaaggaaactgcaagagtggggcagagaaccagagtgtcagagcaaaacctcctctatctgcacatcctggggacgaaccgggcagccggagagctgcggccggcccagtcccgctccgcctttgaagggtaaaacccaaggcggggccttggttctggcagaagggacgctatgaccgcagaattcctctccctgctttgcctcgggctgtgtctgggctacgaagatgagaaaaagaatgagaaaccgcccaagccctccctccacgcctggcccagctcggtggttgaagccgagagcaatgtgaccctgaagtgtcaggctcattcccagaatgtgacatttgtgctgcgcaaggtgaacgactctgggtacaagcaggaacagagctcggcagaaaacgaagctgaattccccttcacggacctgaagcctaaggatgctgggaggtacttttgtgcctacaagacaacagcctcccatgagtggtcagaaagcagtgaacacttgcagctggtggtcacagataaacacgatgaacttgaagctccctcaatgaaaacagacaccagaaccatctttgtcgccatcttcagctgcatctccatccttctcctcttcctctcagtcttcatcatctacagatgcagccagcacagttcatcatctgaggaatccaccaagagaaccagccattccaaacttccggagcaggaggctgccgaggcagatttatccaatatggaaagggtatctctctcgacggcagacccccaaggagtgacctatgctgagctaagcaccagcgccctgtctgaggcagcttcagacaccacccaggagcccccaggatctcatgaatatgcggcactgaaagtgtagcaagaagacagccctggccactaaaggaggggggatcgtgctggccaaggttatcggaaatctggagatgcagatactgtgtttccttgctcttcgtccatatcaataaaattaagtttctcgtctta

SEQ ID NO: 199494 - DNA, 922 bp, Homo sapiens; identical to SEQ ID NO: 199486
  Payload ID: 19358
  Gene Name: V-set and transmembrane domain containing 1
  ENST ID: ENST00000615235
  CDS Start-End: 177-794

SEQ ID NO: 199495 - DNA, 608 bp, Homo sapiens; identical to SEQ ID NO: 199489
  Payload ID: 19358
  Gene Name: V-set and transmembrane domain containing 1
  ENST ID: ENST00000619066
  CDS Start-End: 177-608

SEQ ID NO: 199496 - DNA, 654 bp, Homo sapiens; identical to SEQ ID NO: 199490
  Payload ID: 19358
  Gene Name: V-set and transmembrane domain containing 1
  ENST ID: ENST00000617097
  CDS Start-End: 177-527

SEQ ID NO: 199497 - DNA, 575 bp, Homo sapiens
  Payload ID: 19358
  Gene Name: V-set and transmembrane domain containing 1
  ENST ID: ENST00000613774
  CDS Start-End: 1-447
ctcagaagtagacagggtcccactcggttgcccaggctggagtgcagtggtgcaatcacagctcactgcagccttgacctcccaggcccagataaacacgatgaacttgaagctccctcaatgaaaacagacaccagaaccatctttgtcgccatcttcagctgcatctccatccttctcctcttcctctcagtcttcatcatctacagatgcagccagcacagttcatcatctgaggaatccaccaagagaaccagccattccaaacttccggagcaggaggctgccgaggcagatttatccaatatggaaagggtatctctctcgacggcagacccccaaggagtgacctatgctgagctaagcaccagcgccctgtctgaggcagcttcagacaccacccaggagcccccaggatctcatgaatatgcggcactgaaagtgtagcaagaagacagccctggccactaaaggaggggggatcgtgctggccaaggttatcggaaatctggagatgcagatactgtgtttccttgctcttcgtccatatcaataaaattaagtttctcgtctta

SEQ ID NO: 199498 - DNA, 922 bp, Homo sapiens; identical to SEQ ID NO: 199486
  Payload ID: 19358
  Gene Name: V-set and transmembrane domain containing 1
  ENST ID: ENST00000613042
  CDS Start-End: 177-794

SEQ ID NO: 199499 - DNA, 654 bp, Homo sapiens; identical to SEQ ID NO: 199490
  Payload ID: 19358
  Gene Name: V-set and transmembrane domain containing 1
  ENST ID: ENST00000613085
  CDS Start-End: 177-527

SEQ ID NO: 199500 - DNA, 654 bp, Homo sapiens; identical to SEQ ID NO: 199490
  Payload ID: 19358
  Gene Name: V-set and transmembrane domain containing 1
  ENST ID: ENST00000614154
  CDS Start-End: 177-527

SEQ ID NO: 199501 - DNA, 922 bp, Homo sapiens; identical to SEQ ID NO: 199486
  Payload ID: 19358
  Gene Name: V-set and transmembrane domain containing 1
  ENST ID: ENST00000616717
  CDS Start-End: 177-794

SEQ ID NO: 199502 - DNA, 608 bp, Homo sapiens; identical to SEQ ID NO: 199489
  Payload ID: 19358
  Gene Name: V-set and transmembrane domain containing 1
  ENST ID: ENST00000612784
  CDS Start-End: 177-608

SEQ ID NO: 199503 - DNA, 1015 bp, Homo sapiens; identical to SEQ ID NO: 199493
  Payload ID: 19358
  Gene Name: V-set and transmembrane domain containing 1
  ENST ID: ENST00000610804
  CDS Start-End: 177-887

SEQ ID NO: 199504 - DNA, 1015 bp, Homo sapiens; identical to SEQ ID NO: 199493
  Payload ID: 19358
  Gene Name: V-set and transmembrane domain containing 1
  ENST ID: ENST00000617281
  CDS Start-End: 177-887

SEQ ID NO: 199505 - DNA, 654 bp, Homo sapiens; identical to SEQ ID NO: 199490
  Payload ID: 19358
  Gene Name: V-set and transmembrane domain containing 1
  ENST ID: ENST00000612942
  CDS Start-End: 177-527

SEQ ID NO: 199506 - DNA, 608 bp, Homo sapiens; identical to SEQ ID NO: 199489
  Payload ID: 19358
  Gene Name: V-set and transmembrane domain containing 1
  ENST ID: ENST00000621018
  CDS Start-End: 177-608

SEQ ID NO: 199507 - DNA, 608 bp, Homo sapiens; identical to SEQ ID NO: 199489
  Payload ID: 19358
  Gene Name: V-set and transmembrane domain containing 1
  ENST ID: ENST00000610857
  CDS Start-End: 177-608

SEQ ID NO: 199508 - DNA, 922 bp, Homo sapiens; identical to SEQ ID NO: 199486
  Payload ID: 19358
  Gene Name: V-set and transmembrane domain containing 1
  ENST ID: ENST00000617115
  CDS Start-End: 177-794

SEQ ID NO: 199509 - DNA, 575 bp, Homo sapiens; identical to SEQ ID NO: 199497
  Payload ID: 19358
  Gene Name: V-set and transmembrane domain containing 1
  ENST ID: ENST00000613399
  CDS Start-End: 1-447

SEQ ID NO: 199510 - DNA, 575 bp, Homo sapiens; identical to SEQ ID NO: 199497
  Payload ID: 19358
  Gene Name: V-set and transmembrane domain containing 1
  ENST ID: ENST00000618529
  CDS Start-End: 1-447

SEQ ID NO: 199511 - DNA, 1041 bp, Homo sapiens; identical to SEQ ID NO: 199487
  Payload ID: 19358
  Gene Name: V-set and transmembrane domain containing 1
  Uniprot ID: Q6UX27
  ENST ID: ENST00000612864
  CDS Start-End: 177-701

SEQ ID NO: 199512 - DNA, 1015 bp, Homo sapiens; identical to SEQ ID NO: 199493
  Payload ID: 19358
  Gene Name: V-set and transmembrane domain containing 1
  ENST ID: ENST00000610629
  CDS Start-End: 177-887

SEQ ID NO: 199513 - DNA, 654 bp, Homo sapiens; identical to SEQ ID NO: 199490
  Payload ID: 19358
  Gene Name: V-set and transmembrane domain containing 1
  ENST ID: ENST00000612639
  CDS Start-End: 177-527

SEQ ID NO: 199514 - DNA, 1015 bp, Homo sapiens; identical to SEQ ID NO: 199493
  Payload ID: 19358
  Gene Name: V-set and transmembrane domain containing 1
  ENST ID: ENST00000611293
  CDS Start-End: 177-887

SEQ ID NO: 199515 - DNA, 608 bp, Homo sapiens; identical to SEQ ID NO: 199489
  Payload ID: 19358
  Gene Name: V-set and transmembrane domain containing 1
  ENST ID: ENST00000611985
  CDS Start-End: 177-608

SEQ ID NO: 199516 - DNA, 608 bp, Homo sapiens; identical to SEQ ID NO: 199489
  Payload ID: 19358
  Gene Name: V-set and transmembrane domain containing 1
  ENST ID: ENST00000611605
  CDS Start-End: 177-608

SEQ ID NO: 199517 - DNA, 1015 bp, Homo sapiens; identical to SEQ ID NO: 199493
  Payload ID: 19358
  Gene Name: V-set and transmembrane domain containing 1
  Uniprot ID: Q6UX27
  ENST ID: ENST00000612436
  CDS Start-End: 177-887

SEQ ID NO: 199518 - DNA, 922 bp, Homo sapiens; identical to SEQ ID NO: 199486
  Payload ID: 19358
  Gene Name: V-set and transmembrane domain containing 1
  ENST ID: ENST00000622762
  CDS Start-End: 177-794

SEQ ID NO: 199519 - DNA, 654 bp, Homo sapiens; identical to SEQ ID NO: 199490
  Payload ID: 19358
  Gene Name: V-set and transmembrane domain containing 1
  ENST ID: ENST00000614572
  CDS Start-End: 177-527

SEQ ID NO: 199520 - DNA, 922 bp, Homo sapiens; identical to SEQ ID NO: 199486
  Payload ID: 19358
  Gene Name: V-set and transmembrane domain containing 1
  ENST ID: ENST00000619024
  CDS Start-End: 177-794

SEQ ID NO: 199521 - DNA, 1015 bp, Homo sapiens; identical to SEQ ID NO: 199493
  Payload ID: 19358
  Gene Name: V-set and transmembrane domain containing 1
  ENST ID: ENST00000612105
  CDS Start-End: 177-887

SEQ ID NO: 199522 - DNA, 654 bp, Homo sapiens; identical to SEQ ID NO: 199490
  Payload ID: 19358
  Gene Name: V-set and transmembrane domain containing 1
  ENST ID: ENST00000616582
  CDS Start-End: 177-527

SEQ ID NO: 199523 - DNA, 575 bp, Homo sapiens; identical to SEQ ID NO: 199497
  Payload ID: 19358
  Gene Name: V-set and transmembrane domain containing 1
  ENST ID: ENST00000619907
  CDS Start-End: 1-447

SEQ ID NO: 199524 - DNA, 922 bp, Homo sapiens; identical to SEQ ID NO: 199486
  Payload ID: 19358
  Gene Name: V-set and transmembrane domain containing 1
  ENST ID: ENST00000619921
  CDS Start-End: 177-794

SEQ ID NO: 199525 - DNA, 608 bp, Homo sapiens; identical to SEQ ID NO: 199489
  Payload ID: 19358
  Gene Name: V-set and transmembrane domain containing 1
  ENST ID: ENST00000614756
  CDS Start-End: 177-608

SEQ ID NO: 199526 - DNA, 575 bp, Homo sapiens; identical to SEQ ID NO: 199497
  Payload ID: 19358
  Gene Name: V-set and transmembrane domain containing 1
  ENST ID: ENST00000613096
  CDS Start-End: 1-447

SEQ ID NO: 199527 - DNA, 575 bp, Homo sapiens; identical to SEQ ID NO: 199497
  Payload ID: 19358
  Gene Name: V-set and transmembrane domain containing 1
  ENST ID: ENST00000618109
  CDS Start-End: 1-447

SEQ ID NO: 199528 - DNA, 575 bp, Homo sapiens; identical to SEQ ID NO: 199497
  Payload ID: 19358
  Gene Name: V-set and transmembrane domain containing 1
  ENST ID: ENST00000614390
  CDS Start-End: 1-447

SEQ ID NO: 199529 - DNA, 575 bp, Homo sapiens; identical to SEQ ID NO: 199497
  Payload ID: 19358
  Gene Name: V-set and transmembrane domain containing 1
  ENST ID: ENST00000618448
  CDS Start-End: 1-447

SEQ ID NO: 199530 - DNA, 608 bp, Homo sapiens; identical to SEQ ID NO: 199489
  Payload ID: 19358
  Gene Name: V-set and transmembrane domain containing 1
  ENST ID: ENST00000610575
  CDS Start-End: 177-608

SEQ ID NO: 199531 - DNA, 872 bp, Homo sapiens
  Payload ID: 19358
  Gene Name: V-set and transmembrane domain containing 1
  Uniprot ID: Q6UX27
  ENST ID: ENST00000617776
  CDS Start-End: 154-771
gggcagagaaccagagtgtcagagcaaaacctcctctatctgcacatcctggggacgaaccgggcagccggagagctgcggccggcccagtcccgctccgcctttgaagggtaaaacccaaggcggggccttggttctggcagaagggacgctatgaccgcagaattcctctccctgctttgcctcgggctgtgtctgggctacgaagatgagaaaaagaatgagaaaccgcccaagccctccctccacgcctggcccagctcggtggttgaagccgagagcaatgtgaccctgaagtgtcaggctcattcccagaatgtgacatttgtgctgcgcaaggtgaacgactctgggtacaagcaggaacagagctcggcagaaaacgaagctgaattccccttcacggacctgaagcctaaggatgctgggaggtacttttgtgcctacaagacaacagcctcccatgagtggtcagaaagcagtgaacacttgcagctggtggtcacagataaacacgatgaacttgaagctccctcaatgaaaacaggttcatcatctgaggaatccaccaagagaaccagccattccaaacttccggagcaggaggctgccgaggcagatttatccaatatggaaagggtatctctctcgacggcagacccccaaggagtgacctatgctgagctaagcaccagcgccctgtctgaggcagcttcagacaccacccaggagcccccaggatctcatgaatatgcggcactgaaagtgtagcaagaagacagccctggccactaaaggaggggggatcgtgctggccaaggttatcggaaatctggagatgcagatactgtgtttccttgctcttcgtccat

SEQ ID NO: 199532 - DNA, 654 bp, Homo sapiens; identical to SEQ ID NO: 199490
  Payload ID: 19358
  Gene Name: V-set and transmembrane domain containing 1
  ENST ID: ENST00000620314
  CDS Start-End: 177-527

SEQ ID NO: 199533 - DNA, 1015 bp, Homo sapiens; identical to SEQ ID NO: 199493
  Payload ID: 19358
  Gene Name: V-set and transmembrane domain containing 1
  Uniprot ID: Q6UX27
  ENST ID: ENST00000620474
  CDS Start-End: 177-887

SEQ ID NO: 199534 - DNA, 1015 bp, Homo sapiens; identical to SEQ ID NO: 199493
  Payload ID: 19358
  Gene Name: V-set and transmembrane domain containing 1
  ENST ID: ENST00000617862
  CDS Start-End: 177-887

SEQ ID NO: 199535 - DNA, 922 bp, Homo sapiens; identical to SEQ ID NO: 199486
  Payload ID: 19358
  Gene Name: V-set and transmembrane domain containing 1
  Uniprot ID: Q6UX27
  ENST ID: ENST00000615508
  CDS Start-End: 177-794

SEQ ID NO: 199536 - DNA, 831 bp, Homo sapiens
  Payload ID: 19359
  Gene Name: V-set and transmembrane domain containing 2 like
  Uniprot ID: Q96N03
  ENST ID: ENST00000373459
  CDS Start-End: 241-639
ggaagggaagagtcccgcagtcggaggcggccggctgggcgtgcgctcgctccccgaagccggggctgggccggagccgggcgagggctgggagctgggccgggtccggggacagcgggcgaggggcagctgccggagccgggcagccaggccgctcagggcaggggacagctggcgccggttctgcggtctccggggcccagatgtgaggcggcggcgcccccggcccgagagcgcacgatgggggccccgctcgccgtagcgctgggcgccctccactacctggcacttttcctgcaactcggcggcgccacgcggcccgccggccacgcgccctgggacaaccacgtctccggccacggtggtcaaggtggtgggcagcaacatctcccacaagctgcgcctgtcccgggtgaagcccacggacgaaggcacctacgagtgccgcgtcatcgacttcagcgacggcaaggcccggcaccacaaggtcaaggcctacctgcgggtgcagccaggggagaactccgtcctgcatctgcccgaagcccctcccgccgcgcccgccccgccgccccccaagccaggcaaggagctgaggaagcgctcggtggaccaggaggcctgcagcctctagactgatgcccctgcccccgcccatccgcccccacgctgtacagagtgcatgaggagccgccggaccaccggggaccgactgcctgcgtccagccgcgccccatccccgaggccgcctgtggccaccatgtcggccctctttccaccaccccttgctcagcatgtaagccccacccacccctgccctttcagacccct

SEQ ID NO: 199537 - DNA, 1959 bp, Homo sapiens
  Payload ID: 19359
  Gene Name: V-set and transmembrane domain containing 2 like
  Uniprot ID: Q96N03
  ENST ID: ENST00000373461
  CDS Start-End: 248-862
cttccgcggaagggaagagtcccgcagtcggaggcggccggctgggcgtgcgctcgctccccgaagccggggctgggccggagccgggcgagggctgggagctgggccgggtccggggacagcgggcgaggggcagctgccggagccgggcagccaggccgctcagggcaggggacagctggcgccggttctgcggtctccggggcccagatgtgaggcggcggcgcccccggcccgagagcgcacgatgggggccccgctcgccgtagcgctgggcgccctccactacctggcacttttcctgcaactcggcggcgccacgcggcccgccggccacgcgccctgggacaaccacgtctccggccacgccctgttcacagagacaccccatgacatgacagcacggacgggcgaggacgtggagatggcctgctccttccgcggcagcggctccccctcctactcgctggagatccagtggtggtatgtacggagccaccgggactggaccgacaagcaggcgtgggcctcgaaccagctaaaagcatctcagcaggaagacgcagggaaggaggcaaccaaaataagtgtggtcaaggtggtgggcagcaacatctcccacaagctgcgcctgtcccgggtgaagcccacggacgaaggcacctacgagtgccgcgtcatcgacttcagcgacggcaaggcccggcaccacaaggtcaaggcctacctgcgggtgcagccaggggagaactccgtcctgcatctgcccgaagcccctcccgccgcgcccgccccgccgccccccaagccaggcaaggagctgaggaagcgctcggtggaccaggaggcctgcagcctctagactgatgcccctgcccccgcccatccgcccccacgctgtacagagtgcatgaggagccgccggaccaccggggaccgactgcctgcgtccagccgcgccccatccccgaggccgcctgtggccaccatgtcggccctctttccaccaccccttgctcagcatgtaagccccacccacccctgccctttcagacccctgcggtgacctggctcggagaaggtggccctgggcaccaaggggccaaccgccctgaacactggggcagggaccatgctggggcccggggccacccccttcctgtcaccagcttctgtggagtccagtgttttgctttgcttgcttgtcccccatcctgtcctgagccggggccccccagcctcgcctccctcctcctaccatccctcacttggacctgggggtgtggacagtgacccctccctgaatatggacttgaatcttctgagcagaactagggcctctcccctggtgaagacccagggaacccaggagggcccttctggggcagtggctctgcagggtcactcatggaggcctaggggaacagcgagatgccccaccacctcctggcgagtccttcctgttcagctccctgtgcgaccctccagggatgcaggggatccaggattctctgccctgtcacacggcgagtcagaagggaggggcctttccctcggacccatggccccaggcagagttttgcaccagcaggacccctttgagggccttcaaggctctcccaggagtccccctctgccggccccccaatgccccagctccctcttgggtcctgtgccaagtccgccccagggcctggggctgttgggagccaagggccccctggtactcagttccctcacgattcccgatcacgggcacacctgccccctggttatttgtaaatatttctattggacccaattctcctcggaattggctggcacctctggctgccgcagctcagtgatgacgtgggggaggtgggagaggccgagggctttgcctaggggtgggttgccctgtatacatgatccagtctgtgactaccagccaacctgaataaagcggttttaaaaaaa

SEQ ID NO: 199538 - DNA, 656 bp, Homo sapiens
  Payload ID: 19359
  Gene Name: V-set and transmembrane domain containing 2 like
  Uniprot ID: Q96N03
  ENST ID: ENST00000448944
  CDS Start-End: 210-656
cggctgggcgtgcgctcgctccccgaagccggggctgggccggagccgggcgagggctgggagctgggccgggtccggggacagcgggcgaggggcagctgccggagccgggcagccaggccgctcagggcaggggacagctggcgccggttctgcggtctccggggcccagatgtgaggcggcggcgcccccggcccgagagcgcacgatgggggccccgctcgccgtagcgctgggcgccctccactacctggcacttttcctgcaactcggcggcgccacgcggcccgccggccacgcgccctgggacaaccacgtctccggccacgccctgttcacagagacaccccatgacatgacagcacggacgggcgaggacgtggagatggcctgctccttccgcggcagcggctccccctcctactcgctggagatccagtggtggtatgtacggagccaccgggactggaccgacaagcaggcgtgggcctcgaaccaggtggtcaaggtggtgggcagcaacatctcccacaagctgcgcctgtcccgggtgaagcccacggacgaaggcacctacgagtgccgcgtcatcgacttcagcgacggcaaggcccggcaccacaaggtcaaggcctacctgcgggtgcagccaggg

SEQ ID NO: 199539 - DNA, 3401 bp, Homo sapiens
  Payload ID: 19360
  Gene Name: V-set and transmembrane domain containing 2A
  Uniprot ID: Q8TAG5
  ENST ID: ENST00000302287
  CDS Start-End: 407-1141
gcgccgcgagcccggcgaagtcctcagcccgccccgcttgcccactccccacttcccgagccggctccgtgtttagggagggcagtgatcacgcaagccggagcggcgggctgacgttggacgagctgccaggtagctgaaagcaggcagccaggcagccgagacacttcccagcgattccagcctgggctccgcaggaagcctcgctgaatcccagccagctggttctaaccttccagaatcgcaatcccttctccccacagccagccctcgccaagcaagcagcaggatgtttgcagtgtcgcgcccagggctctgagactgagcctgccatccactcgcacgcctttctttcagggcttttcggctgttggctacactgatgtgacccccctccctttttggaatgatggggatctttttggtgtatgttggatttgttttcttttccgttttatatgtacaacaagggctttcttctcaagcaaaatttaccgagtttccgcggaacgtgacggcgaccgaggggcagaatgtggagatgtcctgcgccttccagagcggctccgcctcggtgtatctggagatccaatggtggttcctgcgggggccggaggacctggatcccggggccgagggggccggcgcgcaggtggagctcttgcccgacagagacccggacagcgacgggaccaagatcagcacagtgaaagtccaaggcaatgacatctcccacaagcttcagatttccaaagtgaggaaaaaggatgaaggcttatatgagtgcagggtgactgatgccaactacggggagcttcaggaacacaaggcccaggcctatctgaaagtcaatgccaacagccatgcccgcagaatgcaggccttcgaagcctcgcccatgtggctgcaggatatgaagccccgcaagaacgtctccgcagccatccccagcagcatccatggctctgccaaccaacgaacgcactccacctccagccctcaagtggtagccaaaatccccaaacaaagtccacaatcaggtatggaaacccatttcgagccttttattttaccactcacaaacgctccacagaaaggtcagtcgtatagagtagacagatttatgaatggtgatttttaaaatcggagacctagttcagtgcaagtgattatgagaggtgagcaccgagcctgcaccaattcactcagagctcaaagcatgtgggtgcaccccgtcagtcccctagtggtgcttcatttccagggcatctgagagctggactctggtttttatcctttctgtatttacacattataagaacaataaatcatgtaatgttggttacattacaaatgcatgttcattttctctacagatttatgtatcgataatgacccaaattaagaggctttcacttaatcaaaatgtaaatgagagagacatgccatatcatgcattttcagcgacccatagctctaagcaggactattctccaagggcttttgattttgaaggagaaacctcagctgcctgtgatgatgataatggaaggatggaggggggattgaagactgtaagtggtgcagagataaggcaactcctctgtgaatttgccttccaggccaatttagaagcttagtcacaggattctgaaggcagctgtgcaagttaaagctgttctgaatggcattaatgtatgcagtcattcagccaatggaaatgcgtggaagttttaaccttgatgtgggataaaggcttcgtggaatgagcagtaccctgcacaaccccgcggccgtcccgatttcctcaaacacgtgacatgggatgaagggagcacaaacatactgactttatccttctttaggtttttccctaaagaagtattgatgctaccatcagtaatggaaaattacattgctaatatttaaggtctcttcagccattaaattaaaaagtctgattacttcaccaggatgatttctgagatctcatctcatatcgtcctgaatacacacacacacacacacacacgcacacacacacacatctcagaaatcatcctaatcaaatatagactttatatatatcaaatatatatatacatgtagaaatacatataggtatgtatctttaagtccttgcttgtgaacaatgcttttaaatgtttttaaaatactgtatgccaaaataggttttctcttaatgctttacttcctaatggatgtgatttgcagatttgtagggcacttggattagggttctctgagtttgccctgccttataatgtagatgagcaactctcctggcatgccttggtcattgcaatttatgtcagtctgatgaacagatggcttagcctctctgaagcccaatgtgtgtggatttgtctaatttttttctttataatcttttctgcttaccaaattaaaggacaaactagtatagctggaacatatatgtgtgtatccatacacactaaacacacaggtatatgctaaattgtaatggtaaccaaatgatggttacaactttgtgactattatttgaggaagatttaatgtctttggagtgattttcccctctttcttcacattatcataaaagaagttagacactacaggcaagattacagagtagcctaagcagacaatttacaacctaattagcaagaactccaaatcatggaagtgaaattattattatcctacatagactgttccaagttagatgtcatcaatctgttcggcagaataaaatcaaacagattacctattccaagtgaagaattccaagggtagaatgaaatgctttatctatttctagaatgttttcttagcttttggggtttaataatgcaatctcaaaatatctatttattttattttaatatctcttagcgctgtgattagtgctaaatgataaactctagatctcttctaacaattatcaaataaaaattactgctctttttgcatcccattgccagccttgctgtcagattcaaaattgctttttctagagttaaaggtagaaggagagaaaaaagtgactcatgaagtctatattcattaaaagtcctgttcactaaacatatctgcttatatcaaagagtaacttgaaatatctgaaaatatttaatttcaatatttccaaccagtgaatactggataatatttttatatacttctatcaacattttctaatttcgatttcagaagctggggcagtccagtcactcactttacttatgtgtaagttcctatacttgcacaattattatatatgattcagtatctggggtggatatttatatattatattcactgtaatacccacatcctgatttatgatttttgcctcacgattttcagattatattcaaataaagcttatttcaata

SEQ ID NO: 199540 - DNA, 1076 bp, Homo sapiens
  Payload ID: 19360
  Gene Name: V-set and transmembrane domain containing 2A
  ENST ID: ENST00000402613
  CDS Start-End: 127-849
agcagcaggatgtttgcagtgtcgcgcccagggctctgagactgagcctgccatccactcgcacgcctttctttcagggcttttcggctgttggctacactgatgtgacccccctccctttttggaatgatggggatctttttggtgtatgttggatttgttttcttttccgttttatatgtacaacaagggctttcttctcaagcaaaatttaccgagtttccgcggaacgtgacggcgaccgaggggcagaatgtggagatgtcctgcgccttccagagcggctccgcctcggtgtatctggagatccaatggtggttcctgcgggggccggaggacctggatcccggggccgagggggccggcgcgcaggtggagctcttgcccgacagagacccggacagcgacgggaccaagatcagcacagtgaaagtccaaggcaatgacatctcccacaagcttcagatttccaaagtgaggaaaaaggatgaaggcttatatgagtgcagggtgactgatgccaactacggggagcttcaggaacacaaggcccaggcctatctgaaagtcaatgccaacagccatgcccgcagaatgcaggccttcgaagcctcgcccatgtggctgcaggatatgaagccccgcaagaacgtctccgcagccatccccagcagcatccatggctctgccaaccaacgaacgcactccacctccagccctcaagtggtagccaaaatccccaaacaaagtccacaatcagcaaagagcaaatcgcctgtaaaatctacggagcggacagcaaagttgaccctaaactccaagcaccaccctgcacccactgtactctaattcactacacaaggagcgcctgcttccggaagcataaatgaagaggctatcacatgctttgttgatcatattttctttggcaaaacactgatcttttattttaagagaattaacgtgaagtgatagaacgttttctaatagcaagatctattttttcccttttctttcggcgactaaaatcatctcactgactgctcaagggttggcctgaatgtcatcaggatagg

SEQ ID NO: 199541 - DNA, 2521 bp, Homo sapiens
  Payload ID: 19360
  Gene Name: V-set and transmembrane domain containing 2A
  ENST ID: ENST00000404951
  CDS Start-End: 316-1245
cgcaagccggagcggcgggctgacgttggacgagctgccaggtagctgaaagcaggcagccaggcagccgagacacttcccagcgattccagcctgggctccgcaggaagcctcgctgaatcccagccagctggttctaaccttccagaatcgcaatcccttctccccacagccagccctcgccaagcaagcagcaggatgtttgcagtgtcgcgcccagggctctgagactgagcctgccatccactcgcacgcctttctttcagggcttttcggctgttggctacactgatgtgacccccctccctttttggaatgatggggatctttttggtgtatgttggatttgttttcttttccgttttatatgtacaacaagggctttcttctcaagcaaaatttaccgagtttccgcggaacgtgacggcgaccgaggggcagaatgtggagatgtcctgcgccttccagagcggctccgcctcggtgtatctggagatccaatggtggttcctgcgggggccggaggacctggatcccggggccgagggggccggcgcgcaggtggagctcttgcccgacagagacccggacagcgacgggaccaagatcagcacagtgaaagtccaaggcaatgacatctcccacaagcttcagatttccaaagtgaggaaaaaggatgaaggcttatatgagtgcagggtgactgatgccaactacggggagcttcaggaacacaaggcccaggcctatctgaaagtcaatgccaacagccatgcccgcagaatgcaggccttcgaagcctcgcccatgtggctgcaggatatgaagccccgcaagaacgtctccgcagccatccccagcagcatccatggctctgccaaccaacgaacgcactccacctccagccctcaagtggtagccaaaatccccaaacaaagtccacaatcagtgtctccaatccttccagaagtcaaacatctccacagaccacctctactagtccttcctttcttctctctgtcttcacttttttctactgacccccttcccaccttcccaacgtcacacagaactgtgaagcggcttcctgctcctcttccccaacctggccatggatcaacccctggtgtgcagagctgcgtgctggctcctccagcaaagagcaaatcgcctgtaaaatctacggagcggacagcaaagttgaccctaaactccaagcaccaccctgcacccactgtactctaattcactacacaaggagcgcctgcttccggaagcataaatgaagaggctatcacatgctttgttgatcatattttctttggcaaaacactgatcttttattttaagagaattaacgtgaagtgatagaacgttttctaatagcaagatctattttttcccttttctttcggcgactaaaatcatctcactgactgctcaagggttggcctgaatgtcatcaggatagggaatatttactatggataccactaatttcctactaaaggacccagcatcttcaggaagcaaacagagatcaaaaggctacagaacagaagctatcatcagacaaaaccccctttttaggggaagaacaaaactatcaacactgcaagtcaacaaggaggacattactttaaggaataacatgagaaagaaatttttttattttcccctttttttcttggatttttcttctttttcttgattacagttcttgttcaatggtggcaagtgctggttatggccaatctccgtcaatcctaggaggtttatagaactacattttgagtgttctatatttcagtgtattttaattcattttgcaattcctgtgtatgcaaacctgataaattctgtaaattgcttatagtatgtgtgctataacttcaaagtagatgtactgcgaccctcatgcaagctgatttttatcattatatatataaatatatacttaagaatatctgtgtgttgggccaatgaccaactttttttgacgaagcatttgtttttcgttgataattcatacactgcgtgaattttgtaattcattgtttcacttccacaggtttgacagctgcagatggtctctattgtcctctgcttcattctggaaagtgcatattcaaaattgtatcagtctctgatcgatgaattaattttgttatgtctgtgctaagttggaatttactatgttcctttatacatggtgtttattgaggtttgagagtctcttgactgtgaagaatgtacactgtctggttttgacagctatttctgtattattatcattataatcttgtcaaatagaaatgttgcttctagaaaatttgcctaggaggcgaatgtggggaaggtgaagcactcaccataattccctaaattcatgttagaacatttcttgctatggttaaaaatgctgcttcctttgacctttatgaatttctgtacctttgtcattctgttacctttgtcattctgttatttgcgctaattatattttaatgtctcctaatta

SEQ ID NO: 199542 - DNA, 3112 bp, Homo sapiens
  Payload ID: 19360
  Gene Name: V-set and transmembrane domain containing 2A
  Uniprot ID: Q8TAG5
  ENST ID: ENST00000407838
  CDS Start-End: 407-1117
gcgccgcgagcccggcgaagtcctcagcccgccccgcttgcccactccccacttcccgagccggctccgtgtttagggagggcagtgatcacgcaagccggagcggcgggctgacgttggacgagctgccaggtagctgaaagcaggcagccaggcagccgagacacttcccagcgattccagcctgggctccgcaggaagcctcgctgaatcccagccagctggttctaaccttccagaatcgcaatcccttctccccacagccagccctcgccaagcaagcagcaggatgtttgcagtgtcgcgcccagggctctgagactgagcctgccatccactcgcacgcctttctttcagggcttttcggctgttggctacactgatgtgacccccctccctttttggaatgatggggatctttttggtgtatgttggatttgttttcttttccgttttatatgtacaacaagggctttcttctcaagcaaaatttaccgagtttccgcggaacgtgacggcgaccgaggggcagaatgtggagatgtcctgcgccttccagagcggctccgcctcggtgtatctggagatccaatggtggttcctgcgggggccggaggacctggatcccggggccgagggggccggcgcgcaggtggagctcttgcccgacagagacccggacagcgacgggaccaagatcagcacagtgaaagtccaaggcaatgacatctcccacaagcttcagatttccaaagtgaggaaaaaggatgaaggcttatatgagtgcagggtgactgatgccaactacggggagcttcaggaacacaaggcccaggcctatctgaaagtcaatgccaacagccatgcccgcagaatgcaggccttcgaagcctcgcccatgtggctgcaggatatgaagccccgcaagaacgtctccgcagccatccccagcagcatccatggctctgccaaccaacgaacgcactccacctccagccctcaagtggtagccaaaatccccaaacaaagtccacaatcaggtgcgaggatagctacaagccatggactttctgtcctgcttcttgtttgtggctttgtgaagggtgctttgctttaatctaaagtgctgacttttttccaatatcactttctcttcttaaagcaaagagcaaatcgcctgtaaaatctacggagcggacagcaaagttgaccctaaactccaagcaccaccctgcacccactgtactctaattcactacacaaggagcgcctgcttccggaagcataaatgaagaggctatcacatgctttgttgatcatattttctttggcaaaacactgatcttttattttaagagaattaacgtgaagtgatagaacgttttctaatagcaagatctattttttcccttttctttcggcgactaaaatcatctcactgactgctcaagggttggcctgaatgtcatcaggatagggaatatttactatggataccactaatttcctactaaaggacccagcatcttcaggaagcaaacagagatcaaaaggctacagaacagaagctatcatcagacaaaaccccctttttaggggaagaacaaaactatcaacactgcaagtcaacaaggaggacattactttaaggaataacatgagaaagaaatttttttattttcccctttttttcttggatttttcttctttttcttgattacagttcttgttcaatggtggcaagtgctggttatggccaatctccgtcaatcctaggaggtttatagaactacattttgagtgttctatatttcagtgtattttaattcattttgcaattcctgtgtatgcaaacctgataaattctgtaaattgcttatagtatgtgtgctataacttcaaagtagatgtactgcgaccctcatgcaagctgatttttatcattatatatataaatatatacttaagaatatctgtgtgttgggccaatgaccaactttttttgacgaagcatttgtttttcgttgataattcatacactgcgtgaattttgtaattcattgtttcacttccacaggtttgacagctgcagatggtctctattgtcctctgcttcattctggaaagtgcatattcaaaattgtatcagtctctgatcgatgaattaattttgttatgtctgtgctaagttggaatttactatgttcctttatacatggtgtttattgaggtttgagagtctcttgactgtgaagaatgtacactgtctggttttgacagctatttctgtattattatcattataatcttgtcaaatagaaatgttgcttctagaaaatttgcctaggaggcgaatgtggggaaggtgaagcactcaccataattccctaaattcatgttagaacatttcttgctatggttaaaaatgctgcttcctttgacctttatgaatttctgtacctttgtcattctgttacctttgtcattctgttatttgcgctaattatattttaatgtctcctaattaaaaattaaaatttggttgttggctaaatacaatatgcaaaagatgatggcaggtccccgactaaagaagattaatgtgttcagttttcactggttaagtgaattataattttaaatattccattcttatttatgtctttatgataattcagactattttattttgaacctgttttctactctggcaaagaaagataggcagaactattagtgttccatatacattatggaatagataaagcttgagagataaatgacctaagttttccttccagagagactcttccattttctctcattacaaaaccagaagatcagctatgtggggccatcagctcccagcctaaggtcctataacccgaagcttgaaggcaatcagtacctctgcttttcaaaggtaaatgcattcattttctttgattcagttataagcaagtatatattttcataatattcttgacattacctgagaaataatacttcatgctaaatcttttactgccacttttctcattcatttggtttatcatttcagtttaatgagaaaaattaataaaggttttgattgcactattttattaaccta

SEQ ID NO: 199543 - DNA, 1488 bp, Homo sapiens
  Payload ID: 19361
  Gene Name: V-set and transmembrane domain containing 2B
  Uniprot ID: A6NLU5
  ENST ID: ENST00000335523
  CDS Start-End: 86-943
agcccgagccggagccgatccgagcccacgcggccgccgcctctccgctcccgggcccccgccgccaccgcgccccccgcgggagatggaacagcggaaccggctcggtgccctcggatacctgccgcctctgctgctgcatgccctgctgctcttcgtggccgacgctgcattcacagaagtccccaaagatgtgacagtacgggagggagacgacatcgaaatgccctgcgcgttccgggccagcggagccacctcgtattcgctggagattcagtggtggtacctcaaggagccaccccgggagctgctgcacgagctggcgctcagcgtgccgggcgcccggagcaaggtaacaaataaggatgcaactaaaatcagcaccgtacgcgtccagggcaatgacatctcacaccggcttcggctgtctgccgtgcggctgcaggacgagggcgtgtacgagtgccgcgtgtcggactacagcgacgacgacacgcaggagcacaaggcccaggcgatgctgcgcgtgctctcgcgcttcgcgccgcccaacatgcaggccgccgaggccgtgtcccacatccagagcagcggcccgcgtcgccacggcccagccagcgccgccaacgccaacaacgcgggcgccgcgagccgtaccacctccgagcccggccgcggcgacaagagcccgccgcccgggagccctcccgccgccatcgatcccgcagtccccgaggccgcggcagcctcggcggcccacacgcccaccaccacagtcgcggcagctgctgctgcctcgtcagcgtcgccgccatcgggacaggcggtcctgctgcgccagaggcacggctcgggcaccggccgtagctacaccacagacccactcttgtccctgctcctgttagctctgcataagttcctgcgcctgctcttgggacattgacagacaagaccaacccgagcatctcagaggccgcacatgacctgcccggggccctcggtgaggaccatgtcgctggatggacacagagagactgagagacgcatgaaaaagtccacatggaaaataaataaatcatatttttgggaaagttacacaaatgtagaacacctaaaataatgcatctagtttccaaataatttggagtttggcccatgcagtctgcatgggaatcaatgatttctctacttcaatgtagttttcttttctacactttccctccaagtcttcattttgcacgaactgttgagcagttatctttaggataatatgtacaaatgttggggtcaaagccttttgacaaagcaaaatatttttagtagattattgtgtttaggatttttttttaatttactttttttctttgggggcttttcttttttattaaattatttcttttgaggcattttgattaaaaaagacacatcttatcataattaaaattcactgtcaataatatttatttttaaataaagattggaaacaag

SEQ ID NO: 199544 - DNA, 2170 bp, Homo sapiens
  Payload ID: 19362
  Gene Name: V-set and transmembrane domain containing 4
  Uniprot ID: Q8IW00
  ENST ID: ENST00000298454
  CDS Start-End: 25-600
acagcgccgggcggcggcggggagatgcggctgctggcactggcggcggccgcgctgctggcgcgggctccggctccggaggtctgtgcggccctcaatgtcactgtgtccccggggcccgtggttgactacctggagggggagaatgccactctcctctgccacgtctcccagaaaaggcggaaggacagcttgctggccgtgcgctggttctttgcacactccttcgactcccaggaggccttgatggtgaagatgaccaagctccgggtggtgcagtactatgggaatttcagccgcagcgccaaacggcggaggctgcgcctgctggaggagcagcggggggcgctctacaggctctccgtcttgacactgcagccctccgatcaagggcattacgtctgcagagtccaggaaatcagcaggcacaggaacaagtggacggcctggtccaatggctcctcagccacggaaatgagaggagtctccagccatccagtggagaggggagcttttcttgggatttcccttgtaatactacctcactctttgcccttcaccgcagacttaaccatggcctccttcctgcagagttcttgatgtgagataaaattgcttgtctttcactggaaactcccagaaagaaaggctggtgcctggtctctcctcatttccctgtcatgaacacctcgcccagcacatggagggtgacttgcgatgatatatttaaaaaataactcccagttctgagaagagccataggagtgttggctcttattatctgtcctgatttccatatgttggttgttttctattgcaaaagtaatatagtgtaatatagttcaattatagaaaacatggaaaaatactgaaagggtttaaagaagaaaataaaaatgacttaccatatctctactcaacttaacatttcagtgcaaatccttcctgtcattttatgcaaattaaaatttaaaacctaatttcaatcttactgtaaagagtgttctgtgactcgcttttctgatattactaaatagtgtgcacattttcccttgttaaatatgcctcaaaaacataatgttaatgatggaataatgttccatcatgcaggtggacctcaatttagcttcctgcttattgttactggacatttgaagctgctgtaaatctttgtcaataaatctccatgaatatccctgaccttagcataaaatcctggaaataagattgccgggtccaaagatctacccaaattaaaaatggacacaatttcaagaagtgaattgacctctaaaatagtttacaaatttatattaccaccagcattgaaaatgccttttccccacggattggtctacataagagtgttggttaattttatgtgttgacttgactaggctaaacgatgcccagatagcaggtaaaacattatttctgggtgtgttcgttctgtttctctgggatcccagactaacacaatcatatactttttgaggatgatgatgataacaatgaatgcctgcaacagtgcctggtacacagttgatcctcaatagatacttgatgaatgaataaaatgttctttgtcaagtgtcattagcaactgttgctgtggatgactttgaagtaggcgtgacttggtggatgtagtcaccctctctgggatgccttacctctctttcccttgacctatttcaatcatacatattttttggggctccacatccagctttcatcttccatcaatgccttctttgggcatgccagcccatggagtgctctcccactggcaacatcttgtagcttctgtttttagcactgtagacacaacattatgtggtcatgccgttgtttttcaagctgctgtggcacagtgatgatgtcaaaaatattatacataaaagagttggccaggcatggtggcttacgcctgtaatcccagcactttgggaggccgaggtgggtggatcacgaagtcaagagttcaagaccagcctggccaacatggtgaaaccccatctctacaaaaatacaaaaattagccaggtgtggtggtgtgcacctgtaatcccagctactcgggaggctgagatgaagaattgcttaaacccaggaggcaaaggctgcagtgagccaagatcccgccactgcactccagcactccgctctc

SEQ ID NO: 199545 - DNA, 6392 bp, Homo sapiens
  Payload ID: 19362
  Gene Name: V-set and transmembrane domain containing 4
  Uniprot ID: Q8IW00
  ENST ID: ENST00000332853
  CDS Start-End: 25-987
acagcgccgggcggcggcggggagatgcggctgctggcactggcggcggccgcgctgctggcgcgggctccggctccggaggtctgtgcggccctcaatgtcactgtgtccccggggcccgtggttgactacctggagggggagaatgccactctcctctgccacgtctcccagaaaaggcggaaggacagcttgctggccgtgcgctggttctttgcacactccttcgactcccaggaggccttgatggtgaagatgaccaagctccgggtggtgcagtactatgggaatttcagccgcagcgccaaacggcggaggctgcgcctgctggaggagcagcggggggcgctctacaggctctccgtcttgacactgcagccctccgatcaagggcattacgtctgcagagtccaggaaatcagcaggcacaggaacaagtggacggcctggtccaatggctcctcagccacggaaatgagagtcatttccctcaaagcttctgaagagtcatcctttgagaaaacaaaagagacttgggcattttttgaagatctctatgtgtatgctgtcctcgtgtgctgcgtggggatcctcagcattctgctcttcatgctggtcatcgtctggcagtctgtgtttaacaagcggaaatccagagtgagacattatttggtgaaatgccctcagaacagctcaggggagactgtcactagcgtgaccagcttggccccactacagcccaagaagggcaagaggcagaaggagaagcctgacattcctcccgcagtccctgccaaagctccgatagcccccacgttccataaaccgaagctgctgaaaccacagagaaaagtcacgctgccaaagattgctgaggaaaacttaacctatgccgaactggagctgatcaaaccccaccgggctgccaaaggcgcccccaccagcactgtctacgcccagatcctcttcgaggagaacaagctgtagtacagcgtccacctccaaggttctatttaatacctgccacccagtgatttatgaagccttggagacaaagcccttatgtctgtattttcactcatgccttctgagtggtggggagccccttttcagcagcattctgggtgcctttgaagaggtacaagcctgctctccccaaaagaatcggggccacagctcttgacagatctcccgggacaagatgcgcctgggtttgagccctgagcgtaaggattctgatcctgagagcagccaaggagattttctgctgagccaaaccccttcacatttttctcctctttccccaggttttctttaaaatcgtttttaaatcttaattttactctctactcttcctgtatccacgatacaagctcacagtatatagctagaggaaatgccattatggacccaactgtaagatggcacatatgttggttttccaaggatcagatggcattgccagggccacagccaactgctgattgccagcaccacctgagatggcatctcttgttttaaatagatgcactaaccctgaagattaaggccagaggggcagactgactagagaagtataaggtctgtctctgaatgccatggtgcccacctatgagaccctgaggccgcaggacaagaagaacaccattctagagggcttccagccctttcacaaggtggacctgtactgatagagaaacacactctctaagaagtgcttactcacccttttccaaaggagcacaggtgttggccatcagaagacacactggagcgcatgggcctcttcactgtgtgccaagctcagtcacctctgattcagcccctgaaggtgtctgctgccaggtgccctcagggtaggagagtgggaagtacacgccaagctggaaagtgtgttctgaagaccctcctcttgccaagtgccttgcccattgcaaccttgtgtgtgaattctaatgggtttgaatgggggtcagggtgcatggggaagttgctctgtggacctttgggacacaggaatcttggacttactggcaggggatccattctgaaagcaccatcctgtcaactgtgttattgaggacatttcttgatgtgagtatagtctgggtggctatttactgcccactatagaaattgtttgactatgtagtggaccatgtatatatgataaattatctattttaaacacagctggggtatgagttgtgccctctatatagctgtgtgaacttggctaaatttcttatcccctaatgacctcagactccatgtttgtgtaaagacgacttaacttcccatagaattcttgagggtaaaatgggataatgaatcttgccagttctagaaactgtaaattgctacacaaatgctctgtgttgacattcatgctaaagccagtctgcattttcaaaatgaaaatttcttcactatttaaggctttcattgcaataactttaaaaaccaaatatttgtccaccaacttagccctacagtaatgttcccaaagactcatgagagtttatggtttattggaaagggtccaaattggaagcagatattgattttctgggagcaaactggtctgcctttacaaagtggaagttcaccctctctggataacacctgtgtctcattcctccctctctgccagatctcgaaggcactgaataaaccatgcagcttttgaggaagaaagaaccatttggaagaactcactagaacttctttgagcatctctttgggaggggaggatatatggttagcacaccatttatataataattatcacagggatttttaattttatcatggcagtgttctgacagatgtatagtgttttgagggcagaggatgatctcctaatttgcccaaagagccttatgggtttgtggggctctgggggtgccaaatgggaaggagagggggcacatgaaaaggaaatggcgggaagagggcaacaggccagggggtaatatcttcccaggccccttaggcctctacagaacggaaatgaacttcattcacccccaaacccacccacttaaatccaaagagagcttagggttattatgcatggacaggaacacattctaccaagaacacatgctcttaagagctagtagctcccagttagagtcaaaccagtcattgttatattatagattgaatccagcctctttctcccaaactgtggtcatcactgcatgaatccacactaaggtgtgtgaatgggaacctgcagattatctcctcctactgaaaatgctgcccaggggaatcttggaagctatggacagcatccaggcagagctggtcccactgttatctccagaagcaaatgcccaagctgtgctcagaactggaagcaatggatgacttgtatcaggtgcttgtttgagaggatatattgacattattgccatagtaagcttaaaaaaatgtgcccactcattcattctttgtccatggaccactaatcatgcattgtcatttccaaagataaggggaaacatatcacatatcattgaaatagaaattagggaaagtttgtcaatttgttttcactataaggcatcaatggcagaaactacatatgagtaattttcaaaatagaccattgcttaaatgtttaaatgaagctaaaagaagtatgaacccattggttagagtgcagtggcttctttcaggcagacagcagatgctctcagatttggtggtgagttttggccttggcatggttggcatggagtcagcacaggaagccgggaggtatgaaggggcatccacctgggtgaaactgtcttgccaagccaaagccccgaggcctgccctgaagcagctgtagtggaggagaggcctgggattccttagagtcacctttttacgaatgtaccgccactctgttagctcacagggaaaataaggaaaagccaggcctcccacctcttgactcttgtgagagtgaagacaacatggggcatttagaaaatatatttttagtgtatgataatgtgggctggcccacacagcaatgagcccaaagaccccctcgctttgggaattattcatggccctgctcatcacagcctctgatatgcatgactgtaacctaggctgagccaagaatggagctcatgccagaaatggtcctaagcatgcacatggccccctggaatatcaaaatcctggggagaaagaaatcatctttgccttgggcagtgaagctggaatggcacatatctatctgttgccacatctcctgcctagtggagaagccttggaaggcaacagacactgagcaagcagcagggaggagaatgtcctggaagggcaggactctacccaagtccctaacatccccagactcttctcttccataaactctctaattactctgctgtttaaatcctggttttggtcaagccagtcaggttgcataaagaatatgaatacagtatgcatcaaagttgcttcccagaacaggaagcaaaacaaacaaacaaacaaacaaacaaaatactgatatcagtacccagggtgcccaattaggtcacacccagtggctgcattgcagcccctgagctcctgctgcaccgtgtgtcctgctgcccgagtgggccccaccctgggttctgaagatgcccttcttaatggagagctcccgatggagggctccaggactgatgctctccctaaggaagggaggcctcagatttggagagggacaccaacaggaccagaggaggactgaggggcactggcaccaataagtggaagggaacagcgtggtaacaaaaaagagccatgccacttgcatgctggagggagtctttttgtgtcagcctaaagcttaggctggtgtccatgtggaacatgacatctttccagtatccctgatccaggaaactgcagtgagacccaggtgacccagctctgtgtcatttggagcccattaaaaagtgaggcagccacatggcggggacattgaccccactccagaccacactcccatctccatacataggatagaaactgttcatcaggaaggaaaaccaaacagaaattcgtggtctaggggaggggtctgcattcagcatggccatgctgggctggagtggctgtggggtgtccagatagatgggcatgtagactagtgctttctcaacctttaatgcatgcacaaatcatcgagatcttgttaaaatgtagatcctgggtgggcacggtggctcacgcctgtaatcccagcactttgggaggctgaggcgggcggatcatgaggtcaggagatcgagaccatcctggctaacacggtgaaaccctgtctctactaaaaatacaaaaaattagccaggcatggtggtgggtgcctgtagtcccagctactcgggaggctgaggcaggagaatggcatgaacccgggaggcggagcttgcagtgagccgagatcgtgctgctgcactccagcctgggcaatagagtgagattccgtctcaaaaaaaaaaaaaaaaaaaatgtagatcctggctcaggaggtctgggataggacctgggattctgagtttctaacaagctcccagggatgtccatgcttctggtccctgaaccacactttgagtgacaaggatgtaaactgttggaaacatggatctggtgctcattgcgggaaagggggtgtcctcagggcataggtcacagccaaagccctgacagcgggcaagagtcccagggagaggctgcctgcacattgaggaggggaagggctgggcctgagcagtggggagcatccatgctggcaggtatgcagcaggcaaggagatccaggtggagatcagaggacagtgacagtcacagcagcaggggagagccaggagaaagctgctcctaggggtgtctcaaaggaagaagggatctgcagtgtgaactctgcagagggcagggagaatagaggttaagcctttgctcattctgaattaattgattactgctttttaaaagtgctttctttctctgggaaaaaaaaaacattccccagtgcctaaggctaacagacgtgggcgctgagctgtgtctggtctgctgagtgtattttccccagagcaatcctcatcttctcagggggtggggatttggacaagactcttcctgaacacgcagcgtggtggggaagggtggccatggaggttttctgttccttctgttgtcactggtgaaagacgacttggtgcccaatttctaataaacacaatgctattagcgtcactccaatttagtgtctgattgttaaatgttaatgtactgcactctacagttttaaatataattagagatgtttacagctttggttaaatgcaccttgttcttccacattaaactttattacaagcgtc

SEQ ID NO: 199546 - DNA, 389 bp, Homo sapiens
  Payload ID: 19363
  Gene Name: V-set and transmembrane domain containing 5
  ENST ID: ENST00000398221
  CDS Start-End: 1-61
aagacacaaactcaaagaaagcacaactgaggagattgagctggaagatgttgagtgttagccaaggctgggcctgactgcattcctacctcaagaggaaaccattctccaacaaaaagagcaagcacagctattatacccattgtgtgtggtcctgttgcagcccgctcctaacaggacagtgggagattaacaacattgactgcatggagttgaggactgtggatgggacaaagctagtattaggactcgcgctaagttcaaggagaagagtgattgaggctttgaaccaggagcttcgcttggctgcagcatcagggccgtgctgacacataaccaatggcagtcggaggaaccaggctctgggccaggacagtttccagtgctgt

SEQ ID NO: 199547 - DNA, 2969 bp, Homo sapiens
  Payload ID: 19363
  Gene Name: V-set and transmembrane domain containing 5
  Uniprot ID: A8MXK1
  ENST ID: ENST00000409977
  CDS Start-End: 30-632
ccccggcccgcgaggccccgggctcgcccatgaggcctctgcccagcgggaggaggaagacccgaggcatctccctaggactcttcgccctctgcctggccgcagcccgctgtctgcagagtcagggtgtgtccctatacattcctcaggccaccatcaatgccactgtcaaagaagacatcctgctctcagttgagtactcctgtcatggagtgcccaccatcgaatggacatattcatccaattggggaacgcagaagatcgtggagtggaaaccagggactcaggccaacatctctcaaagccacaaggacagagtctgcacctttgacaacggctccatccagctcttcagcgtgggagtgagggattccggctactatgtcatcaccgtgacggagcgcctggggagcagccagtttggcaccatcgtgctgcacgtctctgagatcctctatgaagacctgcactttgtcgctgtcatccttgcttttctcgctgctgtggccgcagtattaatcagcctcatgtgggtttgtaataagtgtgcatataaatttcagaggaagagaagacacaaactcaaagaaagcacaactgaggagattgagctggaagatgttgagtgttagccaaggctgggcctgactgcattcctacctcaagaggaaaccattctccaacaaaaagagcaagcacagctattatacccattgtgtgtggtcctgttgcagcccgctcctaacaggacagtgggagattaacaacattgactgcatggagttgaggactgtggatgggacaaagctagtattaggactcgcgctaagttcaaggagaagagtgattgaggctttgaaccaggagcttcgcttggctgcagcatcagggccgtgctgacacataaccaatgggtgagtgcaggcgttggctgcttgctcacgacacttgctctggtgtgcaggatggcctgttgtcagagtccctgtatcagaggccagaggatttccagatggatgtgcagccagcattagaacatgctttctgtgctcctgtctgctctgcaactgctgtgccaaccagccccccatctggtatcccacaagcaagcactgctgtgggagctattgtgagaaaacctgaggcttttagacaatctgctgcctcagagcagaggtggaaagagactgggggtgggggttggtgctgttgtgctgcagagtttttcattggtgaggcccggtggctgggagttttatgggagaggagctcaatggactcctgagaggccagctttggatacaaggaatagagaaaattatctttctcttcctccctcattccaacgttaattggattttccctcccatggctcaaacttaggccattgtaagtaaaacaacagctcatctccattatgggcagcacctggcctcctgacgagctggatgccacctgtgtgaaagctgagcttgcatagtgggtgatgcagctggaaaatcagtcatctcgggctttgcatctgtccccctcagtcactaacacttcacgtctcaagtcaggcccttgccctctcctacctgggctgaggaacgcttggcccttgcctacctcacagtcagagtatcaagagaagcccacagtatgcacagagttctctgagcaacttacgaaatgcatgaggcttcttcaaggatctggaaagctatactggaaaacgctattctgagtattagaaattgataaaatcctctgaggtcttggggctccaggtgagattggggactggaccacagctggccttggccattattccctcaggttgttggtcaccatgttcacctgtaagtttctccatcccaacttccatttgacaagctctaaaagcaggcatggatttattttccattctcttatctctccaatattcatagctacagaccaaaggtaccatccgatgatgatgtgttcctagtcctcagttgcaaattcacccatgcaaaggttaagaagtcttagaacattcctttctcttcttcctcctttcaggcctccaatgtccatatcttctctatttcctatgtggcagaggagttgcttggataagttacagccctttccctcaatattgaatccagagttttgggaagggatctctcagaatattcagacaggaactctcagtatccagagcaggactcccaaggcactgcttgattcaaaaggcgacagcagttggtctacacaacggatgtgtagctctagcacctgacaggtagaagataccctcaaggcgcctcctgtagacacacgggtaaactcacacactatgtcctatccccacgcagcagtcggaggaaccaggctctgggccaggacagtttccagtgctgtgaagaaacgaggtgagcagtatccaaggggctcaaggataatctgctgatttctttcttgtctttcacacagagaggccaccagcaggaaagcagtgggagttgggtagctgctggggccagcatgtcctcttccacactacctgcctttcagaactctgctcttccgcttgtcccgaagtcagggctggcaatcttcataatcaaaggggagttggaaaagaacacccactaagaggcctccatggcagatgtcaattaaattgcccccccgcccaaatctcatgacagtttattcacatcagtagtgtgggaagttacaatgttttttttaaaaaaagcttctttccttggctttccatttctttgaaaaaagggtttcttttgaatttttaaagctctgccatactgaacattcctgtggaaaggtttaaaatgcagagcctgaggtttttgcttttcagaaaaataaaaatcttagagattagctagtgtaaatgttaagctataaattatatttcaaactgtgaaaaaaaaaagttttaaagaatgaatgaaataaaacctgaaaataaa

SEQ ID NO: 199548 - DNA, 2289 bp, Homo sapiens
  Payload ID: 19364
  Gene Name: V-set domain containing T cell activation inhibitor 1
  Uniprot ID: Q7Z7D3
  ENST ID: ENST00000328189
  CDS Start-End: 106-606
acactatttaaggccaatacacgggagctggttgtgagtcaccaaggaaggcagcggcagctccactcagccagtacccagatacgctgggaaccttccccagccatggcttccctggggcagatcctcttctggagcataattagcatcatcattattctggctggagcaattgcactcatcattggctttggtatttcagccttcagcatgccggaagtgaatgtggactataatgccagctcagagaccttgcggtgtgaggctccccgatggttcccccagcccacagtggtctgggcatcccaagttgaccagggagccaacttctcggaagtctccaataccagctttgagctgaactctgagaatgtgaccatgaaggttgtgtctgtgctctacaatgttacgatcaacaacacatactcctgtatgattgaaaatgacattgccaaagcaacaggggatatcaaagtgacagaatcggagatcaaaaggcggagtcacctacagctgctaaactcaaaggcttctctgtgtgtctcttctttctttgccatcagctgggcacttctgcctctcagcccttacctgatgctaaaataatgtgcctcggccacaaaaaagcatgcaaagtcattgttacaacagggatctacagaactatttcaccaccagatatgacctagttttatatttctgggaggaaatgaattcatatctagaagtctggagtgagcaaacaagagcaagaaacaaaaagaagccaaaagcagaaggctccaatatgaacaagataaatctatcttcaaagacatattagaagttgggaaaataattcatgtgaactagacaagtgtgttaagagtgataagtaaaatgcacgtggagacaagtgcatccccagatctcagggacctccccctgcctgtcacctggggagtgagaggacaggatagtgcatgttctttgtctctgaatttttagttatatgtgctgtaatgttgctctgaggaagcccctggaaagtctatcccaacatatccacatcttatattccacaaattaagctgtagtatgtaccctaagacgctgctaattgactgccacttcgcaactcaggggcggctgcattttagtaatgggtcaaatgattcactttttatgatgcttccaaaggtgccttggcttctcttcccaactgacaaatgccaaagttgagaaaaatgatcataattttagcataaacagagcagtcggcgacaccgattttataaataaactgagcaccttctttttaaacaaacaaatgcgggtttatttctcagatgatgttcatccgtgaatggtccagggaaggacctttcaccttgtctatatggcattatgtcatcacaagctctgaggcttctcctttccatcctgcgtggacagctaagacctcagttttcaatagcatctagagcagtgggactcagctggggtgatttcgccccccatctccgggggaatgtctgaagacaattttggttacctcaatgagggagtggaggaggatacagtgctactaccaactagtggatagaggccagggatgctgctcaacctcctaccatgtacaggacgtctccccattacaactacccaatccgaagtgtcaactgtgtcagggctaagaaaccctggttttgagtagaaaagggcctggaaagaggggagccaacaaatctgtctgcttcctcacattagtcattggcaaataagcattctgtctctttggctgctgcctcagcacagagagccagaactctatcgggcaccaggataacatctctcagtgaacagagttgacaaggcctatgggaaatgcctgatgggattatcttcagcttgttgagcttctaagtttctttcccttcattctaccctgcaagccaagttctgtaagagaaatgcctgagttctagctcaggttttcttactctgaatttagatctccagaccctgcctggccacaattcaaattaaggcaacaaacatataccttccatgaagcacacacagacttttgaaagcaaggacaatgactgcttgaattgaggccttgaggaatgaagctttgaaggaaaagaatactttgtttccagcccccttcccacactcttcatgtgttaaccactgccttcctggaccttggagccacggtgactgtattacatgttgttatagaaaactgattttagagttctgatcgttcaagagaatgattaaatatacatttcctacacc

SEQ ID NO: 199549 - DNA, 2581 bp, Homo sapiens
  Payload ID: 19364
  Gene Name: V-set domain containing T cell activation inhibitor 1
  ENST ID: ENST00000359008
  CDS Start-End: 40-897
ctgcaattgtgtccggaatttattccttctggtgggttcatggtcttgctgacttcaagaatgaagccgctgacctcgcgcataattagcatcatcattattctggctggagcaattgcactcatcattggctttggtatttcagggagacactccatcacagtcactactgtcgcctcagctgggaacattggggaggatggaatcctgagctgcacttttgaacctgacatcaaactttctgatatcgtgatacaatggctgaaggaaggtgttttaggcttggtccatgagttcaaagaaggcaaagatgagctgtcggagcaggatgaaatgttcagaggccggacagcagtgtttgctgatcaagtgatagttggcaatgcctctttgcggctgaaaaacgtgcaactcacagatgctggcacctacaaatgttatatcatcacttctaaaggcaaggggaatgctaaccttgagtataaaactggagccttcagcatgccggaagtgaatgtggactataatgccagctcagagaccttgcggtgtgaggctccccgatggttcccccagcccacagtggtctgggcatcccaagttgaccagggagccaacttctcggaagtctccaataccagctttgagctgaactctgagaatgtgaccatgaaggttgtgtctgtgctctacaatgttacgatcaacaacacatactcctgtatgattgaaaatgacattgccaaagcaacaggggatatcaaagtgacagaatcggagatcaaaaggcggagtcacctacagctgctaaactcaaaggcttctctgtgtgtctcttctttctttgccatcagctgggcacttctgcctctcagcccttacctgatgctaaaataatgtgcctcggccacaaaaaagcatgcaaagtcattgttacaacagggatctacagaactatttcaccaccagatatgacctagttttatatttctgggaggaaatgaattcatatctagaagtctggagtgagcaaacaagagcaagaaacaaaaagaagccaaaagcagaaggctccaatatgaacaagataaatctatcttcaaagacatattagaagttgggaaaataattcatgtgaactagacaagtgtgttaagagtgataagtaaaatgcacgtggagacaagtgcatccccagatctcagggacctccccctgcctgtcacctggggagtgagaggacaggatagtgcatgttctttgtctctgaatttttagttatatgtgctgtaatgttgctctgaggaagcccctggaaagtctatcccaacatatccacatcttatattccacaaattaagctgtagtatgtaccctaagacgctgctaattgactgccacttcgcaactcaggggcggctgcattttagtaatgggtcaaatgattcactttttatgatgcttccaaaggtgccttggcttctcttcccaactgacaaatgccaaagttgagaaaaatgatcataattttagcataaacagagcagtcggcgacaccgattttataaataaactgagcaccttctttttaaacaaacaaatgcgggtttatttctcagatgatgttcatccgtgaatggtccagggaaggacctttcaccttgtctatatggcattatgtcatcacaagctctgaggcttctcctttccatcctgcgtggacagctaagacctcagttttcaatagcatctagagcagtgggactcagctggggtgatttcgccccccatctccgggggaatgtctgaagacaattttggttacctcaatgagggagtggaggaggatacagtgctactaccaactagtggatagaggccagggatgctgctcaacctcctaccatgtacaggacgtctccccattacaactacccaatccgaagtgtcaactgtgtcagggctaagaaaccctggttttgagtagaaaagggcctggaaagaggggagccaacaaatctgtctgcttcctcacattagtcattggcaaataagcattctgtctctttggctgctgcctcagcacagagagccagaactctatcgggcaccaggataacatctctcagtgaacagagttgacaaggcctatgggaaatgcctgatgggattatcttcagcttgttgagcttctaagtttctttcccttcattctaccctgcaagccaagttctgtaagagaaatgcctgagttctagctcaggttttcttactctgaatttagatctccagaccctgcctggccacaattcaaattaaggcaacaaacatataccttccatgaagcacacacagacttttgaaagcaaggacaatgactgcttgaattgaggccttgaggaatgaagctttgaaggaaaagaatactttgtttccagcccccttcccacactcttcatgtgttaaccactgccttcctggaccttggagccacggtgactgtattacatgttgttatagaaaactgattttagagttctgatcgttcaagagaatgattaaatatacatttcctacacca

SEQ ID NO: 199550 - DNA, 2612 bp, Homo sapiens
  Payload ID: 19364
  Gene Name: V-set domain containing T cell activation inhibitor 1
  Uniprot ID: Q7Z7D3
  ENST ID: ENST00000369458
  CDS Start-End: 80-928
gctggttgtgagtcaccaaggaaggcagcggcagctccactcagccagtacccagatacgctgggaaccttccccagccatggcttccctggggcagatcctcttctggagcataattagcatcatcattattctggctggagcaattgcactcatcattggctttggtatttcagggagacactccatcacagtcactactgtcgcctcagctgggaacattggggaggatggaatcctgagctgcacttttgaacctgacatcaaactttctgatatcgtgatacaatggctgaaggaaggtgttttaggcttggtccatgagttcaaagaaggcaaagatgagctgtcggagcaggatgaaatgttcagaggccggacagcagtgtttgctgatcaagtgatagttggcaatgcctctttgcggctgaaaaacgtgcaactcacagatgctggcacctacaaatgttatatcatcacttctaaaggcaaggggaatgctaaccttgagtataaaactggagccttcagcatgccggaagtgaatgtggactataatgccagctcagagaccttgcggtgtgaggctccccgatggttcccccagcccacagtggtctgggcatcccaagttgaccagggagccaacttctcggaagtctccaataccagctttgagctgaactctgagaatgtgaccatgaaggttgtgtctgtgctctacaatgttacgatcaacaacacatactcctgtatgattgaaaatgacattgccaaagcaacaggggatatcaaagtgacagaatcggagatcaaaaggcggagtcacctacagctgctaaactcaaaggcttctctgtgtgtctcttctttctttgccatcagctgggcacttctgcctctcagcccttacctgatgctaaaataatgtgcctcggccacaaaaaagcatgcaaagtcattgttacaacagggatctacagaactatttcaccaccagatatgacctagttttatatttctgggaggaaatgaattcatatctagaagtctggagtgagcaaacaagagcaagaaacaaaaagaagccaaaagcagaaggctccaatatgaacaagataaatctatcttcaaagacatattagaagttgggaaaataattcatgtgaactagacaagtgtgttaagagtgataagtaaaatgcacgtggagacaagtgcatccccagatctcagggacctccccctgcctgtcacctggggagtgagaggacaggatagtgcatgttctttgtctctgaatttttagttatatgtgctgtaatgttgctctgaggaagcccctggaaagtctatcccaacatatccacatcttatattccacaaattaagctgtagtatgtaccctaagacgctgctaattgactgccacttcgcaactcaggggcggctgcattttagtaatgggtcaaatgattcactttttatgatgcttccaaaggtgccttggcttctcttcccaactgacaaatgccaaagttgagaaaaatgatcataattttagcataaacagagcagtcggcgacaccgattttataaataaactgagcaccttctttttaaacaaacaaatgcgggtttatttctcagatgatgttcatccgtgaatggtccagggaaggacctttcaccttgtctatatggcattatgtcatcacaagctctgaggcttctcctttccatcctgcgtggacagctaagacctcagttttcaatagcatctagagcagtgggactcagctggggtgatttcgccccccatctccgggggaatgtctgaagacaattttggttacctcaatgagggagtggaggaggatacagtgctactaccaactagtggatagaggccagggatgctgctcaacctcctaccatgtacaggacgtctccccattacaactacccaatccgaagtgtcaactgtgtcagggctaagaaaccctggttttgagtagaaaagggcctggaaagaggggagccaacaaatctgtctgcttcctcacattagtcattggcaaataagcattctgtctctttggctgctgcctcagcacagagagccagaactctatcgggcaccaggataacatctctcagtgaacagagttgacaaggcctatgggaaatgcctgatgggattatcttcagcttgttgagcttctaagtttctttcccttcattctaccctgcaagccaagttctgtaagagaaatgcctgagttctagctcaggttttcttactctgaatttagatctccagaccctgcctggccacaattcaaattaaggcaacaaacatataccttccatgaagcacacacagacttttgaaagcaaggacaatgactgcttgaattgaggccttgaggaatgaagctttgaaggaaaagaatactttgtttccagcccccttcccacactcttcatgtgttaaccactgccttcctggaccttggagccacggtgactgtattacatgttgttatagaaaactgattttagagttctgatcgttcaagagaatgattaaatatacatttcctacacca

SEQ ID NO: 199551 - DNA, 2719 bp, Homo sapiens
  Payload ID: 19364
  Gene Name: V-set domain containing T cell activation inhibitor 1
  Uniprot ID: Q7Z7D3
  ENST ID: ENST00000539893
  CDS Start-End: 473-1036
ctggtaatctgtggcgtaacaagacctccaggtgattctctgtattagcagccgctctgtgctccctgattcctccagaaaagcacaaggatttaatccagatagatataaatttcacctgggatcatttatcattccacattcttctttaagaaatgtgctaaagagccacagatgggtcttgatgaaaacaaaggaaaagccatgaagtttctacagcataattagcatcatcattattctggctggagcaattgcactcatcattggctttggtatttcagggagacactccatcacagtcactactgtcgcctcagctgggaacattggggaggatggaatcctgagctgcacttttgaacctgacatcaaactttctgatatcgtgatacaatggctgaaggaaggtgttttaggcttggtccatgagttcaaagaaggcaaagatgagctgtcggagcaggatgaaatgttcagaggccggacagcagtgtttgctgatcaagtgatagttggcaatgcctctttgcggctgaaaaacgtgcaactcacagatgctggcacctacaaatgttatatcatcacttctaaaggcaaggggaatgctaaccttgagtataaaactggagccttcagcatgccggaagtgaatgtggactataatgccagctcagagaccttgcggtgtgaggctccccgatggttcccccagcccacagtggtctgggcatcccaagttgaccagggagccaacttctcggaagtctccaataccagctttgagctgaactctgagaatgtgaccatgaaggttgtgtctgtgctctacaatgttacgatcaacaacacatactcctgtatgattgaaaatgacattgccaaagcaacaggggatatcaaagtgacagaatcggagatcaaaaggcggagtcacctacagctgctaaactcaaaggcttctctgtgtgtctcttctttctttgccatcagctgggcacttctgcctctcagcccttacctgatgctaaaataatgtgcctcggccacaaaaaagcatgcaaagtcattgttacaacagggatctacagaactatttcaccaccagatatgacctagttttatatttctgggaggaaatgaattcatatctagaagtctggagtgagcaaacaagagcaagaaacaaaaagaagccaaaagcagaaggctccaatatgaacaagataaatctatcttcaaagacatattagaagttgggaaaataattcatgtgaactagacaagtgtgttaagagtgataagtaaaatgcacgtggagacaagtgcatccccagatctcagggacctccccctgcctgtcacctggggagtgagaggacaggatagtgcatgttctttgtctctgaatttttagttatatgtgctgtaatgttgctctgaggaagcccctggaaagtctatcccaacatatccacatcttatattccacaaattaagctgtagtatgtaccctaagacgctgctaattgactgccacttcgcaactcaggggcggctgcattttagtaatgggtcaaatgattcactttttatgatgcttccaaaggtgccttggcttctcttcccaactgacaaatgccaaagttgagaaaaatgatcataattttagcataaacagagcagtcggcgacaccgattttataaataaactgagcaccttctttttaaacaaacaaatgcgggtttatttctcagatgatgttcatccgtgaatggtccagggaaggacctttcaccttgtctatatggcattatgtcatcacaagctctgaggcttctcctttccatcctgcgtggacagctaagacctcagttttcaatagcatctagagcagtgggactcagctggggtgatttcgccccccatctccgggggaatgtctgaagacaattttggttacctcaatgagggagtggaggaggatacagtgctactaccaactagtggatagaggccagggatgctgctcaacctcctaccatgtacaggacgtctccccattacaactacccaatccgaagtgtcaactgtgtcagggctaagaaaccctggttttgagtagaaaagggcctggaaagaggggagccaacaaatctgtctgcttcctcacattagtcattggcaaataagcattctgtctctttggctgctgcctcagcacagagagccagaactctatcgggcaccaggataacatctctcagtgaacagagttgacaaggcctatgggaaatgcctgatgggattatcttcagcttgttgagcttctaagtttctttcccttcattctaccctgcaagccaagttctgtaagagaaatgcctgagttctagctcaggttttcttactctgaatttagatctccagaccctgcctggccacaattcaaattaaggcaacaaacatataccttccatgaagcacacacagacttttgaaagcaaggacaatgactgcttgaattgaggccttgaggaatgaagctttgaaggaaaagaatactttgtttccagcccccttcccacactcttcatgtgttaaccactgccttcctggaccttggagccacggtgactgtattacatgttgttatagaaaactgattttagagttctgatcgttcaagagaatgattaaatatacatttcctacacc

SEQ ID NO: 199552 - DNA, 569 bp, Homo sapiens
  Payload ID: 19364
  Gene Name: V-set domain containing T cell activation inhibitor 1
  ENST ID: ENST00000430871
  CDS Start-End: 73-336
gtgagtcaccaaggaaggcagcggcagctccactcagccagtacccagatacgctgggaaccttccccagccatggcttccctggggcagatcctcttctggagcataattagcatcatcattattctggctggagcaattgcactcatcattggctttggtatttcagaagtctctgtctggctttcagcaatgaagggtttgtgtagaagttccaaggcttcccttagcattgatctttgcttcctgaactgcagggagacactccatcacagtcactactgtcgcctcagctgggaacattggggaggatggaatcctgagctgcacttttgaacctgacatcaaactttctgatatcgtgatacaatggctgaaggaaggtgttttaggcttggtccatgagttcaaagaaggcaaagatgagctgtcggagcaggatgaaatgttcagaggccggacagcagtgtttgctgatcaagtgatagttggcaatgcctctttgcggctgaaaaacgtgcaactcacagatgctggcacctacaaatgttatatcatcacttctaaag

SEQ ID NO: 199553 - DNA, 1534 bp, Homo sapiens
  Payload ID: 19365
  Gene Name: WAP four-disulfide core domain 1
  Uniprot ID: Q9HC57
  ENST ID: ENST00000219454
  CDS Start-End: 327-989
gacaggccactcccggccacgtctccaagcaagccggtgccccctcctcctgctgccaccgcccactgagctgcctgggctgcagacgccctggttggagcgtctggggccagatgttatagggcaagctaaaaataaccgggcaggccagccaccatcgaggaaggggcatgtgctggacgcggacacatgatccgagggaccctgctgggtggaactaagaaagtccagcagactgtgcacgctcctgtccccactcacaggcccacgcagcgaggggggcccctcttctgtgtgcgtctggaaggtcgctgcccagggaggaaatgcctttaaccggcgtggggccgggcagctgcaggaggcagatcatccgggctctgtgcctcttgctacttctcctccacgccggctctgccaagaatatctggaaacgggcattgcctgcgaggctggccgagaaatcccgtgccgaggaggcgggcgcgcccggcggcccccggcagccccgagcagaccgctgcccgccgcctccgcggacgctgccccccggcgcctgccaggccgcgcgctgtcaggcggactccgagtgcccgcggcaccggcgctgctgctacaacggatgcgcctacgcctgcctagaagctgtgccgcccccgccagtcttagactggctggtgcagccgaaacctcgatggcttggtggcaatggctggctcctggatggccctgaggaggtgttacaagcagaggcgtgcagcaccacggaggatggggccgaacccctgctctgtccctcgggctatgagtgccacatcctgagcccaggtgacgtggccgaaggtatccccaaccgtgggcagtgcgtcaagcagcgccggcaagcagatgggcgaatcctacgacacaaactttacaaagaatatccagaaggtgactcaaagaatgtggcagaacctggaaggggacaacagaagcactttcagtaaagcaacggcaagcagctaggttgcaagaacattcctctactttctgctaagccttggaaacagttgggaaaagtagtttgaccctcacagttcacattcagctcagcagagcaagaccccagagatgcttagagacaggacacctggccatcaaacccagtttggcccagcctggttgggtgactttgtgggagccacttaacagctctgggtccctgttttaccatcctgggagcaaggccctgcagctccacgagacctttaccccgggaagaagccgccacccatgaaagcatttctgaagcccctttctaagacaaggctcagcatcttgatatttttgacagattcctcccaagtctggctctgggaggtatgtacccatctcaaatgttcccaagataaattcatccttcaggaaatggaaatgaacttgcttactaatgtgtgattcctagttgtagccaccggatgtgctgaggcctaaatgttagcaggtgggaggaggccacagaacaataaaaacaaccaaataagatgccgag

SEQ ID NO: 199554 - DNA, 1319 bp, Homo sapiens
  Payload ID: 19365
  Gene Name: WAP four-disulfide core domain 1
  Uniprot ID: Q9HC57
  ENST ID: ENST00000568638
  CDS Start-End: 127-789
gaccctgctgggtggaactaagaaagtccagcagactgtgcacgctcctgtccccactcacaggcccacgcagcgaggggggcccctcttctgtgtgcgtctggaaggtcgctgcccagggaggaaatgcctttaaccggcgtggggccgggcagctgcaggaggcagatcatccgggctctgtgcctcttgctacttctcctccacgccggctctgccaagaatatctggaaacgggcattgcctgcgaggctggccgagaaatcccgtgccgaggaggcgggcgcgcccggcggcccccggcagccccgagcagaccgctgcccgccgcctccgcggacgctgccccccggcgcctgccaggccgcgcgctgtcaggcggactccgagtgcccgcggcaccggcgctgctgctacaacggatgcgcctacgcctgcctagaagctgtgccgcccccgccagtcttagactggctggtgcagccgaaacctcgatggcttggtggcaatggctggctcctggatggccctgaggaggtgttacaagcagaggcgtgcagcaccacggaggatggggccgaacccctgctctgtccctcgggctatgagtgccacatcctgagcccaggtgacgtggccgaaggtatccccaaccgtgggcagtgcgtcaagcagcgccggcaagcagatgggcgaatcctacgacacaaactttacaaagaatatccagaaggtgactcaaagaatgtggcagaacctggaaggggacaacagaagcactttcagtaaagcaacggcaagcaggttgcaagaacattcctctactttctgctaagccttggaaacagttgggaaaagtagtttgaccctcacagttcacattcagctcagcagagcaagaccccagagatgcttagagacaggacacctggccatcaaacccagtttggcccagcctggttgggtgactttgtgggagccacttaacagctctgggtccctgttttaccatcctgggagcaaggccctgcagctccacgagacctttaccccgggaagaagccgccacccatgaaagcatttctgaagcccctttctaagacaaggctcagcatcttgatatttttgacagattcctcccaagtctggctctgggaggtatgtacccatctcaaatgttcccaagataaattcatccttcaggaaatggaaatgaacttgcttactaatgtgtgattcctagttgtagccaccggatgtgctgaggcctaaatgttagcaggtgggaggaggccacagaacaataaaaacaaccaaat

SEQ ID NO: 199555 - DNA, 549 bp, Homo sapiens
  Payload ID: 19365
  Gene Name: WAP four-disulfide core domain 1
  ENST ID: ENST00000613603
  CDS Start-End: 29-229
gtctggaaggtcgctgcccagggaggaaatgcctttaaccggcgtggggccgggcagctgcaggaggcagatcatccgggctctgtgcctcttgctacttctcctccacgccggctctgccaagaatatctggaaacgggcattgcctgcgaggctggccgagaaatcccgtgtaagtgcctgggatggggaggctggggcagcctgtgtgggtgggagtcagccttgaggagaggcgatccctagacactgccttctcctgtaagtgctcccccaaaacgtggcaaggcaggcgtcttcctatccgtgtgtgtctgagttgtgtggtgggcagatggggctcacccccaaaaaaggacccttatctgtgaatcaagaggcaaaagacacatcacaaatgtgccaaagaatcgtgccttacttttgccttgttacaaaagtatgcttgctcctgaaagacagcatctcatttcggaaccccaggatttaaacggagcattccgtctccctgatcagtaccaaatgtttgtgaaatacacttatgcattc

SEQ ID NO: 199556 - DNA, 706 bp, Homo sapiens
  Payload ID: 19366
  Gene Name: WAP four-disulfide core domain 10A
  Uniprot ID: Q9H1F0
  ENST ID: ENST00000372643
  CDS Start-End: 289-528
aaagcagaaataaatgatatctttcattctatcggcaagaacacaagactggttatgtgaaaggaggaggcgtcattcctgcggaagccctatcccacatgacgaacgacaaggccaggggcaagcaaaaagaggaaggactctcttgctctgctccgacttggccagtagaggcagtgaggagctaaagatcattccttctttccttccttcactctccgtagacagctctgcagggaagtctgtgacaacctggccagacatagggctcacgatctgatcagagtcatggcaccccagactctgctgcctgtcctggttctctgtgtgctgctgctgcaggcccagggaggataccgtgacaagaagaggatgcagaaaacacagctatccccagaaatcaaagtctgccagcagcagcctaaactatatctatgcaaacacttatgtgaatctcaccgagattgtcaagcaaataacatatgctgttctacctactgtgggaatgtttgcatgagcatcctgtgagtgggagagtgggctgggatgtgcatcctgcttcccaactcctctatccaagactgtgcccacatccgaagcacaaggacctcaagtcaccagcataagaacatcaacaggaatgccgccctctctactgtctgaaccccttgtccctgtcaaataaaccagaacaaatgcccaggga

SEQ ID NO: 199557 - DNA, 630 bp, Homo sapiens
  Payload ID: 19367
  Gene Name: WAP four-disulfide core domain 10B
  Uniprot ID: Q8IUB3
  ENST ID: ENST00000330523
  CDS Start-End: 232-453
agagcccaagaacactggtggccaaaggatggtgtcttgtgaaaggagggcaagcaaaagtgtaggacaaattttgctttgggattttggttacacctgcagactatcccacagaaggaggaacagcactgaaatcctttctcgcaatcttcctgcattgtacacaggcagctctgcagggaagtctgtgactgcctggccagacttagggctcacgctctggtcagagttatggcaccccagactctgctgcttgtcctggttctctgtgtgctgctgctgcaggcccagggaggataccgtgacaagatgaggatgcagagaatcaaggtctgtgagaagcgacccagcatagatctatgcatccaccactgttcatatttccaaaagtgtgaaacaaataagatatgctgttcagccttctgtgggaacatttgtatgagcatcctatgagtgggagagtgggctgggatgtgcatcctgctccctgaacccttccatccgagactgtgcccacatccgaagcacaaggacatcaaatcatcagcacaagaacatcaacaggaatgccaccctccccagtgtctgaactccctgtccctgtcaaataaaccagaacaaatgcccatg

SEQ ID NO: 199558 - DNA, 475 bp, Homo sapiens
  Payload ID: 19367
  Gene Name: WAP four-disulfide core domain 10B
  Uniprot ID: Q8IUB3
  ENST ID: ENST00000335769
  CDS Start-End: 29-298
agagcccaagaacactggtggccaaaggatggtgtcttgtgaaaggagggcaagcaaaagtgtaggacaaattttgctttgggattttggttacacctgcagactatcccacagaaggaggaacagcactgaaatcctttctcgcaatcttcctgcattgtacacaggaatcaaggtctgtgagaagcgacccagcatagatctatgcatccaccactgttcatatttccaaaagtgtgaaacaaataagatatgctgttcagccttctgtgggaacatttgtatgagcatcctatgagtgggagagtgggctgggatgtgcatcctgctccctgaacccttccatccgagactgtgcccacatccgaagcacaaggacatcaaatcatcagcacaagaacatcaacaggaatgccaccctccccagtgtctgaactccctgtccctgtcaaataaaccagaacaaatgcccatg

SEQ ID NO: 199559 - DNA, 614 bp, Homo sapiens
  Payload ID: 19368
  Gene Name: WAP four-disulfide core domain 11
  Uniprot ID: Q8NEX6
  ENST ID: ENST00000324384
  CDS Start-End: 196-459
ttctttatatgtctggtagaatttggctgtgaatccatctggtccagggccttttctggttggggctccatggttcctagaggcaaggaagaagagccaccagtcaaataggtttcagcacctccaactccaacatcttcaaagcagcgactgggaagaaaaataatccttctgacaacacatattcagacacatatggtcagcctcatgaagctctggatacccatgctcatgacattcttctgtacggtgctactgtctgtgctgggagaaatgaggaagaaaagatatgacaggaaggaattgttacttgaagaatgctggggaaagccaaatgtcaaagaatgtaccaataagtgttctaaagcctttagatgtaaagacaaaaattacacatgctgctggacctattgtggaaacatctgctggataaacgtcgaaaccagtggagattactaaaaccgtagcttcccaccaggctgccacctgtgtgggctgggaaatgtttaagaggtctcatagtagtaccctgtggctacttttaggaacaccagtctatttttactgagagctggacaacagcaaacacttgacaaataaacttatttaccagt

SEQ ID NO: 199560 - DNA, 642 bp, Homo sapiens
  Payload ID: 19368
  Gene Name: WAP four-disulfide core domain 11
  Uniprot ID: Q8NEX6
  ENST ID: ENST00000356562
  CDS Start-End: 223-486
ggaataatttcagtaggattggcaccagctcttctttatatgtctggtagaatttggctgtgaatccatctggtccagggccttttctggggctccatggttcctagaggcaaggaagaagagccaccagtcaaataggtttcagcacctccaactccaacatcttcaaagcagcgactgggaagaaaaataatccttctgacaacacatattcagacacatatggtcagcctcatgaagctctggatacccatgctcatgacattcttctgtacggtgctactgtctgtgctgggagaaatgaggaagaaaagatatgacaggaaggaattgttacttgaagaatgctggggaaagccaaatgtcaaagaatgtaccaataagtgttctaaagcctttagatgtaaagacaaaaattacacatgctgctggacctattgtggaaacatctgctggataaacgtcgaaaccagtggagattactaaaaccgtagcttcccaccaggctgccacctgtgtgggctgggaaatgtttaagaggtctcatagtagtaccctgtggctacttttaggaacaccagtctatttttactgagagctggacaacagcaaacacttgacaaataaacttatttaccagta

SEQ ID NO: 199561 - DNA, 561 bp, Homo sapiens
  Payload ID: 19368
  Gene Name: WAP four-disulfide core domain 11
  Uniprot ID: Q8NEX6
  ENST ID: ENST00000618797
  CDS Start-End: 142-405
ctgtgcaggggctccatggttcctagaggcaaggaagaagagccaccagtcaaataggtttcagcacctccaactccaacatcttcaaagcagcgactgggaagaaaaataatccttctgacaacacatattcagacacatatggtcagcctcatgaagctctggatacccatgctcatgacattcttctgtacggtgctactgtctgtgctgggagaaatgaggaagaaaagatatgacaggaaggaattgttacttgaagaatgctggggaaagccaaatgtcaaagaatgtaccaataagtgttctaaagcctttagatgtaaagacaaaaattacacatgctgctggacctattgtggaaacatctgctggataaacgtcgaaaccagtggagattactaaaaccgtagcttcccaccaggctgccacctgtgtgggctgggaaatgtttaagaggtctcatagtagtaccctgtggctacttttaggaacaccagtctatttttactgagagctggacaacagcaaacacttgacaaataaacttatttaccagta

SEQ ID NO: 199562 - DNA, 775 bp, Homo sapiens
  Payload ID: 19369
  Gene Name: WAP four-disulfide core domain 12
  Uniprot ID: Q8WWY7
  ENST ID: ENST00000372785
  CDS Start-End: 19-354
aagcacctgcctggcaacatggggtccagcagcttcttggtcctcatggtgtctctcgttcttgtgaccctggtggctgtggaaggagttaaagagggtatagagaaagcaggggtttgcccagctgacaacgtacgctgcttcaagtccgatcctccccagtgtcacacagaccaggactgtctgggggaaaggaagtgttgttacctgcactgtggcttcaagtgtgtgattcctgtgaaggaactggaagaaggaggaaacaaggatgaagatgtgtcaaggccataccctgagccaggatgggaggccaagtgtccaggctcctcctctaccaggtgtcctcagaaatgatgctgggtcctttctacctctgggggtcactctcacttggcacctgcccctgagggtcctgagacttggaatatggaagaagcaatacccaaccccaccaaagaaaacctgagcttgaagtccttttccccaaaaagagggaagagtcacaaaaagtccagaccccagggacggtactttccctctctacctggtgctcctccctaatgctcatgaatggacccctcatgaatgaaaccagtgcccttataagagaccccaaagagctgccttgcccttctgcaatgtgtgatcacagctagaaggcactgtcagagaagagaaactggtcctcaccagatgctgaatctgctggtgccttgatcttggacttcccagcctctagaactgtaagaaataaatatttgctgtttataatcca

SEQ ID NO: 199563 - DNA, 1372 bp, Homo sapiens
  Payload ID: 19370
  Gene Name: WAP four-disulfide core domain 13
  Uniprot ID: Q8IUB5
  ENST ID: ENST00000305479
  CDS Start-End: 109-390
cacactgggcctccactttgccctctttccttctcttctcctcacagcagtgcctggtcaaacccagcaacccttggccagaacttactcacccatcccactgacaccatgaagcctgtgctgcctctccagttcctggtggtgttctgcctagcactgcagctggtgcctgggagtcccaagcagcgtgttctgaagtatatcttggaacctccaccctgcatatcagcacctgaaaactgtactcacctgtgtacaatgcaggaagattgcgagaaaggatttcagtgctgttcctccttctgtgggatagtctgttcatcagaaacatttcaaaagcgcaacagaatcaaacacaagggctcagaagtcatcatgcctgccaactgaggcatatttcctagatcattttgcctctacgatgttttttcttggtccacctttaggaaggtattgagaagcaagaaactggaggcccaatatctaacctgcaaatcgtttttgagtttggcaataaaggctaatctaccataaaactcttgaagcttaagctttaggtcaacacttgcaagagccccttccaaagctcagcacagtttcctcctgggatgaggagaggaatcagaaaccccactttggcatagagacaagcagcactgttccagtccagggatgctgtgtgtgccctggtggtggtcttaaggacctaccacatcaacatctggacaaccctcactgattacctgcccttggttgcactcatcaggctaattgatcccatatttaacctcaaggagaaatatcaaccagacactgcatggcaacctccttggggccagccttcaaggcttcatggccatatcatgaacccaggacaggcacagtgggggtggtgaggacctgatagagttggatcagtgactaagaggctgcaataaggtgccatgaaatcaaaatcaaagggctagaactctccaaggtcttgcccccggcatgtagcaccacctgagccagaaactgcagaggacatgacagtgtggcattactgataagttatggaaatggaaataatctttcctaaactaccaataataactttaaatttttgatcaaccatgctagagcaaagattgaattatccttctgttctctctacagaaatgatataaaaactatagtcataagaagagacaatcaaaaataatcagccataaaatattaaaaaggtattataaaggtatttaaaataataataataaagtgttattttcctgggattcatgatatttgatatattcgtaagcttttgttaagtttgtaatttgttgcaatttctttttcatttcaaataaatattcacttacgtgtctaa

SEQ ID NO: 199564 - DNA, 356 bp, Homo sapiens
  Payload ID: 19371
  Gene Name: WAP four-disulfide core domain 2
  Uniprot ID: Q14508
  ENST ID: ENST00000217425
  CDS Start-End: 27-335
cctgcaccccgcccgggcatagcaccatgcctgcttgtcgcctaggcccgctagccgccgccctcctcctcagcctgctgctgttcggcttcaccctagtctcaggcacaggagcagagaagactggcgtgtgccccgagctccaggctgaccagaactgcacgcaagagtgcgtctcggacagcgaatgcgccgacaacctcaagtgctgcagcgcgggctgtgccaccttctgctctctgcccaatgcactgttccactggcacctaaagacacggaggctctgggagatttctggccctaggccacgaaggcccacttgggactcaagctgaggtcctgtgattccatttggg

SEQ ID NO: 199565 - DNA, 420 bp, Homo sapiens
  Payload ID: 19371
  Gene Name: WAP four-disulfide core domain 2
  Uniprot ID: Q14508
  ENST ID: ENST00000339946
  CDS Start-End: 27-257
cctgcaccccgcccgggcatagcaccatgcctgcttgtcgcctaggcccgctagccgccgccctcctcctcagcctgctgctgttcggcttcaccctagtctcagataaggagggttcctgcccccaggtgaacattaactttccccagctcggcctctgtcgggaccagtgccaggtggacagccagtgtcctggccagatgaaatgctgccgcaatggctgtgggaaggtgtcctgtgtcactcccaatttctgagctccagccaccaccaggctgagcagtgaggagagaaagtttctgcctggccctgcatctggttccagcccacctgccctcccctttttcgggactctgtattccctcttgggctgaccacagcttctccctttcccaaccaataaagtaaccactttcagca

SEQ ID NO: 199566 - DNA, 818 bp, Homo sapiens
  Payload ID: 19371
  Gene Name: WAP four-disulfide core domain 2
  Uniprot ID: Q14508
  ENST ID: ENST00000342873
  CDS Start-End: 434-655
agatccctccccttcttttaggattattgtgagaattagaagagttaatatatgttaggggcttgatacctggcatgtaataagagctaattaagtgttcactgttataatttctcataactacagagtagtttgatatttcagggagaaataatatatgtttgtttcccactgctttcacaacaaccctatgttgtaattagcactgttccactggcacctaaagacacggaggctctgggagatttctggccctaggccacgaaggcccacttgggactcaagctgaggtcctgtgattccatttgggagcaggaggagggatttgcaggtgatcttcctgggcctcctgagagcagctcaggtgcccaagatggactcaggcaggcagctctgctgtatgtgaagcccagtgaggggcagtgggggggccatgctgcaggtacaagttaatctccctgtatcgcctctgcccacttacccttactcctttttctacccagataaggagggttcctgcccccaggtgaacattaactttccccagctcggcctctgtcgggaccagtgccaggtggacagccagtgtcctggccagatgaaatgctgccgcaatggctgtgggaaggtgtcctgtgtcactcccaatttctgagctccagccaccaccaggctgagcagtgaggagagaaagtttctgcctggccctgcatctggttccagcccacctgccctcccctttttcgggactctgtattccctcttgggctgaccacagcttctccctttcccaaccaataaagtaaccactttcagca

SEQ ID NO: 199567 - DNA, 614 bp, Homo sapiens
  Payload ID: 19371
  Gene Name: WAP four-disulfide core domain 2
  Uniprot ID: Q14508
  ENST ID: ENST00000372676
  CDS Start-End: 77-451
ccccctcccgcgcgcgcggttaaatccccgcacctgagcatcggctcacacctgcaccccgcccgggcatagcaccatgcctgcttgtcgcctaggcccgctagccgccgccctcctcctcagcctgctgctgttcggcttcaccctagtctcaggcacaggagcagagaagactggcgtgtgccccgagctccaggctgaccagaactgcacgcaagagtgcgtctcggacagcgaatgcgccgacaacctcaagtgctgcagcgcgggctgtgccaccttctgctctctgcccaatgataaggagggttcctgcccccaggtgaacattaactttccccagctcggcctctgtcgggaccagtgccaggtggacagccagtgtcctggccagatgaaatgctgccgcaatggctgtgggaaggtgtcctgtgtcactcccaatttctgagctccagccaccaccaggctgagcagtgaggagagaaagtttctgcctggccctgcatctggttccagcccacctgccctcccctttttcgggactctgtattccctcttgggctgaccacagcttctccctttcccaaccaataaagtaaccactttcagca

SEQ ID NO: 199568 - DNA, 692 bp, Homo sapiens
  Payload ID: 19371
  Gene Name: WAP four-disulfide core domain 2
  ENST ID: ENST00000447118
  CDS Start-End: 27-266
cctgcaccccgcccgggcatagcaccatgcctgcttgtcgcctaggcccgctagccgccgccctcctcctcagcctgctgctgttcggcttcaccctagtctcaggcacaggagcagagaagactggcgtgtgccccgagctccaggctgaccagaactgcacgcaagagtgcgtctcggacagcgaatgcgccgacaacctcaagtgctgcagcgcgggctgtgccaccttctgctctctgcccaatggccaactggctgagtgattcgaagaaagtgaggaatcctccctggacactgtatcgcccttcgtcgtctttcagtcaatctcttccactctaaggattgagtgagcgcgagctggggactctctcaaagataaggagggttcctgcccccaggtgaacattaactttccccagctcggcctctgtcgggaccagtgccaggtggacagccagtgtcctggccagatgaaatgctgccgcaatggctgtgggaaggtgtcctgtgtcactcccaatttctgagctccagccaccaccaggctgagcagtgaggagagaaagtttctgcctggccctgcatctggttccagcccacctgccctcccctttttcgggactctgtattccctcttgggctgaccacagcttctccctttcccaaccaataaagtaaccactttcagc

SEQ ID NO: 199569 - DNA, 1000 bp, Homo sapiens
  Payload ID: 19372
  Gene Name: WAP four-disulfide core domain 3
  Uniprot ID: Q8IUB2
  ENST ID: ENST00000243938
  CDS Start-End: 85-780
gcgacgctggagctgcggggttaccatgggaaccgaaccgccgcgcctcgcccaggacagttacacttagaggccttcatcatcatgatgttaagctgcctctttcttctgaaggcacttcttgctcttgggtctctggaatcctggataactgcaggagaacatgcaaaagagggagaatgccctccccataagaacccatgcaaagagctgtgccagggtgatgaattgtgtccggctgaacagaagtgctgcaccacaggctgtggtcggatctgccgagacattcctaaggggaggaaaagagattgccctagggttattcggaaacaatcctgtttgaaaaggtgcatcactgatgagacatgtccaggtgtaaagaaatgctgcacgcttggctgcaacaagagctgtgtagtcccaatctctaaacagaagctggcagagtttggtggtgaatgtcccgctgacccccttccgtgtgaggagctgtgtgatggggatgcatcctgtccccaggggcataaatgctgcagcaccggctgtggccgcacctgcctcggagacattgagggagggcggggcggtgattgtccaaaagttctggtgggcctgtgcattgttggctgtgtgatggatgagaattgtcaagctggagaaaaatgttgcaagtcaggctgtggccgcttctgtgtcccaccagtcctgcccccaaaactgaccatgaaccccaactggactgtgaggtctgattccgaattagagatcccggtgccctagctgtgctgatttgtctggagcttctttggtaattctggaagcttttcctggcagtcaagagagggtgacatcctggggcttgtgacatttccaggggcactcatggccctctctgctctgcttctcctcctgccgctgaccagagcatgggaaatagccctggattgggtagtgggtgtgtggtgcttctctttcccgataaaggctggtgctgacctct

SEQ ID NO: 199570 - DNA, 897 bp, Homo sapiens
  Payload ID: 19372
  Gene Name: WAP four-disulfide core domain 3
  ENST ID: ENST00000337205
  CDS Start-End: 1-677
aaataaaggaggcacttcttgctcttgggtctctggaatcctggataactgcaggagaacatgcaaaagagggagaatgccctccccataagaacccatgcaaagagctgtgccagggtgatgaattgtgtccggctgaacagaagtgctgcaccacaggctgtggtcggatctgccgagacattcctaaggggaggaaaagagattgccctagggttattcggaaacaatcctgtttgaaaaggtgcatcactgatgagacatgtccaggtgtaaagaaatgctgcacgcttggctgcaacaagagctgtgtagtcccaatctctaaacagaagctggcagagtttggtggtgaatgtcccgctgacccccttccgtgtgaggagctgtgtgatggggatgcatcctgtccccaggggcataaatgctgcagcaccggctgtggccgcacctgcctcggagacattgagggagggcggggcggtgattgtccaaaagttctggtgggcctgtgcattgttggctgtgtgatggatgagaattgtcaagctggagaaaaatgttgcaagtcaggctgtggccgcttctgtgtcccaccagtcctgcccccaaaactgaccatgaaccccaactggactgtgaggtctgattccgaattagagatcccggtgccctagctgtgctgatttgtctggagcttctttggtaattctggaagcttttcctggcagtcaagagagggtgacatcctggggcttgtgacatttccaggggcactcatggccctctctgctctgcttctcctcctgccgctgaccagagcatgggaaatagccctggattgggtagtgggtgtgtggtgcttctctttcccgataaaggctggtgctgacctct

SEQ ID NO: 199571 - DNA, 597 bp, Homo sapiens
  Payload ID: 19372
  Gene Name: WAP four-disulfide core domain 3
  ENST ID: ENST00000372630
  CDS Start-End: 98-382
ggccatccctagtcctgctcatacctcagctgatactctgggcaaggtgtacacctctagcctgaactgagctcttgtcccaactctcagcatcatcatgatgttaagctgcctctttcttctgaaggcacttcttgctcttgggtctctggaatcctggataactgcaggagaacatgggcggggcggtgattgtccaaaagttctggtgggcctgtgcattgttggctgtgtgatggatgagaattgtcaagctggagaaaaatgttgcaagtcaggctgtggccgcttctgtgtcccaccagtcctgcccccaaaactgaccatgaaccccaactggactgtgaggtctgattccgaattagagatcccggtgccctagctgtgctgatttgtctggagcttctttggtaattctggaagcttttcctggcagtcaagagagggtgacatcctggggcttgtgacatttccaggggcactcatggccctctctgctctgcttctcctcctgccgctgaccagagcatgggaaatagccctggattgggtagtgggtgtgtggtgcttctctttcccgataaaggctggtgctga

SEQ ID NO: 199572 - DNA, 704 bp, Homo sapiens
  Payload ID: 19372
  Gene Name: WAP four-disulfide core domain 3
  ENST ID: ENST00000372632
  CDS Start-End: 76-489
acctcagctgatactctgggcaaggtgtacacctctagcctgaactgagctcttgtcccaactctcagcatcatcatgatgttaagctgcctctttcttctgaaggcacttcttgctcttgggtctctggaatcctggataactgcaggagaacatgcaaaagagggagaatgccctccccataagaacccatgcaaagagctgtgccagggtgatgaattgtgtccggctgaacagaagtgctgcaccacaggctgtggtcggatctgccgagacattcctaaggggcggggcggtgattgtccaaaagttctggtgggcctgtgcattgttggctgtgtgatggatgagaattgtcaagctggagaaaaatgttgcaagtcaggctgtggccgcttctgtgtcccaccagtcctgcccccaaaactgaccatgaaccccaactggactgtgaggtctgattccgaattagagatcccggtgccctagctgtgctgatttgtctggagcttctttggtaattctggaagcttttcctggcagtcaagagagggtgacatcctggggcttgtgacatttccaggggcactcatggccctctctgctctgcttctcctcctgccgctgaccagagcatgggaaatagccctggattgggtagtgggtgtgtggtgcttctctttcccgataaaggctggtgctga

SEQ ID NO: 199573 - DNA, 1034 bp, Homo sapiens
  Payload ID: 19373
  Gene Name: WAP four-disulfide core domain 5
  Uniprot ID: Q8TCV5
  ENST ID: ENST00000307971
  CDS Start-End: 80-754
ctgactaagtttctctggcttccctgaggctgcaggtgttaatctggggggccctgggccctgagccggcagcagaaatatgaggacccagagccttctcctcctgggggccctcctggctgtggggagtcagctgcctgctgtctttggcaggaagaagggagagaaatcggggggctgcccgccagatgatgggccctgcctcctatcggtgcctgaccagtgcgtggaagacagccagtgtcccttgaccaggaagtgctgctacagagcttgcttccgccagtgtgtccccagggtctctgtgaagctgggcagctgcccagaggaccaactgcgctgcctcagccccatgaaccacctgtgtcacaaggactcagactgctcgggcaaaaagcgatgctgccacagcgcctgcgggcgggattgccgggatcctgccagaggtacggctcctgggtgcccagggcaggctaattctgatttaggatctgtggctctgcacctaagctggggaccaacggaaagagttcacgatgggaggcctggggccctgcccgctggacagcactatctctaccagcggtggttccagccttctgataatcactggcctgctgacacttccctgcaacccatccacccctggtttctcctcctgggagtcaaagtccatagcctgagctcggaggaaggcctctgtatcaccccagtactctgcaccactgccatacgagcttcccacccttcctaacgctttcacaccaatccgtacatgctgcttcctccaccaaaaatgcccaattcaggcagaccctgacctctccctcaggcagcccaaccatccagaatgaatattcttgcagagttttccaaacatcagtcattcacctctttcatgattttcaccatacctacaaaatagcaccatgataggttgcacgctgcctgtaccaccatttacttaatgttttctttaaatggctcacttttgtatataaataaattcatttcaaaagaaaattgatatcact

SEQ ID NO: 199574 - DNA, 1018 bp, Homo sapiens
  Payload ID: 19373
  Gene Name: WAP four-disulfide core domain 5
  Uniprot ID: Q8TCV5
  ENST ID: ENST00000372789
  CDS Start-End: 90-461
ctttcctctcctgactaagtttctctggcttccctgaggctgcaggtgttaatctggggggccctgggccctgagccggcagcagaaatatgaggacccagagccttctcctcctgggggccctcctggctgtggggagtcagctgcctgctgtctttggcaggaagaagggagagaaatcggggggctgcccgccagatgatgggccctgcctcctatcggtgcctgaccagtgcgtggaagacagccagtgtcccttgaccaggaagtgctgctacagagcttgcttccgccagtgtgtccccagggtctctgtgaagctgggcagctgcccagaggaccaactgcgctgcctcagccccatgaaccacctgtgtcacaaggactcagactgctcgggcaaaaagcgatgctgccacagcgcctgcgggcgggattgccgggatcctgccagaggctaattctgatttaggatctgtggctctgcacctaagctggggaccaacggaaagagttcacgatgggaggcctggggccctgcccgctggacagcactatctctaccagcggtggttccagccttctgataatcactggcctgctgacacttccctgcaacccatccacccctggtttctcctcctgggagtcaaagtccatagcctgagctcggaggaaggcctctgtatcaccccagtactctgcaccactgccatacgagcttcccacccttcctaacgctttcacaccaatccgtacatgctgcttcctccaccaaaaatgcccaattcaggcagaccctgacctctccctcaggcagcccaaccatccagaatgaatattcttgcagagttttccaaacatcagtcattcacctctttcatgattttcaccatacctacaaaatagcaccatgataggttgcacgctgcctgtaccaccatttacttaatgttttctttaaatggctcacttttgtatataaataaattcatttcaaaagaaaattgatatcact

SEQ ID NO: 199575 - DNA, 394 bp, Homo sapiens
  Payload ID: 19374
  Gene Name: WAP four-disulfide core domain 6
  Uniprot ID: Q9BQY6
  ENST ID: ENST00000372665
  CDS Start-End: 1-394
atgggactctcaggacttctgccaatcctggtaccattcatccttttgggggacatccaggaacctgggcacgctgaaggcatccttggcaagccgtgtcccaaaatcaaagtggaatgcgaagtggaagaaatagaccagtgtaccaaacccagagattgcccagaaaacatgaagtgttgcccgttcagccgtggaaagaaatgtttagacttcagaaagatatatgcagtatgccacaggaggctggcccctgcctggcctccataccacactggtggtacaataaaaaaaactaagatctgctccgaattcatctatggcggtagccaggggaacaataacaacttccaaactgaagctatctgtctggtcacctgcaaaaaataccata

SEQ ID NO: 199576 - DNA, 620 bp, Homo sapiens
  Payload ID: 19374
  Gene Name: WAP four-disulfide core domain 6
  Uniprot ID: Q9BQY6
  ENST ID: ENST00000372670
  CDS Start-End: 89-349
acaccggggcaggcaaagtgcagatgtaggagctgctgaggagcagttcttagttttggtgccatcaaccaggccagtacttcctaaaatgggactctcaggacttctgccaatcctggtaccattcatccttttgggggacatccaggaacctgggcacgctgaaggcatccttggcaagccgtgtcccaaaatcaaagtggaatgcgaagtggaagaaatagaccagtgtaccaaacccagagattgcccagaaaacatgaagtgttgcccgttcagccgtggaaagaaatgtttagacttcagaaaggtcagccttactttataccataaggaggagcttgaataacctccaggatttggctcataatccaggcctctctccacgtgtgcctgattgatgctccaaattggcttccacgggccaaaccttggctgttccagaaactgaaccccaggaattgcttacacactttcttccagcgtagcatctcttcaaacacaatgctcttccccttgaccacttctcagtatgaaactctatgtcttcaactttcagaccccccatttatttgtatgaaggcttcagttgccttaataaagtgctctgtggggtccga

SEQ ID NO: 199577 - DNA, 1069 bp, Homo sapiens
  Payload ID: 19375
  Gene Name: WAP four-disulfide core domain 8
  Uniprot ID: Q8IUA0
  ENST ID: ENST00000289953
  CDS Start-End: 80-805
ccaggcaggggagcagatgagggaggagccttagagctggagcaaagtgaggaagctgtctccatagggaagaggcctgatgtggactgtccgaactgaaggagggcactttcctctccatagccccaccttctcctggaggaatgtagctttcctgctgcttctctcccttgctttggagtggacttctgcaatgctgaccaagaagatcaaacacaaaccagggttatgtcccaaagagaggctcacctgtaccactgaacttccggactcatgtaacacagattttgactgcaaggaataccagaagtgctgcttttttgcctgtcagaagaagtgcatggatccctttcaagaaccctgcatgctacctgtgaggcatggaaactgtaatcatgaggcacagcgctggcattttgactttaaaaattaccgctgcacacccttcaaatacaggggctgcgaagggaatgccaacaacttcttaaatgaggatgcctgcagaacggcctgcatgttaattgttaaggatggacaatgcccactcttccctttcactgaacgtaaggagtgtccaccttcatgtcacagtgacatcgattgtccccagacagacaaatgttgtgaatccaggtgtggctttgtttgtgccagggcctggacagtcaaaaaaggtttctgcccacgcaagcccttgctatgtaccaagattgataaacccaagtgcctgcaggatgaggagtgcccattggtggaaaagtgctgctcacattgtggactgaaatgtatggaccccagacgttgaatagtaagtagaaaatattatcatcaaaatcattaattatgagtagcatgataaagagctgtcagttttgtcttgtatccaacttgccaaattatcttaagtatcacaatattgaatgatgttactttgattttatatataatcccatcatctgaaagtgatgatatatttggctttttttcaacttcatgactttattttcttgtcttcttgtattgtgtagaacctccaaaataataatgaaaataaaggcaatggcatcca

SEQ ID NO: 199578 - DNA, 1268 bp, Homo sapiens
  Payload ID: 19375
  Gene Name: WAP four-disulfide core domain 8
  Uniprot ID: Q8IUA0
  ENST ID: ENST00000357199
  CDS Start-End: 80-805
ccaggcaggggagcagatgagggaggagccttagagctggagcaaagtgaggaagctgtctccatagggaagaggcctgatgtggactgtccgaactgaaggagggcactttcctctccatagccccaccttctcctggaggaatgtagctttcctgctgcttctctcccttgctttggagtggacttctgcaatgctgaccaagaagatcaaacacaaaccagggttatgtcccaaagagaggctcacctgtaccactgaacttccggactcatgtaacacagattttgactgcaaggaataccagaagtgctgcttttttgcctgtcagaagaagtgcatggatccctttcaagaaccctgcatgctacctgtgaggcatggaaactgtaatcatgaggcacagcgctggcattttgactttaaaaattaccgctgcacacccttcaaatacaggggctgcgaagggaatgccaacaacttcttaaatgaggatgcctgcagaacggcctgcatgttaattgttaaggatggacaatgcccactcttccctttcactgaacgtaaggagtgtccaccttcatgtcacagtgacatcgattgtccccagacagacaaatgttgtgaatccaggtgtggctttgtttgtgccagggcctggacagtcaaaaaaggtttctgcccacgcaagcccttgctatgtaccaagattgataaacccaagtgcctgcaggatgaggagtgcccattggtggaaaagtgctgctcacattgtggactgaaatgtatggaccccagacgttgaataacggagttttgctcttattgcccaggcgcaatctcggctcactgcaacctctgcttcccgggttcaagtgattctcctgcctcagcctcccaagtagctgggattacaggtgcccaccatcatgcccagctaattttttgtatttttagtagagatggggttttaccatgttggccaagctggtcacaaactcctgacctcaggtgatccacccacctcagcctccgaaagtgctgggatcacaggtgggagccactgtgcctggccagttatttcctttttaagcctatttcctatccatttatagctactactgaaaatgactactgaattttatcaaataccttttaagcatacagtcacataatgatttttctcttctaatttgttggcataataaattactaaattttcttgagccatccttgcattcttaataaacttaattgcagactgctgt

SEQ ID NO: 199579 - DNA, 659 bp, Homo sapiens
  Payload ID: 19376
  Gene Name: WAP four-disulfide core domain 9
  Uniprot ID: Q8NEX5
  ENST ID: ENST00000326000
  CDS Start-End: 219-488
acaagtggggcatctgtaggggccacagtgagctctcaatgatcatctgtagtggcagcaaaagagttcgagccccacttcaaacaacttcataataaaaggccagacaaaagagctgtcagccagttactacagacactcaatgcagacaccttcagagtattgggaaaagacttgccttctgccagaacttaacccaaatacacacagagagcaccatgaagccctggattcttctactcgtcatgttcatctctggagttgtgatgcttctgcctgtgctgggaagcttctggaacaaagatccctttctagatatgataagagaaactgagcagtgctgggtacagcctccatataagtactgtgagaaaaggtgtactaaaataatgacttgtgtacgtccaaatcatacatgctgctggacctactgtggaaacatctgcttagacaacgaagagccccttaaatcaatgctaaacccctagattctattggccgatcactactgtgggctgaaggatgaccatctggtctaagaagagtgctgcctacttccttcttgggacacccactggctctagctggtaacctttctgctatttccttgacctctttaccctgaagcttttgtcaaataaactgctacatcaacctga

SEQ ID NO: 199580 - DNA, 2028 bp, Homo sapiens
  Payload ID: 19377
  Gene Name: WAP, follistatin/kazal, immunoglobulin, kunitz and netrin domain containing 1
  Uniprot ID: Q96NZ8
  ENST ID: ENST00000319070
  CDS Start-End: 323-1969
cctcctcccctctgccctgtgctgaccagggcctgggagcccccgcacggttcagacagaggggccaggctgaagctggagaggaaccagcgtcacacagacggcctctgagaacttggagaccccgttacccacccagcaggggtgtcaggacaagcatctgctgcaggcttcagcctcaggggcaaaagggagccccggggtcctggtgggggcaccgaccacaggcccggagggtggatgcctgcaggaagctgggctctgtggagcccgaggaggggctggtggccacaccccccggccccctggctcggcggccctcatgcccgccctacgtccactcctgccgctcctgctcctcctccggctgacctcgggggctggcttgctgccagggctggggagccacccgggcgtgtgccccaaccagctcagccccaacctgtgggtggacgcccagagcacctgtgagcgcgagtgtagcagggaccaggactgtgcggctgctgagaagtgctgcatcaacgtgtgtggactgcacagctgcgtggcagcacgcttccccggcagcccagctgcgccgacgacagcggcctcctgcgagggctttgtgtgcccacagcagggctcggactgcgacatctgggacgggcagcccgtgtgccgctgccgcgaccgctgtgagaaggagcccagcttcacctgcgcctcggacggcctcacctactacaaccgctgctatatggacgccgaggcctgcctgcggggcctgcacctccacatcgtgccctgcaagcacgtgctcagctggccgcccagcagcccggggccgccggagaccactgcccgccccacacctggggccgcgcccgtgcctcctgccctgtacagcagcccctccccacaggcggtgcaggttgggggtacggccagcctccactgcgacgtcagcggccgcccgccgcctgctgtgacctgggagaagcagagtcaccagcgagagaacctgatcatgcgccctgatcagatgtatggcaacgtggtggtcaccagcatcgggcagctggtgctctacaacgcgcggcccgaagacgccggcctgtacacctgcaccgcgcgcaacgctgctgggctgctgcgggctgacttcccactctctgtggtccagcgagagccggccagggacgcagcccccagcatcccagccccggccgagtgcctgccggatgtgcaggcctgcacgggccccacttccccacaccttgtcctctggcactacgacccgcagcggggcggctgcatgaccttcccggcccgtggctgtgatggggcggcccgcggctttgagacctacgaggcatgccagcaggcctgtgcccgcggccccggcgacgcctgcgtgctgcctgccgtgcagggcccctgccggggctgggagccgcgctgggcctacagcccgctgctgcagcagtgccatcccttcgtgtacggtggctgcgagggcaacggcaacaacttccacagccgcgagagctgcgaggatgcctgccccgtgccgcgcacaccgccctgccgcgcctgccgcctccggagcaagctggcgctgagcctgtgccgcagcgacttcgccatcgtggggcggctcacggaggtgctggaggagcccgaggccgccggcggcatcgcccgcgtggcgctcgaggacgtgctcaaggatgacaagatgggcctcaagttcttgggcaccaagtacctggaggtgacgctgagtggcatggactgggcctgcccctgccccaacatgacggcgggcgacgggccgctggtcatcatgggtgaggtgcgcgatggcgtggccgtgctggacgccggcagctacgtccgcgccgccagcgagaagcgcgtcaagaagatcttggagctgctggagaagcaggcctgcgagctgctcaaccgcttccaggactagcccccgcaggggcctgcgccaccccgtcctggtgaataaacgcactccctgtgcctcag

SEQ ID NO: 199581 - DNA, 3588 bp, Homo sapiens
  Payload ID: 19378
  Gene Name: WAP, follistatin/kazal, immunoglobulin, kunitz and netrin domain containing 2
  Uniprot ID: Q8TEU8
  ENST ID: ENST00000311378
  CDS Start-End: 529-2259
tggagccagctccccgcaaagcacatgccatttctggcccttgaaggggttaaaggcctcctggagtcaaaaacaagcaggtgtcccaccgtgccagatacgctgcctaaactgcttccagcttctttttttttttttccccccttctgcaataagtctgtgatcagccacgggacagaggcgccagcagcctgcctgtgacaggcatcaggttagctggctcccactcgggtggcgcgcccaggatataaatccgggcgcgggcccctgctgtggctcctctccctgcacactcaggagagggagcttccttctaaagacctttcttttatctgaagccgcacagcccggcaggctgtgctgacttggtggaggcagcagcggcagagcagcctgagcagcagcctgagcaggaaacctgctggggtggggagggcaggtgtctgcagcccctgagaagaaggccctggtgggccccagaccctggcatcgtttcaggggaggtctctagccgccccagcctgcaccatgtgggccccaaggtgtcgccggttctggtctcgctgggagcaggtggcagcgctgctgctgctgctgctactgctcggggtgcccccgcgaagcctggcgctgccgcccatccgctattcccacgccggcatctgccccaacgacatgaatcccaacctctgggtggacgcacagagcacctgcaggcgggagtgtgagacggaccaggagtgtgagacctatgagaagtgctgccccaacgtatgtgggaccaagagctgcgtggcggcccgctacatggacgtgaaagggaagaagggcccagtgggcatgcccaaggaggccacatgtgaccacttcatgtgtctgcagcagggctctgagtgtgacatctgggatggccagcccgtgtgtaagtgcaaagaccgctgtgagaaggagcccagctttacctgcgcctcggacggcctcacctactataaccgctgctacatggatgccgaggcctgctccaaaggcatcacactggccgttgtaacctgccgctatcacttcacctggcccaacaccagccccccaccacctgagaccaccatgcaccccaccacagcctccccagagacccctgagctggacatggcggcccctgcgctgctcaacaaccctgtgcaccagtcggtcaccatgggtgagacagtgagcttcctctgtgatgtggtgggccggccccggcctgagatcacctgggagaagcagttggaggatcgggagaatgtggtcatgcggcccaaccatgtgcgtggcaacgtggtggtcaccaacattgcccagctggtcatctataacgcccagctgcaggatgctgggatctacacctgcacggcccggaacgtggctggggtcctgagggctgatttcccgctgtcggtggtcaggggtcatcaggctgcagccacctcagagagcagccccaatggcacggctttcccggcggccgagtgcctgaagcccccagacagtgaggactgtggcgaagagcagacccgctggcacttcgatgcccaggccaacaactgcctgaccttcaccttcggccactgccaccgtaacctcaaccactttgagacctatgaggcctgcatgctggcctgcatgagcgggccgctggccgcgtgcagcctgcccgccctgcaggggccctgcaaagcctacgcgcctcgctgggcttacaacagccagacgggccagtgccagtcctttgtctatggtggctgcgagggcaatggcaacaactttgagagccgtgaggcctgtgaggagtcgtgccccttccccagggggaaccagcgctgtcgggcctgcaagcctcggcagaagctcgttaccagcttctgtcgcagcgactttgtcatcctgggccgagtctctgagctgaccgaggagcctgactcgggccgcgccctggtgactgtggatgaggtcctaaaggatgagaaaatgggcctcaagttcctgggccaggagccattggaggtcactctgcttcacgtggactgggcatgcccctgccccaacgtgaccgtgagcgagatgccgctcatcatcatgggggaggtggacggcggcatggccatgctgcgccccgatagctttgtgggcgcatcgagtgcccgccgggtcaggaagcttcgtgaggtcatgcacaagaagacctgtgacgtcctcaaggagtttcttggcttgcactgaagccccccacccctccctgccccctccctggccttcttccacctatccaccccaatgcctctcagcaaactgggcgaggtcagattagacaggcttgggacagcagggaaacatcaaccgacgtgtcacagaaaaagccacagaaggtctcagatcagcatctattctttgggttcaataaggggttcatatcttttttagctgagggggacaagaggagaagtcagtggacacatggaagttactcgtgaccaccagcttgctcagatattctcctcctcccctcactggccccacacccctggctctcccagtcaccctcccctagccagtctcccagcaagggtttaagagatggccgctgtgtgctggtcacaggaagtgttgaatggattggcttgcaaagggggtaggtggggagagataggagggcccagggactcatgggacacctttcccacagcctcctcgattgctgtgagcagaggccactcggagttaggggcatgggcaatagcaagctggcggcagagtccagcccagcatatgacttgccctgaatggaagctgctgaaacgggtgcctttgggtggtggtcggcttgcctctgaggccaccacggcaccagcagaatacgtatttcttctccttggctgcactggtttgtcgatctagttcagttcaactcagtggatgttctctgaatgcttactgggtgccaggaccacagagagatgttagtcactgcccagttcttagagccccaacacagataccctcatcccagggcccccagacacacccctccgctggactcacaactgtctggagtttctgtctgatggatggtgtgctttcatatgccactggcttccttggacatagatcagacaaaagccccgggatctgtttggtagcaggagaaatgaaggaagatgaaaaagcaggcagggaagggggtagtaaaggactgagagaggagggaggtggctggagaaggaaaaggaacattgctcgatgctcccatctggtggcggcctcaggaacccacgggaacctggaaggaggctctttgtgagacctgggcaaaggatggggcagctcgtcgatgatttttttgtgtttccaggcttcctgtgtgatcctggccctccggccgctagagagaggattgggaaaccccactgtcagctctgcatctgcccccactaccctcctctgccctattctgtccctgcccctccaagctgaagaaggtccttgtggggcgtcctcatttcttcctcaaatataaggaggaagataccaattaaaagctcatagtatcaa

SEQ ID NO: 199582 - DNA, 2193 bp, Homo sapiens
  Payload ID: 19378
  Gene Name: WAP, follistatin/kazal, immunoglobulin, kunitz and netrin domain containing 2
  ENST ID: ENST00000426127
  CDS Start-End: 453-1904
gtgcgtcctttcctccgatctgaaatggaggtgcagtttgttgtgaggattaaatgagatgatgcgttcagagaagccacacgtgtgaagagcccagtgcatctggcagctggtaccaccaggactgctcactctgtgcgaccttggacaagtcgctcgccctcttcgaccacagaccttctcctttgggaagtgggggaggccagacaaggctggcagtcagaaggagctcactgaagagcagccactgtggtcgtcagcgagggcagctggactccggcacaatcctgagacactgtgaccgcggaggttttctcggtgtgtcgatggaagagggaggaatgtgatccgtcccagccgccggcggggccagagcatatctggagtgtgagacctatgagaagtgctgccccaacgtatgtgggaccaagagctgcgtggcggcccgctacatggacgtgaaagggaagaagggcccagtgggcatgcccaaggaggccacatgtgaccacttcatgtgtctgcagcagggctctgagtgtgacatctgggatggccagcccgtgtgtaagtgcaaagaccgctgtgagaaggagcccagctttacctgcgcctcggacggcctcacctactataaccgctgctacatggatgccgaggcctgctccaaaggcatcacactggccgttgtaacctgccgctatcacttcacctggcccaacaccagccccccaccacctgagaccaccatgcaccccaccacagcctccccagagacccctgagctggacatggcggcccctgcgctgctcaacaaccctgtgcaccagtcggtcaccatgggtgagacagtgagcttcctctgtgatgtggtgggccggccccggcctgagatcacctgggagaagcagttggaggatcgggagaatgtggtcatgcggcccaaccatgtgcgtggcaacgtggtggtcaccaacattgcccagctggtcatctataacgcccagctgcaggatgctgggatctacacctgcacggcccggaacgtggctggggtcctgagggctgatttcccgctgtcggtggtcaggggtcatcaggctgcagccacctcagagagcagccccaatggcacggctttcccggcggccgagtgcctgaagcccccagacagtgaggactgtggcgaagagcagacccgctggcacttcgatgcccaggccaacaactgcctgaccttcaccttcggccactgccaccgtaacctcaaccactttgagacctatgaggcctgcatgctggcctgcatgagcgggccgctggccgcgtgcagcctgcccgccctgcaggggccctgcaaagcctacgcgcctcgctgggcttacaacagccagacgggccagtgccagtcctttgtctatggtggctgcgagggcaatggcaacaactttgagagccgtgaggcctgtgaggagtcgtgccccttccccagggggaaccagcgctgtcgggcctgcaagcctcggcagaagctcgttaccagcttctgtcgcagcgactttgtcatcctgggccgagtctctgagctgaccgaggagcctgactcgggccgcgccctggtgactgtggatgaggtcctaaaggatgagaaaatgggcctcaagttcctgggccaggagccattggaggtcactctgcttcacgtggactgggcatgcccctgccccaacgtgaccgtgagcgagatgccgctcatcatcatgggggaggtggacggcggcatggccatgctgcgccccgatagctttgtgggcgcatcgagtgcccgccgggtcaggaagcttcgtgaggtcatgcacaagaagacctgtgacgtcctcaaggagtttcttggcttgcactgaagccccccacccctccctgccccctccctggccttcttccacctatccaccccaatgcctctcagcaaactgggcgaggtcagattagacaggcttgggacagcagggaaacatcaaccgacgtgtcacagaaaaagccacagaaggtctcagatcagcatctattctttgggttcaataaggggttcatatcttttttagctgagggggacaagaggagaagtcagtggacacatggaagttactcgtgaccaccagcttgctcagatattctcctcctcccctcact

SEQ ID NO: 199583 - DNA, 5987 bp, Homo sapiens
  Payload ID: 19379
  Gene Name: WAPL cohesin release factor
  ENST ID: ENST00000263070
  CDS Start-End: 2493-3701
ggaaggaggtgggggccgggagcgcaaatggcgttgagatggttcagggccctgttcaaactccagcactgaccattcaccggcggaagcggcgccgctcctgcccccccaaccgggcttcctatttaccgaaagcagagtccctcgcctctctcggctctcacctgccggccctgctctcccgcgcgagggttccgcgcccgcccgcgggccgtagggagcgggagaggcggaggcggcccgtggccaaagcacccgccaggctccgaggagaatatgaaactggtgtcaaaatgacatccagatttgggaaaacatacagtaggaaaggtggaaatggcagttcaaaattcgatgaagtcttttccaacaaacggactacccttagcacaaaatggggagagaccacatttatggctaaattagggcagaagaggcccaatttcaaaccagatatccaagaaattccgaagaaacctaaagtggaagaagaaagtactggagatccttttggatttgatagtgatgatgagtctctaccagtttcttcaaagaatttagcccaggttaagtgttcctcttattcagaatctagtgaagctgctcagttggaagaggtcacttcagtacttgaagctaatagcaaaattagtcatgtggtcgttgaagacactgtcgtttctgataaatgcttccctttggaggacactttacttgggaaagaaaagagcacaaaccgaattgtagaagatgatgcaagcataagtagctgtaataaattaataacttcagataaagtggagaattttcatgaagaacatgaaaagaatagtcaccatattcacaaaaatgctgatgacagtactaagaaacccaatgcagaaactacagtggcttctgaaatcaaggaaacaaatgatacttggaactcccagtttgggaaaaggccagaatcaccatcagaaatatctccaatcaagggatctgttagaactggtttgtttgaatgggataatgattttgaagatatcagatcagaagactgtattttaagtttggatagtgatccccttttggagatgaaggatgacgattttaaaaatcgattggaaaatctgaatgaagccattgaggaagatattgtacaaagtgttcttaggccaaccaactgtaggacgtactgtagggccaataaaacgaaatcctcccaaggagcatcaaattttgataagctgatggacggcaccagtcaggccttagccaaagcaaacagtgaatcgagtaaagatggcctgaatcaggcaaagaaagggggtgtaagttgtgggaccagttttagagggacagttggacggactagagattacactgttttacatccatcttgcttgtcagtttgtaatgttaccatacaggatactatggaacgcagcatggatgagttcactgcatccactcctgcagatttgggagaagctggtcgtctcagaaaaaaggcagatattgcaacttctaagactactactagatttcgacctagtaatactaaatccaaaaaggatgttaaacttgaattttttggttttgaagatcatgagacaggaggtgatgaaggaggttctggaagttctaattacaaaattaagtattttggctttgatgatctcagtgaaagcgaagatgatgaagatgatgactgtcaagtagaaagaaagacaagcaaaaaaagaactaaaacagctccatcaccctccttgcagcctcccccagaaagcaatgataattcccaggacagtcagtctggtactaacaatgcagaaaacttggattttacagaggacttgcctggtgtgcctgaaagtgtgaagaagcccataaataaacaaggagataaatcaaaggaaaataccagaaagatttttagtggccccaaacggtcacccacaaaagctgtatataatgccagacattggaatcatccagattcagaagaactgcctgggccaccagtagtaaaacctcagagtgtcacagtgaggctgtcttcaaaggaaccaaatcaaaaagatgatggagtttttaaggctcctgcaccaccatccaaagtgataaaaactgtgacaatacctactcagccctaccaagatatagttactgcactgaaatgcagacgagaagacaaagaattatatactgttgttcagcacgtgaagcacttcaacgatgttgtagaatttggtgaaaatcaagagttcactgatgacattgagtacttgttaagtggcttaaagagcactcagcctctaaacacacgttgccttagtgttattagcttggctactaaatgtgccatgcccagttttcgaatgcacctgagagcacatgggatggtagcaatggtctttaaaaccttggatgattcccagcaccatcagaatctgtccctctgtacagctgccctcatgtatatactgagtagagatcgtttgaacatggatcttgatagagctagcttagatctaatgattcgacttttggaactggaacaagatgcttcatcagccaagctactgaatgaaaaagacatgaacaaaattaaagaaaaaatccgaaggctctgtgaaactgtacacaacaagcatcttgatctagaaaatataacgactgggcatttagctatggagacattattatcccttacttctaaacgagcaggagactggtttaaagaagaactccggcttttgggtggtctggatcatattgtagataaagtaaaagaatgtgtggatcatttaagtagagatgaggatgaagagaaactggtagcctcactatggggagcagagagatgtttacgagttttagaaagtgtaactgtgcataatcccgaaaatcaaagctacttgatagcatataaagattcccaacttattgtttcatcagctaaagcattacagcattgtgaagaactgattcagcagtacaaccgtgctgaggacagcatatgcttagctgacagtaagcctctgcctcaccagaatgtaactaaccatgtaggcaaagcagtggaggactgcatgagggccatcatcggggtgttgcttaatttaactaatgataatgagtggggcagcaccaaaacaggagagcaggacggtctcataggcacagcgctgaactgtgtgcttcaggttccaaagtacctacctcaggagcagagatttgatattcgagtgctgctattccttgagcgagagcgggcagcccagctagcagaaagtaaaacagatgagttgatcaaagatgctcccaccactcagcatgataagagtggagagtggcaagaaacaagtggagaaatacagtgggtgtcaactgaaaagactgatggtacagaagagaaacataagaaggaggaggaggatgaagaacttgacctcaataaagcccttcagcatgccggcaaacacatggaggattgcattgtggcctcctacacagcactacttcttgggtgtctctgccaggaaagtccaatcaatgtaaccactgtgcgggaatatctgccagaaggagacttttcaataatgacagagatgctcaaaaaatttttgagttttatgaatctcacttgtgctgttggaacaactggccagaaatctatctctagagtgattgaatatttggaacattgctagctgctttacctttgcttcaggtgctcggtaatgctggagctatccttagacaaagaaaagtcaagtcatgaaagaagtccttgaagatataccaagaacattcatcagtatcattcgtgtttggatttttaaggccacctgatttcttcgtcatgcattcggcatttgctaaatgacagttactacatcaatctgcaactatcaaaaatgaggggaaaaggttcaggctgttaacaattccatgcagtatttaaatacatttactttggcagagtttataccctccccttgttttcttgctttattctgggcaagtttgaaggggaaaatttgtgctgctgttagtgcaactgctgtgtatgttgagccactgttgtcatgccagccaggtgcaaaggcagcttagctactgaggtagcgaatgttctgaggacattctagacaacagcttagttcctttttcaggctcatttgcttttgcttttttgttgaatgattccaatcgtaaataaagcttttaataattttgtgaattttttggttgttgttccctgaactactgtctatatttaaaattagatggaatccaaagatacacgggattaatagtatatttttttattcttgattaggtttgggttattgaactattttttacttttgagaccacaaccatattcaatatcataccataatgtgtcatagctataggcacaagaaaaacaacagtttgagagaatattatataagatgatgtgccctgttaaaaggaggaggcaaaatagtcaaacccagggtagtttacacttaatgctagggaggctcttaaaacattattagattttgaggaaagactctctagatatattttctaatgttcagtacaataaatataaggaagctaaaacaccaatgtggaattcctgtttccagataacatgtatattcttctatagagtgacaggatcaattgcataagcgcaaagccttaaattgctggtttagagaagacccttttttcattcagattctttgttcgtagagcagttatttgaaaaacagttatggaacacaaaacattttatagatttaatatcataacattgcaaatttttcttgtattattcacaccactggttatacttttttttttccttttttattgattgggcctgaatacaggctttctagagatctttttcattaatacttttaaatacctttcaggtagttacatcatgtttcttcattggatttgtaaaacttgaagccataaaaatattagtttggtgtgtattggggaaaatagctaaaagtctaatttttacccatttagactttgttatttccttgtataaagtgacaaatcggggctcttgtatcagtgccagctgtaatgtttttaaatgcagtggctgccttctattgtcttcctatttttgataatgcagattgttgggaaatctgtaaggaagtaactgattccaggcaaattgttttcttccttctacccaccccaacccctacccatcaccttttaagaacatagtacgccagtgtaacgtgggaaccattgagattgtatttgccctgagtattaaagctagcttagcaaaatacttttaaaaacatattggtaaatgatacccgtaaaattaaattagttatattttattttaaaatgcaaaatacattgatatttattaatcattggatttagggaaagggacagatttttggtgaacctgacttgtggcagatggtaaggaatattataaaacatttggatgagaacaatcagggcgaactgcatttttctgttacactggtaatcatttgaaaattgatttacctcagtgtttaacagttttttgttttgttttgttttttaaataataactaattgtcgagcactgatagagatgcagattttggtggggggaggtggtgggggagataatcacttcaccaactgcagtgcatttgtgtgtttttaaccctcagagaactctgcattttagggtacttgaggctgacttaactaaaagttttaaagtaaccttttttccattgtaaatatttctgtaaatactaccaattggaaattagaacagtagagtacttttctgaatccaatcctatttttattttatacagtatttctcagctgtgatctttggagcaaaagccaacggcaggaaaaaatagtttgtaccagtttcatgaagtatgtctttgggtttttgtaaataattttaactcaaataaaattgctactttcaatac

SEQ ID NO: 199584 - DNA, 6333 bp, Homo sapiens
  Payload ID: 19379
  Gene Name: WAPL cohesin release factor
  Uniprot ID: Q7Z5K2
  ENST ID: ENST00000298767
  CDS Start-End: 474-4046
gcgcggggactgtgggaagcggagtgacggagcgagcggctgttggaggaaggaggtgggggccgggagcgcaaatggcgttgagatggttcagggccctgttcaaactccagcactgaccattcaccggcggaagcggcggcgcaggaggcggcggcggcccagcgggggcacacagcaggctctgttaccagctccagcagtggcggccagcgagagctaggcctgggcccggccggcggcgctcgaggcggggagggaagttgcggggccgccgctcctgcccccccaaccgggcttcctatttaccgaaagcagagtccctcgcctctctcggctctcacctgccggccctgctctcccgcgcgagggttccgcgcccgcccgcgggccgtagggagcgggagaggcggaggcggcccgtggccaaagcacccgccaggctccgaggagaatatgaaactggtgtcaaaatgacatccagatttgggaaaacatacagtaggaaaggtggaaatggcagttcaaaattcgatgaagtcttttccaacaaacggactacccttagcacaaaatggggagagaccacatttatggctaaattagggcagaagaggcccaatttcaaaccagatatccaagaaattccgaagaaacctaaagtggaagaagaaagtactggagatccttttggatttgatagtgatgatgagtctctaccagtttcttcaaagaatttagcccaggttaagtgttcctcttattcagaatctagtgaagctgctcagttggaagaggtcacttcagtacttgaagctaatagcaaaattagtcatgtggtcgttgaagacactgtcgtttctgataaatgcttccctttggaggacactttacttgggaaagaaaagagcacaaaccgaattgtagaagatgatgcaagcataagtagctgtaataaattaataacttcagataaagtggagaattttcatgaagaacatgaaaagaatagtcaccatattcacaaaaatgctgatgacagtactaagaaacccaatgcagaaactacagtggcttctgaaatcaaggaaacaaatgatacttggaactcccagtttgggaaaaggccagaatcaccatcagaaatatctccaatcaagggatctgttagaactggtttgtttgaatgggataatgattttgaagatatcagatcagaagactgtattttaagtttggatagtgatccccttttggagatgaaggatgacgattttaaaaatcgattggaaaatctgaatgaagccattgaggaagatattgtacaaagtgttcttaggccaaccaactgtaggacgtactgtagggccaataaaacgaaatcctcccaaggagcatcaaattttgataagctgatggacggcaccagtcaggccttagccaaagcaaacagtgaatcgagtaaagatggcctgaatcaggcaaagaaagggggtgtaagttgtgggaccagttttagagggacagttggacggactagagattacactgttttacatccatcttgcttgtcagtttgtaatgttaccatacaggatactatggaacgcagcatggatgagttcactgcatccactcctgcagatttgggagaagctggtcgtctcagaaaaaaggcagatattgcaacttctaagactactactagatttcgacctagtaatactaaatccaaaaaggatgttaaacttgaattttttggttttgaagatcatgagacaggaggtgatgaaggaggttctggaagttctaattacaaaattaagtattttggctttgatgatctcagtgaaagcgaagatgatgaagatgatgactgtcaagtagaaagaaagacaagcaaaaaaagaactaaaacagctccatcaccctccttgcagcctcccccagaaagcaatgataattcccaggacagtcagtctggtactaacaatgcagaaaacttggattttacagaggacttgcctggtgtgcctgaaagtgtgaagaagcccataaataaacaaggagataaatcaaaggaaaataccagaaagatttttagtggccccaaacggtcacccacaaaagctgtatataatgccagacattggaatcatccagattcagaagaactgcctgggccaccagtagtaaaacctcagagtgtcacagtgaggctgtcttcaaaggaaccaaatcaaaaagatgatggagtttttaaggctcctgcaccaccatccaaagtgataaaaactgtgacaatacctactcagccctaccaagatatagttactgcactgaaatgcagacgagaagacaaagaattatatactgttgttcagcacgtgaagcacttcaacgatgttgtagaatttggtgaaaatcaagagttcactgatgacattgagtacttgttaagtggcttaaagagcactcagcctctaaacacacgttgccttagtgttattagcttggctactaaatgtgccatgcccagttttcgaatgcacctgagagcacatgggatggtagcaatggtctttaaaaccttggatgattcccagcaccatcagaatctgtccctctgtacagctgccctcatgtatatactgagtagagatcgtttgaacatggatcttgatagagctagcttagatctaatgattcgacttttggaactggaacaagatgcttcatcagccaagctactgaatgaaaaagacatgaacaaaattaaagaaaaaatccgaaggctctgtgaaactgtacacaacaagcatcttgatctagaaaatataacgactgggcatttagctatggagacattattatcccttacttctaaacgagcaggagactggtttaaagaagaactccggcttttgggtggtctggatcatattgtagataaagtaaaagaatgtgtggatcatttaagtagagatgaggatgaagagaaactggtagcctcactatggggagcagagagatgtttacgagttttagaaagtgtaactgtgcataatcccgaaaatcaaagctacttgatagcatataaagattcccaacttattgtttcatcagctaaagcattacagcattgtgaagaactgattcagcagtacaaccgtgctgaggacagcatatgcttagctgacagtaagcctctgcctcaccagaatgtaactaaccatgtaggcaaagcagtggaggactgcatgagggccatcatcggggtgttgcttaatttaactaatgataatgagtggggcagcaccaaaacaggagagcaggacggtctcataggcacagcgctgaactgtgtgcttcaggttccaaagtacctacctcaggagcagagatttgatattcgagtgctgggcttaggtctgctgataaatctagtggagtatagtgctcggaatcggcactgtcttgtcaacatggaaacatcgtgctcttttgattcttccatctgtagtggagaaggggatgatagtttaaggataggtggacaagttcatgctgtccaggctttagtgcagctattccttgagcgagagcgggcagcccagctagcagaaagtaaaacagatgagttgatcaaagatgctcccaccactcagcatgataagagtggagagtggcaagaaacaagtggagaaatacagtgggtgtcaactgaaaagactgatggtacagaagagaaacataagaaggaggaggaggatgaagaacttgacctcaataaagcccttcagcatgccggcaaacacatggaggattgcattgtggcctcctacacagcactacttcttgggtgtctctgccaggaaagtccaatcaatgtaaccactgtgcgggaatatctgccagaaggagacttttcaataatgacagagatgctcaaaaaatttttgagttttatgaatctcacttgtgctgttggaacaactggccagaaatctatctctagagtgattgaatatttggaacattgctagctgctttacctttgcttcaggtgctcggtaatgctggagctatccttagacaaagaaaagtcaagtcatgaaagaagtccttgaagatataccaagaacattcatcagtatcattcgtgtttggatttttaaggccacctgatttcttcgtcatgcattcggcatttgctaaatgacagttactacatcaatctgcaactatcaaaaatgaggggaaaaggttcaggctgttaacaattccatgcagtatttaaatacatttactttggcagagtttataccctccccttgttttcttgctttattctgggcaagtttgaaggggaaaatttgtgctgctgttagtgcaactgctgtgtatgttgagccactgttgtcatgccagccaggtgcaaaggcagcttagctactgaggtagcgaatgttctgaggacattctagacaacagcttagttcctttttcaggctcatttgcttttgcttttttgttgaatgattccaatcgtaaataaagcttttaataattttgtgaattttttggttgttgttccctgaactactgtctatatttaaaattagatggaatccaaagatacacgggattaatagtatatttttttattcttgattaggtttgggttattgaactattttttacttttgagaccacaaccatattcaatatcataccataatgtgtcatagctataggcacaagaaaaacaacagtttgagagaatattatataagatgatgtgccctgttaaaaggaggaggcaaaatagtcaaacccagggtagtttacacttaatgctagggaggctcttaaaacattattagattttgaggaaagactctctagatatattttctaatgttcagtacaataaatataaggaagctaaaacaccaatgtggaattcctgtttccagataacatgtatattcttctatagagtgacaggatcaattgcataagcgcaaagccttaaattgctggtttagagaagacccttttttcattcagattctttgttcgtagagcagttatttgaaaaacagttatggaacacaaaacattttatagatttaatatcataacattgcaaatttttcttgtattattcacaccactggttatacttttttttttccttttttattgattgggcctgaatacaggctttctagagatctttttcattaatacttttaaatacctttcaggtagttacatcatgtttcttcattggatttgtaaaacttgaagccataaaaatattagtttggtgtgtattggggaaaatagctaaaagtctaatttttacccatttagactttgttatttccttgtataaagtgacaaatcggggctcttgtatcagtgccagctgtaatgtttttaaatgcagtggctgccttctattgtcttcctatttttgataatgcagattgttgggaaatctgtaaggaagtaactgattccaggcaaattgttttcttccttctacccaccccaacccctacccatcaccttttaagaacatagtacgccagtgtaacgtgggaaccattgagattgtatttgccctgagtattaaagctagcttagcaaaatacttttaaaaacatattggtaaatgatacccgtaaaattaaattagttatattttattttaaaatgcaaaatacattgatatttattaatcattggatttagggaaagggacagatttttggtgaacctgacttgtggcagatggtaaggaatattataaaacatttggatgagaacaatcagggcgaactgcatttttctgttacactggtaatcatttgaaaattgatttacctcagtgtttaacagttttttgttttgttttgttttttaaataataactaattgtcgagcactgatagagatgcagattttggtggggggaggtggtgggggagataatcacttcaccaactgcagtgcatttgtgtgtttttaaccctcagagaactctgcattttagggtacttgaggctgacttaactaaaagttttaaagtaaccttttttccattgtaaatatttctgtaaatactaccaattggaaattagaacagtagagtacttttctgaatccaatcctatttttattttatacagtatttctcagctgtgatctttggagcaaaagccaacggcaggaaaaaatagtttgtaccagtttcatgaagtatgtctttgggtttttgtaaataattttaactcaaataaaattgctactttcaataca

SEQ ID NO: 199585 - DNA, 1801 bp, Homo sapiens
  Payload ID: 19379
  Gene Name: WAPL cohesin release factor
  ENST ID: ENST00000372075
  CDS Start-End: 60-1268
agaatctgtccctctgtacagctgccctcatgtatatactgagtagagatcgtttgaacatggatcttgatagagctagcttagatctaatgattcgacttttggaactggaacaagatgcttcatcagccaagctactgaatgaaaaagacatgaacaaaattaaagaaaaaatccgaaggctctgtgaaactgtacacaacaagcatcttgatctagaaaatataacgactgggcatttagctatggagacattattatcccttacttctaaacgagcaggagactggtttaaagaagaactccggcttttgggtggtctggatcatattgtagataaagtaaaagaatgtgtggatcatttaagtagagatgaggatgaagagaaactggtagcctcactatggggagcagagagatgtttacgagttttagaaagtgtaactgtgcataatcccgaaaatcaaagctacttgatagcatataaagattcccaacttattgtttcatcagctaaagcattacagcattgtgaagaactgattcagcagtacaaccgtgctgaggacagcatatgcttagctgacagtaagcctctgcctcaccagaatgtaactaaccatgtaggcaaagcagtggaggactgcatgagggccatcatcggggtgttgcttaatttaactaatgataatgagtggggcagcaccaaaacaggagagcaggacggtctcataggcacagcgctgaactgtgtgcttcaggttccaaagtacctacctcaggagcagagatttgatattcgagtgctgctattccttgagcgagagcgggcagcccagctagcagaaagtaaaacagatgagttgatcaaagatgctcccaccactcagcatgataagagtggagagtggcaagaaacaagtggagaaatacagtgggtgtcaactgaaaagactgatggtacagaagagaaacataagaaggaggaggaggatgaagaacttgacctcaataaagcccttcagcatgccggcaaacacatggaggattgcattgtggcctcctacacagcactacttcttgggtgtctctgccaggaaagtccaatcaatgtaaccactgtgcgggaatatctgccagaaggagacttttcaataatgacagagatgctcaaaaaatttttgagttttatgaatctcacttgtgctgttggaacaactggccagaaatctatctctagagtgattgaatatttggaacattgctagctgctttacctttgcttcaggtgctcggtaatgctggagctatccttagacaaagaaaagtcaagtcatgaaagaagtccttgaagatataccaagaacattcatcagtatcattcgtgtttggatttttaaggccacctgatttcttcgtcatgcattcggcatttgctaaatgacagttactacatcaatctgcaactatcaaaaatgaggggaaaaggttcaggctgttaacaattccatgcagtatttaaatacatttactttggcagagtttataccctccccttgttttcttgctttattctgggcaagtttgaaggggaaaatttgtgctgctgttagtgcaactgctgtgtatgttgagccactgttgtcatgccagccaggtgcaaaggcagcttagctactgaggtagcgaatgttctgaggacattctagacaacagcttagttcctttttcaggctcatttgcttttgcttttttgttgaatgattccaatcgtaaataaagcttttaataattttgtgaa

SEQ ID NO: 199586 - DNA, 6152 bp, Homo sapiens
  Payload ID: 19379
  Gene Name: WAPL cohesin release factor
  Uniprot ID: Q7Z5K2
  ENST ID: ENST00000618527
  CDS Start-End: 294-3866
ggaaggaggtgggggccgggagcgcaaatggcgttgagatggttcagggccctgttcaaactccagcactgaccattcaccggcggaagcggcgccgctcctgcccccccaaccgggcttcctatttaccgaaagcagagtccctcgcctctctcggctctcacctgccggccctgctctcccgcgcgagggttccgcgcccgcccgcgggccgtagggagcgggagaggcggaggcggcccgtggccaaagcacccgccaggctccgaggagaatatgaaactggtgtcaaaatgacatccagatttgggaaaacatacagtaggaaaggtggaaatggcagttcaaaattcgatgaagtcttttccaacaaacggactacccttagcacaaaatggggagagaccacatttatggctaaattagggcagaagaggcccaatttcaaaccagatatccaagaaattccgaagaaacctaaagtggaagaagaaagtactggagatccttttggatttgatagtgatgatgagtctctaccagtttcttcaaagaatttagcccaggttaagtgttcctcttattcagaatctagtgaagctgctcagttggaagaggtcacttcagtacttgaagctaatagcaaaattagtcatgtggtcgttgaagacactgtcgtttctgataaatgcttccctttggaggacactttacttgggaaagaaaagagcacaaaccgaattgtagaagatgatgcaagcataagtagctgtaataaattaataacttcagataaagtggagaattttcatgaagaacatgaaaagaatagtcaccatattcacaaaaatgctgatgacagtactaagaaacccaatgcagaaactacagtggcttctgaaatcaaggaaacaaatgatacttggaactcccagtttgggaaaaggccagaatcaccatcagaaatatctccaatcaagggatctgttagaactggtttgtttgaatgggataatgattttgaagatatcagatcagaagactgtattttaagtttggatagtgatccccttttggagatgaaggatgacgattttaaaaatcgattggaaaatctgaatgaagccattgaggaagatattgtacaaagtgttcttaggccaaccaactgtaggacgtactgtagggccaataaaacgaaatcctcccaaggagcatcaaattttgataagctgatggacggcaccagtcaggccttagccaaagcaaacagtgaatcgagtaaagatggcctgaatcaggcaaagaaagggggtgtaagttgtgggaccagttttagagggacagttggacggactagagattacactgttttacatccatcttgcttgtcagtttgtaatgttaccatacaggatactatggaacgcagcatggatgagttcactgcatccactcctgcagatttgggagaagctggtcgtctcagaaaaaaggcagatattgcaacttctaagactactactagatttcgacctagtaatactaaatccaaaaaggatgttaaacttgaattttttggttttgaagatcatgagacaggaggtgatgaaggaggttctggaagttctaattacaaaattaagtattttggctttgatgatctcagtgaaagcgaagatgatgaagatgatgactgtcaagtagaaagaaagacaagcaaaaaaagaactaaaacagctccatcaccctccttgcagcctcccccagaaagcaatgataattcccaggacagtcagtctggtactaacaatgcagaaaacttggattttacagaggacttgcctggtgtgcctgaaagtgtgaagaagcccataaataaacaaggagataaatcaaaggaaaataccagaaagatttttagtggccccaaacggtcacccacaaaagctgtatataatgccagacattggaatcatccagattcagaagaactgcctgggccaccagtagtaaaacctcagagtgtcacagtgaggctgtcttcaaaggaaccaaatcaaaaagatgatggagtttttaaggctcctgcaccaccatccaaagtgataaaaactgtgacaatacctactcagccctaccaagatatagttactgcactgaaatgcagacgagaagacaaagaattatatactgttgttcagcacgtgaagcacttcaacgatgttgtagaatttggtgaaaatcaagagttcactgatgacattgagtacttgttaagtggcttaaagagcactcagcctctaaacacacgttgccttagtgttattagcttggctactaaatgtgccatgcccagttttcgaatgcacctgagagcacatgggatggtagcaatggtctttaaaaccttggatgattcccagcaccatcagaatctgtccctctgtacagctgccctcatgtatatactgagtagagatcgtttgaacatggatcttgatagagctagcttagatctaatgattcgacttttggaactggaacaagatgcttcatcagccaagctactgaatgaaaaagacatgaacaaaattaaagaaaaaatccgaaggctctgtgaaactgtacacaacaagcatcttgatctagaaaatataacgactgggcatttagctatggagacattattatcccttacttctaaacgagcaggagactggtttaaagaagaactccggcttttgggtggtctggatcatattgtagataaagtaaaagaatgtgtggatcatttaagtagagatgaggatgaagagaaactggtagcctcactatggggagcagagagatgtttacgagttttagaaagtgtaactgtgcataatcccgaaaatcaaagctacttgatagcatataaagattcccaacttattgtttcatcagctaaagcattacagcattgtgaagaactgattcagcagtacaaccgtgctgaggacagcatatgcttagctgacagtaagcctctgcctcaccagaatgtaactaaccatgtaggcaaagcagtggaggactgcatgagggccatcatcggggtgttgcttaatttaactaatgataatgagtggggcagcaccaaaacaggagagcaggacggtctcataggcacagcgctgaactgtgtgcttcaggttccaaagtacctacctcaggagcagagatttgatattcgagtgctgggcttaggtctgctgataaatctagtggagtatagtgctcggaatcggcactgtcttgtcaacatggaaacatcgtgctcttttgattcttccatctgtagtggagaaggggatgatagtttaaggataggtggacaagttcatgctgtccaggctttagtgcagctattccttgagcgagagcgggcagcccagctagcagaaagtaaaacagatgagttgatcaaagatgctcccaccactcagcatgataagagtggagagtggcaagaaacaagtggagaaatacagtgggtgtcaactgaaaagactgatggtacagaagagaaacataagaaggaggaggaggatgaagaacttgacctcaataaagcccttcagcatgccggcaaacacatggaggattgcattgtggcctcctacacagcactacttcttgggtgtctctgccaggaaagtccaatcaatgtaaccactgtgcgggaatatctgccagaaggagacttttcaataatgacagagatgctcaaaaaatttttgagttttatgaatctcacttgtgctgttggaacaactggccagaaatctatctctagagtgattgaatatttggaacattgctagctgctttacctttgcttcaggtgctcggtaatgctggagctatccttagacaaagaaaagtcaagtcatgaaagaagtccttgaagatataccaagaacattcatcagtatcattcgtgtttggatttttaaggccacctgatttcttcgtcatgcattcggcatttgctaaatgacagttactacatcaatctgcaactatcaaaaatgaggggaaaaggttcaggctgttaacaattccatgcagtatttaaatacatttactttggcagagtttataccctccccttgttttcttgctttattctgggcaagtttgaaggggaaaatttgtgctgctgttagtgcaactgctgtgtatgttgagccactgttgtcatgccagccaggtgcaaaggcagcttagctactgaggtagcgaatgttctgaggacattctagacaacagcttagttcctttttcaggctcatttgcttttgcttttttgttgaatgattccaatcgtaaataaagcttttaataattttgtgaattttttggttgttgttccctgaactactgtctatatttaaaattagatggaatccaaagatacacgggattaatagtatatttttttattcttgattaggtttgggttattgaactattttttacttttgagaccacaaccatattcaatatcataccataatgtgtcatagctataggcacaagaaaaacaacagtttgagagaatattatataagatgatgtgccctgttaaaaggaggaggcaaaatagtcaaacccagggtagtttacacttaatgctagggaggctcttaaaacattattagattttgaggaaagactctctagatatattttctaatgttcagtacaataaatataaggaagctaaaacaccaatgtggaattcctgtttccagataacatgtatattcttctatagagtgacaggatcaattgcataagcgcaaagccttaaattgctggtttagagaagacccttttttcattcagattctttgttcgtagagcagttatttgaaaaacagttatggaacacaaaacattttatagatttaatatcataacattgcaaatttttcttgtattattcacaccactggttatacttttttttttccttttttattgattgggcctgaatacaggctttctagagatctttttcattaatacttttaaatacctttcaggtagttacatcatgtttcttcattggatttgtaaaacttgaagccataaaaatattagtttggtgtgtattggggaaaatagctaaaagtctaatttttacccatttagactttgttatttccttgtataaagtgacaaatcggggctcttgtatcagtgccagctgtaatgtttttaaatgcagtggctgccttctattgtcttcctatttttgataatgcagattgttgggaaatctgtaaggaagtaactgattccaggcaaattgttttcttccttctacccaccccaacccctacccatcaccttttaagaacatagtacgccagtgtaacgtgggaaccattgagattgtatttgccctgagtattaaagctagcttagcaaaatacttttaaaaacatattggtaaatgatacccgtaaaattaaattagttatattttattttaaaatgcaaaatacattgatatttattaatcattggatttagggaaagggacagatttttggtgaacctgacttgtggcagatggtaaggaatattataaaacatttggatgagaacaatcagggcgaactgcatttttctgttacactggtaatcatttgaaaattgatttacctcagtgtttaacagttttttgttttgttttgttttttaaataataactaattgtcgagcactgatagagatgcagattttggtggggggaggtggtgggggagataatcacttcaccaactgcagtgcatttgtgtgtttttaaccctcagagaactctgcattttagggtacttgaggctgacttaactaaaagttttaaagtaaccttttttccattgtaaatatttctgtaaatactaccaattggaaattagaacagtagagtacttttctgaatccaatcctatttttattttatacagtatttctcagctgtgatctttggagcaaaagccaacggcaggaaaaaatagtttgtaccagtttcatgaagtatgtctttgggtttttgtaaataattttaactcaaataaaattgctactttcaatac

SEQ ID NO: 199587 - DNA, 1827 bp, Homo sapiens
  Payload ID: 19380
  Gene Name: WAS protein family homolog 1
  Uniprot ID: A8K0Z3
  ENST ID: ENST00000442898
  CDS Start-End: 144-1541
ctattctaggcacttcacaaaactggactcatacgatatctgtagttttgcgtctggcttctctattgaattcttaaaggggggtgggaactaagcagatcacaagggagctgcccacagaggtaaagacaaggtcaggcaccatgactcctgtgaggatgcagcactccctggcaggtcagacctatgccgtgcccttcatccagccagacctgcggcgagaggaggccgtccagcagatggcggatgccctgcagtacctgcagaaggtctctggagacatcttcagcaggatctcccagcaggtagagcagagccggagccaggtgcaggccattggagagaaggtctccttggcccaggccaagattgagaagatcaagggcagcaagaaggccatcaaggtgttctccagtgccaagtaccctgctccagggcgcctgcaggaatatggctccatcttcacgggcgcccaggaccctggcctgcagagacgcccccgccacaggatccagagcaagcaccgccccctggacgagcgggccctgcaggagaagctgaaggactttcctgtgtgcgtgagcaccaagccggagcccgaggacgatgcagaagagggacttgggggtcttcccagcaacatcagctctgtcagctccttgctgctcttcaacaccaccgagaacctgtacaagaagtatgtcttcctggaccccctggctggtgctgtaacaaagacccatgtgatgctgggggcagagacagaggagaagctgtttgatgcccccttgtccatcagcaagagagagcagctggaacagcaggtcccagagaactacttctatgtgccagacctgggccaggtgcctgagatccatgttccatcctacctgcctgacctgcccggcattgccaacgacctcatgtacagtgccgacctgggccccggcattgccccctctgcccctggcaccattccagaactgcccaccttccacactgaggtagccgagcctctcaaggtagacctacaagatggggtactaacaccacccccaccgcccccaccaccacccccagctcctgaggtgctggccagtgcacccccactcccaccctcaaccgcggcccctgtaggccaaggcgccaggcaggacgacagcagcagcagcgcatctccttcagtccagggagctcccagggaagtggtcgacccctccggtggctgggccactctgctagagtccatccgccaagctgggggcatcggcaaggccaagctgcgcagcatgaaggagcgaaagctggagaagcagcagcagaaggagcaggagcaagtgagagccacgagccaaggtgggcacttgatgtcggatctcttcaacaagctggtcatgaggcgcaagggcatctctgggaaaggacctggggctggtgaggggcccggaggagcctttgtccgcgtgtcagactccatccctcctttgccgccaccgcagcagccacaggcagaggaggacgaggacgactgggaatcgtagggggctccatgacaccttcccccccagacccagacttgggccgttgctctgacatggacacagccaggacaagctgctcagacctgcttccctgggagggggtgacggaaccagcagtgtgtggagaccagcttcaaggagcggaaggctggcttgaggccacacagctggggcggggacttgtctgcctgtacttcatggggggacggctccacccagcctgcgccactgtgttcttaagaggcttccagagaaaacggcacaccaatcaataaagaactgagca

SEQ ID NO: 199588 - DNA, 904 bp, Homo sapiens
  Payload ID: 19381
  Gene Name: WAS protein family, member 1
  ENST ID: ENST00000265601
  CDS Start-End: 483-904
gcgcgtcgagcacacggtgggtccggcggcgggttggcgccccaggcggcgttccctgtggcctggcgcctgggccgctgccctgagcgggttccgccccagagcccgaccctcctgggggctctaggcggagtcccgcgagccgagggggaccggcgaccgctgccgaagcatgaagaaggggtaaggcgtgagcccccaagatttcacgcatgccccctagcttcggtactctgacaccttctcttgcacttgcggatgatgaactggaataacgatgaaagaaagcacatccgatctcaacattcacgtcctgccctataaccgattaattaattgatccccagctagactagtgttggagaaatcagcatgttaaaacaactgttgatgatagctgttggagtaaagttgcagtggaagctatggctgcaaaatcgttaaaatcttcaaggtgaactggcacaaaggttaatctcaagatgccgctagtgaaaagaaacatcgatcctaggcacttgtgccacacagcactgcctagaggcattaagaatgaactggaatgtgtaaccaatatttccttggcaaatataattagacaactaagtagcctaagtaaatatgctgaagatatatttggagaattattcaatgaagcacatagtttttccttcagagtcaactcattgcaagaacgtgtggaccgtttatctgttagtgttacacagcttgatccaaaggaagaagaattgtctttgcaagatataacaatgaggaaagctttccgaagttctacaattcaagaccagcagcttttcgatcgcaagactttgcctattccattacaggagacgtacgatgtttgtgaacagcctccacctctcaatatactcactccttatag

SEQ ID NO: 199589 - DNA, 3075 bp, Homo sapiens
  Payload ID: 19381
  Gene Name: WAS protein family, member 1
  Uniprot ID: Q92558
  ENST ID: ENST00000359451
  CDS Start-End: 693-2372
agcagtgttctcttcgtccccctcccccaaactgaggattgggcaataccacagaacctcaggaaaggggggaagagcgagcttcggccccactaatgggggagtgggcggaggctggatttcccacctcggctgcacctgggcactggaggctgaagaggaaagtgagaatctgaagttttgagacctctgactggccaggaatagctcctggggcggggggcaaggatgggaccataggcggaaagagtctcgcggtcccccctgcttctggcgcgggtccctgcgcccggttgtggagcgtctcgcgcggggagggggcggggggaacggcagctcgcggtgttgttcactcgcgcgtcgagcacacggtgggtccggcggcgggttggcgccccaggcggcgttccctgtggcctggcgcctgggccgctgccctgagcgggttccgccccagagcccgaccctcctgggggctctaggcggagtcccgcgagccgagggggaccggcgaccgctgccgaagcatgaagaaggggtaaggcgtgagcccccaagatttcacgtgttggagaaatcagcatgttaaaacaactgttgatgatagctgttggagtaaagttgcagtggaagctatggctgcaaaatcgttaaaatcttcaaggtgaactggcacaaaggttaatctcaagatgccgctagtgaaaagaaacatcgatcctaggcacttgtgccacacagcactgcctagaggcattaagaatgaactggaatgtgtaaccaatatttccttggcaaatataattagacaactaagtagcctaagtaaatatgctgaagatatatttggagaattattcaatgaagcacatagtttttccttcagagtcaactcattgcaagaacgtgtggaccgtttatctgttagtgttacacagcttgatccaaaggaagaagaattgtctttgcaagatataacaatgaggaaagctttccgaagttctacaattcaagaccagcagcttttcgatcgcaagactttgcctattccattacaggagacgtacgatgtttgtgaacagcctccacctctcaatatactcactccttatagagatgatggtaaagaaggtctgaagttttataccaatccttcgtatttctttgatctatggaaagaaaaaatgttgcaagatacagaggataagaggaaggaaaagaggaagcagaagcagaaaaatctagatcgtcctcatgaaccagaaaaagtgccaagagcacctcatgacaggcggcgagaatggcagaagctggcccaaggtccagagctggctgaagatgatgctaatctcttacataagcatattgaagttgctaatggcccagcctctcattttgaaacaagacctcagacatacgtggatcatatggatggatcttactcactttctgccttgccatttagtcagatgagtgagcttctgactagagctgaggaaagggtattagtcagaccacatgaaccacctccacctccaccaatgcatggagcaggagatgcaaaaccgatacccacctgtatcagttctgctacaggtttgatagaaaatcgccctcagtcaccagctacaggcagaacacctgtgtttgtgagccccactcccccacctcctccaccacctcttccatctgccttgtcaacttcctcattaagagcttcaatgacttcaactcctccccctccagtacctcccccacctccacctccagccactgctttgcaagctccagcagtaccaccacctccagctcctcttcagattgcccctggagttcttcacccagctcctcctccaattgcacctcctctagtacagccctctccaccagtagctagagctgccccagtatgtgagactgtaccagttcatccactcccacaaggtgaagttcaggggctgcctccacccccaccaccgcctcctctgcctccacctggcattcgaccatcatcacctgtcacagttacagctcttgctcatcctccctctgggctacatccaactccatctactgccccaggtccccatgttccattaatgcctccatctcctccatcacaagttatacctgcttctgagccaaagcgccatccatcaaccctacctgtaatcagtgatgccaggagtgtgctactggaagcaatacgaaaaggtattcagctacgcaaagtagaagagcagcgtgaacaggaagctaagcatgaacgcattgaaaacgatgttgccaccatcctgtctcgccgtattgctgttgaatatagtgattcggaagatgattcagaatttgatgaagtagattggttggagtaagaaaaatgcattgataaatattacaaaactgaatgcaaatgtcctttgtggtgcttgttccttgaaaatgtttggtcattctagtgttttgctttcttttccttataataaatgacccttttcctccataacttttgatttctaaggaaaatattagcatacatttcaaactaaatgttttacagtggcttatcttttttttccccctgaaaagactaatttggtcaaataaaccactaagtattaagcatggacagctgttgttagagtagcagattcagttttttgatatatcttaattgtgtactttgtgaattttaatttaaagaaagcaactgaaattgaaatcttgagggcagctgtgtctactaatgagccttattccatttcctgatgttttaaaagaagaaacactgccttgattatacgaatacactcagaaagtacatttagcttgtagtgttgaattctcttaaaggaatgcttgaattttttcattattgttttattgtttttatatacttgccttatttgaatgtttagcagtatccccttcccacttatatattgtgtgatatgattttgcttgcctataggagttaaaaacttttccatgtgaaatactctgacttaaacatacatgtaacttacataactgttaagaataacagtctgatttaataaatggttcattttaaaagtt

SEQ ID NO: 199590 - DNA, 678 bp, Homo sapiens
  Payload ID: 19381
  Gene Name: WAS protein family, member 1
  ENST ID: ENST00000368938
  CDS Start-End: 257-678
cttcggccccactaatgggggagtgggcggaggctggatttcccacctcggctgcacctgggcactggaggctgaagaggaaacatgccccctagcttcggtactctgacaccttctcttgcacttgcggatgatgaactggaataacgatgaaagaaagcacatccgatctcaacattcacgtcctgccctataaccgattaattaattgatccccagctagactaggtgaactggcacaaaggttaatctcaagatgccgctagtgaaaagaaacatcgatcctaggcacttgtgccacacagcactgcctagaggcattaagaatgaactggaatgtgtaaccaatatttccttggcaaatataattagacaactaagtagcctaagtaaatatgctgaagatatatttggagaattattcaatgaagcacatagtttttccttcagagtcaactcattgcaagaacgtgtggaccgtttatctgttagtgttacacagcttgatccaaaggaagaagaattgtctttgcaagatataacaatgaggaaagctttccgaagttctacaattcaagaccagcagcttttcgatcgcaagactttgcctattccattacaggagacgtacgatgtttgtgaacagcctccacctctcaatatactcactccttatag

SEQ ID NO: 199591 - DNA, 2815 bp, Homo sapiens
  Payload ID: 19381
  Gene Name: WAS protein family, member 1
  Uniprot ID: Q92558
  ENST ID: ENST00000392586
  CDS Start-End: 433-2112
agtgttctcttcgtccccctcccccaaactgaggattgggcaataccacagaacctcaggaaaggggggaagagcgagcttcggccccactaatgggggagtgggcggaggctggatttcccacctcggctgcacctgggcactggaggctgaagaggaaacatgccccctagcttcggtactctgacaccttctcttgcacttgcggatgatgaactggaataacgatgaaagaaagcacatccgatctcaacattcacgtcctgccctataaccgattaattaattgatccccagctagactagtgttggagaaatcagcatgttaaaacaactgttgatgatagctgttggagtaaagttgcagtggaagctatggctgcaaaatcgttaaaatcttcaaggtgaactggcacaaaggttaatctcaagatgccgctagtgaaaagaaacatcgatcctaggcacttgtgccacacagcactgcctagaggcattaagaatgaactggaatgtgtaaccaatatttccttggcaaatataattagacaactaagtagcctaagtaaatatgctgaagatatatttggagaattattcaatgaagcacatagtttttccttcagagtcaactcattgcaagaacgtgtggaccgtttatctgttagtgttacacagcttgatccaaaggaagaagaattgtctttgcaagatataacaatgaggaaagctttccgaagttctacaattcaagaccagcagcttttcgatcgcaagactttgcctattccattacaggagacgtacgatgtttgtgaacagcctccacctctcaatatactcactccttatagagatgatggtaaagaaggtctgaagttttataccaatccttcgtatttctttgatctatggaaagaaaaaatgttgcaagatacagaggataagaggaaggaaaagaggaagcagaagcagaaaaatctagatcgtcctcatgaaccagaaaaagtgccaagagcacctcatgacaggcggcgagaatggcagaagctggcccaaggtccagagctggctgaagatgatgctaatctcttacataagcatattgaagttgctaatggcccagcctctcattttgaaacaagacctcagacatacgtggatcatatggatggatcttactcactttctgccttgccatttagtcagatgagtgagcttctgactagagctgaggaaagggtattagtcagaccacatgaaccacctccacctccaccaatgcatggagcaggagatgcaaaaccgatacccacctgtatcagttctgctacaggtttgatagaaaatcgccctcagtcaccagctacaggcagaacacctgtgtttgtgagccccactcccccacctcctccaccacctcttccatctgccttgtcaacttcctcattaagagcttcaatgacttcaactcctccccctccagtacctcccccacctccacctccagccactgctttgcaagctccagcagtaccaccacctccagctcctcttcagattgcccctggagttcttcacccagctcctcctccaattgcacctcctctagtacagccctctccaccagtagctagagctgccccagtatgtgagactgtaccagttcatccactcccacaaggtgaagttcaggggctgcctccacccccaccaccgcctcctctgcctccacctggcattcgaccatcatcacctgtcacagttacagctcttgctcatcctccctctgggctacatccaactccatctactgccccaggtccccatgttccattaatgcctccatctcctccatcacaagttatacctgcttctgagccaaagcgccatccatcaaccctacctgtaatcagtgatgccaggagtgtgctactggaagcaatacgaaaaggtattcagctacgcaaagtagaagagcagcgtgaacaggaagctaagcatgaacgcattgaaaacgatgttgccaccatcctgtctcgccgtattgctgttgaatatagtgattcggaagatgattcagaatttgatgaagtagattggttggagtaagaaaaatgcattgataaatattacaaaactgaatgcaaatgtcctttgtggtgcttgttccttgaaaatgtttggtcattctagtgttttgctttcttttccttataataaatgacccttttcctccataacttttgatttctaaggaaaatattagcatacatttcaaactaaatgttttacagtggcttatcttttttttccccctgaaaagactaatttggtcaaataaaccactaagtattaagcatggacagctgttgttagagtagcagattcagttttttgatatatcttaattgtgtactttgtgaattttaatttaaagaaagcaactgaaattgaaatcttgagggcagctgtgtctactaatgagccttattccatttcctgatgttttaaaagaagaaacactgccttgattatacgaatacactcagaaagtacatttagcttgtagtgttgaattctcttaaaggaatgcttgaattttttcattattgttttattgtttttatatacttgccttatttgaatgtttagcagtatccccttcccacttatatattgtgtgatatgattttgcttgcctataggagttaaaaacttttccatgtgaaatactctgacttaaacatacatgtaacttacataactgttaagaataacagtctgatttaataaatggttcattttaaaagtt

SEQ ID NO: 199592 - DNA, 2675 bp, Homo sapiens
  Payload ID: 19381
  Gene Name: WAS protein family, member 1
  Uniprot ID: Q92558
  ENST ID: ENST00000392587
  CDS Start-End: 293-1972
gtctcgcgcggggagggggcggggggaacggcagctcgcggtgttgttcactcgcgcgtcgagcacacggtgggtccggcggcgggttggcgccccaggcggcgttccctgtggcctggcgcctgggccgctgccctgagcgggttccgccccagagcccgaccctcctgggggctctaggcggagtcccgcgagccgagggggaccggcgaccgctgccgaagcatgaagaaggggtaaggcgtgagcccccaagatttcacggtgaactggcacaaaggttaatctcaagatgccgctagtgaaaagaaacatcgatcctaggcacttgtgccacacagcactgcctagaggcattaagaatgaactggaatgtgtaaccaatatttccttggcaaatataattagacaactaagtagcctaagtaaatatgctgaagatatatttggagaattattcaatgaagcacatagtttttccttcagagtcaactcattgcaagaacgtgtggaccgtttatctgttagtgttacacagcttgatccaaaggaagaagaattgtctttgcaagatataacaatgaggaaagctttccgaagttctacaattcaagaccagcagcttttcgatcgcaagactttgcctattccattacaggagacgtacgatgtttgtgaacagcctccacctctcaatatactcactccttatagagatgatggtaaagaaggtctgaagttttataccaatccttcgtatttctttgatctatggaaagaaaaaatgttgcaagatacagaggataagaggaaggaaaagaggaagcagaagcagaaaaatctagatcgtcctcatgaaccagaaaaagtgccaagagcacctcatgacaggcggcgagaatggcagaagctggcccaaggtccagagctggctgaagatgatgctaatctcttacataagcatattgaagttgctaatggcccagcctctcattttgaaacaagacctcagacatacgtggatcatatggatggatcttactcactttctgccttgccatttagtcagatgagtgagcttctgactagagctgaggaaagggtattagtcagaccacatgaaccacctccacctccaccaatgcatggagcaggagatgcaaaaccgatacccacctgtatcagttctgctacaggtttgatagaaaatcgccctcagtcaccagctacaggcagaacacctgtgtttgtgagccccactcccccacctcctccaccacctcttccatctgccttgtcaacttcctcattaagagcttcaatgacttcaactcctccccctccagtacctcccccacctccacctccagccactgctttgcaagctccagcagtaccaccacctccagctcctcttcagattgcccctggagttcttcacccagctcctcctccaattgcacctcctctagtacagccctctccaccagtagctagagctgccccagtatgtgagactgtaccagttcatccactcccacaaggtgaagttcaggggctgcctccacccccaccaccgcctcctctgcctccacctggcattcgaccatcatcacctgtcacagttacagctcttgctcatcctccctctgggctacatccaactccatctactgccccaggtccccatgttccattaatgcctccatctcctccatcacaagttatacctgcttctgagccaaagcgccatccatcaaccctacctgtaatcagtgatgccaggagtgtgctactggaagcaatacgaaaaggtattcagctacgcaaagtagaagagcagcgtgaacaggaagctaagcatgaacgcattgaaaacgatgttgccaccatcctgtctcgccgtattgctgttgaatatagtgattcggaagatgattcagaatttgatgaagtagattggttggagtaagaaaaatgcattgataaatattacaaaactgaatgcaaatgtcctttgtggtgcttgttccttgaaaatgtttggtcattctagtgttttgctttcttttccttataataaatgacccttttcctccataacttttgatttctaaggaaaatattagcatacatttcaaactaaatgttttacagtggcttatcttttttttccccctgaaaagactaatttggtcaaataaaccactaagtattaagcatggacagctgttgttagagtagcagattcagttttttgatatatcttaattgtgtactttgtgaattttaatttaaagaaagcaactgaaattgaaatcttgagggcagctgtgtctactaatgagccttattccatttcctgatgttttaaaagaagaaacactgccttgattatacgaatacactcagaaagtacatttagcttgtagtgttgaattctcttaaaggaatgcttgaattttttcattattgttttattgtttttatatacttgccttatttgaatgtttagcagtatccccttcccacttatatattgtgtgatatgattttgcttgcctataggagttaaaaacttttccatgtgaaatactctgacttaaacatacatgtaacttacataactgttaagaataacagtctgatttaataaatggttcattttaaaagtt

SEQ ID NO: 199593 - DNA, 3122 bp, Homo sapiens
  Payload ID: 19381
  Gene Name: WAS protein family, member 1
  Uniprot ID: Q92558
  ENST ID: ENST00000392588
  CDS Start-End: 740-2419
agcagtgttctcttcgtccccctcccccaaactgaggattgggcaataccacagaacctcaggaaaggggggaagagcgagcttcggccccactaatgggggagtgggcggaggctggatttcccacctcggctgcacctgggcactggaggctgaagaggaaagtgagaatctgaagttttgagacctctgactggccaggaatagctcctggggcggggggcaaggatgggaccataggcggaaagagtctcgcggtcccccctgcttctggcgcgggtccctgcgcccggttgtggagcgtctcgcgcggggagggggcggggggaacggcagctcgcggtgttgttcactcgcgcgtcgagcacacggtgggtccggcggcgggttggcgccccaggcggcgttccctgtggcctggcgcctgggccgctgccctgagcgggttccgccccagagcccgaccctcctgggggctctaggcggagtcccgcgagccgagggggaccggcgaccgctgccgaagcatgaagaaggggtaaggcgtgagcccccaagatttcacgcatgccccctagcttcggtactctgacaccttctcttgcacttgcggatgatgaactggaataacgatgaaagaaagcacatccgatctcaacattcacgtcctgccctataaccgattaattaattgatccccagctagactaggtgaactggcacaaaggttaatctcaagatgccgctagtgaaaagaaacatcgatcctaggcacttgtgccacacagcactgcctagaggcattaagaatgaactggaatgtgtaaccaatatttccttggcaaatataattagacaactaagtagcctaagtaaatatgctgaagatatatttggagaattattcaatgaagcacatagtttttccttcagagtcaactcattgcaagaacgtgtggaccgtttatctgttagtgttacacagcttgatccaaaggaagaagaattgtctttgcaagatataacaatgaggaaagctttccgaagttctacaattcaagaccagcagcttttcgatcgcaagactttgcctattccattacaggagacgtacgatgtttgtgaacagcctccacctctcaatatactcactccttatagagatgatggtaaagaaggtctgaagttttataccaatccttcgtatttctttgatctatggaaagaaaaaatgttgcaagatacagaggataagaggaaggaaaagaggaagcagaagcagaaaaatctagatcgtcctcatgaaccagaaaaagtgccaagagcacctcatgacaggcggcgagaatggcagaagctggcccaaggtccagagctggctgaagatgatgctaatctcttacataagcatattgaagttgctaatggcccagcctctcattttgaaacaagacctcagacatacgtggatcatatggatggatcttactcactttctgccttgccatttagtcagatgagtgagcttctgactagagctgaggaaagggtattagtcagaccacatgaaccacctccacctccaccaatgcatggagcaggagatgcaaaaccgatacccacctgtatcagttctgctacaggtttgatagaaaatcgccctcagtcaccagctacaggcagaacacctgtgtttgtgagccccactcccccacctcctccaccacctcttccatctgccttgtcaacttcctcattaagagcttcaatgacttcaactcctccccctccagtacctcccccacctccacctccagccactgctttgcaagctccagcagtaccaccacctccagctcctcttcagattgcccctggagttcttcacccagctcctcctccaattgcacctcctctagtacagccctctccaccagtagctagagctgccccagtatgtgagactgtaccagttcatccactcccacaaggtgaagttcaggggctgcctccacccccaccaccgcctcctctgcctccacctggcattcgaccatcatcacctgtcacagttacagctcttgctcatcctccctctgggctacatccaactccatctactgccccaggtccccatgttccattaatgcctccatctcctccatcacaagttatacctgcttctgagccaaagcgccatccatcaaccctacctgtaatcagtgatgccaggagtgtgctactggaagcaatacgaaaaggtattcagctacgcaaagtagaagagcagcgtgaacaggaagctaagcatgaacgcattgaaaacgatgttgccaccatcctgtctcgccgtattgctgttgaatatagtgattcggaagatgattcagaatttgatgaagtagattggttggagtaagaaaaatgcattgataaatattacaaaactgaatgcaaatgtcctttgtggtgcttgttccttgaaaatgtttggtcattctagtgttttgctttcttttccttataataaatgacccttttcctccataacttttgatttctaaggaaaatattagcatacatttcaaactaaatgttttacagtggcttatcttttttttccccctgaaaagactaatttggtcaaataaaccactaagtattaagcatggacagctgttgttagagtagcagattcagttttttgatatatcttaattgtgtactttgtgaattttaatttaaagaaagcaactgaaattgaaatcttgagggcagctgtgtctactaatgagccttattccatttcctgatgttttaaaagaagaaacactgccttgattatacgaatacactcagaaagtacatttagcttgtagtgttgaattctcttaaaggaatgcttgaattttttcattattgttttattgtttttatatacttgccttatttgaatgtttagcagtatccccttcccacttatatattgtgtgatatgattttgcttgcctataggagttaaaaacttttccatgtgaaatactctgacttaaacatacatgtaacttacataactgttaagaataacagtctgatttaataaatggttcattttaaaagtt

SEQ ID NO: 199594 - DNA, 3220 bp, Homo sapiens
  Payload ID: 19381
  Gene Name: WAS protein family, member 1
  Uniprot ID: Q92558
  ENST ID: ENST00000392589
  CDS Start-End: 838-2517
agcagtgttctcttcgtccccctcccccaaactgaggattgggcaataccacagaacctcaggaaaggggggaagagcgagcttcggccccactaatgggggagtgggcggaggctggatttcccacctcggctgcacctgggcactggaggctgaagaggaaagtgagaatctgaagttttgagacctctgactggccaggaatagctcctggggcggggggcaaggatgggaccataggcggaaagagtctcgcggtcccccctgcttctggcgcgggtccctgcgcccggttgtggagcgtctcgcgcggggagggggcggggggaacggcagctcgcggtgttgttcactcgcgcgtcgagcacacggtgggtccggcggcgggttggcgccccaggcggcgttccctgtggcctggcgcctgggccgctgccctgagcgggttccgccccagagcccgaccctcctgggggctctaggcggagtcccgcgagccgagggggaccggcgaccgctgccgaagcatgaagaaggggtaaggcgtgagcccccaagatttcacgcatgccccctagcttcggtactctgacaccttctcttgcacttgcggatgatgaactggaataacgatgaaagaaagcacatccgatctcaacattcacgtcctgccctataaccgattaattaattgatccccagctagactagtgttggagaaatcagcatgttaaaacaactgttgatgatagctgttggagtaaagttgcagtggaagctatggctgcaaaatcgttaaaatcttcaaggtgaactggcacaaaggttaatctcaagatgccgctagtgaaaagaaacatcgatcctaggcacttgtgccacacagcactgcctagaggcattaagaatgaactggaatgtgtaaccaatatttccttggcaaatataattagacaactaagtagcctaagtaaatatgctgaagatatatttggagaattattcaatgaagcacatagtttttccttcagagtcaactcattgcaagaacgtgtggaccgtttatctgttagtgttacacagcttgatccaaaggaagaagaattgtctttgcaagatataacaatgaggaaagctttccgaagttctacaattcaagaccagcagcttttcgatcgcaagactttgcctattccattacaggagacgtacgatgtttgtgaacagcctccacctctcaatatactcactccttatagagatgatggtaaagaaggtctgaagttttataccaatccttcgtatttctttgatctatggaaagaaaaaatgttgcaagatacagaggataagaggaaggaaaagaggaagcagaagcagaaaaatctagatcgtcctcatgaaccagaaaaagtgccaagagcacctcatgacaggcggcgagaatggcagaagctggcccaaggtccagagctggctgaagatgatgctaatctcttacataagcatattgaagttgctaatggcccagcctctcattttgaaacaagacctcagacatacgtggatcatatggatggatcttactcactttctgccttgccatttagtcagatgagtgagcttctgactagagctgaggaaagggtattagtcagaccacatgaaccacctccacctccaccaatgcatggagcaggagatgcaaaaccgatacccacctgtatcagttctgctacaggtttgatagaaaatcgccctcagtcaccagctacaggcagaacacctgtgtttgtgagccccactcccccacctcctccaccacctcttccatctgccttgtcaacttcctcattaagagcttcaatgacttcaactcctccccctccagtacctcccccacctccacctccagccactgctttgcaagctccagcagtaccaccacctccagctcctcttcagattgcccctggagttcttcacccagctcctcctccaattgcacctcctctagtacagccctctccaccagtagctagagctgccccagtatgtgagactgtaccagttcatccactcccacaaggtgaagttcaggggctgcctccacccccaccaccgcctcctctgcctccacctggcattcgaccatcatcacctgtcacagttacagctcttgctcatcctccctctgggctacatccaactccatctactgccccaggtccccatgttccattaatgcctccatctcctccatcacaagttatacctgcttctgagccaaagcgccatccatcaaccctacctgtaatcagtgatgccaggagtgtgctactggaagcaatacgaaaaggtattcagctacgcaaagtagaagagcagcgtgaacaggaagctaagcatgaacgcattgaaaacgatgttgccaccatcctgtctcgccgtattgctgttgaatatagtgattcggaagatgattcagaatttgatgaagtagattggttggagtaagaaaaatgcattgataaatattacaaaactgaatgcaaatgtcctttgtggtgcttgttccttgaaaatgtttggtcattctagtgttttgctttcttttccttataataaatgacccttttcctccataacttttgatttctaaggaaaatattagcatacatttcaaactaaatgttttacagtggcttatcttttttttccccctgaaaagactaatttggtcaaataaaccactaagtattaagcatggacagctgttgttagagtagcagattcagttttttgatatatcttaattgtgtactttgtgaattttaatttaaagaaagcaactgaaattgaaatcttgagggcagctgtgtctactaatgagccttattccatttcctgatgttttaaaagaagaaacactgccttgattatacgaatacactcagaaagtacatttagcttgtagtgttgaattctcttaaaggaatgcttgaattttttcattattgttttattgtttttatatacttgccttatttgaatgtttagcagtatccccttcccacttatatattgtgtgatatgattttgcttgcctataggagttaaaaacttttccatgtgaaatactctgacttaaacatacatgtaacttacataactgttaagaataacagtctgatttaataaatggttcattttaaaagtt

SEQ ID NO: 199595 - DNA, 652 bp, Homo sapiens
  Payload ID: 19381
  Gene Name: WAS protein family, member 1
  ENST ID: ENST00000447287
  CDS Start-End: 385-652
gcgcgtcgagcacacggtgggtccggcggcgggttggcgccccaggcggcgttccctgtggcctggcgcctgggccgctgccctgagcgggttccgccccagagcccgaccctcctgggggctctaggcggagtcccgcgagccgagggggaccggcgaccgctgccgaagcatgaagaaggggtaaggcgtgagcccccaagatttcacgcatgccccctagcttcggtactctgacaccttctcttgcacttgcggatgatgaactggaataacgatgaaagaaagcacatccgatctcaacattcacgtcctgccctataaccgattaattaattgatccccagctagactaggtgaactggcacaaaggttaatctcaagatgccgctagtgaaaagaaacatcgatcctaggcacttgtgccacacagcactgcctagaggcattaagaatgaactggaatgtgtaaccaatatttccttggcaaatataattagacaactaagtagcctaagtaaatatgctgaagatatatttggagaattattcaatgaagcacatagtttttccttcagagtcaactcattgcaagaacgtgtggaccgtttatctgttagtgttacacagcttgatccaaaggaagaagaat

SEQ ID NO: 199596 - DNA, 740 bp, Homo sapiens
  Payload ID: 19381
  Gene Name: WAS protein family, member 1
  ENST ID: ENST00000419252
  CDS Start-End: 473-740
agtgttctcttcgtccccctcccccaaactgaggattgggcaataccacagaacctcaggaaaggggggaagagcgagcttcggccccactaatgggggagtgggcggaggctggatttcccacctcggctgcacctgggcactggaggctgaagaggaaacatgccccctagcttcggtactctgacaccttctcttgcacttgcggatgatgaactggaataacgatgaaagaaagcacatccgatctcaacattcacgtcctgccctataaccgattaattaattgatccccagctagactaggtgttacaatccaaaatacatagttgtgatcatttataagtgttggagaaatcagcatgttaaaacaactgttgatgatagctgttggagtaaagttgcagtggaagctatggctgcaaaatcgttaaaatcttcaaggtgaactggcacaaaggttaatctcaagatgccgctagtgaaaagaaacatcgatcctaggcacttgtgccacacagcactgcctagaggcattaagaatgaactggaatgtgtaaccaatatttccttggcaaatataattagacaactaagtagcctaagtaaatatgctgaagatatatttggagaattattcaatgaagcacatagtttttccttcagagtcaactcattgcaagaacgtgtggaccgtttatctgttagtgttacacagcttgatccaaaggaagaagaat

SEQ ID NO: 199597 - DNA, 898 bp, Homo sapiens
  Payload ID: 19381
  Gene Name: WAS protein family, member 1
  ENST ID: ENST00000444391
  CDS Start-End: 359-898
agctcgcggtgttgttcactcgcgcgtcgagcacacggtgggtccggcggcgggttggcgccccaggcggcgttccctgtggcctggcgcctgggccgctgccctgagcgggttccgccccagagcccgaccctcctgggggctctaggcggagtcccgcgagccgagggggaccggcgaccgctgccgaagcatgaagaaggggtaaggcgtgagcccccaagatttcacgtgttggagaaatcagcatgttaaaacaactgttgatgatagctgttggagtaaagttgcagtggaagctatggctgcaaaatcgttaaaatcttcaaggtgaactggcacaaaggttaatctcaagatgccgctagtgaaaagaaacatcgatcctaggcacttgtgccacacagcactgcctagaggcattaagaatgaactggaatgtgtaaccaatatttccttggcaaatataattagacaactaagtagcctaagtaaatatgctgaagatatatttggagaattattcaatgaagcacatagtttttccttcagagtcaactcattgcaagaacgtgtggaccgtttatctgttagtgttacacagcttgatccaaaggaagaagaattgtctttgcaagatataacaatgaggaaagctttccgaagttctacaattcaagaccagcagcttttcgatcgcaagactttgcctattccattacaggagacgtacgatgtttgtgaacagcctccacctctcaatatactcactccttatagagatgatggtaaagaaggtctgaagttttataccaatccttcgtatttctttgatctatggaaagaaaaaatgttgcaagatacagaggataagaggaaggaaaagaggaagcagaag

SEQ ID NO: 199598 - DNA, 1083 bp, Homo sapiens
  Payload ID: 19382
  Gene Name: WAS protein family, member 2
  Uniprot ID: Q9Y6W5
  ENST ID: ENST00000536657
  CDS Start-End: 110-955
actctgtgcggagactgggcggccggccgacccttcctgtcgctgacggcgactgcgggaggccaggttgtttttcaccattcagaacattgcctgaagcaggtccaccatgccgttagtaacgaggaacatcgagccaaggcacctgtgccgtcagacgttgcctagcgttagaagcgagctggaatgcgtgaccaacatcaccctggcaaatgtcatccgacagctgggcagcctgagtaaatatgcagaggacatttttggagagctctttactcaggcaaatacctttgcctctcgggtaagctcccttgctgagagggtcgaccgactacaggttaaagtcactcagctggatcccaaggaagaagaagtgtcactgcaaggaatcaacacccgaaaagccttcagaagttccaccattcaagaccagaagctttttgacagaaactctctcccagtgcctgtcttagaaacatacaatacctgtgatactcctccccctctcaacaatcttaccccttacagggacgatggaaaagaggcactcaaattctacacagacccttcatacttctttgatctttggaaggagaagatgctgcaggacaccaaggatatcatgaaagagaagagaaagcataggaaagaaaagaaagataatccaaatcgagggaatgtaaacccacgtaaaatcaagacacgtaaggaagagtgggagaaaatgaagatggggcaagaatttgtggagtccaaagaaaagctggggacttctgggtatccacccactttggtgtaccagaatggcagcattggctgtgttgaaaacgtggatgcaagtagctatccgccaccaccacagtcagactctgcttcttcaccttctccttccttctccgaggacaacttgcctcctccaccagcagaattcaggttttcagctgcgcagggttgaggagcagcgggaacaagagaagcgggatgttgtgggcaatgacgtggccaccatcttgtctcgtcgcattgctgttgagtacagtgactcagaagatgactcctctgaatttgatgaggacgactggt

SEQ ID NO: 199599 - DNA, 5676 bp, Homo sapiens
  Payload ID: 19382
  Gene Name: WAS protein family, member 2
  Uniprot ID: Q9Y6W5
  ENST ID: ENST00000618852
  CDS Start-End: 217-1713
ggggaatcgcgtaatggcggacacaggcagggcgagcgcggctgggggcgtagcgcgctgagggggtccggccgtttggcagcccgcgaggcggtccgcgggagcacactctgtgcggagactgggcggccggccgacccttcctgtcgctgacggcgactgcgggaggccaggttgtttttcaccattcagaacattgcctgaagcaggtccaccatgccgttagtaacgaggaacatcgagccaaggcacctgtgccgtcagacgttgcctagcgttagaagcgagctggaatgcgtgaccaacatcaccctggcaaatgtcatccgacagctgggcagcctgagtaaatatgcagaggacatttttggagagctctttactcaggcaaatacctttgcctctcgggtaagctcccttgctgagagggtcgaccgactacaggttaaagtcactcagctggatcccaaggaagaagaagtgtcactgcaaggaatcaacacccgaaaagccttcagaagttccaccattcaagaccagaagctttttgacagaaactctctcccagtgcctgtcttagaaacatacaatacctgtgatactcctccccctctcaacaatcttaccccttacagggacgatggaaaagaggcactcaaattctacacagacccttcatacttctttgatctttggaaggagaagatgctgcaggacaccaaggatatcatgaaagagaagagaaagcataggaaagaaaagaaagataatccaaatcgagggaatgtaaacccacgtaaaatcaagacacgtaaggaagagtgggagaaaatgaagatggggcaagaatttgtggagtccaaagaaaagctggggacttctgggtatccacccactttggtgtaccagaatggcagcattggctgtgttgaaaacgtggatgcaagtagctatccgccaccaccacagtcagactctgcttcttcaccttctccttccttctccgaggacaacttgcctcctccaccagcagaattcagttacccagtggacaaccaaagaggatctggtttggctggacccaaaagatccagtgtggtcagcccaagccatccaccaccagctcctcctctaggctctccaccaggccctaaacccgggtttgctccaccacctgcccctccgccacctccgcctccaatgataggcatcccacctccaccaccgcctgtaggatttgggtctccagggacgcctccaccaccctcacccccatctttcccacctcaccctgattttgctgcccctccacctcctcctccaccaccagcagctgactacccaactctgccaccacctcccttgtcccagccaacaggaggagcacctcctcctccccctcctcctcctcctccggggccccctcctccccctttcactggtgcagatggccagcctgctataccaccaccgctttctgataccaccaagcccaagtcctccttgcctgccgtgagcgatgcccgtagcgacctgctttcagccatccgtcaaggttttcagctgcgcagggttgaggagcagcgggaacaagagaagcgggatgttgtgggcaatgacgtggccaccatcttgtctcgtcgcattgctgttgagtacagtgactcagaagatgactcctctgaatttgatgaggacgactggtccgattaactctttctgcctgctgcccaccttctttttctttccttcctacctgccttctttgatgccaaccccaacagacccgtagggggagaaaagggaggaaaaaagtaattttaaggggccaaagctttccctgaagcaaccaaagatatatccaagtgcttcctccaagtcaacatgtatttcctctccccattttcaggccctgtggggctcctgaggttcagtagctgggatgttccctctttccttcaagtgcctgttgcatattgaaaggaaggagaaatcccaaagcagattcctttgatcgggtttctgttggagatggggcttcccttaggagccatattcaactacagccttctaaaacctgtgccctcagccacttcgaatgccagccaccttctggttctaaaacggggagtggtctgaatgaacacagctgacccctttcccgcgcactgaaagggcagagtaggccgaagggtccaagggccagactgcctcaccctctgccctaatcagcagggtgggcctgccttttgctaagcgatctctatgcctgggatgccctttattccaggaggcatcaagcctctaaagaatgtctcacctcctctgcccaaaaatgatgcctttctgtaggctggtgttgttgcctccctcccaggatccctttggtgagtatggtgttcaggatgcaccaccaccacctctagataccttcaggcaacacagcccagttttaacctctagtatccatgaccaaactatccctgacacatgaggacaggggcctcttctggctgtcaggagcaaagcctgaagacttggagctgcaggactggaagaacagtggagccccgtgggtctcaccctttaaggatgctgaggcctagagatgggaagtgacttgctcaaggtcacacaattggatagtgacatagctagagcgcagagttcctgattccaagtcacctgtgctttctgggaccaaagaatgggcacctgctggagtccgggcagagctttctcagttgtattgctactccagacctcaccataggttggggtcccagtaggaaggctcagggtctgtgccagccctgtcggtgctgctcagaccttcatagcctctcttgtcattctttgttgccccttttctgtcaccagccaaccacatagccttgggaccagcctctctgggggaccagaagtagtgagagaaggaaggggataggcagctttgacaggtgctgctttcaattcctctgcaactcctcccccttttatttccccaatttaaacaaagattctgccaactgtggaaacttcagtccctcaggctggcagccatgccagtacctgcctgggggtggggggtgcctggcagccatgaagcaggctgaaaggcagaggggctccaggtcctgtttccagctcccctcactgcacatggtgaagctcgctccctccctccctcccttcccgcttttcccagagctaatacacaggtgctattattcagaaaaaaactggtcagctctagccaacagtgaggtttcttttcttctgccctaactattgtgtagcctcttatgctgaaatcggcttctgctggcttctccggctttcagagccctgaaacaaagagaaacaggatctgtccctacccagcacagcaaatggttgtagtaattgccaaagccctcataaagccctccggcttgaggagagagtgtatagtcatgggttctgcctctgtgcccttgctggccgcttctcctctgccttctttcctggaactcagggtgtggggactgagcctgtaggggacagcatgccgtcttgctgtggccactcccaagtgtgccctcttccctctttacacatcaggtgtctctggcacaggacttggcactaagctccatgctgagacaccaggctatgtgggcccccaccttgtttcccagcctgcaccttagaagccgaaggtgctttcatcagaaccctaaaatggtcgttgaaggcgcctgggccgcagcccagcagtagttggagaggcaggcagagggcagtggttctcccaaataggagacctggggcctggccaggccagggtttgggcctaatggctttgactaaattacccccatcctccttgcccggaaaagggagagctagagccactcactgtcattctgctctgaccttgaagggggcggtgttggcctggcttctggaatggactgagtccatcgtggaaagggctgggggcaggaggaggtggggaggggcactgcctgcggaaggtaggattagatcattagctcagtgacctcctagggtttcgatgtgctatgttctcatcctacagttggtttggtaatgatctgcaagtcccggagagcaacagcacagctctgcctgacgctctcattaaaatctatgcagccaagctcggcactttgtagcagccggccttgcgaagcctcctcagctcggggggccggggacccagtgagccgagaggccctctgggctccacttatgcatatgcaccaaaaaaaaaaaaaaaaaaaaaaaaaaaaaaaaggcttctttagacccagagccctttaagatgataaaggacccaatgcaggtaatcctgtttttggactcacgtaatgtagaatgcaaagtttagtgattatttaatctgggcctaagctagtgagagtatggaacaatggcccataaggactcctaagcgccgaagccaaggagcctcctcccttcctggttcaccccgcccaagggacctgcccccattcctgtggccctggggcccagcttccaatagtgtcagaagcaacttgtggctttgccttggttgtgagatgggtacattccaaaggagcagcctgggggagggggcaggctcagccagcccttggaggctcagagcagctggcccaggctccagctcgcctccagtggaagcccgagcgccctcagaaacgaccctggccaatgtcaacgcagagccgaggcggtgttgtcacggctaatgtgaaatctcttcccgtggcgcccatcctctgactctgcagtgccagcttggacagattgaggtctctgtggctttggtgaccctgcttaagcattcccaccgtgtcccagctctgctctaggactgcctcccactgcggcccctcacctgacttcagggtatggggagggagggagccagtgctccaaggccagggggctttgctcatgagagatgtcaggcttcctggaggcatcaggctttgagccctgctggggtccaactgacctgggaccaggtgtcgcgcagagatgtgcctcattctgtgcctccttctgtgcctcctaccatgttccctttaactgtgcctcagtgtgggttagggaacaattttgttattgtattaagtttattcagttaattcacttgaggaactaaccagtttttactttctgtctagaatgatgtacatgtagtagagtaagccataatgctcccaaagtgccttgttttctctgatacaaacatatttataaggacatattcctgtgggttcttgggtgtgtttgccacatcaagattttagggaaggggggtatatgtgtagtagggatgccgtttgaaaacaggcactcttcccctgaggatgggaaaggagctcttcagttggagatctaggcagtgggttaagccagacccctaaagtgaccctttcctcttctgccctattcttctcagaccctcagaaagacatccaatttttttaaatccctgtagctccaagcctggtctcatttgcttccctgccaggctcatcgtgtgtataccacatttgtgccccactgacctgaaggttccatgtaactgtatacacatgaatacttaaatgccaacatttaaaataatttgataaagtctttgtagccactcagcca

SEQ ID NO: 199600 - DNA, 4790 bp, Homo sapiens
  Payload ID: 19383
  Gene Name: WAS protein family, member 3
  Uniprot ID: Q9UPY6
  ENST ID: ENST00000335327
  CDS Start-End: 179-1687
gcggccgcggcgcggcgggaccatggagctcagagcgcagccccggcgccggcggcgggaccgcggaccgttttagttttgattgctgttaactactactgataactgagccaaagtggtgatgctacttgaggggaatttctgcaacccatagtcaacgattacatgattgtgaaccatgcctttagtgaagaggaacattgagccccggcacttgtgccggggagctctgcctgaagggattaccagcgaacttgaatgtgtaaccaatagtactcttgccgctatcatacgccagctgagcagtctgagcaaacatgctgaagacatatttggtgagttgtttaatgaggctaacaacttctacatcagagcaaattctcttcaagacagaattgatcgccttgctgtcaaagtcacccagctggattcaacagtggaagaggtctcactacaggatatcaacatgaaaaaagctttcaaaagttccacagtccaagaccagcaagtggtttcaaagaacagcattcctaatcctgttgctgatatttacaaccagagtgataagccaccgcctctgaacatcctgacaccatacagagatgacaagaaggatgggctgaagttctatactgatccttcctatttctttgacctctggaaagaaaaaatgctacaggacacagaagacaaaaggaaagagaaaaggcgtcaaaaggagcaaaagcgtatagatggcaccacccgtgaggtgaaaaaggttagaaaagccagaaacaggcgccaggagtggaatatgatggcatatgacaaagagcttagacccgacaacaggttgtctcagagtgtgtaccatggagcgtcttccgagggatccctgtccccagatactaggtcacatgcatcggacgttacggattactcttacccggctactcccaaccattctctgcacccccagcctgtgaccccttcctatgcagctggtgacgtgccaccacacgggcctgcaagccaggctgcggagcatgagtaccggcccccatctgcctcggcgaggcacatggccctcaacagacctcagcagccgccccccccgcctccccctcaggccccagaggggtcccaggcctctgcaccgatggctccagcagactacgggatgctcccagcgcagataattgagtattacaacccatccggaccacctcctccgccacctcctcctgtgattccctcagcacaaactgccttcgtcagccctctccagatgcccatgcagcccccgttccctgcatcagccagctccacgcacgcagctcctcctcacccaccctccaccgggctcctggtcacagccccgccacccccgggcccaccacctcccccgccaggccctcctggtcccgggtcttctctttcgtcctccccaatgcatggccccccagtagctgaggcgaagcggcaagagcctgcacagccaccaatcagtgatgctcgaagcgacctcctcgctgctattcgaatgggaattcaactgaaaaaggtgcaggagcagcgggagcaggaggccaagcgggagccagtggggaatgacgtggccacgatcctgtcccggcgcattgccgtggagtacagcgactctgacgacgactcagagttcgacgagaacgactggtccgactgagcaaaggccggcggagaggccgcgtgtgggagcgtgttgaagattttaagtggtctctacacccaaatagtggtattctaatcccgtagcatagcaccttttgtataaacaatgtgatattgcttctgcacatccaaaaattctgggtcttttcagtatttactgtgtaatacttaagtgccactaaacatagcaaattgtgctgcacatgaggaaataggctgtcactatcacattgtcctgaaaacagcatctgctttcctcttggccatgagagtatttagtgcagtttgggtttactcttactgatcaatataactctgcagacttgctgtgtgtttgtgaagctgcctggtgttaggtctctgcaagactaatgactatgtcagagtgatgtcttccaaccagtaagtgatattgtttcaccgctttggtttttccttttgtttttttaaaggatgtgtttctgaataagttggttttagagggaaaggttcaacaaacagggagaatccagtgtttctgctttcagtttcttggcttggtagcctctgagtgaatctgatgctctgctgaataatttcattacctctgcacatgcctgtcaaatatgaaattggaagggcccttttcaggctgggttccctgtgggcatttgcttagtaaatgcctgttgatggtttttgcaagagaattcagcagctcaacagtaatgaaagtgaagaacagagtccattttccttcctggggccattggggatgacactcaagatacttgccagtctctccagtgtgggcaccagccggccagaacagatgcgagcagtccatgactctgggagctacaccgctgagctgggcagagctgcggcacagggcctgggctgcaaaggagccctgctcctttagtttcctgacacctgtgtcctgagtgagccgcaggagttcttagctcctcagcgagcaacagagagcactttagatggcacctttcaccacttggtcagaattttaaaagcttaggtttaggtgaaagtagatattgacagctattcacctttcacggtgctggggccagattagggatcactcccgtgaggagggccttcaccctgttctagaagcacatggttgtcctcctgttgttggcacattaaatgataaaaagcacctcatgagattcccttgatcagccctgcagctgtagtacagtgctgtgccctcacctccacccttcctgttgttcccacgtgggcaataccagggacccatggggaaactcaagaatgacagcttctatattttgtaattctggatgaaagataactgtgttgaacaaacaggtgctccaggctttgattatagatacgacttcaaaaatatgctaagacgcttgacttattaaggactttaacctactcaacagtatttcatatccattgtggttagttactcagttatgttgagaagaatctggagctaaaagcagagatgtttgaggtgacggtaggaatgtgagcaggatggtgatgggggtttttgttaaaatgcatctgagcaagtcagccagccccgaagtcccctcagtgtgtgtgtctcgagtggctacctgttgggcttgtgggcagtgattgtacagagcctgtccattgggtgcagtcatgtagatctgaagccctgaaaagcctcatgtctgcatcccctttccaaggctgcttccctggtgtgtctgttctctcctctgtcccaggtgctgggagcgtcctcttcagcgtcttttcctagagctggtcaccactaggctgtcactataaattccttgaatataagtaacagttattaatgaacttctaaatttctaatttctctctctctctcttttttttttttttgttgttgttaaaaagggcctactacattggcgctattcttaggacttctgcaacttttaaagtcttacttgtctttcttgttgcttttgtattaggagttccccgtgtgggtctagaactcccctttggtaatgcttctttgtttttttatggcccttctgttctcaggatggagagaacacagaagctactatccatgtcaggatttattctatttatatcttattacaataaaattagtggcactttattcataaatattcatgagcctgttaattgttagttgtcttcctgtagctgaatcaacaagttattttcaactcaattttatgacttgcgaaaaagcttttgccctgttgtgtaccataacatttaaaagaatggaaaatgactgaaatccaatttagattatttttagagtatttttccagcaaattcaatttattctgaaatttaaatccagatcttttctaatatggtattacaatgaaaagaataaagagaagatttgaattttcagtttcattttcaaaaactatttaccaaaacaaatggagaagaaacatccaaaagcacatttcatttctccaaactttgtgttttaaattatagttataaattgtaaggtaattttaaattgtccctcgtattatttctccacgtctgttttagtttaatgtctcctaagcttttctctcatagcgtagacctagggaagggatgggaagattgcccagtccccgatggctgcgcacacaggaggcggcggagcacaaggcaagtgagtttgcactgtcagccccagaccgtaagcttggctacactgatgtttttctttactaaggatactattcaaaaattaacattttcatctcagtaagtttttagaacatcaaaatgttttctgagctccaagtggctaggttgtaaaagttttataataatttgcaattaaaatacatgatacatattaatccattaaagactagtgggaatgtatcagccagagtagcaagtaatttttgttttataaatcatagtatctgtcatcttgcagtattaccaatgctgttgtaaattgaatttaaagtggtattaaaaaaaactgttaaacaatttttatctgtttgtatatcttactatagattatgtacaagtaacatctaaataaaattacacttttaaccctaagaggttttgcttattaataa

SEQ ID NO: 199601 - DNA, 4823 bp, Homo sapiens
  Payload ID: 19383
  Gene Name: WAS protein family, member 3
  Uniprot ID: Q9UPY6
  ENST ID: ENST00000361042
  CDS Start-End: 226-1725
gtcgctcgcgccgctgcgtgcggtgtggtgcgaggcgggtgcgccgggcggccgcggcgcggcgggaccatggagctcagagcgcagccccggcgccggcggcgggaccgcggaccgttttagttttgattgctgttaactactactgataactgagccaaagtggtgatgctacttgaggggaatttctgcaacccatagtcaacgattacatgattgtgaaccatgcctttagtgaagaggaacattgagccccggcacttgtgccggggagctctgcctgaagggattaccagcgaacttgaatgtgtaaccaatagtactcttgccgctatcatacgccagctgagcagtctgagcaaacatgctgaagacatatttggtgagttgtttaatgaggctaacaacttctacatcagagcaaattctcttcaagacagaattgatcgccttgctgtcaaagtcacccagctggattcaacagtggaagaggtctcactacaggatatcaacatgaaaaaagctttcaaaagttccacagtccaagaccagcaagtggtttcaaagaacagcattcctaatcctgttgctgatatttacaaccagagtgataagccaccgcctctgaacatcctgacaccatacagagatgacaagaaggatgggctgaagttctatactgatccttcctatttctttgacctctggaaagaaaaaatgctacaggacacagaagacaaaaggaaagagaaaaggcgtcaaaagagagagaaacacaagctgaaccctaacagaaaccagcaagtaaatgtgagaaaagtcagaacaagaaaagaagagtgggagagaaggaaaatgggcattgagtttatgagtgacgcaaagaaactggagcaggcagggagcgccaaagaggacagagtgcccagcgggtcacatgcatcggacgttacggattactcttacccggctactcccaaccattctctgcacccccagcctgtgaccccttcctatgcagctggtgacgtgccaccacacgggcctgcaagccaggctgcggagcatgagtaccggcccccatctgcctcggcgaggcacatggccctcaacagacctcagcagccgccccccccgcctccccctcaggccccagaggggtcccaggcctctgcaccgatggctccagcagactacgggatgctcccagcgcagataattgagtattacaacccatccggaccacctcctccgccacctcctcctgtgattccctcagcacaaactgccttcgtcagccctctccagatgcccatgcagcccccgttccctgcatcagccagctccacgcacgcagctcctcctcacccaccctccaccgggctcctggtcacagccccgccacccccgggcccaccacctcccccgccaggccctcctggtcccgggtcttctctttcgtcctccccaatgcatggccccccagtagctgaggcgaagcggcaagagcctgcacagccaccaatcagtgatgctcgaagcgacctcctcgctgctattcgaatgggaattcaactgaaaaaggtgcaggagcagcgggagcaggaggccaagcgggagccagtggggaatgacgtggccacgatcctgtcccggcgcattgccgtggagtacagcgactctgacgacgactcagagttcgacgagaacgactggtccgactgagcaaaggccggcggagaggccgcgtgtgggagcgtgttgaagattttaagtggtctctacacccaaatagtggtattctaatcccgtagcatagcaccttttgtataaacaatgtgatattgcttctgcacatccaaaaattctgggtcttttcagtatttactgtgtaatacttaagtgccactaaacatagcaaattgtgctgcacatgaggaaataggctgtcactatcacattgtcctgaaaacagcatctgctttcctcttggccatgagagtatttagtgcagtttgggtttactcttactgatcaatataactctgcagacttgctgtgtgtttgtgaagctgcctggtgttaggtctctgcaagactaatgactatgtcagagtgatgtcttccaaccagtaagtgatattgtttcaccgctttggtttttccttttgtttttttaaaggatgtgtttctgaataagttggttttagagggaaaggttcaacaaacagggagaatccagtgtttctgctttcagtttcttggcttggtagcctctgagtgaatctgatgctctgctgaataatttcattacctctgcacatgcctgtcaaatatgaaattggaagggcccttttcaggctgggttccctgtgggcatttgcttagtaaatgcctgttgatggtttttgcaagagaattcagcagctcaacagtaatgaaagtgaagaacagagtccattttccttcctggggccattggggatgacactcaagatacttgccagtctctccagtgtgggcaccagccggccagaacagatgcgagcagtccatgactctgggagctacaccgctgagctgggcagagctgcggcacagggcctgggctgcaaaggagccctgctcctttagtttcctgacacctgtgtcctgagtgagccgcaggagttcttagctcctcagcgagcaacagagagcactttagatggcacctttcaccacttggtcagaattttaaaagcttaggtttaggtgaaagtagatattgacagctattcacctttcacggtgctggggccagattagggatcactcccgtgaggagggccttcaccctgttctagaagcacatggttgtcctcctgttgttggcacattaaatgataaaaagcacctcatgagattcccttgatcagccctgcagctgtagtacagtgctgtgccctcacctccacccttcctgttgttcccacgtgggcaataccagggacccatggggaaactcaagaatgacagcttctatattttgtaattctggatgaaagataactgtgttgaacaaacaggtgctccaggctttgattatagatacgacttcaaaaatatgctaagacgcttgacttattaaggactttaacctactcaacagtatttcatatccattgtggttagttactcagttatgttgagaagaatctggagctaaaagcagagatgtttgaggtgacggtaggaatgtgagcaggatggtgatgggggtttttgttaaaatgcatctgagcaagtcagccagccccgaagtcccctcagtgtgtgtgtctcgagtggctacctgttgggcttgtgggcagtgattgtacagagcctgtccattgggtgcagtcatgtagatctgaagccctgaaaagcctcatgtctgcatcccctttccaaggctgcttccctggtgtgtctgttctctcctctgtcccaggtgctgggagcgtcctcttcagcgtcttttcctagagctggtcaccactaggctgtcactataaattccttgaatataagtaacagttattaatgaacttctaaatttctaatttctctctctctctcttttttttttttttgttgttgttaaaaagggcctactacattggcgctattcttaggacttctgcaacttttaaagtcttacttgtctttcttgttgcttttgtattaggagttccccgtgtgggtctagaactcccctttggtaatgcttctttgtttttttatggcccttctgttctcaggatggagagaacacagaagctactatccatgtcaggatttattctatttatatcttattacaataaaattagtggcactttattcataaatattcatgagcctgttaattgttagttgtcttcctgtagctgaatcaacaagttattttcaactcaattttatgacttgcgaaaaagcttttgccctgttgtgtaccataacatttaaaagaatggaaaatgactgaaatccaatttagattatttttagagtatttttccagcaaattcaatttattctgaaatttaaatccagatcttttctaatatggtattacaatgaaaagaataaagagaagatttgaattttcagtttcattttcaaaaactatttaccaaaacaaatggagaagaaacatccaaaagcacatttcatttctccaaactttgtgttttaaattatagttataaattgtaaggtaattttaaattgtccctcgtattatttctccacgtctgttttagtttaatgtctcctaagcttttctctcatagcgtagacctagggaagggatgggaagattgcccagtccccgatggctgcgcacacaggaggcggcggagcacaaggcaagtgagtttgcactgtcagccccagaccgtaagcttggctacactgatgtttttctttactaaggatactattcaaaaattaacattttcatctcagtaagtttttagaacatcaaaatgttttctgagctccaagtggctaggttgtaaaagttttataataatttgcaattaaaatacatgatacatattaatccattaaagactagtgggaatgtatcagccagagtagcaagtaatttttgttttataaatcatagtatctgtcatcttgcagtattaccaatgctgttgtaaattgaatttaaagtggtattaaaaaaaactgttaaacaatttttatctgtttgtatatcttactatagattatgtacaagtaacatctaaataaaattacacttttaaccctaagaggttttgcttatt

SEQ ID NO: 199602 - DNA, 5101 bp, Homo sapiens
  Payload ID: 19384
  Gene Name: WAS protein homolog associated with actin, golgi membranes and microtubules
  Uniprot ID: Q8TF30
  ENST ID: ENST00000286760
  CDS Start-End: 100-2529
ctagcgaaaaatgatttggctcggactgtcccgtgacaggcggtgcgaggaggccaggcccgcgcccgccgagccctagggccgctgctgccgacagccatggaggacgagcagcctgacagcctggagggctgggtgccggtccgggagggcctcttcgccgagcccgagaggcaccggctgcgcttcctggtggcctggaacggcgcggagggcaagttcgctgtgacttgtcacgaccgtaccgcgcagcagcggcggctgcgcgagggggcccggttggggcccgagcccgagcccaagcctgaggccgccgtctccccgtccagctgggccggcctgctctcggccgcggggctccgcggcgcgcaccggcagttggcggcgctgtggccgcctctggagcgctgcttcccgcggctgccgccggagctggacgtgggcggcggcggggcctggggtctggggctcgggctgtgggcgctgctgtggccgacgcgcgcgggtcccggcgaggcggcgctgcaggagctgtgcgggcagctggaacgctatctgggcgcggcggccgacggctgcggcggcgccacagtgcgcgacgcactcttcccggctgagggcggcgcggccgactgcgaaagcccgcgcgagttccgggagcgggccttgcgcgcgcggtgggtcgaggcggacgcgcggctgcgccaggttattcaaggacacggaaaagccaacaccatggtagcattaatgaacgtttaccaagaggaagatgaagcataccaggaattggttaccgtggcaaccatgttcttccagtacttattgcagccatttagggctatgcgagaagttgcaactttatgtaagcttgatattttgaagtctttggatgaggatgacctaggtcctagaagggtagttgccctggagaaagaagctgaagaatggaccagacgggctgaagaagctgtcgtctctattcaggatatcacagtgaattattttaaggagacagtaaaagcattagcaggaatgcagaaagaaatggaacaggatgcgaagagatttggtcaggctgcctgggccacagcaattcccaggttggaaaaacttcagctaatgctagctcgagagactctgcaactcatgagagcgaaagagttgtgtttaaatcacaaaagagctgaaattcagggaaagatggaagatcttccagaacaagaaaaaaatacaaatgttgtagatgaattagaaatacaattttatgaaattcaattagaactatatgaagttaaatttgagatattaaaaaacgaagaaatactgcttactacacagttggactctcttaaaagacttataaaagaaaaacaagatgaagttgtctattacgatccatgtgaaaatccagaggaacttaaagtcattgactgtgtggtggggctgcaggatgataagaatttggaagtgaaagaactcagaaggcagtgccagcagctggagtctaaacggggcaggatctgtgccaaaagagcctctctccggagtagaaaggatcagtgcaaagaaaatcatcggttcagattgcaacaggctgaagaaagcataagatactctcgtcagcatcacagtattcagatgaaaagagacaagataaaagaagaggagcaaaagaaaaaagaatggatcaaccaagaacgtcaaaaaacactccaacgattgagatcatttaaagataaacgcctagctcaatctgtccgaaacacctctggctcagaacctgtggctccaaacctgccaagtgatctttcccagcagatgtgcttgccagcttcccacgcggtgtcagtaattcacccgtcctctaggaaaactagaggtgttcccctatcggaagctggtaatgtgaaaagccccaagtgtcaaaactgtcatggaaatatccctgtccaggtttttgttccagttggtgatcaaacacattccaaatccagtgaggaattgtcactgccaccacctcctcctcctccaccaccaccaccgccgccaccgccgcccccaccccctcctctccgtgctctgtcctcatcctctcaagctgcaactcatcagaacttaggcttccgggctccagtgaaagatgaccagccacgtcctctagtgtgcgaatcacctgctgagcgaccacgtgactccttggaaagtttttcatgtccaggatctatggatgaagtgttggcctccttaaggcatggcagagctcctctccggaaggtggaagtgccggcggtgcgccctccccacgcctcaatcaatgagcacattctggctgccataaggcaaggggtcaaactgaagaaagttcaccctgatcttggcccaaaccccagcagcaaaccaaccagcaacagacgcaccagtgaccttgagaggagcatcaaggctgcgctccagagaatcaagagggtgtctgctgactctgaggaggacagtgatgagcaggaccctggccagtgggatggttaggctcaagtttgacaaaggcacctgccacagtaggcttgaataaagtgggtgagtcttagacctatcgaaaagcatactaacagggtgctgatagatgggccacataacaccccggaagatcagcagggccttgtgtaggctgctgcagcattttttttttttttcttttttgagatggagtctcactctgtcgcccaggctggggtgcagtggcgccatctcggctcaccgcaagctccgcttcccaggctggggtgcagtggtgcgatcttggctcactgcaagctccgcctcctgggttcacgccattctcctgcctcagcctcccgagtagctgggactacaggcgccaccaccttgcccaactaattttttgtattttttagtagagacgaggtttcaccgtgttagccaggatggtctcgatcttctgacctcgtgatccgcctgcctcagactcccaaagtgctgggattacaggtgtgagccaccacgcccagccttttttttttctttcttttgagacagaatctctctgtcatccaggctagagtgcagtggcacgatcttggcttactgcaacctccacctcccaggttcaagcaattctctgtctcagcctcccgagtagctgggattacaggcatgcaccaccacgcctggctaatttttgtatatttaagtagagacaaggtttcgctatgttggccaggctggtcttgaactcctgacctcgtgatccacctgccttggccacccaaagtgttgggattataggcatgagccaccgtgcctggctgatgctggagcttttatgtgacatggtgactcttaaaactggggagggacgtagagatgagagtttcacacaccagcccataggtgggatgtcaagacccatcggaagtgtcgctggcctaagagaagagcacttatttctcaccatggctgatctagaattgttccctgattctgaaagaagtttacactacactggtaagcagtactattagactactgactgtggccttctgtgcatatggaataatgatttctcagatttgtaggcttgaatgtgaatgttattttatcagtaatcagaataaattgcttatattcaggagttattttaaatatttaaatgaaatttattttaggcaccaagcactacataaactcataataactatttgcaatgcattagcatcactcacggggtaatgaaaacataccttagctgctgtaaaagcaaagtcttccgtgtccgggtgggctgaaagtttttaataaaattttagctaaacatttgtttaagtgaatactaaggatggagcaatagtgttattttcctcaggaactgaagtctcatgctgaagtattttctccttaaaattaaatttttaaaatcagggaaggggaagggactgatgcaaagcagtccgttcatttctcagactgcgagcatccctactaacctcatcaccctcactctggtgatattactcctgggtctccacagaacaaaaggaacgcacctcgtttacaaagaaagtcctgattgatatagaacagaaatcttcctacttcagtttttttgtttttttttttgagacagagtcttgctctgtcaaccaggctggagtgcggtggcacgatctcagctcactgcaacctctgcctcctgggttcaagtgattctcctgcctcagcctctcgagtagctgggactacaggcgtgtgccaccacacccagctaatttttatatttttagtagagatggggtttcaccatgttggcaggatggtctcgatctcttgacctcgtgatcctcccaccttggcctcccaaatgctgggggttacaggcgtgagccaccacacctggccttccagtgtcttaactaactggtacacagcagcctgaggggcctcagttggcacagctgggaggggcgtgagtccctttcagcagctgcagcctgggtctccctctgtggcatggccactgccaggtttcccagccactgccaggttgcccacgggtctgtcatgtgtgctaccttttcagaatgcaaatccaactcctgtgtatgaatgaatgtgcctcactgtgctggcccaggcctgatgggccaagccctgactctgcactggcccctgtacctgccgctcccacccaggttcccaggggtgttccagtgggggacgcaacctgcgggctactcgctgggcatcaggtccagatcccagagacaggtccagtggctgtggcccaggcctccttccccaccacagacaggccaggctcagcatcaaacttcctagggaaagaatttggaattgaaaaagtagcaaaatcacaactttgtgggacttttcttatgcatattttgcagtttggcattgtttgtaattacgtatttataatttcagtattttgagataccagcgagcttaatcaggctaaaataattctcagaatttgctttctaagggctgccaaacacaagaggcctttgaaaaaaggatccttttcaaaagaacgttctcacaataaaaattcctggcccaa

SEQ ID NO: 199603 - DNA, 3028 bp, Homo sapiens
  Payload ID: 19385
  Gene Name: WAS/WASL interacting protein family, member 1
  Uniprot ID: O43516
  ENST ID: ENST00000272746
  CDS Start-End: 165-1697
gcagcctcccggcgctgagcgcttttcctgcccgcccggctcagccctgcggaccccgggagaagtttcccagaaaaaatgcccagcgcggcgcggggctgcggagtcgtccggagccgctgcgcgatttatcagcaagactgttgaacgcataactgcccaagatgcctgtccctccccctccagcacccccgccgcccccgacgtttgcactggccaatacagagaagcctaccttgaataagacagagcaggctgggagaaatgctctcctttctgatatcagcaaagggaagaaactaaagaagacggtcaccaatgacagaagtgcaccaatactggacaaacctaaaggagctggtgctggaggcggtggtggtggctttggtggaggcggcggatttggcggaggaggtggtggcggaggcggtggaagttttggagggggcggacctccaggtctgggaggattgttccaggctggaatgccgaagctgagatccacggccaacagggataatgattctggaggaagccgaccaccattgttgccaccgggaggaagatccacatctgcgaaacccttttcacccccaagtggcccagggaggtttcctgtgccttctccaggccacagaagtggtcccccagagcctcagaggaaccgaatgccgcccccaaggcccgacgtgggctcaaagcctgatagcattcctcctccagtacctagtactccaagacccattcaatcaagtccgcacaaccgggggtccccaccagtgcccggaggccccaggcagcccagccccgggcccactcctccccctttccctggaaaccgcggcactgctttgggaggaggctcaatacgtcagtcccccttgagctcctcctcgcccttctccaaccggcctcccctgccgcctacccccagcagggccttggatgacaaaccccctccaccacctcctccagtgggcaacaggccctccatccacagggaagcggttccccctcctcctcctcagaacaacaagcctccagtgccttccactccgcggccttcggcctcctcacaggccccacctccgccgccacctcccagcaggcccgggccgcctcctctgcctccaagttccagcggcaatgacgaaaccccaagactcccacagcggaatctgtccctcagttcgtccacgcccccgttaccttcgccaggacgttcaggtcctcttcctcccccgcccagtgagagacccccacctccagtgagggacccgccaggccgatcaggccccctcccaccacctcctccagtaagcagaaacggcagcacatctcgggccctgcctgctacccctcagttgccatccaggagtggagtagacagtcccaggagtggacccaggcctccccttcctcctgataggcccagtgctggggcacctcccccacctccaccatcaacatctattagaaatggcttccaagactctccatgtgaagatgagtgggaaagcagattctacttccatccgatttccgatttgccacctccagagccatatgtacaaacgaccaaaagttatcccagcaaactggcaagaaacgaaagccggagtggatccaaccgaagagaaaggggtgctccaccactccctcccatcccgagaccacctaagcaagctgctgagtaagggctcactggaaacttgcagtcacaggatgtccaatctttggcagtccgagcttggctctaggacagagctgtccaatagaaatataatgtgagccccatatacaatttttacatttctaatatattttaaacaagtgaagttaatatgcatccaaaatatttcaacctgtaatcaacataaaattttaatgagatattttatattattttttggtactgaatcttcaaaatccagagtgtattttacacttaccgcacatctccattcagactagtcacatttttaagtgctcagtagccacatgtggctggtggctactggattagacagcacgagtctggaagatggaagctagtgcagaaacctcttgtttaaaaaacaaaaaaggcaagatgggcttgagcgattcaagaggcaactaaaaataaaattaggacccagcaccttgtttgacacacagtttgaccttcgattttcctcccttaacttccctcttcccttaatatctgtatacaagtgttgcttcaaagtaccaaggtcagaaattgattgagtacggtttactaaagtcatgtggaataaagccattggaaacaaatggaaagcctgtcgggacttctgggctcagaaccagctggctcacgcactccacttgtcagctggacttctgccttgtgaaatggaagcagcctttgttcctttctggctgagcaagctcctgaggctgggagagactaggaaggcttggtaggaggggaaaaaagtcaggaaaatatatcaaatcagaaacatggaagaagaagggaaccgatttgagttggtgggcaaaactctaaaaatctaaatctgatgcttatgtaagggttgagcgaattagggagattgctagtggaaattggagggaatttgttttgcatcatttgtctaggatctatgcaaatatagctccactaaaggaccatagggaagagccagccttgccttttcttatatgattttgtttacaaaattttactgggacttttaaatctagctatagagttgggaaaaaatatttccacttagatattttacatggttttgtttaaaattaccattacttgttttttaaaaacacatgaccacatatgtatatgtatatctacctaaacattgtatcatggtttcagtatgttattcatgtattactgggagatgctaccaagaaaccaacccaaagaaaattctgaaaaatacatttctatttatagaataaatgtttcatttatataaaagcaaaagaacttagagttctaataaatgggatgtctaataaattatgaagttac

SEQ ID NO: 199604 - DNA, 2003 bp, Homo sapiens
  Payload ID: 19385
  Gene Name: WAS/WASL interacting protein family, member 1
  Uniprot ID: O43516
  ENST ID: ENST00000359761
  CDS Start-End: 149-1660
gagcgcttttcctgcccgcccggctcagccctgcggaccccgggagaagtttcccagaaaaaatgcccagcgcggcgcggggctgcggagtcgtccggagccgctgcgcgatttatcagcaagactgttgaacgcataactgcccaagatgcctgtccctccccctccagcacccccgccgcccccgacgtttgcactggccaatacagagaagcctaccttgaataagacagagcaggctgggagaaatgctctcctttctgatatcagcaaagggaagaaactaaagaagacggtcaccaatgacagaagtgcaccaatactggacaaacctaaaggagctggtgctggaggcggtggtggtggctttggtggaggcggcggatttggcggaggaggtggtggcggaggcggtggaagttttggagggggcggacctccaggtctgggaggattgttccaggctggaatgccgaagctgagatccacggccaacagggataatgattctggaggaagccgaccaccattgttgccaccgggaggaagatccacatctgcgaaacccttttcacccccaagtggcccagggaggtttcctgtgccttctccaggccacagaagtggtcccccagagcctcagaggaaccgaatgccgcccccaaggcccgacgtgggctcaaagcctgatagcattcctcctccagtacctagtactccaagacccattcaatcaagtccgcacaaccgggggtccccaccagtgcccggaggccccaggcagcccagccccgggcccactcctccccctttccctggaaaccgcggcactgctttgggaggaggctcaatacgtcagtcccccttgagctcctcctcgcccttctccaaccggcctcccctgccgcctacccccagcagggccttggatgacaaaccccctccaccacctcctccagtgggcaacaggccctccatccacagggaagcggttccccctcctcctcctcagaacaacaagcctccagtgccttccactccgcggccttcggcctcctcacaggccccacctccgccgccacctcccagcaggcccgggccgcctcctctgcctccaagttccagcggcaatgacgaaaccccaagactcccacagcggaatctgtccctcagttcgtccacgcccccgttaccttcgccaggacgttcaggtcctcttcctcccccgcccagtgagagacccccacctccagtgagggacccgccaggccgatcaggccccctcccaccacctcctccagtaagcagaaacggcagcacatctcgggccctgcctgctacccctcagttgccatccaggagtggagtagacagtcccaggagtggacccaggcctccccttcctcctgataggcccagtgctggggcacctcccccacctccaccatcaacatctattagaaatggcttccaagactctccatgtgaagatgagtgggaaagcagattctacttccatccgatttccgatttgccacctccagagccatatgtacaaacgaccaaaagttatcccagcaaactggcaagaaacgaaagccggagtggatccaaccgaagagaaaggggtgctccaccactccctcccatcccgaggtgatctttgcctgctcttctctacccaagctcaagagctgcttctgttgctatctaagaactgcataccctcctccctgcttcttcccttgtgcctcatgtatgggcaggaggaaaggtgggagggggagtgggaatatgcgtgtgtgggtgggaatcggtaagaaatgcacctagcttttcatattgtgtttattctccaggctattgcttgcttcagctgcagcctgcctgtgctggctgctggggtcgataggcttttgtcgtaataggcagagatgacttgcatcccagctttccaccaaccaaattcaaacattcactgcttatttgttacagactgtaat

SEQ ID NO: 199605 - DNA, 2180 bp, Homo sapiens
  Payload ID: 19385
  Gene Name: WAS/WASL interacting protein family, member 1
  Uniprot ID: O43516
  ENST ID: ENST00000392546
  CDS Start-End: 333-1844
gaagaagcccttagcctaatgaagcgataaggtaagcaaaggaggaaggaacaacaaacaacaaattaatcagacaggaagcgaataaccacagaaggacgtctgcctctgactcagtatgtcacatttaacaagaggccagagcttgtccaaaatggctgtccaaaaacgaccccacacttgcgttagaagatgatacctttttcagggacagttttctctcttggctcctgtcccgctggccctctgtctgcctgtgtccctgaccatggctccctgcagtaccctttaacgatttatcagcaagactgttgaacgcataactgcccaagatgcctgtccctccccctccagcacccccgccgcccccgacgtttgcactggccaatacagagaagcctaccttgaataagacagagcaggctgggagaaatgctctcctttctgatatcagcaaagggaagaaactaaagaagacggtcaccaatgacagaagtgcaccaatactggacaaacctaaaggagctggtgctggaggcggtggtggtggctttggtggaggcggcggatttggcggaggaggtggtggcggaggcggtggaagttttggagggggcggacctccaggtctgggaggattgttccaggctggaatgccgaagctgagatccacggccaacagggataatgattctggaggaagccgaccaccattgttgccaccgggaggaagatccacatctgcgaaacccttttcacccccaagtggcccagggaggtttcctgtgccttctccaggccacagaagtggtcccccagagcctcagaggaaccgaatgccgcccccaaggcccgacgtgggctcaaagcctgatagcattcctcctccagtacctagtactccaagacccattcaatcaagtccgcacaaccgggggtccccaccagtgcccggaggccccaggcagcccagccccgggcccactcctccccctttccctggaaaccgcggcactgctttgggaggaggctcaatacgtcagtcccccttgagctcctcctcgcccttctccaaccggcctcccctgccgcctacccccagcagggccttggatgacaaaccccctccaccacctcctccagtgggcaacaggccctccatccacagggaagcggttccccctcctcctcctcagaacaacaagcctccagtgccttccactccgcggccttcggcctcctcacaggccccacctccgccgccacctcccagcaggcccgggccgcctcctctgcctccaagttccagcggcaatgacgaaaccccaagactcccacagcggaatctgtccctcagttcgtccacgcccccgttaccttcgccaggacgttcaggtcctcttcctcccccgcccagtgagagacccccacctccagtgagggacccgccaggccgatcaggccccctcccaccacctcctccagtaagcagaaacggcagcacatctcgggccctgcctgctacccctcagttgccatccaggagtggagtagacagtcccaggagtggacccaggcctccccttcctcctgataggcccagtgctggggcacctcccccacctccaccatcaacatctattagaaatggcttccaagactctccatgtgaagatgagtgggaaagcagattctacttccatccgatttccgatttgccacctccagagccatatgtacaaacgaccaaaagttatcccagcaaactggcaagaaacgaaagccggagtggatccaaccgaagagaaaggggtgctccaccactccctcccatcccgaggtgatctttgcctgctcttctctacccaagctcaagagctgcttctgttgctatctaagaactgcataccctcctccctgcttcttcccttgtgcctcatgtatgggcaggaggaaaggtgggagggggagtgggaatatgcgtgtgtgggtgggaatcggtaagaaatgcacctagcttttcatattgtgtttattctccaggctattgcttgcttcagctgcagcctgcctgtgctggctgctggggtcgataggcttttgtcgtaataggcagagatgacttgcatcccagctttccaccaaccaaattcaaacattcactgcttatttgttacaga

SEQ ID NO: 199606 - DNA, 4587 bp, Homo sapiens
  Payload ID: 19385
  Gene Name: WAS/WASL interacting protein family, member 1
  Uniprot ID: O43516
  ENST ID: ENST00000392547
  CDS Start-End: 101-1612
ggctagaagacagcaggggaactcgagaagttggttgttttcagcagattaaaacaatacagatttatcagcaagactgttgaacgcataactgcccaagatgcctgtccctccccctccagcacccccgccgcccccgacgtttgcactggccaatacagagaagcctaccttgaataagacagagcaggctgggagaaatgctctcctttctgatatcagcaaagggaagaaactaaagaagacggtcaccaatgacagaagtgcaccaatactggacaaacctaaaggagctggtgctggaggcggtggtggtggctttggtggaggcggcggatttggcggaggaggtggtggcggaggcggtggaagttttggagggggcggacctccaggtctgggaggattgttccaggctggaatgccgaagctgagatccacggccaacagggataatgattctggaggaagccgaccaccattgttgccaccgggaggaagatccacatctgcgaaacccttttcacccccaagtggcccagggaggtttcctgtgccttctccaggccacagaagtggtcccccagagcctcagaggaaccgaatgccgcccccaaggcccgacgtgggctcaaagcctgatagcattcctcctccagtacctagtactccaagacccattcaatcaagtccgcacaaccgggggtccccaccagtgcccggaggccccaggcagcccagccccgggcccactcctccccctttccctggaaaccgcggcactgctttgggaggaggctcaatacgtcagtcccccttgagctcctcctcgcccttctccaaccggcctcccctgccgcctacccccagcagggccttggatgacaaaccccctccaccacctcctccagtgggcaacaggccctccatccacagggaagcggttccccctcctcctcctcagaacaacaagcctccagtgccttccactccgcggccttcggcctcctcacaggccccacctccgccgccacctcccagcaggcccgggccgcctcctctgcctccaagttccagcggcaatgacgaaaccccaagactcccacagcggaatctgtccctcagttcgtccacgcccccgttaccttcgccaggacgttcaggtcctcttcctcccccgcccagtgagagacccccacctccagtgagggacccgccaggccgatcaggccccctcccaccacctcctccagtaagcagaaacggcagcacatctcgggccctgcctgctacccctcagttgccatccaggagtggagtagacagtcccaggagtggacccaggcctccccttcctcctgataggcccagtgctggggcacctcccccacctccaccatcaacatctattagaaatggcttccaagactctccatgtgaagatgagtgggaaagcagattctacttccatccgatttccgatttgccacctccagagccatatgtacaaacgaccaaaagttatcccagcaaactggcaagaaacgaaagccggagtggatccaaccgaagagaaaggggtgctccaccactccctcccatcccgaggtgatctttgcctgctcttctctacccaagctcaagagctgcttctgttgctatctaagaactgcataccctcctccctgcttcttcccttgtgcctcatgtatgggcaggaggaaaggtgggagggggagtgggaatatgcgtgtgtgggtgggaatcggtaagaaatgcacctagcttttcatattgtgtttattctccaggctattgcttgcttcagctgcagcctgcctgtgctggctgctggggtcgataggcttttgtcgtaataggcagagatgacttgcatcccagctttccaccaaccaaattcaaacattcactgcttatttgttacagactgtaattattaaagtccctgagagctgttttctcccgttcctttttcgcatgcttggcctcctctctgtttctatgaaccacagaccacctaagcaagctgctgagtaagggctcactggaaacttgcagtcacaggatgtccaatctttggcagtccgagcttggctctaggacagagctgtccaatagaaatataatgtgagccccatatacaatttttacatttctaatatattttaaacaagtgaagttaatatgcatccaaaatatttcaacctgtaatcaacataaaattttaatgagatattttatattattttttggtactgaatcttcaaaatccagagtgtattttacacttaccgcacatctccattcagactagtcacatttttaagtgctcagtagccacatgtggctggtggctactggattagacagcacgagtctggaagatggaagctagtgcagaaacctcttgtttaaaaaacaaaaaaggcaagatgggcttgagcgattcaagaggcaactaaaaataaaattaggacccagcaccttgtttgacacacagtttgaccttcgattttcctcccttaacttccctcttcccttaatatctgtatacaagtgttgcttcaaagtaccaaggtcagaaattgattgagtacggtttactaaagtcatgtggaataaagccattggaaacaaatggaaagcctgtcgggacttctgggctcagaaccagctggctcacgcactccacttgtcagctggacttctgccttgtgaaatggaagcagcctttgttcctttctggctgagcaagctcctgaggctgggagagactaggaaggcttggtaggaggggaaaaaagtcaggaaaatatatcaaatcagaaacatggaagaagaagggaaccgatttgagttggtgggcaaaactctaaaaatctaaatctgatgcttatgtaagggttgagcgaattagggagattgctagtggaaattggagggaatttgttttgcatcatttgtctaggatctatgcaaatatagctccactaaaggaccatagggaagagccagccttgccttttcttatatgattttgtttacaaaattttactgggacttttaaatctagctatagagttgggaaaaaatatttccacttagatattttacatggttttgtttaaaattaccattacttgttttttaaaaacacatgaccacatatgtatatgtatatctacctaaacattgtatcatggtttcagtatgttattcatgtattactgggagatgctaccaagaaaccaacccaaagaaaattctgaaaaatacatttctatttatagaataaatgtttcatttatataaaagcaaaagaacttagagttctaataaatgggatgtctaataaattatgaagttactgatttgaatatattatatttctataacttccttgccaaagtcctgatttagtacattagagaacctgtgtttcctctctcctctaccattcatctctcttccatacagtcatttgggctttttactcaaagagaatcaagaaataataaggtataacaagcttggcaaagtgttggctttttaaaaaaaaatttttttaatctctagcagtttggtaatttagcagcatcatttatttgggattcttttatctgatttcaacagtgaaaaacatccctatgataaagcctaatgacccatttcacaaaagatggaatttgcccttcctagaaaatatgacggagaaaagtctgactcagagaaagtgggtctgaattttataaggggtagtaagaattggacaattcctttgcatatctgaacttggcaggtaccgttctaaatctgaaacagggtgatagctcaaagttgccattcatccagaatagattgttttagaatgtagtgtttaagtgactgtttcattaatacacctacaccctttctttgaaagtttgcaacctaattgcatctaaaactatgaataagttctgtggtaaaatcttaaactatggaaaattacaaaaatgaatttttcttccctgaaatcagagcttacatgtgtgtttttttataacattttcagataaatgtattcaacatgtaatacagtattttaacattcacctcttattttatattgaaatgtattacagtattaaaactcagtgttcagtatttatttcactatgcattttatttagtaaaagccaggagaaatgtttaatccaatggtgccttactttgtgatttaaaagaaatcaacttttttttatgtctaagtagtagattatttgcatatttgtaaaaactgttaggtctttatattttaaagtgtaataccagttttgttattttagtagcagaaatgggatgattgttaaagttccccaaaaatgttggcatgaaattaatttttccctccttatagtcaaggaccgtagaggaagaaaaacttttttttcataccatgcactatgtaaacagacacattttgctatctgtgtcatcaggatagtgtaagtggtagggtagagactaccctagacatctgcatctttgtaagttagccagacaataaagaaaagcagaatgata

SEQ ID NO: 199607 - DNA, 2568 bp, Homo sapiens
  Payload ID: 19385
  Gene Name: WAS/WASL interacting protein family, member 1
  Uniprot ID: O43516
  ENST ID: ENST00000409891
  CDS Start-End: 204-1685
aacaagaggccagagcttgtccaaaatggctgtccaaaaacgaccccacacttgcgttagaagatgatacctttttcagggacagttttctctcttggctcctgtcccgctggccctctgtctgcctgtgtccctgaccatggctccctgcagtaccctttaacgatttatcagcaagactgttgaacgcataactgcccaagatgcctgtccctccccctccagcacccccgccgcccccgacgtttgcactggccaatacagagaagcctaccttgaataagacagagcaggctgggagaaatgctctcctttctgatatcagcaaagggaagaaactaaagaagacggtcaccaatgacagaagtgcaccaatactggacaaacctaaaggagctggtgctggaggcggtggtggtggctttggtggaggcggcggatttggcggaggaggtggtggcggaggcggtggaagttttggagggggcggacctccaggtctgggaggattgttccaggctggaatgccgaagctgagatccacggccaacagggataatgattctggaggaagccgaccaccattgttgccaccgggaggaagatccacatctgcgaaacccttttcacccccaagtggcccagggaggtttcctgtgccttctccaggccacagaagtggtcccccagagcctcagaggaaccgaatgccgcccccaaggcccgacgtgggctcaaagcctgatagcattcctcctccagtacctagtactccaagacccattcaatcaagtccgcacaaccgggggtccccaccagtgcccggaggccccaggcagcccagccccgggcccactcctccccctttccctggaaaccgcggcactgctttgggaggaggctcaatacgtcagtcccccttgagctcctcctcgcccttctccaaccggcctcccctgccgcctacccccagcagggccttggatgacaaaccccctccaccacctcctccagtgggcaacaggccctccatccacagggaagcggttccccctcctcctcctcagaacaacaagcctccagtgccttccactccgcggccttcggcctcctcacaggccccacctccgccgccacctcccagcaggcccgggccgcctcctctgcctccaagttccagcggcaatgacgaaaccccaagactcccacagcggaatctgtccctcagttcgtccacgcccccgttaccttcgccaggacgttcaggtcctcttcctcccccgcccagtgagagacccccacctccagtgagggacccgccaggccgatcaggccccctcccaccacctcctccagtaagcagaaacggcagcacatctcgggccctgcctgctacccctcagttgccatccaggagtggagtagacagtcccaggagtggacccaggcctccccttcctcctgataggcccagtgctggggcacctcccccacctccaccatcaacatctattagaaatggcttccaagactctccatgtgaagatgagtgggaaagcagattctacttccatccgatttccgatttgccacctccagagccatatgtacaaacgaccaaaagttatcccagcaaactggcaagaaacgaaagccggagtgagtatttctgccaaggtttttgaagattcacgcttgagtagcctgagtgacactcgggctatatagaaagtccaggcttcttgcctggagtggggtagagaaccctttggagccatctacattctagtaaattccccttccacaggcagtgaggaaattgcagatgcccagaatgcatatgagaaacagttattttaatgtgtcattacaagctcaaaataccgtggtttgctagtattaaattttattattttacttctttggacgtcttcctctgttttcatcttcctgagacagcacaagtagagccatcttctattccttctagttttgaaattggcataatgtctgattaattataacaaaaactccctttaactgccttgatcttttaaacgtattgtaatcatagctttacagagcattacatgaaaatgtaaatatatccataatctctccacataatagatattttcattttaccagattctcatccaattttttatccatataattctgtttttttatgtagttataatgacgatgtacagttttttggcggggtttacataacattgcttagtaaatagtgcccatgttatcacatggtttttatttcagcatatagtaatttaccattaccatggacatttaaattatttctgttgttctgctaatgtaggtaatgctaccataaagaactaaattgcttttcctccattgaagaagaatgtcaacaagaaaggaaaaatagacaaactggaattttataacagtaaatgtataggaagtgttacagctctttgagaatttgtctagcaggctttccagggttttgctggaaagcctctgaaatttacttttaaaaaaacacaatagctgggcatggtggctcacgcctgtaat

SEQ ID NO: 199608 - DNA, 777 bp, Homo sapiens
  Payload ID: 19385
  Gene Name: WAS/WASL interacting protein family, member 1
  ENST ID: ENST00000410117
  CDS Start-End: 208-603
atttaacaagaggccagagcttgtccaaaatggctgtccaaaaacgaccccacacttgcgttagaagatgatacctttttcagggacagttttctctcttggctcctgtcccgctggccctctgtctgcctgtgtccctgaccatggctccctgcagtaccctttaacgatttatcagcaagactgttgaacgcataactgcccaagatgcctgtccctccccctccagcacccccgccgcccccgacgtttgcactggccaatacagagaagcctaccttgaataagacagagcaggctgggagaaatgctctcctttctgatatcagcaaagggaagaaactaaagaagacggtcaccaatgacagaagtgcaccaatactggacaaacctaaaggagctggtgctggaggcggtggtggtggctttggtggaggcggcggatttggcggaggaggtggtggcggaggcggtggaagttttggagggggcggacctccaggtctgggaggattgttccaggctggaatgccgaagctgagatccacggccaacagggataatgggttagctggagtgggaagaaaagggaggagcaaatagaacttgctggccctggaaatctgcctggtgacctgacagattcagctttctttgtgaggtagcccagctgtctagtagagtaaatacttgtgagccgcttttcaaacacgatggagcacatcttgtggaatatgattacaaatctcactaaatctgaaaaagtgttttgcatga

SEQ ID NO: 199609 - DNA, 1772 bp, Homo sapiens
  Payload ID: 19385
  Gene Name: WAS/WASL interacting protein family, member 1
  ENST ID: ENST00000409415
  CDS Start-End: 137-1348
tgcccgcccggctcagccctgcggaccccgggagaagtttcccagaaaaaatgcccagcgcggcgcggggctgcggagtcgtccggagccgctgcgcgatttatcagcaagactgttgaacgcataactgcccaagatgcctgtccctccccctccagcacccccgccgcccccgacgtttgcactggccaatacagagaagcctaccttgaataagacagagcaggctgggagaaatgctctcctttctgatatcagcaaagggaagaaactaaagaagacggtcaccaatgacagaagtgcaccaatactggacaaacctaaaggagctggtgctggaggcggtggtggtggctttggtggaggcggcggatttggcggaggaggtggtggcggaggcggtggaagttttggagggggcggacctccaggtctgggaggattgttccaggctggaatgccgaagctgagatccacggccaacagggataatgattctggaggaagccgaccaccattgttgccaccgggaggaagatccacatctgcgaaacccttttcacccccaagtggcccagggaggtttcctgtgccttctccaggccacagaagtggtcccccagagcctcagaggaaccgaatgccgcccccaaggcccgacgtgggctcaaagcctgatagcattcctcctccagtacctagtactccaagacccattcaatcaagtccgcacaaccgggggtccccaccagtgcccggaggccccaggcagcccagccccgggcccactcctccccctttccctggaaaccgcggcactgctttgggaggaggctcaatacgtcagtcccccttgagctcctcctcgcccttctccaaccggcctcccctgccgcctacccccagcagggccttggatgacaaaccccctccaccacctcctccagtgggcaacaggccctccatccacagggaagcggttccccctcctcctcctcagaacaacaagcctccagtgccttccactccgcggccttcggcctcctcacaggccccacctccgccgccacctcccagcaggcccgggccgcctcctctgcctccaagttccagcggcaatgacgaaaccccaagactcccacagcggaatctgtccctcagttcgtccacgcccccgttaccttcgccaggacgttcaggtcctcttcctcccccgcccagtgagagacccccacctccagtgagggacccgccaggccgatcaggtatgacaagacgtggagtgagttgcttccaaaacccagcctgcccaaatgtaccaataatcctgtcagtcaagatagtctaacaaaagcaggcataagtaaactcagactgctttgtgcttttaagtggcacacgacacgtgtgatcgtgacctcgtgtaaaccccgggggaaagtgggaccaatatttctgttggtgttttagagatgaggacactgagtagctaataaagttaaatggtcacgagctagttaataaagaagaggcaagaactttcatcttccatctctgaagtgtacttgccagtccactaccctgcctccctagagagaatttcggcggtcttaattgggaaaataagtccccacctcccgcaggagggctctgttattccaacaagaggggaagttcttcaagagctaatgaacttctcctgtacttctctcttcattcgccaggctttgaggccatttccctattcattaaagactaatgtttaaaaagtc

SEQ ID NO: 199610 - DNA, 373 bp, Homo sapiens
  Payload ID: 19385
  Gene Name: WAS/WASL interacting protein family, member 1
  ENST ID: ENST00000436221
  CDS Start-End: 75-373
aatgagaagaagcccttagcctaatgaagcgataagatttatcagcaagactgttgaacgcataactgcccaagatgcctgtccctccccctccagcacccccgccgcccccgacgtttgcactggccaatacagagaagcctaccttgaataagacagagcaggctgggagaaatgctctcctttctgatatcagcaaagggaagaaactaaagaagacggtcaccaatgacagaagtgcaccaatactggacaaacctaaaggagctggtgctggaggcggtggtggtggctttggtggaggcggcggatttggcggaggaggtggtggcggaggcggtggaagttttggagggggcggacctccaggtct

SEQ ID NO: 199611 - DNA, 488 bp, Homo sapiens
  Payload ID: 19385
  Gene Name: WAS/WASL interacting protein family, member 1
  ENST ID: ENST00000455428
  CDS Start-End: 17-488
cgcataactgcccaagatgcctgtccctccccctccagcacccccgccgcccccgacgtttgcactggccaatacagagaagcctaccttgaataagacagagcaggctgggagaaatgctctcctttctgatatcagcaaagggaagaaactaaagaagacggtcaccaatgacagaagtgcaccaatactggacagagctggtgctggaggcggtggtggtggctttggtggaggcggcggatttggcggaggaggtggtggcggaggcggtggaagttttggagggggcggacctccaggtctgggaggattgttccaggctggaatgccgaagctgagatccacggccaacagggataatgattctggaggaagccgaccaccattgttgccaccgggaggaagatccacatctgcgaaacccttttcacccccaagtggcccagggaggtttcctgtgccttctccaggccacagaagtggtc

SEQ ID NO: 199612 - DNA, 2565 bp, Homo sapiens
  Payload ID: 19385
  Gene Name: WAS/WASL interacting protein family, member 1
  ENST ID: ENST00000610916
  CDS Start-End: 204-1682
aacaagaggccagagcttgtccaaaatggctgtccaaaaacgaccccacacttgcgttagaagatgatacctttttcagggacagttttctctcttggctcctgtcccgctggccctctgtctgcctgtgtccctgaccatggctccctgcagtaccctttaacgatttatcagcaagactgttgaacgcataactgcccaagatgcctgtccctccccctccagcacccccgccgcccccgacgtttgcactggccaatacagagaagcctaccttgaataagacagagcaggctgggagaaatgctctcctttctgatatcagcaaagggaagaaactaaagaagacggtcaccaatgacagaagtgcaccaatactggacaaacctaaaggagctggtgctggaggcggtggtggtggctttggtggaggcggcggatttggcggaggaggtggtggcggaggcggtggaagttttggagggggcggacctccaggtctgggaggattgttccaggctggaatgccgaagctgagatccacggccaacagggataatgattctggaggaagccgaccaccattgttgccaccgggaggaagatccacatctgcgaaacccttttcacccccaagtggcccagggaggtttcctgtgccttctccaggccacagaagtggtcccccagagcctcagaggaaccgaatgccgcccccaaggcccgacgtgggctcaaagcctgatagcattcctcctccagtacctagtactccaagacccattcaatcaagtccgcacaaccgggggtccccaccagtgcccggaggccccaggcagcccagccccgggcccactcctccccctttccctggaaaccgcggcactgctttgggaggaggctcaatacgtcagtcccccttgagctcctcctcgcccttctccaaccggcctcccctgccgcctacccccagcagggccttggatgacaaaccccctccaccacctcctccagtgggcaacaggccctccatccacagggaagcggttccccctcctcctcctcagaacaacaagcctccagtgccttccactccgcggccttcggcccctcacaggccccacctccgcccacctcccagcaggcccgggccgcctcctctgcctccaagttccagcggcaatgacgaaaccccaagactcccacagcggaatctgtccctcagttcgtccacgcccccgttaccttcgccaggacgttcaggtcctcttcctcccccgcccagtgagagacccccacctccagtgagggacccgccaggccgatcaggccccctcccaccacctcctccagtaagcagaaacggcagcacatctcgggccctgcctgctacccctcagttgccatccaggagtggagtagacagtcccaggagtggacccaggcctccccttcctcctgataggcccagtgctggggcacctcccccacctccaccatcaacatctattagaaatggcttccaagactctccatgtgaagatgagtgggaaagcagattctacttccatccgatttccgatttgccacctccagagccatatgtacaaacgaccaaaagttatcccagcaaactggcaagaaacgaaagccggagtgagtatttctgccaaggtttttgaagattcacgcttgagtagcctgagtgacactcgggctatatagaaagtccaggcttcttgcctggagtggggtagagaaccctttggagccatctacattctagtaaattccccttccacaggcagtgaggaaattgcagatgcccagaatgcatatgagaaacagttattttaatgtgtcattacaagctcaaaataccgtggtttgctagtattaaattttattattttacttctttggacgtcttcctctgttttcatcttcctgagacagcacaagtagagccatcttctattccttctagttttgaaattggcataatgtctgattaattataacaaaaactccctttaactgccttgatcttttaaacgtattgtaatcatagctttacagagcattacatgaaaatgtaaatatatccataatctctccacataatagatattttcattttaccagattctcatccaattttttatccatataattctgtttttttatgtagttataatgacgatgtacagttttttggcggggtttacataacattgcttagtaaatagtgcccatgttatcacatggtttttatttcagcatatagtaatttaccattaccatggacatttaaattatttctgttgttctgctaatgtaggtaatgctaccataaagaactaaattgcttttcctccattgaagaagaatgtcaacaagaaaggaaaaatagacaaactggaattttataacagtaaatgtataggaagtgttacagctctttgagaatttgtctagcaggctttccagggttttgctggaaagcctctgaaatttacttttaaaaaaacacaatagctgggcatggtggctcacgcctgtaat

SEQ ID NO: 199613 - DNA, 7474 bp, Homo sapiens
  Payload ID: 19386
  Gene Name: WAS/WASL interacting protein family, member 2
  Uniprot ID: Q8TF74
  ENST ID: ENST00000323571
  CDS Start-End: 241-1563
ggggacggtgggagcagatccatttccgggttggcaaaaggggcggtggcggcggcggcggcggcggcggcggcggcgacggcgagaaagagcttgccggggggcgagcaggacaggacgaagccggagtgtaggcggcagaggattcgctcccagagcagctgcggccaggtatatgaatgacctaaaggtacaaataaagacggagagagaacagtgccaactgggagcagggcaagaatgccaattcctcctcccccgccacccccacctggtcctcctccacctcccacatttcatcaggcaaacacagagcagcccaagctgagtagagatgagcagcggggtcgaggcgccctcttacaggacatttgcaaagggaccaagctgaagaaggtgaccaacattaatgatcggagtgctcccatcctcgagaagccgaaaggaagcagtggtggctatggctctggaggagctgccctgcagcccaagggaggtctcttccaaggaggagtgctgaagcttcgacctgtgggagccaaggatggttcagagaacctagctggtaagccagccctgcaaatccccagttctcgagctgctgccccaaggcctccagtatctgccgccagcgggcgtcctcaggatgatacagacagcagccgggcctcactcccagaactgccccggatgcagagaccctctttaccggacctctctcggcctaataccaccagcagtacgggcatgaagcacagctcctctgcccctcccccaccacccccagggcggcgtgccaacgcaccccccacacctctgcctatgcacagcagcaaagcccccgcctacaacagagagaaacccttgccaccgacgcctggacaaaggcttcaccctggtcgagagggacctcctgctccacccccagtcaaaccacctccttcccctgtgaatatcagaacaggaccaagtggccagtctctggctcctcctcctccgccttaccgccagcctcctggggtccccaatggaccctctagccccactaatgagtcagcccctgagctgccacagagacacaattctttgcataggaagacaccagggcctgtcagaggcctagcacctcctccacccacctcggcctccccatctttactgagtaataggccacctcccccagcccgagaccctcccagtcggggagcagctcctccacccccaccacctgtgatccgaaatggtgccagggatgctccccctcccccaccaccataccgaatgcatgggtcagaacccccgagccgaggaaagcccccacctccaccctcaaggacgccagctgggccaccccctcctcctccaccgcccctgaggaatggccacagagattctatcaccactgtccggtctttcttggatgattttgagtcaaagtattccttccatccagtagaagactttcctgctccagaagaatataaacactttcagaggatatatcccagcaaaacaaaccgagctgcccgtggagccccacctctgccacccattctcaggtgaagcctggcttggtcccgttcctcaggaaaaggatggaccttctcttcttctcagatggtcccttccattcccctgaaacctgcatgagagctcctaacatgtttctccaatgcaatcaagccctagactccaaatgtcctcccagctcacctccatctatgcatctcatctctggatttggtgatcagactctatattgacagtaggatctcaaaccctgcatccatccttcctccagcaagccctgctagccacatgaggaacaagtttccgtgtcttctgccttcctcttggggaaaggtgccttgttgtgatgaattaactcactgttagggcagggtggagaatggtactccttccttctcctgtccactgtgggggaagcttggcaggtatattatatttcatcatttaggaggctggcatgaccaggacttatgggtgggaggggagcatttttagtgaagcaagaaaggagtttgccaagaagtgatctgttttaaaggtcatatttggagaaagggcaaggaattgggtctgctttatttttgggggtattttgtttttgttctcacctgctgcccccccaccccaccaccccagggataaattggatataaacactaaatactaatcagttgaacttaacatttaataaaaagaaagggtgaaataaactgaagaccattttagaactagtcagttctctgcagcaaagggaacaggagccatttgaaccctctgggacccctcaccccactgcttcagggtgctaggctgagggatgtttttcctcccccttaccgcccatgcccttgaaagaaaagtcactttttgtggagggcatcattcattcctgattcacaaaccccaaaaacctctggtgggagataggaagatagggcgtgggcctgggccttaacctcaatcttgtgtctgcctcagtcttttctgactggccctgaagttgtcagtggctctttctgtccttcagcccctggaaggtgctccaggataacaaagaagggcaggttgaagcccctcatggaaggagctggctttgtggggctgcaaaggacttttaagtcctgcctgtactgaagttcacagcccacctgactgagcagactcttcctgttcctttctctaccacccttgccttcccaggactgcacggtttaacacagcagagtacagaagggtgaagaagtgagcagaggcttatgaagatattcagatactcttctatgccaggaagcacaaagactttgttgagatttgcctcagttcagtagatcttccttggcagccagccataggttgtttctttgtcttccgggtcctaaagagcacagagaaaatggaggtccccagtctaggtaggaagctgattggatgaggacttctttttttccgacagcaggatggggctcttgggctccacacaccagatgctttggttttctacaactgttgctatgtgtagagggtgctcagagcgtggcatgagagcaaggagaccatggctactctttgaaatggatggggaaaattagcttaaaaatttaatcacgagattgcgccactgcactccagcctgggcgacagagccagactccgtctcaaaaaaaaaaaaaaaaaaaaaatttaatcacacacatcacaggcttaaactgtcttagagacctttccagttgattggatcacaggctagggatctgtgcatggtgccaggtgaaacccaagtctccccagtgctaggtgagggagggctcaacgggggtaatgtgtatggggtctgctgtcctttgccatcccctggaccatattaactctgggacagaccatgattaggtctgtcaccaaacttttcctaatcattttttatgtatcattcttctttctaatctgttagcagttatctcccagaagtatccctagcatcctgaagcaaacagaactgccgggcgctgtggcttatgcctgtaatctcagcaatttgggaggccgaggcgggcggatcacctgaggtcagaagttcgagaccagcctgtccaacatggtgaaaccccgtctccactaaaaacacaaaaattatctgggcgtggtggcatgtgcctgtagtcccagctactggggaggctgaggcaggagaatcgcttgaatccaggaggtggaggttgcagtgagtggagatggcgccactgcgctccagcccgggtgacagagtgaaactccatctcagaaaacaaacaaaccaaacaactgagagagggcatgctagtggagggaaaaggagagagtacaagagttgatactgcatcagagttccagggcagatactgacaagtgactgaactttgactgtgaagtcttcccatttatttttgaaatgggagtcgatgccttttgtacgttatcaaagtgtttttttttttttcctcctttactcagacatagagcatcaaaatatcacgagtaaagccaaaccccagcttttcactggggctgatatcttcctccccatggcccactgccccctcatattccccagcacttggactgtgtcacatgggtattgattgtatacttgttgtcttggcctcatgcaaaaaggcctgggtctagatctagtcagatgagttttttttagagcatgttgatgatacaacacctgtttaaatgtctgccttatatgttatttggtcccactgttaataatagatttattactatgtatatttactattgaagatgggaatgtgatctgcatagttatcagtctattttgtatgttgtaaaaagcttctaatttaggtttaaggtgggctggctacaagagcactaaaactcctcaccttttaaactgctctttttatctgcttgtgggaatgtcgtctctttcgtggaagattgggtggtctcatgttgaggctgttgcccagtcccattaactcccttgtccccccacagaaggaagagacattgcccagctaagcatcaggaagctgtgttaaaagcccttctatgggtttggttttgtgatgtttttccctaatgggaaaaacgttatagttgtttcttactgccctgtctgggaagcagggcaaacctccaggtttttaaatgagctagatgcccctcttcctcttctctggtcactgaacctggaccaaagcactttgatattccaggtgtgattttctctgtcatggggatttgctccactgcagagccccatcattttcacagcgtaggccaacagagtgagaacctagggctaccctagctgatggatgtgaggctgctgtctacaggagctcatcccagccctgttaactggcagtggcaaggatactcgtcatcggccattgcactggggaactccctcaccccatggcttcccaacttgaaacccagatttacctccagggagaggtgagaaaaaaattgtaaatagacttgctaaagagcaactcagggttggggtgtgttttaattctcctgatcacttgaaataatctgtaggctgagtgcttatgggggtgggggagaagggtgactccagggtccttccattttgtgaagctctgggggtggagtgtgggcatctgaggccctatgatggcactacattgagctgtctgcccttccggaaacccaacctgcaatcaactgcaaatcaaattcttcacattccagctacagtctttctttccccattgaatctcagtccctggccatgtggtcaaggtggctttctgttaagctaccctaatttcgggaatgggaggggagagaggagggccattacaactctgccttcaagactcatctcttaaaaacaaaacgaaacaaaactacaaccaccatcaaaaccacacgcaaaaaaaaaaaaaaaaaaaaaaaggataactttaaccgaaggaagggtttggttccattcaactccacattcattgtgcctttacttgcattagatttctgtgctttcttcctttccctctttgaagcaattaaaatcttccttgataactgctgtttctttctactcttgtttctggcaatttagtgggttccttctctagtggtcttaaatctcattccactggtggcaagatggggcctagccttcttttcacatgtctaatcttttcctttctcatggtgccctccatggaagtcacagtcaacactgaataaatgactagaatgacacgtgtgcgtgcgcacgcgtgtgcgtgtgtgtgttcatctgtctgcatgtggatcaatttcttttagaaaataatttattgtatgatttattttggagttatattctgattacagtgctccctctcccaaatagcattgattttttcccccctctaaaatgtataatctggtctcaggttggattctttggtacatttctctcttctggatgccatgcagcttaattaaaaccttgcttaaaaacaaaaagtgaaaattgtgtactcttgtctggaataccgcctcaggtggtggcacagagaggggagaaaacctttgcctcataatttgggtaagtgtagtggtttgattccaggtcccttgaaaaagtagatctactgaattgggcagactcatctatagctttctgagggtcttctctcctcctctccagctgtattttgaaaattacagttctagttggctgggcgcgatggctcatgtctgtaatcccagcactttgggaggccaaggcgggtggatcatttgaggtcaggagttcaagaccagcttggccaacatggtgaaaccccgtctctactgaaaatacaaaaattaaccggtgtcatggcgcatgcctgtagtcccagctactcgggaggccgaggcaggaaaatcacttgaacccaggaggcggaggttgcactgagctgagatcatgccactgcactaaaaaaaaaaaaaaaaaaaaaaaaaaaaaaaaaaaaaaattctagagttctagttacccttcctgggagattctgatggtccttattttattattattattatttttttttgagacaggatgttgctgtcatccaggctggagtgcagtggtgtgatcatagctcaccgcagcctccaactctcaagctcaagtgatcctcccacctcagcctcccgtgtagctgggaccacaggtgtgtaccactatgcctggctaattttgaaaatttttttgtaaagacagggtctccctatgttgcccagactggtctcaaattcctgggcttaagtgattgtcccacctcagcttctcaaagtgctgggattacaggcatgagccaccgcacccagccagtccttattttatatttccacctaactcccctttgcccacgatttcagggaacctaggaggcttcctggccttgtgaccttttccttgaatctcttataattctttctacctgtgttgcatggcagattctcagattgaggctaaagaaaagaagggtggggacaaagcatacagaatgtgtgtatctgtttttatgtgggtgttggctgtttttcgtcactgctttttaagctgaatcttagctggttttcttgaactttgactttaggtgtaaaaattcaaccagacattctctccttactgtggtcagctgacatcataaccactaaggcttaatgagcttaacttgcactttcatcactagcaaaggtcttgaagttatttctcttactgattcataatgggtgtgtgtatgaatcactctcacataatttagatataaaaacctatgaggatgagggagggaggggaagaaaaaaaaggactcctttcattttcatccgtacttcccagatgggctgaatctccgattatttgacccatcattgttattaatatggttaataaactacctatttattgattgaa

SEQ ID NO: 199614 - DNA, 2378 bp, Homo sapiens
  Payload ID: 19386
  Gene Name: WAS/WASL interacting protein family, member 2
  ENST ID: ENST00000394103
  CDS Start-End: 206-754
aaaaggggcggtggcggcggcggcggcggcggcggcggcggcgacggcgagaaagagcttgccggggggcgagcaggacaggacgaagccggagtgtaggcggcagaggattcgctcccagagcagctgcggccaggtatatgaatgacctaaaggtacaaataaagacggagagagaacagtgccaactgggagcagggcaagaatgccaattcctcctcccccgccacccccacctggtcctcctccacctcccacatttcatcaggcaaacacagagcagcccaagctgagtagagatgagcagcggggtcgaggcgccctcttacaggacatttgcaaagggaccaagctgaagaaggtgaccaacattaatgatcggagtgctcccatcctcgagactcctccacccccaccacctgtgatccgaaatggtgccagggatgctccccctcccccaccaccataccgaatgcatgggtcagaacccccgagccgaggaaagcccccacctccaccctcaaggacgccagctgggccaccccctcctcctccaccgcccctgaggaatggccacagagattctatcaccactgtccggtctttcttggatgattttgagtcaaagtattccttccatccagtagaagactttcctgctccagaagaatataaacactttcagaggatatatcccagcaaaacaaaccgagctgcccgtggagccccacctctgccacccattctcaggtgaagcctggcttggtcccgttcctcaggaaaaggatggaccttctcttcttctcagatggtcccttccattcccctgaaacctgcatgagagctcctaacatgtttctccaatgcaatcaagccctagactccaaatgtcctcccagctcacctccatctatgcatctcatctctggatttggtgatcagactctatattgacagtaggatctcaaaccctgcatccatccttcctccagcaagccctgctagccacatgaggaacaagtttccgtgtcttctgccttcctcttggggaaaggtgccttgttgtgatgaattaactcactgttagggcagggtggagaatggtactccttccttctcctgtccactgtgggggaagcttggcaggtatattatatttcatcatttaggaggctggcatgaccaggacttatgggtgggaggggagcatttttagtgaagcaagaaaggagtttgccaagaagtgatctgttttaaaggtcatatttggagaaagggcaaggaattgggtctgctttatttttgggggtattttgtttttgttctcacctgctgcccccccaccccaccaccccagggataaattggatataaacactaaatactaatcagttgaacttaacatttaataaaaagaaagggtgaaataaactgaagaccattttagaactagtcagttctctgcagcaaagggaacaggagccatttgaaccctctgggacccctcaccccactgcttcagggtgctaggctgagggatgtttttcctcccccttaccgcccatgcccttgaaagaaaagtcactttttgtggagggcatcattcattcctgattcacaaaccccaaaaacctctggtgggagataggaagatagggcgtgggcctgggccttaacctcaatcttgtgtctgcctcagtcttttctgactggccctgaagttgtcagtggctctttctgtccttcagcccctggaaggtgctccaggataacaaagaagggcaggttgaagcccctcatggaaggagctggctttgtggggctgcaaaggacttttaagtcctgcctgtactgaagttcacagcccacctgactgagcagactcttcctgttcctttctctaccacccttgccttcccaggactgcacggtttaacacagcagagtacagaagggtgaagaagtgagcagaggcttatgaagatattcagatactcttctatgccaggaagcacaaagactttgttgagatttgcctcagttcagtagatcttccttggcagccagccataggttgtttctttgtcttccgggtcctaaagagcacagagaaaatggaggtccccagtctaggtaggaagctgattggatgaggacttctttttttccgacagcaggatggggctcttgggctccacacaccagatgctttggttttctacaactgttgctatgtgtagagggtgctcagagcgtggcatgagagcaaggagaccatggctactctttgaaatggatggggaaaattagcttaaaaatttaatcacgagattgcgccactgcactccagcctgggcgacagagccagactccgtctc

SEQ ID NO: 199615 - DNA, 1529 bp, Homo sapiens
  Payload ID: 19386
  Gene Name: WAS/WASL interacting protein family, member 2
  Uniprot ID: Q8TF74
  ENST ID: ENST00000583130
  CDS Start-End: 201-1523
aggcaataagggctcctgaagggttgggtgagttaaggcggcaactctgtgaggaacgaggtaatcgtgcgcaaaaagggagacgggaacggaggacctgttgggaacggctaattagcaggatgctgtgggtatatgaatgacctaaaggtacaaataaagacggagagagaacagtgccaactgggagcagggcaagaatgccaattcctcctcccccgccacccccacctggtcctcctccacctcccacatttcatcaggcaaacacagagcagcccaagctgagtagagatgagcagcggggtcgaggcgccctcttacaggacatttgcaaagggaccaagctgaagaaggtgaccaacattaatgatcggagtgctcccatcctcgagaagccgaaaggaagcagtggtggctatggctctggaggagctgccctgcagcccaagggaggtctcttccaaggaggagtgctgaagcttcgacctgtgggagccaaggatggttcagagaacctagctggtaagccagccctgcaaatccccagttctcgagctgctgccccaaggcctccagtatctgccgccagcgggcgtcctcaggatgatacagacagcagccgggcctcactcccagaactgccccggatgcagagaccctctttaccggacctctctcggcctaataccaccagcagtacgggcatgaagcacagctcctctgcccctcccccaccacccccagggcggcgtgccaacgcaccccccacacctctgcctatgcacagcagcaaagcccccgcctacaacagagagaaacccttgccaccgacgcctggacaaaggcttcaccctggtcgagagggacctcctgctccacccccagtcaaaccacctccttcccctgtgaatatcagaacaggaccaagtggccagtctctggctcctcctcctccgccttaccgccagcctcctggggtccccaatggaccctctagccccactaatgagtcagcccctgagctgccacagagacacaattctttgcataggaagacaccagggcctgtcagaggcctagcacctcctccacccacctcggcctccccatctttactgagtaataggccacctcccccagcccgagaccctcccagtcggggagcagctcctccacccccaccacctgtgatccgaaatggtgccagggatgctccccctcccccaccaccataccgaatgcatgggtcagaacccccgagccgaggaaagcccccacctccaccctcaaggacgccagctgggccaccccctcctcctccaccgcccctgaggaatggccacagagattctatcaccactgtccggtctttcttggatgattttgagtcaaagtattccttccatccagtagaagactttcctgctccagaagaatataaacactttcagaggatatatcccagcaaaacaaaccgagctgcccgtggagccccacctctgccacccattctcaggtgaagcctg

SEQ ID NO: 199616 - DNA, 581 bp, Homo sapiens
  Payload ID: 19386
  Gene Name: WAS/WASL interacting protein family, member 2
  ENST ID: ENST00000583268
  CDS Start-End: 393-581
attttgttcgcggacgctggggacggtgggagcagatccatttccgggttggcaaaaggggcggtggcggcggcggcggcggcggcggcggcggcgacggcgagaaagagcttgccggggggcgagcaggacaggacgaagccggagtgtaggcggcagaggattcgctcccagagcagctgcggccaggtatatgaatgacctaaaggtacaaataaagacggagagagaacagtgccaactgggagcagggcaagaatgccaattcctcctcccccgccacccccacctggtcctcctccacctcccacatttcatcagctcctccacccccaccacctgtgatccgaaatggtgccagggatgctccccctcccccaccaccataccgaatgcatgggtcagaacccccgagccgaggaaagcccccacctccaccctcaaggacgccagctgggccaccccctcctcctccaccgcccctgaggaatggccacagagattctatcaccactgtccggtctttcttggatgattttgagtcaaagtattccttccatccagtagaagactttcctgct

SEQ ID NO: 199617 - DNA, 2693 bp, Homo sapiens
  Payload ID: 19386
  Gene Name: WAS/WASL interacting protein family, member 2
  Uniprot ID: Q8TF74
  ENST ID: ENST00000585043
  CDS Start-End: 239-1561
gggttggcaaaaggggcggtggcggcggcggcggcggcggcggcggcggcgacggcgagaaagagcttgccggggggcgagcaggacaggacgaagccggagtgtaggcggcagaggattcgctcccagagcagctgcggccaggtcggaaagaggccggggcggctgggtatatgaatgacctaaaggtacaaataaagacggagagagaacagtgccaactgggagcagggcaagaatgccaattcctcctcccccgccacccccacctggtcctcctccacctcccacatttcatcaggcaaacacagagcagcccaagctgagtagagatgagcagcggggtcgaggcgccctcttacaggacatttgcaaagggaccaagctgaagaaggtgaccaacattaatgatcggagtgctcccatcctcgagaagccgaaaggaagcagtggtggctatggctctggaggagctgccctgcagcccaagggaggtctcttccaaggaggagtgctgaagcttcgacctgtgggagccaaggatggttcagagaacctagctggtaagccagccctgcaaatccccagttctcgagctgctgccccaaggcctccagtatctgccgccagcgggcgtcctcaggatgatacagacagcagccgggcctcactcccagaactgccccggatgcagagaccctctttaccggacctctctcggcctaataccaccagcagtacgggcatgaagcacagctcctctgcccctcccccaccacccccagggcggcgtgccaacgcaccccccacacctctgcctatgcacagcagcaaagcccccgcctacaacagagagaaacccttgccaccgacgcctggacaaaggcttcaccctggtcgagagggacctcctgctccacccccagtcaaaccacctccttcccctgtgaatatcagaacaggaccaagtggccagtctctggctcctcctcctccgccttaccgccagcctcctggggtccccaatggaccctctagccccactaatgagtcagcccctgagctgccacagagacacaattctttgcataggaagacaccagggcctgtcagaggcctagcacctcctccacccacctcggcctccccatctttactgagtaataggccacctcccccagcccgagaccctcccagtcggggagcagctcctccacccccaccacctgtgatccgaaatggtgccagggatgctccccctcccccaccaccataccgaatgcatgggtcagaacccccgagccgaggaaagcccccacctccaccctcaaggacgccagctgggccaccccctcctcctccaccgcccctgaggaatggccacagagattctatcaccactgtccggtctttcttggatgattttgagtcaaagtattccttccatccagtagaagactttcctgctccagaagaatataaacactttcagaggatatatcccagcaaaacaaaccgagctgcccgtggagccccacctctgccacccattctcaggtgaagcctggcttggtcccgttcctcaggaaaaggatggaccttctcttcttctcagatggtcccttccattcccctgaaacctgcatgagagctcctaacatgtttctccaatgcaatcaagccctagactccaaatgtcctcccagctcacctccatctatgcatctcatctctggatttggtgatcagactctatattgacagtaggatctcaaaccctgcatccatccttcctccagcaagccctgctagccacatgaggaacaagtttccgtgtcttctgccttcctcttggggaaaggtgccttgttgtgatgaattaactcactgttagggcagggtggagaatggtactccttccttctcctgtccactgtgggggaagcttggcaggtatattatatttcatcatttaggaggctggcatgaccaggacttatgggtgggaggggagcatttttagtgaagcaagaaaggagtttgccaagaagtgatctgttttaaaggtcatatttggagaaagggcaaggaattgggtctgctttatttttgggggtattttgtttttgttctcacctgctgcccccccaccccaccaccccagggataaattggatataaacactaaatactaatcagttgaacttaacatttaataaaaagaaagggtgaaataaactgaagaccattttagaactagtcagttctctgcagcaaagggaacaggagccatttgaaccctctgggacccctcaccccactgcttcagggtgctaggctgagggatgtttttcctcccccttaccgcccatgcccttgaaagaaaagtcactttttgtggagggcatcattcattcctgattcacaaaccccaaaaacctctggtgggagataggaagatagggcgtgggcctgggccttaacctcaatcttgtgtctgcctcagtcttttctgactggccctgaagttgtcagtggctctttctgtccttcagcccctggaaggtgctccaggataacaaagaagggcaggttgaagcccctcatggaaggagctggctttgtggggctgcaaaggacttttaagtcctgcctgtactgaagttcacagcccacctgactgagcagactct

SEQ ID NO: 199618 - DNA, 572 bp, Homo sapiens
  Payload ID: 19386
  Gene Name: WAS/WASL interacting protein family, member 2
  ENST ID: ENST00000584296
  CDS Start-End: 263-572
aatcgtgcgcaaaaagggagacgggaacggaggacctgttgggaacggctaattagcaggatgctgtggagacgtggtctcactctgtcgcccgggctggagtgcagtggcatgatcatggctccttaaagcctcgacctcccgggctgaagtggtccttccacctaagccccgccaatagctgggaccacaggtatatgaatgacctaaaggtacaaataaagacggagagagaacagtgccaactgggagcagggcaagaatgccaattcctcctcccccgccacccccacctggtcctcctccacctcccacatttcatcaggcaaacacagagcagcccaagctgagtagagatgagcagcggggtcgaggcgccctcttacaggacatttgcaaagggaccaagctgaagaaggtgaccaacattaatgatcggagtgctcccatcctcgagaagccgaaaggaagcagtggtggctatggctctggaggagctgccctgcagcccaagggaggtctcttccaaggaggagtgctgaagcttcgacctgtgggagccaaggatggtt

SEQ ID NO: 199619 - DNA, 3163 bp, Homo sapiens
  Payload ID: 19386
  Gene Name: WAS/WASL interacting protein family, member 2
  ENST ID: ENST00000582781
  CDS Start-End: 237-476
acggtgggagcagatccatttccgggttggcaaaaggggcggtggcggcggcggcggcggcggcggcggcggcgacggcgagaaagagcttgccggggggcgagcaggacaggacgaagccggagtgtaggcggcagaggattcgctcccagagcagctgcggccaggtatatgaatgacctaaaggtacaaataaagacggagagagaacagtgccaactgggagcagggcaagaatgccaattcctcctcccccgccacccccacctggtcctcctccacctcccacatttcatcaggcaaacacagagcagcccaagctgagtagagatgagcagcggggtcgaggcgccctcttacaggacatttgcaaagggaccaagctgaagaagagccgaaaggaagcagtggtggctatggctctggaggagctgccctgcagcccaagggaggtctcttccaaggaggagtgctgaagcttcgacctgtgggagccaaggatggttcagagaacctagctggtaagccagccctgcaaatccccagttctcgagctgctgccccaaggcctccagtatctgccgccagcgggcgtcctcaggatgatacagacagcagccgggcctcactcccagaactgccccggatgcagagaccctctttaccggacctctctcggcctaataccaccagcagtacgggcatgaagcacagctcctctgcccctcccccaccacccccagggcggcgtgccaacgcaccccccacacctctgcctatgcacagcagcaaagcccccgcctacaacagagagaaacccttgccaccgacgcctggacaaaggcttcaccctggtcgagagggacctcctgctccacccccagtcaaaccacctccttcccctgtgaatatcagaacaggaccaagtggccagtctctggctcctcctcctccgccttaccgccagcctcctggggtccccaatggaccctctagccccactaatgagtcagcccctgagctgccacagagacacaattctttgcataggaagacaccagggcctgtcagaggcctagcacctcctccacccacctcggcctccccatctttactgagtaataggccacctcccccagcccgagaccctcccagtcggggagcagctcctccacccccaccacctgtgatccgaaatggtgccagggatgctccccctcccccaccaccataccgaatgcatgggtcagaacccccgagccgaggaaagcccccacctccaccctcaaggacgccagctgggccaccccctcctcctccaccgcccctgaggaatggccacagagattctatcaccactgtccggtctttcttggatgattttgagtcaaagtattccttccatccagtagaagactttcctgctccagaagaatataaacactttcagaggatatatcccagcaaaacaaaccgagctgcccgtggagccccacctctgccacccattctcaggtgaagcctggcttggtcccgttcctcaggaaaaggatggaccttctcttcttctcagatggtcccttccattcccctgaaacctgcatgagagctcctaacatgtttctccaatgcaatcaagccctagactccaaatgtcctcccagctcacctccatctatgcatctcatctctggatttggtgatcagactctatattgacagtaggatctcaaaccctgcatccatccttcctccagcaagccctgctagccacatgaggaacaagtttccgtgtcttctgccttcctcttggggaaaggtgccttgttgtgatgaattaactcactgttagggcagggtggagaatggtactccttccttctcctgtccactgtgggggaagcttggcaggtatattatatttcatcatttaggaggctggcatgaccaggacttatgggtgggaggggagcatttttagtgaagcaagaaaggagtttgccaagaagtgatctgttttaaaggtcatatttggagaaagggcaaggaattgggtctgctttatttttgggggtattttgtttttgttctcacctgctgcccccccaccccaccaccccagggataaattggatataaacactaaatactaatcagttgaacttaacatttaataaaaagaaagggtgaaataaactgaagaccattttagaactagtcagttctctgcagcaaagggaacaggagccatttgaaccctctgggacccctcaccccactgcttcagggtgctaggctgagggatgtttttcctcccccttaccgcccatgcccttgaaagaaaagtcactttttgtggagggcatcattcattcctgattcacaaaccccaaaaacctctggtgggagataggaagatagggcgtgggcctgggccttaacctcaatcttgtgtctgcctcagtcttttctgactggccctgaagttgtcagtggctctttctgtccttcagcccctggaaggtgctccaggataacaaagaagggcaggttgaagcccctcatggaaggagctggctttgtggggctgcaaaggacttttaagtcctgcctgtactgaagttcacagcccacctgactgagcagactcttcctgttcctttctctaccacccttgccttcccaggactgcacggtttaacacagcagagtacagaagggtgaagaagtgagcagaggcttatgaagatattcagatactcttctatgccaggaagcacaaagactttgttgagatttgcctcagttcagtagatcttccttggcagccagccataggttgtttctttgtcttccgggtcctaaagagcacagagaaaatggaggtccccagtctaggtaggaagctgattggatgaggacttctttttttccgacagcaggatggggctcttgggctccacacaccagatgctttggttttctacaactgttgctatgtgtagagggtgctcagagcgtggcatgagagcaaggagaccatggctactctttgaaatggatggggaaaattagcttaaaaatttaatcacgagattgcgccactgcactccagcctgggcgacagagccagactccgtctcaaaaaaaaaaaaaaaaaaaa

SEQ ID NO: 199620 - DNA, 4184 bp, Homo sapiens
  Payload ID: 19387
  Gene Name: WAS/WASL interacting protein family, member 3
  Uniprot ID: A6NGB9
  ENST ID: ENST00000242140
  CDS Start-End: 183-1634
tcggcggtagcggcgccgcttggagcacgggcgctgcgggacggagcccggagccggaggcggcggcggcggagacgtcggccggagctcgagtccagtccagcccccggctccgccacctgcagagcagaagccactctcttgggaccattcataagcaggagacatcaacaccgtgacacatgccagtgccaccgccacccccacctcctctgcctccacctcccccgcctctgggggctcctccccctcccccaccatcagcacccccggtaagcacagacacctccagcttgcgaagggcagatccgaaaggccggagtgcgctgttggctgatatccagcaaggaactcgcctgcgcaaagtcacgcagatcaacgaccgcagtgccccgcagatcgagagttctaaaggaaccaacaaagaaggaggaggttctgcaaacacacgaggcgcgagcacacctcccaccctgggagatctgtttgctggtggctttcctgtattgcgaccagcaggccagcgggatgtagcaggtggcaagacagggcagggccctggctcccgcgcgccctctcccaggcttcccaacaaaaccatcagcggcccgcttatcccgcctgcctctcccaggctaggcaatacctccgaggcgcatggcgctgccaggacagccccgcctcgccccaacgtgcctgccccgccccctcccaccccaccccctccgcctccacccttacccccgccccttccctcttcctcccccatcaaaactccgcttgtgtccccacccggcccactgaccaaagggaacctcccggtggttgcaccccccgtcccctgtgcgccaccacctccacctccgccacctcccccaacgccacccccgctgcccccggcctcggttcttagtgacaaggcagtgaagcctcagctggctcccttgcacctcccgcccatcccgcccccgctccctctgctcccaccttgtgggtatccggggctcaaagcggagcccgccagccctgcgcaagatgcgcaggagcctcccgccccgccgcccccgctccccccttatgcttcttgctccccgagggcttctttgcccgcgccccctttgccaggagttaatagcagcagtgaaactccacccccgctaccccctaaatcccccagcttccaggccccaccgcagaaggccggtgcgcaggccttgcccgccccgcctgcccctccgggctcccagccgttcctgcagaagaagaggcatggccgaccaggggccggtgggggaaagctaaatccacctccagcaccccctgcgagatcacctaccacagagctttcaagcaagagccagcaggccacagcctggaccccgacgcagcagcctggaggtcaactgcgaaatggaagcctgcacatcattgatgacttcgagtctaaattcacgttccattctgtggaagactttccccctccggatgaatataaaccatgccagaagatttaccccagcaagatccccagaagccgtacacctggtccctggctccaagcggaagcagtcgggcagagctctgatgacatcaaaggcagaaattctcagttatctctaaagactcttcggtgagaagacagatgaagcgaaggtcctggggttccaggttgcagaacaacatgtcagaccccacccaccccatgctcaagctgtaattcagttggcatacaggcttggaattgagaatttatttattgtaaatatgtgatttgcacgggctttaaagcagtattttaattgacttttatttcggtaatattttttaaaacacccctcatttttccattttttgcattgcatcttggcatttgtcagcacagatagagccctgtccctccacctagtgcccactccatgactgtgaatctgcttgcaggctggcccttcctagattctgaaccgtttgtagagagtccttagtttgcaggtagccccaaagttataaatatccacaacggcttcttattggcataatttcatattctcatcacactaactgcaaaatcaaaccaaataatgccttatcaatgatgcagctcagaggaagtagcgtgtcccccacacccagacagtgccgcgcagcctccagggaacgaggtgccatgtctcgcttccattttgcagtacagggaatttttttttttttttttttttttttttttgctgcctaatgtaatacatcacaaagtaaaggcaagagtgggcttggccctccgatgccaaccacagggccccttttgtaactgaataatcctccaagtagccagtgctcctactgtttacagtgtccctcgtgcccaagtctctgtcactttcatcctgttccctccaagttcccagtcccatcccagtagccagctttatgagattttggtatttcttccctacagattaaaaacatacacaactcatcattatgctaaactaccagttgtatctcagaggtctccccttctgcccttgcttcgagtgtggacttccatggaaaatatgacatgaaaaagtgtagaacgaaacatcgtgtgaaatacctgccacaaatacctagtgcctcactgcccccatcttaggatccttggagccacccgtcaggcaaaacctagctcccttctgagctaaaggagaaccttgcctgacaactccacattcattcccttgtggtgggcacctgtctgtggggagatgtgtgcaagctcagccactctgaatatggaaaaggtcaggccgggctggtcctgctcttcactccctcttcttgatcctgtagggagtggaaatgtgtttttgcttgctgcctgacccctgatgttccccatctttggtcggggaagactgtgacagaggaaggagaaaaaatagaaggaaacagactgatccctgggctgtgctcaaaatagctgccctttaaaggaaatcaggcagggaggggagggaaaccagcgaaaaagaaatttgctttgcaacaacccacgcacacattcacccctgaagtatatcatgaacagaccaagccatccagaaaggcagccggtcaggagggtgtgggcaaacatgactgcatctgcctcactgttgtctggagtaacgactcaggtggtgtcctgcagcagtgctgtgctttctcattccagatggaagcaagtgagccagggtcaaattcccttctccaggggaatgaatcaagcccaaactgtaacagctaaataagtagaagtttttgcaggtcatcagctctgggcataactaatttgttttattggttctggaagatttccaaaaagccagaatttattattataacagtgtccactccactgccctcacagttgtgtaaaataattatagaagttttaatgatcctgattaagaagaccctagacaaaggcaattccaccttcagagtagactgcctgccctaatgaggtgtttagacattcgtgtctcctatggctgggatggaaattaaaataacactatttaaggacagagcgggccaggagcagtggctcatgcaggtaatcccagcatgggaggctgaggtgggtggattacttgaggttaggagttcaagaccagcctggccaacatggtgaaaccctgtctactcaaatacaaaaaattagccaggcatggtggctcacacctgtaatcccagcaacttgggaggttcaggcacaagaattgcttgaaccctggaggtggaggttgcagtgagctgagatggcaccactgcactctagcctgggcaacagagcgagaccctaactcaaaaaaaaaaaaggacagaggggaggaaggagcagaaaccaaaaatggcaattagggagaaatctcaggaatgtggcatcccatctccccttgagacctatcactgaattcacaacccttcgagctcatgctggtgcactgagtcccttgggcgctgtaaaggtttaaccccttgactgtaaactcagacttagagacatctgagtcacacagtccccgccattgtcacatattctcactgacactgcagtctgtgactcctccaatgtttcacgtgtattttatatttattgatgtctccttccgcagattcatttctttgtacttaataaactttagtaagtggaaatgctt

SEQ ID NO: 199621 - DNA, 3491 bp, Homo sapiens
  Payload ID: 19387
  Gene Name: WAS/WASL interacting protein family, member 3
  ENST ID: ENST00000409123
  CDS Start-End: 251-1702
cccgcctccgcgtcccggcagcaccagagccggtggccggggagcgagccgggcgcaccgagcgcagctcggcggtagcggcgccgcttggagcacgggcgctgcgggacggagcccggagccggaggcggcggcggcggagacgtcggccggagctcgagtccagtccagcccccggctccgccacctgcagagcagaagccactctcttgggaccattcataagcaggagacatcaacaccgtgacacatgccagtgccaccgccacccccacctcctctgcctccacctcccccgcctctgggggctcctccccctcccccaccatcagcacccccggtaagcacagacacctccagcttgcgaagggcagatccgaaaggccggagtgcgctgttggctgatatccagcaaggaactcgcctgcgcaaagtcacgcagatcaacgaccgcagtgccccgcagatcgagagttctaaaggaaccaacaaagaaggaggaggttctgcaaacacacgaggcgcgagcacacctcccaccctgggagatctgtttgctggtggctttcctgtattgcgaccagcaggccagcgggatgtagcaggtggcaagacagggcagggccctggctcccgcgcgccctctcccaggcttcccaacaaaaccatcagcggcccgcttatcccgcctgcctctcccaggctaggcaatacctccgaggcgcatggcgctgccaggacagccccgcctcgccccaacgtgcctgccccgccccctcccaccccaccccctccgcctccacccttacccccgccccttccctcttcctcccccatcaaaactccgcttgtgtccccacccggcccactgaccaaagggaacctcccggtggttgcaccccccgtcccctgtgcgccaccacctccacctccgccacctcccccaacgccacccccgctgcccccggcctcggttcttagtgacaaggcagtgaagcctcagctggctcccttgcacctcccgcccatcccgcccccgctccctctgctcccaccttgtgggtatccggggctcaaagcggagcccgccagccctgcgcaagatgcgcaggagcctcccgccccgccgcccccgctccccccttatgcttcttgctccccgagggcttctttgcccgcgccccctttgccaggagttaatagcagcagtgaaactccacccccgctaccccctaaatcccccagcttccaggccccaccgcagaaggccggtgcgcaggccttgcccgccccgcctgcccctccgggctcccagccgttcctgcagaagaagaggcatggccgaccaggggccggtgggggaaagctaaatccacctccagcaccccctgcgagatcacctaccacagagctttcaagcaagagccagcaggccacagcctggaccccgacgcagcagcctggaggtcaactgcgaaatggaagcctgcacatcattgatgacttcgagtctaaattcacgttccattctgtggaagactttccccctccggatgaatataaaccatgccagaagatttaccccagcaagatccccagaagccgtacacctggtccctggctccaagcggaagcagtcgggcagagctctgatgacatcaaaggcagaaattctcaggtaacacaagcctcatgtctctgaatgtaaaaccaggaattctcctcaggaggcacagaaatggtaagggtatgctttctcctaaacagctttatatttttcctcacactccttttcctcagggaaagccatttggtggaccttttttcaagccagaatgaaacactcaccatttcaaaatctgaagtgtgacaaaagggggcttccctggaatcaccactacatatagaagcaagtttagcaactctgacattctgcaacaatcatgccaatcacttcccattcttccttggttatgatggcctgtgagaaaaactgaataacatgtataaaacataattcagtattctctctcatctgtagaatacatggtttcttttagcacacttggagtttttttttcccccaccaatgttataattgattttggccaaatttagtcacaattcaagtactagtacccacaagaaatgaacagaactagaaggcaagccagacagctgcttttgtgataagacagtccttgaagaaacacctttaatctcacccagggcatcttgaaccgaattatttcctaacctggacacatttccctgcacatgacagggtctcatctttaaaagccctttgtttctttgaaaacatgtattcagtcgaacaataatctccccatttctgaatactatgtgacagactacagagtcacttgcagttaaaccaggcaattctgcaactgtgtggaacatcaaggaaagtgacctgagaaggaagaggctaggttcctggaagctaggatgagttcctcagaggaaaaagtacatcctctagcagataagtatcccccttttctaaccacagctgatgcaagaattgcagtaacgattcttagacgatcacaggttcaaaactgtgtgtatgattgtagttaaggaagaagtatatatacacaggaaaaaagacaggaagaatatacacaatattgttaacaggtagagagaattctgagaagatggcagaggagaaagcaccaggaatctgtggacaacaattgcattggcagaatctgtctgatgtaatttgtctcatgtattttggaactctgggattcattaaaggcttgaaacttccatgggaaagcttggacagtaaattgtgctcttagtacaatagtaactactcatcctccaccccccaccccatggcaggcaactgggcacgtgttcctggagcagcttgcatacagcttgcaggagccaaggtgggcacaaaaaaaaaaccctgtcctccagatactggggaatctgttctctgattggttattgctgcttctgatcacagaggtacaaataaagagatgggcagccattgttgcacctcctcttattgttgtaaatccctttccctctggctgaagtggcctcctggggatttcaagggctggtggccattttgttcctcctgtccttgctctttttttttccccatttgggagccaaacattaaagatgaacattcaaaggctactacatatatgatgaaaattagaaagtgaccacatatgcccagggaaaggcacaggctcagaaaagaccaagaagaccttaagattacacctcagactgattcttagcacagagacagcctacaacaatcaaaaaaataaaatgaacaaaaacaataagaaaaaccagcaaaccctgggggacagagagaattgatatctagagttaccacattattagattaaaatgtagagttttcaacaacaacaaaaatcacatcatacaaagaaacaggagagtatggcccattc

SEQ ID NO: 199622 - DNA, 4002 bp, Homo sapiens
  Payload ID: 19387
  Gene Name: WAS/WASL interacting protein family, member 3
  Uniprot ID: A6NGB9
  ENST ID: ENST00000409290
  CDS Start-End: 1-1452
atgccagtgccaccgccacccccacctcctctgcctccacctcccccgcctctgggggctcctccccctcccccaccatcagcacccccggtaagcacagacacctccagcttgcgaagggcagatccgaaaggccggagtgcgctgttggctgatatccagcaaggaactcgcctgcgcaaagtcacgcagatcaacgaccgcagtgccccgcagatcgagagttctaaaggaaccaacaaagaaggaggaggttctgcaaacacacgaggcgcgagcacacctcccaccctgggagatctgtttgctggtggctttcctgtattgcgaccagcaggccagcgggatgtagcaggtggcaagacagggcagggccctggctcccgcgcgccctctcccaggcttcccaacaaaaccatcagcggcccgcttatcccgcctgcctctcccaggctaggcaatacctccgaggcgcatggcgctgccaggacagccccgcctcgccccaacgtgcctgccccgccccctcccaccccaccccctccgcctccacccttacccccgccccttccctcttcctcccccatcaaaactccgcttgtgtccccacccggcccactgaccaaagggaacctcccggtggttgcaccccccgtcccctgtgcgccaccacctccacctccgccacctcccccaacgccacccccgctgcccccggcctcggttcttagtgacaaggcagtgaagcctcagctggctcccttgcacctcccgcccatcccgcccccgctccctctgctcccaccttgtgggtatccggggctcaaagcggagcccgccagccctgcgcaagatgcgcaggagcctcccgccccgccgcccccgctccccccttatgcttcttgctccccgagggcttctttgcccgcgccccctttgccaggagttaatagcagcagtgaaactccacccccgctaccccctaaatcccccagcttccaggccccaccgcagaaggccggtgcgcaggccttgcccgccccgcctgcccctccgggctcccagccgttcctgcagaagaagaggcatggccgaccaggggccggtgggggaaagctaaatccacctccagcaccccctgcgagatcacctaccacagagctttcaagcaagagccagcaggccacagcctggaccccgacgcagcagcctggaggtcaactgcgaaatggaagcctgcacatcattgatgacttcgagtctaaattcacgttccattctgtggaagactttccccctccggatgaatataaaccatgccagaagatttaccccagcaagatccccagaagccgtacacctggtccctggctccaagcggaagcagtcgggcagagctctgatgacatcaaaggcagaaattctcagttatctctaaagactcttcggtgagaagacagatgaagcgaaggtcctggggttccaggttgcagaacaacatgtcagaccccacccaccccatgctcaagctgtaattcagttggcatacaggcttggaattgagaatttatttattgtaaatatgtgatttgcacgggctttaaagcagtattttaattgacttttatttcggtaatattttttaaaacacccctcatttttccattttttgcattgcatcttggcatttgtcagcacagatagagccctgtccctccacctagtgcccactccatgactgtgaatctgcttgcaggctggcccttcctagattctgaaccgtttgtagagagtccttagtttgcaggtagccccaaagttataaatatccacaacggcttcttattggcataatttcatattctcatcacactaactgcaaaatcaaaccaaataatgccttatcaatgatgcagctcagaggaagtagcgtgtcccccacacccagacagtgccgcgcagcctccagggaacgaggtgccatgtctcgcttccattttgcagtacagggaatttttttttttttttttttttttttttttgctgcctaatgtaatacatcacaaagtaaaggcaagagtgggcttggccctccgatgccaaccacagggccccttttgtaactgaataatcctccaagtagccagtgctcctactgtttacagtgtccctcgtgcccaagtctctgtcactttcatcctgttccctccaagttcccagtcccatcccagtagccagctttatgagattttggtatttcttccctacagattaaaaacatacacaactcatcattatgctaaactaccagttgtatctcagaggtctccccttctgcccttgcttcgagtgtggacttccatggaaaatatgacatgaaaaagtgtagaacgaaacatcgtgtgaaatacctgccacaaatacctagtgcctcactgcccccatcttaggatccttggagccacccgtcaggcaaaacctagctcccttctgagctaaaggagaaccttgcctgacaactccacattcattcccttgtggtgggcacctgtctgtggggagatgtgtgcaagctcagccactctgaatatggaaaaggtcaggccgggctggtcctgctcttcactccctcttcttgatcctgtagggagtggaaatgtgtttttgcttgctgcctgacccctgatgttccccatctttggtcggggaagactgtgacagaggaaggagaaaaaatagaaggaaacagactgatccctgggctgtgctcaaaatagctgccctttaaaggaaatcaggcagggaggggagggaaaccagcgaaaaagaaatttgctttgcaacaacccacgcacacattcacccctgaagtatatcatgaacagaccaagccatccagaaaggcagccggtcaggagggtgtgggcaaacatgactgcatctgcctcactgttgtctggagtaacgactcaggtggtgtcctgcagcagtgctgtgctttctcattccagatggaagcaagtgagccagggtcaaattcccttctccaggggaatgaatcaagcccaaactgtaacagctaaataagtagaagtttttgcaggtcatcagctctgggcataactaatttgttttattggttctggaagatttccaaaaagccagaatttattattataacagtgtccactccactgccctcacagttgtgtaaaataattatagaagttttaatgatcctgattaagaagaccctagacaaaggcaattccaccttcagagtagactgcctgccctaatgaggtgtttagacattcgtgtctcctatggctgggatggaaattaaaataacactatttaaggacagagcgggccaggagcagtggctcatgcaggtaatcccagcatgggaggctgaggtgggtggattacttgaggttaggagttcaagaccagcctggccaacatggtgaaaccctgtctactcaaatacaaaaaattagccaggcatggtggctcacacctgtaatcccagcaacttgggaggttcaggcacaagaattgcttgaaccctggaggtggaggttgcagtgagctgagatggcaccactgcactctagcctgggcaacagagcgagaccctaactcaaaaaaaaaaaaggacagaggggaggaaggagcagaaaccaaaaatggcaattagggagaaatctcaggaatgtggcatcccatctccccttgagacctatcactgaattcacaacccttcgagctcatgctggtgcactgagtcccttgggcgctgtaaaggtttaaccccttgactgtaaactcagacttagagacatctgagtcacacagtccccgccattgtcacatattctcactgacactgcagtctgtgactcctccaatgtttcacgtgtattttatatttattgatgtctccttccgcagattcatttctttgtacttaataaactttagtaagtggaaatgctt

SEQ ID NO: 199623 - DNA, 3403 bp, Homo sapiens
  Payload ID: 19388
  Gene Name: WBP2 N-terminal like
  Uniprot ID: Q6ICG8
  ENST ID: ENST00000329620
  CDS Start-End: 95-1024
ataatctccgccctccccttcagaaccgcgccccacagctcggcgcaggtcccgcccctttccatctacggggcggcaggaggcccgaagcaagatggcggtgaatcagagccacaccgagaaccgccgcggagccctcatccctaacggtgaaagtctcttgaagcggtctccgaatgtggagctctccttcccacagcgatcagaaggctcaaatgtctttagtggtagaaagacaggaacattgtttctcacttcataccgggtgattttcataacttcatgctccatcagtgatcccatgttgtcttttatgatgccatttgatctgatgacgaacctcactgttgaacaaccagtatttgctgcaaacttcattaagggaactattcaggcagctccatatggtggctgggaaggacaagctacttttaaattagtcttcagaaatggagatgccattgaatttgcccagttgatggtgaaagctgcctctgctgctgcccgaggatttccacttagaaccttaaatgactggttcagctctatgggaatttatgtaattactggggaagggaatatgtgcactccacagatgccttgttcagttattgtctatggagccccacctgcaggatatggagccccacctcccggatacggagccccacctgcaggatatggagcccaacccgtaggaaatgaaggcccgcctgtgggatacagagcctcacctgtgcgatatggagccccacctcttggatacggagccccacctgcaggatatggagccccacctctaggatatggagccccacctcttggatatggaaccccacctctcggatatggagccccacctctcggatatggagccccacctgcaggaaatgaaggcccgcctgcgggatacagagcctcacctgctggatcaggagccaggcctcaggaatctacagcagcccaggctcctgaaaacgaggcttctcttccctctgcctcctcttctcaggtccattcttaaccttctaagatgtaaaccttgaagactcaccaagcaaagaggtaccctaaaattgaagtcaggataaggaggacgactcagcttagagtcattgattgatctgcattgtgaaaattaggaaaccagatgctcccatgttctcaaggacagcctttcttaaggaagtcagtacgtgggcaacagtgatgagaggaagagaggagagactcaaccaactagagcagggataaggtttcccttgttcagcttttcagtgtctgctggaatgtgatggtaagttgagaacagggtgaatgggtgaggccttttttatatcagaaagttttccgagtaactgatctctggcaaatatttggggattagaattctaaaagaatacaaactagacttctcttctgctcttcatgttagttatacttgtaccaggtagatttgaggtggggtccagttacctgaaaagcgtagcaggttcgagtttcttaaaggtggaattccaccatgttctcctgtgcaaagggtacctgtttacctggtccaccaaactgccccagtacaaccaaaggctgtgactgtgtaaggatagaaccaagtggagccacagtttggacccacgtggtgctgcgtggcacacctactgttagttagctcccactgtctggtacagttgtttcccccaaaggctcagtccaatttgttctataagaagagctttgtgtcctgtatattcaaaggaccctggtttttgctttgctgaggacaaatccagtcagaattcagctgagccttctgcatgctgagagcactcatgtgctgagttcctcagctcctcactgacgttttgagtactttctttctgactcactcactgtgctggtggattccgctcttcctgtctcttccccagctgcaatacagaaactatactctgttgtctactctttcatttcctattagaaatataaagggatagaaataagaagaccttttagtcctggactatctggtattggcccctaaaatgagcctccaaatactccttttcatgggtaagtggatgctccccagcctgctggagcagaaccttcctggctcagctaccctgagatatcaggacaaaaacatatagttggtgtgattttcctctttttgtttttttttttttcaagatagaatctggctctgtcccccaggctggagtgcagtggcgcgatctcggctcactgcaacctttgccccacaggtttaagcgattctcctgcttcagcctcctgaatagcttggatgacaggtgcctgccaccatgctcggctaatttttgtgtttttagtggagacagggtttcaccatgttggccaggctggtttcgaactcctgacctcaagtgatccacccgcctcggcctcccaaagtgctgggattacaggcatcggcctgtgcctggccgatttttcaatccatagattaatatgttcaagaaatattgcatgtctttgttttctgtaaatttatttctgttaccaagatccccaccaccatctgctttgttggtgggcttctcacaaatcctaagattatgcaaaggtatccagattttatttggcaccaagatgctgagaagtttcttctggtcatcagactgcttctgaaacagccactatccagtcctggcagtcccgtcaagtctaaaagcttgttgccttgggaccccagaatcttaggtagggcttagaaccagggtgtcagagatccaactctgtgtaccatattgctccttagaactggggagtaggaccccaaaggcctccttatccttgagagtctgacaattccttaaacttccagattctgccctctcagctgtgctgttggtctgcatcacctctatctcttaagcatctatcctaatccaaatctcaggatttgggtttacccaaaaggtaatagaaagcctttgccttcatgttgacttggctttccttgcctagcacttggttgcttgcttgaaaatcatgtatgtatatatataaaatgtagaagcccaattcaaattaataatgtaaaaatttattctgttacacagattacctcattgtcaggtaggaagtgaaacgtatgatattcttcctggcctttgccttgagagtcttctggagcctgaagagggtggggcagacaaccatggactgctagagaataaactttctttgaagcttcctaaatggattagaaagaaggggttctgtcaaagggaaagggtctatacagatgtgaccagcagtttgattagtttagatgtatgatttagtagccaatataagaaacttgtaatttttagtaattagaatttattataaataataaaacagggtattaattatt

SEQ ID NO: 199624 - DNA, 2255 bp, Homo sapiens
  Payload ID: 19388
  Gene Name: WBP2 N-terminal like
  Uniprot ID: Q6ICG8
  ENST ID: ENST00000328823
  CDS Start-End: 32-961
atctacggggcggcaggaggcccgaagcaagatggcggtgaatcagagccacaccgagaaccgccgcggagccctcatccctaacggtgaaagtctcttgaagcggtctccgaatgtggagctctccttcccacagcgatcagaaggctcaaatgtctttagtggtagaaagacaggaacattgtttctcacttcataccgggtgattttcataacttcatgctccatcagtgatcccatgttgtcttttatgatgccatttgatctgatgacgaacctcactgttgaacaaccagtatttgctgcaaacttcattaagggaactattcaggcagctccatatggtggctgggaaggacaagctacttttaaattagtcttcagaaatggagatgccattgaatttgcccagttgatggtgaaagctgcctctgctgctgcccgaggatttccacttagaaccttaaatgactggttcagctctatgggaatttatgtaattactggggaagggaatatgtgcactccacagatgccttgttcagttattgtctatggagccccacctgcaggatatggagccccacctcccggatacggagccccacctgcaggatatggagcccaacccgtaggaaatgaaggcccgcctgtgggatacagagcctcacctgtgcgatatggagccccacctcttggatacggagccccacctgcaggatatggagccccacctctaggatatggagccccacctcttggatatggaaccccacctctcggatatggagccccacctctcggatatggagccccacctgcaggaaatgaaggcccgcctgcgggatacagagcctcacctgctggatcaggagccaggcctcaggaatctacagcagcccaggctcctgaaaacgaggcttctcttccctctgcctcctcttctcaggtccattcttaaccttctaagatgtaaaccttgaagactcaccaagcaaagaggtaccctaaaattgaagtcaggataaggaggacgactcaggtatgtgatcacaggcttctcgcaggtagttgttccaccctttggaagggcaatcttatgggggaaggtgaaactttacttctgtgcctagattttagaagcagaatcaactcttaaatagctggctaaaggaagaataccattgtggggctaattccccagtaatttggttgacattgggttgcatttttaaacataactttttccacactcgcattcaaggttcctgtcttcccatcctcattcaagaaacatttattatgctccgtttgctaggcactaagatgcgtgctaaaaacgtcatgttgaacacttagttgtttgagaaagctaaattttcaatagtaagagtgttataaattacggtggatccacaaaatggagtattatacacctgttgaaaactatgtctagaggtagagaaagccttctttgaggagaccaaaaccaacaaataaaagcatgataaattgactatatcaaaatttaaaacttctctatgacagaagttaaaagataggcaacagaataggaaaaagtgattttcaacatatatattaatttatagtcagaatacgtgaataactacaaatcaattctccccaaaatgacagaaatatgaattgccgaataaccaaggcaatagcatggccagaaaacgtttgaaaagatgttcagcttgactagtgttagggaaatgcaacctgagatgagaaaacatttttatctccaaagatttacaaatattaaaactcttgatatggcactttcacattttaaaatatgcctgcgagaaaacttgcatgtgtgcacaaagatgcatgtgggaagatttcattatattcattgtttctaacagcacaaaattagaaataacctatatgtccattaataggaaatatatgaataggctatggtatgcccatactacgtatgcagaaatttctaagacttgttgataaggagaaaagcaagttgtagggagcatatactatagtgattttcagcctcatcagactgaatgccccattttataacaaatatttatattttataacaaacgtttatatttgtatatttataacaaatattttgtaatgtctccttcacttcaatgaagtttgtagataattgcatatgattccacaccatttcaaccaaaattaataggccataaatgtgatagaggaaataaaaggagtttgtagtaaaa

SEQ ID NO: 199625 - DNA, 1423 bp, Homo sapiens
  Payload ID: 19388
  Gene Name: WBP2 N-terminal like
  ENST ID: ENST00000412113
  CDS Start-End: 95-916
ataatctccgccctccccttcagaaccgcgccccacagctcggcgcaggtcccgcccctttccatctacggggcggcaggaggcccgaagcaagatggcggtgaatcagagccacaccgagaaccgccgcggagccctcatccctaacggtgaaagtctcttgaagcggtctccgaatgtggagctctccttcccacagcgatcagaaggctcaaatgtctttagtggtagaaagacaggaacattgtttctcacttcataccgggtgattttcataacttcatgctccatcagtgatcccatgttgtcttttatgatgccatttgatctgatgacgaacctcactgttgaacaaccagtatttgctgcaaacttcattaagggaactattcaggcagctccatatggtggctgggaaggacaagctacttttaaattagtcttcagaaatggagatgccattgaatttgcccagttgatggtgaaagctgcctctgctgttattgtctatggagccccacctgcaggatatggagccccacctcccggatacggagccccacctgcaggatatggagcccaacccgtaggaaatgaaggcccgcctgtgggatacagagcctcacctgtgcgatatggagccccacctcttggatacggagccccacctgcaggatatggagccccacctctaggatatggagccccacctcttggatatggaaccccacctctcggatatggagccccacctctcggatatggagccccacctgcaggaaatgaaggcccgcctgcgggatacagagcctcacctgctggatcaggagccaggcctcaggaatctacagcagcccaggctcctgaaaacgaggcttctcttccctctgcctcctcttctcaggtccattcttaaccttctaagatgtaaaccttgaagactcaccaagcaaagaggtaccctaaaattgaagtcaggataaggaggacgactcagcttagagtcattgattgatctgcattgtgaaaattaggaaaccagatgctcccatgttctcaaggacagcctttcttaaggaagtcagtacgtgggcaacagtgatgagaggaagagaggagagactcaaccaactagagcagggataaggtttcccttgttcagcttttcagtgtctgctggaatgtgatgattctgccctctcagctgtgctgttggtctgcatcacctctatctcttaagcatctatcctaatccaaatctcaggatttgggtttacccaaaagattacctcattgtcaggtaggaagtgaaacgtatgatattcttcctggcctttgccttgagagtcttctggagcctgaagagggtggggcagacaaccatggactgctagagaataaactttctttgaagcttcctaaa

SEQ ID NO: 199626 - DNA, 475 bp, Homo sapiens
  Payload ID: 19388
  Gene Name: WBP2 N-terminal like
  ENST ID: ENST00000445185
  CDS Start-End: 27-278
cggggcggcaggaggcccgaagcaagatggcggtgaatcagagccacaccgagaaccgccgcggagccctcatccctaacggtgaaagtctcttgaagcggtctccgaatgtggagctctccttcccacagcgatcagaaggctcaaatgtctttagtggtagaaagacaggaacattgtttctcacttcataccggtatttgctgcaaacttcattaagggaactattcaggcagctccatatggtggctgggaaggacaagctacttttaaattagtcttcagaaatggagatgccattgaatttgcccagttgatggtgaaagctgcctctgctgctgcccgaggatttccacttagaaccttaaatgactggttcagctctatgggaatttatgtaattactggggaagggaatatgtgcactccacagatgccttgttcagttattgtctatggagccccacctgcagga

SEQ ID NO: 199627 - DNA, 1417 bp, Homo sapiens
  Payload ID: 19388
  Gene Name: WBP2 N-terminal like
  Uniprot ID: Q6ICG8
  ENST ID: ENST00000436265
  CDS Start-End: 48-977
ggtcccgcccctttccatctacggggcggcaggaggcccgaagcaagatggcggtgaatcagagccacaccgagaaccgccgcggagccctcatccctaacggtgaaagtctcttgaagcggtctccgaatgtggagctctccttcccacagcgatcagaaggctcaaatgtctttagtggtagaaagacaggaacattgtttctcacttcataccgggtgattttcataacttcatgctccatcagtgatcccatgttgtcttttatgatgccatttgatctgatgacgaacctcactgttgaacaaccagtatttgctgcaaacttcattaagggaactattcaggcagctccatatggtggctgggaaggacaagctacttttaaattagtcttcagaaatggagatgccattgaatttgcccagttgatggtgaaagctgcctctgctgctgcccgaggatttccacttagaaccttaaatgactggttcagctctatgggaatttatgtaattactggggaagggaatatgtgcactccacagatgccttgttcagttattgtctatggagccccacctgcaggatatggagccccacctcccggatacggagccccacctgcaggatatggagcccaacccgtaggaaatgaaggcccgcctgtgggatacagagcctcacctgtgcgatatggagccccacctcttggatacggagccccacctgcaggatatggagccccacctctaggatatggagccccacctcttggatatggaaccccacctctcggatatggagccccacctctcggatatggagccccacctgcaggaaatgaaggcccgcctgcgggatacagagcctcacctgctggatcaggagccaggcctcaggaatctacagcagcccaggctcctgaaaacgaggcttctcttccctctgcctcctcttctcaggtccattcttaaccttctaagatgtaaaccttgaagactcaccaagcaaagaggtaccctaaaattgaagtcaggataaggaggacgactcagcttagagtcattgattgatctgcattgtgaaaattaggaaaccagatgctcccatgttctcaaggacagcctttcttaaggaagtcagtacgtgggcaacagtgatgagaggaagagaggagagactcaaccaactagagcagggataaggtttcccttgttcagcttttcagtgtctgctggaatgtgatgatactctagctcacacatcagaagagcatgtgcaggaagagagatgaaataatggtacacgttgatggttactggagctggatgctgggtacatggaggttcactctaccattttatttttgtatttgaaagttttcatgataaaaagtttttaaaaagagaaaggg

SEQ ID NO: 199628 - DNA, 1001 bp, Homo sapiens
  Payload ID: 19388
  Gene Name: WBP2 N-terminal like
  ENST ID: ENST00000543212
  CDS Start-End: 1-708
atgccatttgatctgatgacgaacctcactgttgaacaaccagtatttgctgcaaacttcattaagggaactattcaggcagctccatatggtggctgggaaggacaagctacttttaaattagtcttcagaaatggagatgccattgaatttgcccagttgatggtgaaagctgcctctgctgctgcccgaggatttccacttagaaccttaaatgactggttcagctctatgggaatttatgtaattactggggaagggaatatgtgcactccacagatgccttgttcagttattgtctatggagccccacctgcaggatatggagccccacctcccggatacggagccccacctgcaggatatggagcccaacccgtaggaaatgaaggcccgcctgtgggatacagagcctcacctgtgcgatatggagccccacctcttggatacggagccccacctgcaggatatggagccccacctctaggatatggagccccacctcttggatatggaaccccacctctcggatatggagccccacctctcggatatggagccccacctgcaggaaatgaaggcccgcctgcgggatacagagcctcacctgctggatcaggagccaggcctcaggaatctacagcagcccaggctcctgaaaacgaggcttctcttccctctgcctcctcttctcaggtccattcttaaccttctaagatgtaaaccttgaagactcaccaagcaaagaggtaccctaaaattgaagtcaggataaggaggacgactcagcttagagtcattgattgatctgcattgtgaaaattaggaaaccagatgctcccatgttctcaaggacagcctttcttaaggaagtcagtacgtgggcaacagtgatgagaggaagagaggagagactcaaccaactagagcagggataaggtttcccttgttcagcttttcagtgtctgctggaatgtgatgattacctcattgtcaggtag

SEQ ID NO: 199629 - DNA, 4819 bp, Homo sapiens
  Payload ID: 19389
  Gene Name: WD and tetratricopeptide repeats 1
  Uniprot ID: Q8N5D0
  ENST ID: ENST00000319394
  CDS Start-End: 536-2569
aagtgggggggcccggctagccattctggaagcggccgggcgcagtcttcgtagcgtacccgccggctgcgaggcgcagggcggaggcggagactgcgtggcgcaggcgcgttgctgggcttctcctgggtccccagacagctggaggagataaacagaggaggaggagggaggggagtgcgtgtgtgagagcgcgcgagggagtgtgagtgtgtgtgagcgcgggtgtgaggcggtgcgcaggggcgggcggaggcgctgtccggccccggccaggcgccgggcggggagcatgggaaggggctagaactgctcgagccccccagccccctccccgggatccgcgccccccttcccgggagaggggccgccccccccggacggacatgggctcctgaagttgcgccgctgccggtcgggggaagagacctgacaggtaattaaatgtgtattttgtggacctgggcttggctggaatgctcaggggtcctgaagatcctattatagcttccttctgttgaaccattaagaaaagatggcgaaagtcaacataactagagacctcatccgtaggcagatcaaggagcggggtgccctgagctttgagcggcgctaccatgtcactgacccctttatccggcggctgggcctggaagcagagctgcagggtcactcaggatgtgtcaactgtctggagtggaatgagaaaggagacttgctggcctctggttccgatgaccagcacacgattgtgtgggacccgctgcaccacaagaagctgctctccatgcacacgggacacaccgcaaatatcttctctgtcaagttcctgcctcacgctggggaccgcatcttgatcacgggggcagccgactctaaggtgcatgtgcacgacctgacagtaaaggagaccatccacatgtttggagaccacacaaaccgggtgaagcgcatcgccacagcgcccatgtggcccaacacattctggagtgctgctgaggatgggcttatccgccagtatgaccttcgagagaacagcaaacactcggaggtgctgattgacctgacagagtactgtggccagctggtggaggccaagtgcctcactgtcaacccccaggacaacaactgcctggcagttggggccagcgggcccttcgtgaggctctatgacatccgcatgatccataaccacagaaagagcatgaagcagagcccttcagcgggtgtgcacaccttctgtgaccggcagaaaccccttccggacggtgcagcccagtattacgtagcaggtcacctgccagtgaagcttcctgactacaacaaccgtttgagagtgctggttgccacctatgtgaccttcagccccaatggcacagagctactagtcaacatggggggggaacaggtctatttgtttgacttgacttacaagcagcggccgtacaccttcctcttgcctagaaaatgccactcctcgggggaagtccagaatggcaagatgtccaccaacggtgtgtccaacggtgtgtccaatggcctgcaccttcatagcaatggcttccggctgccggagagtaggggacatgtcagcccccaagtagagctaccaccatacctggagcgtgtgaaacagcaagccaatgaggcttttgcctgccagcagtggacccaagccattcagctttacagcaaggctgtgcagagggcccctcacaatgccatgctttatggaaaccgagcagcagcctacatgaagcgcaagtgggatggtgaccactatgatgccctgagggactgcctcaaggccatctccctaaacccatgccacctgaaggcacactttcgcctggcccgctgcctctttgagctcaagtatgtggctgaagccctggagtgcctggacgacttcaaagggaaatttccggagcaggcccacagcagcgcttgtgatgcattgggccgcgacatcacagctgccctcttctctaaaaatgatggtgaggagaagaagggacctggtggcggcgccccagtccgcctccgcagcacgagccgcaaggactccatctcagaggatgaaatggtgctgcgggagcgaagctacgactatcagttccgctactgcggccactgcaacaccaccacggatatcaaagaggccaatttctttggcagcaacgctcagtatatcgtcagtggctctgacgatggctccttcttcatctgggaaaaggagaccaccaacctggtccgtgtgctccaaggggatgagtccattgtcaactgcctgcagccacaccccagctactgcttcctggccaccagtggcatcgatcctgttgtgcggctctggaacccccgaccagagagtgaagacctcacaggccgagtcgtggaagatatggagggtgcttcacaggccaaccagcggcgcatgaatgcagacccgttggaggtgatgctgctcaacatgggctaccggatcacgggcctgagcagtgggggtgccggggcctctgatgatgaggacagctctgagggccaggtgcagtgccggcccagctagaccctccagccctggtccccagcccctgctactggctggaccctctgccctgggcaggaggtcaggggattctgttttggtttgtcttccccaccacccttttttttcatttcccctgttttgtttgttagtttggcgttaggggtggaggttgctacaacttgctggctttcggactctgggctgattgtcccctgactatccccagccctgaaaaaaagagcaggaggggacacccctccatatgcccccccccatctcctgctttcatgtccctggagggctctggcctgcctcaaaaccccttctgcctcaggtggggaggaacaagctgaactgtcttcagggactgtcctgccctttagctggcagcagcaggaggagtgggattcccaattggtaagggctcgccttggcctgttgccactcttgctccctagcctgcaaggctagctcccctgtggtcttcaggaaaggttttgaaaaaggatgggtcccaccctccctccagagccaccagtgttagagcggagcccaaaggaaggatgggagccctggagtgggcaagaccaggccacctgctgaggtcgctgtggagcaccctcgctcctctcctggctactagctctggccctgcacctactctcactggccacctctggaggctctgcctttcccaagggccctggcagagggtggggcactgcaccttaccccacccatccatgccagcacttctgcactacggccattctcctcttgggcgctcctcagcctcactgtgacctttctgccagagctcccagccaggcctactctgctgaggtggcgcttcctgctaagggcccttctctgccctttctgccctccttcccatcccacatgctgagccgccacaaagaccaaagaagtgatggcttttctctgtcccctgctgctctgaggggagaggggtgggtctcctgagccactcagatgggaaagtcccttactcggcccctccctccccagcagccccaagctttacactggatgcagcgatcaacccaccactcaccaggcctctcctcccctctgcccccggctcttagctccagctgctccaggtagttggttcatccttccccctctctccctccctgcttccccttcagtgcttacttggctccagccctccagctgcagcccctggggaaaagcagcctcccttctcctctccctccactccctcgctccctccctcagcccctgtctctgccaggtgcctcctctcagtcaggcttcagagcagccctggagacaggagggccatgttaaaagctttttcacagttttaagaagacaagtggagggtgaggatagtggtggggggtctggcaccatctcattgctttaatcccagcaacacaggtggcagcttctcccccttccttcccaccccagtccctcttcccacccctctcttctagcttggtaatgaagtatatttattggtgaaggaaacagctgctgctgcttctcctgctgctgggacctgctcccctgtctcttctccgtgacctttctctagccagggagaagggagagcaggagtattggggctgggccctggggcccaaggaccagctgggtcccctttgctttcttgtgttccagccacctgccatttcctccctgcctcccaccctccctccctgccccctgtcctgcttcccaccccctgcctgcccagcctgggccctgcagtgtggagagacacataagccttactgtcctctgggggcaggagccgagcctttttgttgctccgctcccaggagagtgagggtgacgcaattgattaaaaccattttgttctaggtgtggctggtggcatttgtggggtgcagatgggtcttggaaccaaagtgagggcacctggtccctcacctctgtagctctatgacttagtaaccacacctctactggacagaatgaggcctgccttgaagggtcaccgtgagcagcggccacccagcccagcagggctgagtgcagagcccagctctcatggctgtgatttgtaatcatcagctttcactctctggctgttttctcatcagtaaaataagggacttggaatcttagtggtttttcaaaccattttacattgtgacccaatatacacatgattacttgtagatatgtgtgtgtgtatatatatataaaaaaaatgaacaaaagttttacacaataatatttacccttgct

SEQ ID NO: 199630 - DNA, 4275 bp, Homo sapiens
  Payload ID: 19389
  Gene Name: WD and tetratricopeptide repeats 1
  Uniprot ID: Q8N5D0
  ENST ID: ENST00000361771
  CDS Start-End: 384-2414
aaacagaggaggaggagggaggggagtgcgtgtgtgagagcgcgcgagggagtgtgagtgtgtgtgagcgcgggtgtgaggcggtgcgcaggggcgggcggaggcgctgtccggccccggccaggcgccgggcggggagcatgggaaggggctagaactgctcgagccccccagccccctccccgggatccgcgccccccttcccgggagaggggccgccccccccggacggacatgggctcctgaagttgcgccgctgccggtcgggggaagagacctgacaggtaattaaatgtgtattttgtggacctgggcttggctggaatgctcaggggtcctgaagatcctattatagcttccttctgttgaaccattaagaaaagatggcgaaagtcaacataactagagacctcatccgtaggcagatcaaggagcggggtgccctgagctttgagcggcgctaccatgtcactgacccctttatccggcggctgggcctggaagcagagctgcagggtcactcaggatgtgtcaactgtctggagtggaatgagaaaggagacttgctggcctctggttccgatgaccagcacacgattgtgtgggacccgctgcaccacaagaagctgctctccatgcacacgggacacaccgcaaatatcttctctgtcaagttcctgcctcacgctggggaccgcatcttgatcacgggggcagccgactctaaggtgcatgtgcacgacctgacagtaaaggagaccatccacatgtttggagaccacacaaaccgggtgaagcgcatcgccacagcgcccatgtggcccaacacattctggagtgctgctgaggatgggcttatccgccagtatgaccttcgagagaacagcaaacactcggaggtgctgattgacctgacagagtactgtggccagctggtggaggccaagtgcctcactgtcaacccccaggacaacaactgcctggcagttggggccagcgggcccttcgtgaggctctatgacatccgcatgatccataaccacagaaagagcatgaagcagagcccttcagcgggtgtgcacaccttctgtgaccggcagaaaccccttccggacggtgcagcccagtattacgtagcaggtcacctgccagtgaagcttcctgactacaacaaccgtttgagagtgctggttgccacctatgtgaccttcagccccaatggcacagagctactagtcaacatggggggggaacaggtctatttgtttgacttgacttacaagcagcggccgtacaccttcctcttgcctagaaaatgccactcctcgggggtccagaatggcaagatgtccaccaacggtgtgtccaacggtgtgtccaatggcctgcaccttcatagcaatggcttccggctgccggagagtaggggacatgtcagcccccaagtagagctaccaccatacctggagcgtgtgaaacagcaagccaatgaggcttttgcctgccagcagtggacccaagccattcagctttacagcaaggctgtgcagagggcccctcacaatgccatgctttatggaaaccgagcagcagcctacatgaagcgcaagtgggatggtgaccactatgatgccctgagggactgcctcaaggccatctccctaaacccatgccacctgaaggcacactttcgcctggcccgctgcctctttgagctcaagtatgtggctgaagccctggagtgcctggacgacttcaaagggaaatttccggagcaggcccacagcagcgcttgtgatgcattgggccgcgacatcacagctgccctcttctctaaaaatgatggtgaggagaagaagggacctggtggcggcgccccagtccgcctccgcagcacgagccgcaaggactccatctcagaggatgaaatggtgctgcgggagcgaagctacgactatcagttccgctactgcggccactgcaacaccaccacggatatcaaagaggccaatttctttggcagcaacgctcagtatatcgtcagtggctctgacgatggctccttcttcatctgggaaaaggagaccaccaacctggtccgtgtgctccaaggggatgagtccattgtcaactgcctgcagccacaccccagctactgcttcctggccaccagtggcatcgatcctgttgtgcggctctggaacccccgaccagagagtgaagacctcacaggccgagtcgtggaagatatggagggtgcttcacaggccaaccagcggcgcatgaatgcagacccgttggaggtgatgctgctcaacatgggctaccggatcacgggcctgagcagtgggggtgccggggcctctgatgatgaggacagctctgagggccaggtgcagtgccggcccagctagaccctccagccctggtccccagcccctgctactggctggaccctctgccctgggcaggaggtcaggggattctgttttggtttgtcttccccaccacccttttttttcatttcccctgttttgtttgttagtttggcgttaggggtggaggttgctacaacttgctggctttcggactctgggctgattgtcccctgactatccccagccctgaaaaaaagagcaggaggggacacccctccatatgcccccccccatctcctgctttcatgtccctggagggctctggcctgcctcaaaaccccttctgcctcaggtggggaggaacaagctgaactgtcttcagggactgtcctgccctttagctggcagcagcaggaggagtgggattcccaattggtaagggctcgccttggcctgttgccactcttgctccctagcctgcaaggctagctcccctgtggtcttcaggaaaggttttgaaaaaggatgggtcccaccctccctccagagccaccagtgttagagcggagcccaaaggaaggatgggagccctggagtgggcaagaccaggccacctgctgaggtcgctgtggagcaccctcgctcctctcctggctactagctctggccctgcacctactctcactggccacctctggaggctctgcctttcccaagggccctggcagagggtggggcactgcaccttaccccacccatccatgccagcacttctgcactacggccattctcctcttgggcgctcctcagcctcactgtgacctttctgccagagctcccagccaggcctactctgctgaggtggcgcttcctgctaagggcccttctctgccctttctgccctccttcccatcccacatgctgagccgccacaaagaccaaagaagtgatggcttttctctgtcccctgctgctctgaggggagaggggtgggtctcctgagccactcagatgggaaagtcccttactcggcccctccctccccagcagccccaagctttacactggatgcagcgatcaacccaccactcaccaggcctctcctcccctctgcccccggctcttagctccagctgctccaggtagttggttcatccttccccctctctccctccctgcttccccttcagtgcttacttggctccagccctccagctgcagcccctggggaaaagcagcctcccttctcctctccctccactccctcgctccctccctcagcccctgtctctgccaggtgcctcctctcagtcaggcttcagagcagccctggagacaggagggccatgttaaaagctttttcacagttttaagaagacaagtggagggtgaggatagtggtggggggtctggcaccatctcattgctttaatcccagcaacacaggtggcagcttctcccccttccttcccaccccagtccctcttcccacccctctcttctagcttggtaatgaagtatatttattggtgaaggaaacagctgctgctgcttctcctgctgctgggacctgctcccctgtctcttctccgtgacctttctctagccagggagaagggagagcaggagtattggggctgggccctggggcccaaggaccagctgggtcccctttgctttcttgtgttccagccacctgccatttcctccctgcctcccaccctccctccctgccccctgtcctgcttcccaccccctgcctgcccagcctgggccctgcagtgtggagagacacataagccttactgtcctctgggggcaggagccgagcctttttgttgctccgctcccaggagagtgagggtgacgcaattgattaaaaccattttgttctagg

SEQ ID NO: 199631 - DNA, 3115 bp, Homo sapiens
  Payload ID: 19389
  Gene Name: WD and tetratricopeptide repeats 1
  Uniprot ID: Q8N5D0
  ENST ID: ENST00000447062
  CDS Start-End: 8-1855
agaaaagatggcgaaagtcaacataactagagacctcatccgtaggcagatcaaggagcggggtgccctgagctttgagcggcgctaccatgtcactgacccctttatccggcggctgggcctggaagcagagctgcagggtcactcaggatgtgtcaactgtctggagtggaatgagaaaggagacttgctggcctctggttccgatgaccagcacacgattgtgtgggacccgctgcaccacaagaagctgctctccatgcacacgggacacaccgcaaatatcttctctgtcaagttcctgcctcacgctggggaccgcatcttgatcacgggggcagccgactctaaggtgcatgtgcacgacctgacagtaaaggagaccatccacatgtttggagaccacacaaaccgggtgaagcgcatcgccacagcgcccatgtggcccaacacattctggagtgctgctgaggatgggcttatccgccagtatgaccttcgagagaacagcaaacactcggaggtgctgattgacctgacagagtactgtggccagctggtggaggccaagtgcctcactgtcaacccccaggacaacaactgcctggcagttggggccagcgggcccttcgtgaggctctatgacatccgcatgatccataaccacagaaagagcatgaagcagagcccttcagcgggtgtgcacaccttctgtgaccggcagaaaccccttccggacggtgcagcccagtattacgtagcaggtcacctgccagtgaagcttcctgactacaacaaccgtttgagagtgctggttgccacctatgtgaccttcagccccaatggcacagagctactagtcaacatggggggggaacaggtctatttgtttgacttgacttacaagcagcggccgtacaccttcctcttgcctagaaaatgccactcctcgggggaagtccagaatggcaagatgtccaccaacggtgtgtccaacggtgtgtccaatggcctgcaccttcatagcaatggcttccggctgccggagagtaggggacatgtcagcccccaagtagagctaccaccatacctggagcgtgtgaaacagcaagccaatgaggcttttgcctgccagcagtggacccaagccattcagctttacagcaaggctgtgcagagggcccctcacaatgccatgctttatggaaaccgagcagcagcctacatgaagcgcaagtgggatggtgaccactatgatgccctgagggactgcctcaaggccatctccctaaacccatgccacctgaaggcacactttcgcctggcccgctgcctctttgagctcaagtatgtggctgaagccctggagtgcctggacgacttcaaagggaaatttccggagcaggcccacagcagcgcttgtgatgcattgggccgcgacatcacagctgccctcttctctaaaaatgatggtgaggagaagaagggacctggtggcggcgccccagtccgcctccgcagcacgagccgcaaggactccatctcagaggatgaaatggtgctgcgggagcgaagctacgactatcagttccgctactgcggccactgcaacaccaccacggatatcaaagaggccaatttctttggcaggagaccaccaacctggtccgtgtgctccaaggggatgagtccattgtcaactgcctgcagccacaccccagctactgcttcctggccaccagtggcatcgatcctgttgtgcggctctggaacccccgaccagagagtgaagacctcacaggccgagtcgtggaagatatggagggtgcttcacaggccaaccagcggcgcatgaatgcagacccgttggaggtgatgctgctcaacatgggctaccggatcacgggcctgagcagtgggggtgccggggcctctgatgatgaggacagctctgagggccaggtgcagtgccggcccagctagaccctccagccctggtccccagcccctgctactggctggaccctctgccctgggcaggaggtcaggggattctgttttggtttgtcttccccaccacccttttttttcatttcccctgttttgtttgttagtttggcgttaggggtggaggttgctacaacttgctggctttcggactctgggctgattgtcccctgactatccccagccctgaaaaaaagagcaggaggggacacccctccatatgcccccccccatctcctgctttcatgtccctggagggctctggcctgcctcaaaaccccttctgcctcaggtggggaggaacaagctgaactgtcttcagggactgtcctgccctttagctggcagcagcaggaggagtgggattcccaattggtaagggctcgccttggcctgttgccactcttgctccctagcctgcaaggctagctcccctgtggtcttcaggaaaggttttgaaaaaggatgggtcccaccctccctccagagccaccagtgttagagcggagcccaaaggaaggatgggagccctggagtgggcaagaccaggccacctgctgaggtcgctgtggagcaccctcgctcctctcctggctactagctctggccctgcacctactctcactggccacctctggaggctctgcctttcccaagggccctggcagagggtggggcactgcaccttaccccacccatccatgccagcacttctgcactacggccattctcctcttgggcgctcctcagcctcactgtgacctttctgccagagctcccagccaggcctactctgctgaggtggcgcttcctgctaagggcccttctctgccctttctgccctccttcccatcccacatgctgagccgccacaaagaccaaagaagtgatggcttttctctgtcccctgctgctctgaggggagaggggtgggtctcctgagccactcagatgggaaagtcccttactcggcccctccctccccagcagccccaagctttacactggatgcagcgatcaacccaccactcaccaggagccgagcctttttgttgctccgctcccaggagagtgagggtgacgcaattgattaaaaccattttgttct

SEQ ID NO: 199632 - DNA, 628 bp, Homo sapiens
  Payload ID: 19389
  Gene Name: WD and tetratricopeptide repeats 1
  ENST ID: ENST00000472249
  CDS Start-End: 1-378
atcgtcagtggctctgacgatggctccttcttcatctgggaaaaggagaccaccaacctggtccgtgtgctccaaggggatgagtccattgtcaactgcctgcagccacaccccagctactgcttcctggccaccagtggcatcgatcctgttgtgcggctctggaacccccgaccagagagtgaagacctcacaggccgagtcgtggaagatatggagggtgcttcacaggccaaccagcggcgcatgaatgcagacccgttggaggtgatgctgctcaacatgggctaccggatcacgggcctgagcagtgggggtgccggggcctctgatgatgaggacagctctgagggccaggtgcagtgccggcccagctagaccctccagccctggtccccagcccctgctactggctggaccctctgccctgggcaggaggtcaggggaacaagctgaactgtcttcagggactgtcctgccctttagctggcagcagcaggaggagtgggattcccaattggtaagggctcgccttggcctgttgccactcttgctccctagcctgcaaggctagctcccctgtggtcttcaggaaaggttttgaaaaaggatgggtcccaccctccct

SEQ ID NO: 199633 - DNA, 4660 bp, Homo sapiens
  Payload ID: 19390
  Gene Name: WD repeat and FYVE domain containing 1
  Uniprot ID: Q8IWB7
  ENST ID: ENST00000233055
  CDS Start-End: 104-1336
aagaggccccagcagccgaagggaaaccggcgcgtcccccgcccgcccaggcgtcagctgatgggctgcctgccgaggaggccgcagcagtcgccgcgcgaacatggcggccgaaatccactccaggccgcagagcagccgcccggtgctgctgagcaagatcgaggggcaccaggacgccgtcacggccgcgctgctcatccccaaggaggacggcgtgatcacggccagcgaggacagaaccatccgggtatggctgaaaagagacagtggtcaatactggcccagcatttaccacacaatggcctctccttgctctgctatggcttaccatcatgacagcagacggatatttgtgggccaggataatggagctgtaatggaatttcacgtttctgaagattttaataaaatgaactttatcaagacctacccagctcatcagaaccgggtgtctgcgattatcttcagcttggccacagagtgggtgatcagtaccggccacgacaagtgtgtgagctggatgtgcacgcggagcgggaacatgctcgggaggcacttcttcacgtcctgggcttcgtgtctgcaatatgactttgacactcagtatgctttcgttggtgattattctgggcagatcaccctgctgaagcttgaacagaacacgtgttcagtcatcacaaccctcaaaggacatgaaggtagtgtcgcctgcctctggtgggaccctattcagcggttactcttctcaggagcatctgacaacagcatcatcatgtgggacatcggaggaaggaaaggccggacgctgttacttcagggccatcatgacaaggtgcagtcgctgtgctaccttcagctcaccaggcagctcgtctcctgttcctcggacggcggaattgcagtgtggaacatggatgttagcagagaagaggctcctcagtggttggaaagtgattcttgtcagaaatgtgagcagccatttttctggaacataaagcagatgtgggacaccaagacgctggggctaagacaacatcactgcaggaaatgcgggcaggctgtctgcgggaagtgcagcagcaagcgctcaagttacccagtcatgggcttcgagttccaagtccgggtttgtgattcttgttacgactccatcaaagatgaagatcggacttctctagcgacctttcatgaaggaaaacataacatttcccacatgtccatggacattgccaggggactgatggtgacctgtgggaccgaccgcattgtaaagatctgggacatgacacctgtggtgggctgcagtctggcgactgggttttctccgcactgatctgagagctgggcggcgtccacacctaagaacagcagctccaccaaatgaagtccctctcacgcagctccacagcgctgtctcgtgaatggacagtagccacttacaaacaaatcaacatttttaaaaagaaaatgtaaaggtgtgttttggggcatttgtggaacttacccatggggactaatatggaaaaggtctgtccatagtggttccctgaagactggaattacttcagcaaaacttccccatgaacagctaatgtgtagtgaaagaatgagctagcaaatgagttttagcggggacaaaaaatcaaacaaaaaagtgaatgcttagaaccttctcaaagcagtcacaagtacagacacttcacttagcctagggggccttccagggttcttgtggctgttgtcagagcaggagctgggggagggaagacttgttctctctttcttgaggggtggcattaggaacttacgaaaccagagacctttccctatgacttggcagtatgtgaatatcctctacacttagttattgataaacttcttaaagagatctgttattttcaggtagtgccataatctgcacttagcattggcttgcttcagttgtttctcttcccagccagtatgccacaggtgaactttcggggttgtcattaagtaagttgtgaaatttctgtaataacaaaggcagtccgcattcttccctttcccccaaattcctagggcaaaacttttttatggtgctgttaacatgggagtcacacaagccgcctgactttttctcattgccattagtaatgactgatggaaaacccagccaccactgtgatgcgaaatgatcagtctgttgcctgaaacagcccagtcctcttaactgaaacagcattctacttcttgttccaagatgagcctctgcaatattctggcaatttaatataccccctacaaaagcactccacagcttttacactattttgactttgagttataactagtattattcatgttttcataaaaagaagttagtgacccagagctataatcatccatcaagtcttccacaataattcccaactcataaattgctttcctaacaactagcaaaagctattgttcataatggcatttctaaagcttttgggcactgtgtaccaggatgaggaagagaagaaatgaggagcctgtcttttaatattccagtatttgtgtgtttgattttttttgacaacagtacatatatctatttctctagggatatggaagtaagtggagaagggcctacctttttaaaggacaaatataaaaatagcaacagtatctttgctaatcttactaatagatattgattaaaaaaaaaaaacctcagtactgcatcactgtgttgggatcataccaggacaatagggtcattccatatgataaaactaaaggactaaatttgttttataatgatgtcttagagggactgaaaggtttaaggaggcgatcaaactaaaatgtcttaatggctgtgtgacacacgtaaggaaaggaaagggggtcacgcacatcatgtactggaatgatctgcattaaacatagacttgtcttcagaaataagactgaagggttttgttgttccttagagttttcgtgttacatcacctaaagagatttcttttaaaaactttctagactctttgcaaaatgtatattactaacatagtttggaagaaaaattgagtagtggtaagttttgttcaagcacaatgttgaatgttaagcttcctgtattaattttagttcagttaatggttcagcccatacaaaggtgctatcctagggattttatgaattcctgaaaggaaaatagaatatgatcaattccttgccctgtggaagagtgcagaactgtggttttgttttcctttgacttctgtaaaatgtgaccgtttgacatctgtggtagattgaacggaatatcacagctgctgagtttactccatagctttcaaaccttttttattttaagaaattcttgaaaaaccctatgttccatgggaacataaagttattatagtgcctcctaaggggttaatataaatcaaggaggaagtttatatttaaggaagaattggagtgacgtatcttagaaaaggaaaggctgatgtttccatatagcttgctctccaccaggcctatcatttttctttttagagacaaacgtgacaggctagtcttgtctctctcatatgctaggtagcaaatggggtgatatttttatagaagtgggcaaaaattattttctcaattttactgagtaggcacagaagaaaagtacagataggctgatggttattgccttattttgactgcatttctcttaaatggatcatttaaattagttcttcaagtaacagtttactggttgttccattcctgaatatgcaggctaatttgtacagatagggattaaggaatacagactattagagaagatccttatatttacatctagtatatatgtggtaaggaaatgccgattcttcattataaacaagttttaaaattgttctttcttagttcaaatgatagcaatacccctatagcattaggtagaaacaaattattcattacatcgtaaatctctttactatgtcctagctctgtcctgctacctaaaggatataaagaaatactattgctctagaatgtattactttgttctcccatgaaagaattcagtttgttagtacctatatttttaaactggtgaaactgacccaaatatgtaataaataccatagtagctcagacccaaggagatatttttctaaaatcagttttcgttaaagtacttctacttccgttattggatatggtatctcctaaagtgtaaaaaaaatctgttactatatagtgataaaccatctgctcatcgtaagtgtaaggcttaacaaataagtaatacatgctatatttattcaagtgtctattgcttaattgttaattgtgagcagatttattgaatgcctattctattttctgcagtttacaatacaataactctttgagtaagttgaagtttaattgtgcaacaaatttgtattagagtacaatttaaagtgtttttctctatagccttttttgactggggaagcaaggggtaatgttaattagtacactttgttcttgtactagctatgtttctataagatatggtgccctgtgtatcccagagatgctagaaaactgttctttgctcctatttgtgggttctgtttttgtgggtttttttttttgagaaaatgtacacaataaaacattccttgcttgttac

SEQ ID NO: 199634 - DNA, 719 bp, Homo sapiens
  Payload ID: 19390
  Gene Name: WD repeat and FYVE domain containing 1
  ENST ID: ENST00000429915
  CDS Start-End: 74-719
cgcgtcccccgcccgcccaggcgtcagctgatgggctgcctgccgaggaggccgcagcagtcgccgcgcgaacatggcggccgaaatccactccaggccgcagagcagccgcccggtgctgctgagcaagatcgaggggcaccaggacgccgtcacggccgcgctgctcatccccaaggaggacggcgtgatcacggccagcgaggacagaaccatccgggtatggctgaaaagagacagtggtcaatactggcccagcatttaccacacaatggcctctcatcagaaccgggtgtctgcgattatcttcagcttggccacagagtgggtgatcagtaccggccacgacaagtgtgtgagctggatgtgcacgcggagcgggaacatgctcgggaggcacttcttcacgtcctgggcttcgtgtctgcaatatgactttgacactcagtatgctttcgttggtgattattctgggcagatcaccctgctgaagcttgaacagaacacgtgttcagtcatcacaaccctcaaaggacatgaaggtagtgtcgcctgcctctggtgggaccctattcagcggttactcttctcaggagcatctgacaacagcatcatcatgtgggacatcggaggaaggaaaggccggacgctgttacttcagggccatcatgacaaggtgcagtcgctgtgctaccttcagctcaccaggcagctcgtct

SEQ ID NO: 199635 - DNA, 9321 bp, Homo sapiens
  Payload ID: 19391
  Gene Name: WD repeat and FYVE domain containing 2
  Uniprot ID: Q96P53
  ENST ID: ENST00000298125
  CDS Start-End: 181-1383
gaagcagggagcgcggagtcgttcccgagagaggcggccaggctatgctcgccggtttccggcgttccgctccggccagccagagtctctgtctcaacctgtgtccgtgctccagcagtctcctcagcccggccccgcggcgcggttggcggcggcgccccaggcgcgccccctcctccgatggcggcggagatccagcccaagcctctgacccgcaagccgatcctgctgcagcggatggaggggtcccaggaggtggtgaatatggccgtgatcgtgcccaaagaggagggcgtcatcagcgtctccgaggacaggacagttcgtgtttggttaaagagagacagtggacagtattggccaagcgtataccatgcaatgccttctccatgttcatgcatgtcttttaacccggaaacaagaagactgtccataggtctagacaatggtacaatctcagagtttatattgtcagaagattataacaagatgactcctgtgaaaaactatcaagcgcatcagagcagagtgacgatgatcctgtttgtcctggagctggagtgggtgctgagcacaggacaggacaagcaatttgcctggcactgctctgagagtgggcagcgcctgggaggttatcggaccagtgctgtggcctcaggcctgcaatttgatgttgaaacccggcatgtgtttatcggtgaccactcaggccaagtaacaatcctcaaactggagcaagaaaactgcaccctggtcacaacattcagaggacacacaggtggggtgaccgctctctgttgggacccagtccagcgggtgttgttctcaggcagttcagatcactctgtcatcatgtgggacatcggtgggagaaaaggaacagccatcgagctccaaggacacaacgacagagtccaggccctctcctatgcacagcacacgcgacaattgatctcctgtggcggtgatggtgggattgtcgtctggaacatggacgtggagaggcaggagacccctgaatggttggacagtgattcctgccaaaagtgtgatcagcctttcttctggaacttcaagcaaatgtgggacagtaagaaaattggtctaagacagcaccactgccgcaagtgtgggaaggccgtctgtggcaagtgcagctccaagcgctcctccatccccctgatgggcttcgagtttgaagtgagggtctgtgacagctgccacgaggccatcacagatgaagaacgtgcacccacagccaccttccatgacagtaaacataacattgtgcatgtgcatttcgatgcaaccagaggatggttactgacttctggaactgacaaggttattaagttgtgggatatgaccccagtcgtgtcttgatgactctcccaggaatcagaaagatagtatttactaaagaaacggttgttttaacccaaatcattaccagagtggtaaagcagacatgtgagaagtaagaaagaaactaaagaccctgaatgaatttgcagattacccatgtgcacagtggggacctggccagtgagcactcgcaaggggactcttccaacttgttcatacaatataaaagaagctatttttttaacaaatggtttatacagtctggctgtgctgcattgttttgagtgtaccgaaaaatctgtgtggggtgtttaatttttatacttttcaacaccccattttacttgttgctttgtcagagaaataagggaggtatctactcagagtattttggtcattatactttctgtgtttacttcaacatgtgtcacgtggccagcggctttttcttctcttccctctgcacctacctgcaccttctctgcctttcctggaggggatgtatttatgttatttattcccagtgtttctgctttcatgtcctcctcagtggagagatttggaaactcatcatgtggattcaccagccagctgctggaattgcctgaagagcgatttgtttgtaatgtctgcctcattcacgttcttatgaagtagaaaagactgtgtttctgcctcagttgcctctgtctttcccacattaaaaaaaaaaatgctgtgagaaagctgctcccaaccatggttatcacagaagtagattattttaactcagagcttcaacgatcagtgcctggatcatttagaattcagttggagcctcctgagcctcttgttttagcttttttgacgcagctctccctcactcgtaacaatgaaaacaaatgacacacacacaaaatcctacatcagcggccctcaaccttgttggcagcagggaccggtttcaaaatgaaactgttccacctcggatcagcaggcattagcttctcataaggagcacgcaacctaaatccctcgcatgcgcagttcacaatagagtttctgctcctgtgagaatctgacgccaccgctgatctgatgggaggcggagcccaggcagtaacacttgcttgcccactgctcacgtctgatgggtgcccccattcctcacaggctatggaccagtacccatctgcagcccagggttggggacccccaccatacatgctctgaaaataagtgtctttaagttgtgtttttctgtgtgacatcatctctgaacttgaacatgttcattacggcaagattgtaatcctgctgtattcctcgccctctgtattctatccctttaaaaactagatatttaaacattttatcctaatgtgtttcatcagaacactttgcacactttcttactaaaacggtatgtgggtggtccgagacagaatggtacctacagtgcaggctatgtttctgtgggaatggaaaagaggactttagaaagtgaacctgaagaactcttatttctaagggaatccagtcaagcttgagaaaatgaaatattcttgtgtgtagtgattcagctcaggatattgaagtcccttttaaaaatcttattttcacctgtaaaaatagaataaaaattaatggcaagcctgcgccaggtgcctgcccctcctaagcactttacacgcacagctcattcaacctcacgtgtcgggagcatcagggagctcaccagtctcttgaggatcacaggccaattgcttgtccttcccgacccaagccccaccccacagtgtcttgctctcttctgattttacaggttttttggcagtaatacacatgggagtgaaattgaaatcctccctattattttccctcttttcctggaaagccgttttttgccctcacaatcattcattacttctctaactagggggaagtactacaagctgtcctcaggtactgcccctacgtgtgtttccctgggatggggccttgctagaggtgattctgctgccccagcattgggaagcaggaccagtgcatgtgccccatgcagccacggtacatggaagctgtcacttgagccatcagaccggctcagcccatgtgaccggagctctgaagaggcacacacgcatgccccgcacaggctgttagcacttgtcgcctcgctgccctggtccagactacccttgcttgcgtcagtcaaaactgttgtaactactttgagtcttttctgcatgattgctctttgagagaactttaacaagggaattaaatttaaaatattcaaatatctattttgtagtttattactagaagctgcagccacttactaagttgtatgtaatataggactgtgtgttggaaatgagtaatagagctgaatcactccattttcccttcctaaactttgagcttggcctgccggcagagagaggaacacagtattagggcagcaaaggcccaggcgcccagcaagcctgtatgggttctgagatgggtctagatgcgttcagacctcattcgggaagcagagtgtccccgtcagatcacatatgtcctctacagtcgctctggcctgtgaccttgcacgccactctaccttctccctcccagcccacagagccactcagaggctgaagccacttcacagcccactggtgttgagaatcatcatcagaaaaccagatatgtcaaggtatccattgctctttccttttctctcatctgtgtgggtgcttgaatttggtgaaatgcgtttagcaaaccaactgtgtgtttgtaatactgtgaattcttgcgttttgcattaagtgtctcccccatttttgtaatttgtagagaaatatgtgctggtgttgggtgtcttccaagcattttatggaaatggaggctccattccttaggagtaaaagctggcgccagcacttggctcttgttctgtctaggtgaactctcataattcttgttttaccctgttggatttgcactttacatatatttttgctctattacttaaacatatagcagcttttacaaataatgcctaacatgcctgcgctgagaaagtggcagatctacacatatcatacgcagagttgttctctacctgatggggcaaaaccaaccacatgttcttggttcctccaaacgaatgacattacttgacattactgcctgagtgtatcttcacaatagcaaaatggtttgagattaagcatttggaatcttatgtcattttgtatggggtcaatccaccataacgtgtttctcatttggttttaattatttccagaaatcataaagtcacaaaactggaagggatcttcagagatctagagtgtttcaagcagaaaacacattagttatacagggcagttagatatggctgagatgtaaacaagagaatctaaaagaatgttcaaggaatagctgtttttgaacattacttagtaatggcatgagtgggaggagagactttcagcaccttgagacagggcgctctctggaaccagctttgttcctcttatcgaaagcatatatgacagtttttttggctccggccctgtggtgggggaggtaattattgccttcatccacataaattccttcctatacattcccctcagaccaccccagaggcaaaactgaaatggaaatccagtggcacttaaaattcaccctgccccgtttggctgcgattcccaggcttacagcactgcccttatggaatatcacattttcattttctgagattcattttataaaagtaaaggccaggtgccatggctcacacctataatctgaacactttgggaggacaaggtgggaggattgctgagcccaggagttcaagaccagcctgggccacacagcaagatcctgtcactaccaaaaattcaaaacttagttgggtgtggtggcacacacctgtattcccagctactcaggaagctgaggcgggaggatcactcgagcccaggaattcaaggatgcagtgagctatgattgcactactgcagtccagcctgggcagcagagcaaggccctgaataaataaacaaaagtataatttatttttgcctgatattaatcacttcttaaggcccaaatttttgtttttaagcaaaaggatagctctaagtgtgggttgcagttactggacataaatattcactaaatgagattcctttggttatggctgttcatagaattttaattctatgtcagtgttcttgttcactaagatatttcgaagtgagagaaagcattttaccaatacattcttattttttctcctttaaaataatattgaatttttcctggtacgaagacagatatttattaacttgattggaaaacacagaaattaagatcatgttgaacactgagttatctagatgatccctgagatttgaatgttcatgtcaaccgtgttgagcgctcaccagccaccaggctttaggcactggcagtgcaaggtgtctgaggcccattctcaggctgggcagaggtcacacagtgagtaaatgggtcttttcagtgcaatgtggttatgatagaggcatgccagggtgccactaacccagcaggtgtggcaggaggggcttcacagaggaaagggactttgagctcagtgttaaaggatgaggagtgagtcataagggggaaaaatggaaatgactttccaggcttcagaaacagcataaacaaacaaaggcctgagagctggagtcagtgtggtgtgtccagggatcacaagtgggctggagctgccggagaacagccaagtggctcagctgccatcccagaattgagctcgtcactatcagatgctgctgctccctggcctcagaggaaagcagcacacagctcaccacgaggggtttccccagaggctcctcctgcagccaatgctactattagtttatattataatagtatcagtttctttttctttggaaatccctagaactgttaactgaaggtgactcagggtaactaattctggatctttgggtgcacagcctctcactggagtctgagaggaggaggtggagactatcagtgcacggcccgcaaccaggaaggactcccagactaacgccaaaggtgtgttgggctcagctgctccactgtggaaaaggaaagccctggccctgtggcaggagaggattgttctagtcaagtgtggcgttgcacggacaggcggtgccgagtgtttgggtgcagacacaggcagctgctgccctccacttcctgctcttgcaagtcacagatgattccagtacaatgtgggaggtcctccttacaggggcacttgcaacaggaaggcagagagtttcgtcaattcaggtacaggtctgtctgggagacctggccctgtggaggcaggaacaccgtgcaggggcatggcagcgcctgtctttgctatcacatcatttgccttttccttgtaggacccaaagatctatgtccaaaacttagtccagaaacatctgcattcctgtttaaacttcagctcagtttcttaaccaagaaccacgtcaaccctccagggttgtggtttgtatttttgcctttaagcattatctcctttccaccaagaagcctacttaggtttaacacatgaaagcagtgtctaaaaattagatcggtcctaaattggaatgggatgtcttccttgcatgtcccataccagggaatttttttaacacacagtgtagagcctttgccagagatgttgaaagggagattaaaggcttgagggatgaatttgatcatcattcttaaagtcccttccaatcctgtgattctctgattccctgagtctcgtttattattggacatgcctagcccatcaccagtgacctgcccgcatattgctggcttcccttggataacggagagcctatcaccacatgcctttgttgtcttccatcatatcaagtgagttgctttctggactttttccatctagagcctgctaggtttggttttgagaaaagatggtgaagtttcttttcatgagtttgtagggcaaaaaaaattctttttaaagatggtaagggtggaaattaatcatggtaccatctcattaaaaatagatacctcaaaatgtttacctttacaagtcaagaagagtatctgactttcttggaagtgtcaagaattgcaggttggctgaaaagttagattgagaatctgaccttgttacttatgattcttttttcccttggttctcggggatgcatgagaaggtgagctgtcactcacaaaaaaagggaaaatgatttgaaaaatgtttcacatatacactttttatcattttagtggatggcagccttacgtcagtagtatatgccactatgaagtatggccaaaaccctagcgtcacttgtaaccattgtactcttatggatttgtgtcttacaccatttgccttgctttttaaatgactttgtttttcaaggtgctgtcattttgcaaaaggaaatctttatatgaaatgtacaaaaaccgttactaactggacaacagggaaggtgctggccccacattagtgcctgcccaccgctctacttctaaccagggacacggatcttccattctctacatccaccggactgcagcccaagtctggacctggctgcagtgggcatattaccgtatggatatctttttctttctttttttaaagtgaggagattcttcagggggtcaggctgagaatgtaataagcctgacattggaacagatttctcccgtgtggtctagctggacccctccggcatttgccacactccctgccagtcctgacattgacttcctgaatgtgattaggtggtaatgagcaagaatttcctaggatattgaaacatctgtatccaggcccccaatcaaatgctgctgaatattgtgaatgtttttactccgctcactttcccactgtgctttcctctaaccaaaatatacgtgtagccattaccaatgtacaactctcaatgcggagttgccgccacggtttaaaataaatctctgtgaaaacctttctgcagctatggtcccatcacggttacatgtggccacgcacacaccgacaaccttgctgtgctgtttagccctgtgggttctgtccagttggtgggagggggaggttccagaccactccacctgctgtctagatgccagggagagctgctgtttggaggtgaagatgagccctgttcaccacagtctaagcacagcacacgggctcaagccatggagcccttttccttcatcatgtaagtcagctttttcttgtgcttagtaaacttttccagtgaggagaaatgacttcggggcaaacactgccagggaaagcctcatttaaaacttgtgaggttcattttatggagaagaaaaataggtgcaaaggcaccaagtgacctgcatgctatggaatcaccgttgagggggtggctgggttgccccgtcctggtgctgccagcacagcgtcgcccacacccagcattgctgaggcccatcatcctcctgcagaaaaggaggcatgcagttaaatggagctggtgcttgcttgatagcgcctccttttgtcagaaagacgctgatgtttcaggctggcacacccagaaaaatcccttccttgtggtccttggctgatgatgagccctggatcagagtgtctccaggaccactgagaagctgcagccgtctgggttttcctctgctatgggggatgagttacgtttattccaccatggacaccaagaatgtatgtagatgtattctaaatctgctcattggttttattacaacttttcctggagtcactaagaggtaaaatggtgtaaattagaggttttatcaaagtgtagtaccagaatgccagatgcattactgaagccactcctaatcttaagcaaatgtaaactaggcctcattaaattgtttgtgtaaata

SEQ ID NO: 199636 - DNA, 6932 bp, Homo sapiens
  Payload ID: 19391
  Gene Name: WD repeat and FYVE domain containing 2
  ENST ID: ENST00000612477
  CDS Start-End: 234-422
tcctcttgtagtggcgccggcttgcatcccaggtcgtggcggttttggtgcctgaagcagggagcgcggagtcgttcccgagagaggcggccaggctatgctcgccggtttccggcgttccgctccggccagccagagtctctgtctcaacctgtgtccgtgctccagcagtctcctcagcccggccccgcggcgcggttggcggcggcgccccaggcgcgccccctcctccgatggcggcggagatccagcccaagcctctgacccgcaagccgatcctgctgcagcggatggaggggtcccaggaggtggtgaatatggccgtgatcgtgcccaaagaggagggcgtcatcagcgtctccgaggacagatccaatggaaaacattgtaaacatacaccagtggcaagcattctgcaatgaacagaagaaattcatggctgaaatggagtacatggatgtaggacccttttgaaattcacagagaagccttatgagaaagtttgattttttccataaaggcaaaattttattaaaaagactgcttctggacctagaaattctttggcacagtattgtttttatgggatatattccataaaatatattgaaggaatatattggtagatgtcactttcccagtctgtaactactggagatggaactgatcaatttctaactgctgtggaaaattcataagcaaattcatggaatcaagaaaaggagaagggtagttaaacctaagctgctttaatattttatttatttttttaagactagttaagtacggtagtgagaaggggaagagagtagaacaaggagttcaatctgtaactgactgtgaacaattgagataataaaactaccttcagaccatcctaagctcctttaatattaaggtgttattatagtattgaaacttctgattcccatttcaccacatttaccttgaaggaaacagctttactggggtatattttcaagtgtttggagacgctgaagtagtgtatattaatgaaactgaagaataaatttcatttgattataggatgaaagaaatgcaatgttcagctatgtcttagcctaattttcactttcctagtgtacaatgtaaataatagaaattattttgtcatggagttactgttaaataaggttcacccataagtctggaattattattaatatactttttttcaagttgacaagtctgtgcttctttgggtcatatactcaaacatgaacataactttgttatttagagctcagttttggttatggttttcattaaaataattgatctatattcttgctttccaaaattcaatgttaatgtcacttggtacaatgctaaatatatgaaaatgtaatattgattttcatcacaacctacaaagccattaccattcactgctttagctagaaactagtaatcttcattcctgaactctgaggttaaagccgcaagtaatgttccatacctgaatggcagtgttccataaattcttaatgaaaccctggtttatctttttgacctttgacttcttcattgcctttatgtgtgcctttgaaaacacttaacattttccattttaaacggtgttatacagtatatacttcatgtccattttattttctcttctgtgagttccctatggagctttgtgtgtcttattcattgtatcatcattagggcctaacatggtacctggcatgcaatacgtcctcaatacacgtttgttgtatcagtgactgatctgtttttttgctgttcctgaaagcacagcatcttaactactgtagacttttagttgatatttgttgagtgaattatatgatgacctatgaaaggcttatgtggacaagtatacacttgtaggaaaagtactggactaggtggactttaaagtacttcaaaactctgaaagtccatgaattgcttcatttattccgtcaacaaacatttgagtacttactgtgttccagtcacatgcatacatggtaatgatgaaaatgataaggtcctttcaagatgctcacaatttagtgcaggaattttagaagaatattgcttaataaaaacaaaactactacttccaagatttagtattggaaagagaatttcagatgaagaatggcaggattccacaatctgtattatcccctaaattttacctcccgttggaggattctttgactcaaactgccctcaataatggcctgataatactcaaatcttcaagcccaagagtggataaaaattcttgccttcaggttccttttagcagagttcaaacagccttgaactttactcagtattaatggaggaaatataaaggaatagaagaaatgtaaaaacaatctgatttacaaataaagatttctggtgctaccataatacagagcctgtttcaggaactccccacccttgtctgattctgtctttgctttagttgtagttagattatatacccaaagggcataccaaactttgatattttggatacctcatttcccagcttctttttggactgtcttttctgagtgaatgccattttagcattccctgcctaggagcttcctttcagacatctctgctctgttttggtcaagacttatgtttagtcagcagcttagcaggggctcctttgtttagtggcagcctcttcaagtgatgaaagccaggagggacctctctccaggtgggaccagtcccatgcagacctttgtatcttcataagttctttataagcatatcaacacaagtcagtaatcttagcattcatacagagactttcagtaacttgatagtttcgtttaggcaattataggaaatcattcccttcctaggagttaacaacaggtacaaacattgtcctctggggttgccaatgaacctcctgcttgtggtggttagagaagaccaacaatctcttctacagatgggtcttgcagggtgagtaggagttcttgtgaaaaagcctttcctgtagaggaaagggcattttagatagaggaggcaagaaaactcccattcattaagaagcactagaatgtcctgattaagggtggacaacggagccaattggcttgagttcagaactcagcactcagtgtcctcacattttgaggaatctggaaattagtgtctgcaggaggagtgactctgatagcaaaaattactgaaccctttggttgaaagatttcagggttctttttctggataaaaaggcctgtgttggtggtaaggtgtagagaaggaggctgtaggagagataactatagagaagaaagttactggggagggcgatatggggaactgcctttctatattctgactttattcaggaccaatttatacaacataggccctgctgtgttctctctaagtcctgagggcagagcacaagcaattgttaagagaggggtgagatttttaatcccaaaataaggagatctgatccccaatgcctagcacaaaggagatatgcattatatgttccttgaatgaattaagcaatgactggtgatcacctttttgaattgaaatggacctgaggattttgtgagtttctgtcagcaaaggtatttaagttgagcctgagagaagtttagcagcttgctttaggccagggtaatcaacaatacaatatgggatgggagtgggaaggggctgggatgagggggttggattttttttctgcttcgagggcctttttttcctgactctaaattactatgattcgaagtggccatgactacttgactgtttcctgaaaaaaatatgttaaaattttatttcatcttatgaatcctcatagtattggttcatttaccattaattctttttattatgaaattacactatcccagttctctgcttcaaccattagtttgataattagaccttggtgcagttcagttgagctcctgatagagttttatgtaccatgtattttataacatttgcacaattttcttaagaaatgcaaatcaaagttttatagtgccaagcacagttctgaaagttgaggacttttcagagtgagggagtgagcgctctgaagtcagcaaaattagaacccatctaaactaatttttcagtgtgtgaagtctctaatagcataaaattaatacactttccactgcgcacttgagactcatcacttggtggtaataattgtggatttcaaggtcccaaagagggaacttgtcctgtatgattgtggaaaattagacctttactccgaattcaaaacatgaagcactcttcatgctagcaaatctttctgggaacaggctgcctctgtgtttccaaaggtcagaaatagactgactttttaaggaaagatcactatgggaaagcttatttgaggaggcttactagaggaggattagcttcaagtgatcccagagctcctgacagttctgaatttcctgtttttatattattaaaccagagtctgtccaggacctcacagatcttaatcagtatatattcatccacatattgcaatgctatgggaaagttaggatggcaattctgacactcttaaaatgagtaatttttaaatcttgaaatcctgaccagctgtcttacacctcaagtgctgctaaacttactttgaaaaaggaatataggtaaaaatcataggatttaagtagctagaataaactttagagagatggccttttccaaacaaacaaaaccaaaactttagaaaaggaaatgtgagtttttacttgcacagcatctttctctggctgtctgttttcactttgcatttggctttgagaaagcatggagaatcatcttgatgtcattagaaataacagtgtggggaaaattaaaacactttgtggcatttagaaatcaataagtagattgtgatttaagactactgcaggtggtgatttgttgatatctgtaacactaaactaaattgtgtacagtatatacttagaagagactgaccaccataccaagcttttcttctcaactattggcagaatagaaagaatttaaaaagagatcacactcctttatttttatatgagtaggtctcccaaggagagtgttacaattaacctagaaattccctaacagagaaaaaaaaaacaaaaaaaactccccttgtgcaacttcagcaagcagtcttctctttaaaaaaattttttgtatttcggggcagggagcctcttcatccaaatattttatttagtccttagtaaaaattaattcagaagtatgagaaactaaccagtaagaccaaaaaagaaaaggtcatctccttgtctcttggcagggagtgctactttatggtctcctgtgcctttaatttaaggattcttggaaaagaactgggagtctgatctcagctctactctgcattgaccttggcatttcctggggcatttcatcactctaagcttcagtttgtccatctggcaaaggagggggttagatttcctagctatgactcttgtactgtgatgtgcttctgtagtgactagataagtagtctctgcaaccatatcatcctaaaatctcaagtggaggaaagcacgcattagggaaaaagcagcatgcttgtgtgaaactgtcagcacctcatgttgcaactgtaaaacgatgctttctagagcctttggatggcagcggttatttattcctggatgaaatattaagaagtatttgttttgtgttagtgcctaacacccagttgaactagattcactacattcctacttctagatgagtcctttactttcaaactctgggtggtttgccagcaaccaagtcagggcctgggttatctagattaatgctttggaaactttttagaccataaatcatagtaaaaaatatagttagcattgctacgcaagactgacatactctctcacacatagacacacatatgacagaaacaaaggttttatgaaatggtatcctcttaatgtgacatgcacactattttctgttctgttgcagcccttataagatcctagttgtgaccgtttcaattaatttcatgacccactaaaggattgtgaacaagagtttgaaatattacagagctttagaagaactggtaatgttttgtaccttctttttctcccgttatgtagtttcagttttctagaagatggaaatgtaattcaacttggggacctaaaccctgccagcctaccccacccctggcctggcctgcttttctgaaattcccattgacattatagaattgacccagtctgactggaagccttcaagttaggagataactgttctaaagcctttcagcccagagccagagagggttcagaaaaaaagtaggaatgttggggggaggggggagggatagcattaggagatatacctaatgttaaatgaagagttaatgggtgtagcacaccaacatggcacatgtatacatatgtaacaaacctgcatgttgggcacatgtaccctaaaacttaaagtgtaataaaaagaaaaaaaaaaagaaaaaaattaggaatgtaccaaattgagcatttgctattgtttgagtggctgcattttaacttcctgtcctatgttaatttattactgagttaggactcagaaatgatgcatcacatctaaattatgaatgttgccaggtggggtggctcacgcctgtaatcccagcactttggggggttgaggcgggtggatcacctgaggtcaggagtttgagaccagcctggccaacatgttgaaaccctgtctctactaaaaatacaaaaattagctgggtgtgttggtgggcacctgtaatcccagctacccgggagactaaggcaggagaatcgcttgaacccaggaggcggaagttgcagtgagccgagattgtaccactgcactccagcctgggcaacagagcgagactccatctcaaaaaaaaaaaa

SEQ ID NO: 199637 - DNA, 14247 bp, Homo sapiens
  Payload ID: 19392
  Gene Name: WD repeat and FYVE domain containing 3
  Uniprot ID: Q8IZQ1
  ENST ID: ENST00000295888
  CDS Start-End: 409-10989
gcggccgcagaatcgagctcgggccccggcccccggcccgcggcgcggggctcccgggccccgccgcggacgtcgcgccggtcgccccttccccgtagcccgtgcgccctcggcgcggagccccggcccgccgcggtcccgtctcctgggcctgtcccgcccgcgccctccgccggccctcaggtataatacttctccacgtctgcttcaggaagaaagtgcctgccattcttatcatttctaagcaggttcatgccagcccagaacagagaatcagctggagcccagatttcaagttttgagtaaaataccttcaagcgaatgggccctattgtgctcacacattcagaacctgttacccaaggaattccctaaagaattagaagtgcgtctcaccaaccagccaagatgaacatggtgaagaggatcatggggcggccgaggcaggaggagtgcagcccacaagacaacgccttaggactgatgcacctccgccggctcttcacggagttgtgccatcctccccggcacatgactcagaaggaacaagaagagaaactgtatatgatgctgccagtgtttaacagggtttttggaaatgctccgccgaatacaatgacagaaaaattttctgatcttctgcagttcacaacacaagtctcacgactaatggtgacagaaattcgaaggagagcatcaaacaaatccacagaggctgcaagtcgggccatagttcagttcctagagattaatcagagtgaagaagccagtagaggctggatgcttctaacgacaattaatttgttagcttcctctggtcagaaaaccgtggactgcatgacaacaatgtcagtgccttccaccctggttaaatgtttatatctgttttttgaccttccacatgtgcctgaggcagttggaggtgcacagaatgagctacctctagcagaacgtcgaggactactccagaaagtttttgtacagatcttagtgaaactgtgcagttttgtttcccctgcggaggagctggctcagaaagatgatctccagcttctattcagtgcaataacctcttggtgccctccctataacctgccttggagaaagagtgctggagaagtcctcatgaccatatctcgtcatggtcttagtgtcaatgtagtgaagtatattcatgagaaagagtgtttatctacatgtgttcagaatatgcagcaatcagatgacctgtctcccctagaaattgtcgaaatgtttgctgggctttcttgtttcctcaaagattccagcgatgtttcccaaacacttctggatgattttcggatatggcaaggatataattttctttgtgatctcttgcttagattggaacaagcaaaagaggcagaatccaaagatgccttgaaagatctggttaatctgataacttccctaacaacatatggtgtcagtgaactaaaaccagctggtattaccacaggggcaccctttttattgcctggatttgcagtacctcagcctgcaggcaaaggtcacagtgtgagaaacgtccaggcctttgcagttcttcagaatgcatttttaaaagcaaaaaccagcttccttgcccaaatcatccttgatgctatcacaaatatttacatggctgacaatgccaattacttcatcctagagtcacagcacacattgtcacagtttgcagagaagatttctaaactcccagaagtacaaaacaaatactttgagatgctggagtttgttgtttttagcttaaattatataccttgtaaagaacttattagtgtcagtatcctcttaaaatctagctcttcttatcactgtagcattattgcaatgaaaacacttcttaagtttacaagacatgactacatatttaaagacgtgttcagggaggttggccttttggaggtcatggtaaaccttttgcataaatatgctgccctgttgaaggatccaactcaggcactaaatgaacaaggggactcaagaaataatagttcagttgaagaccaaaaacacctggctttattggttatggagaccttgacagtgcttcttcaaggatcaaacacaaatgcaggaatttttcgagaatttggaggtgcaagatgtgcacataatatagtaaagtaccctcaatgccggcagcatgccttgatgactatccaacagctggtgctctccccaaatggggacgatgacatgggcactctcctggggctaatgcattcagccccaccgacggaattgcagttgaagactgatattttaagggccctcctgtcggtccttcgagaaagccatcgttcaagaacagtttttaggaaagttggaggatttgtgtacattacatccttgctcgttgctatggaaagatctttgagctgtccacccaagaatggctgggagaaagtgaaccagaatcaagtgtttgaacttcttcacactgtgttctgcacgttgactgcagcaatgcgctatgagccagccaactctcatttcttcaaaacagagattcagtatgagaagttggcagatgctgttcgatttcttggctgcttctcagacctaagaaaaataagcgccatgaatgtcttcccctcaaatacacagccatttcaaagacttttagaggaagatgtaatctcaatagaatcagtgtcacccacgttacggcactgcagtaaactttttatttatctttacaaagtagccacagattcttttgacagtcgtgcagaacagatccctccttgcctgacaagtgagtcttctctcccctctccttggggtacaccagctttgtccaggaaaaggcatgcatatcattctgtttcaactccccctgtttaccctcctaaaaatgttgccgacctgaaactacatgtgacaacttcatctctgcagagttctgatgcagtcatcattcatcctggagccatgcttgccatgctggacctactggcctctgttgggtcagtgacacagccagaacatgctttggatcttcaacttgccgtggcaaatattttacaatccctggtgcacacagaaaggaaccagcaagtcatgtgtgaagctggtcttcatgcacgactgctgcagaggtgcagtgctgcattggctgatgaggaccactcactgcacccgcccctgcagcggatgtttgaacgattagcctctcaggctctggaacccatggtgttgagggagtttttacgtttggcaagtcctttaaattgtggtgcctgggacaaaaaactgctaaaacaatatagggtccacaaaccaagttcactgagttatgaaccagaaatgagaagtagtatgatcacatctctggaaggtctgggtactgataatgtttttagcttacatgaagataaccattaccggataagcaagagcctggtaaaatctgcggaaggaagtactgtacccctgaccagggtgaagtgtctggtctccatgacaaccccacatgacatcagacttcatgggtcatcagttactccagcttttgttgaatttgacacatcacttgaagggtttggatgtctttttttgcccagtttggcccctcataatgctcctacaaataataccgtcacaacaggtcttattgatggggctgtggtcagtggcattggttctggtgaaagattcttccctcctccctccggcttaagttactctagctggttttgtattgaacattttagttctcctccaaataaccaccctgtcagacttcttactgttgtgcgccgagcaaattcttctgagcaacattacgtgtgccttgcaatagttctatcagcaaaagaccgatctctgattgtttccaccaaagaggaactcctccaaaattatgttgatgattttagtgaagagtcctcattttatgaaattctcccatgctgtgctcgctttcgatgtggagagcttatcattgagggacagtggcatcatttggtcctggtaatgagcaaaggcatgttgaaaaacagtactgcagccctttatattgatggacagcttgttaacactgtaaagcttcattatgtccacagtactccagggggttcaggttcggcaaatccaccagtggtgagcacggtctatgcctacattggtactccacctgcccaacgccaaattgcctcattggtttggcgcctgggacccacacattttctagaagaagttttaccttcttcaaatgttactaccatttatgaacttggaccaaattatgttggaagctttcaggctgtatgtatgccatgtaaagatgcaaaatccgaaggggtggtgccatcccctgtgtcattagtaccagaggagaaagtgtcatttggcctctatgcactctctgtgtcgtctctaacagtggcaagaatccggaaagtgtataacaaattggatagcaaagccattgctaagcagttaggcatttcctcacatgagaatgccactcctgtgaagttgatacacaattcagcaggacatcttaatggatctgcacggacaattggggccgctctgattggatacttgggagtaagaacatttgtccctaagcctgttgccactactttgcagtacgttggtggagctgcagccatcctgggcctggtggccatggcctctgatgtggaagggttatatgcagcagtcaaggccctggtttgtgtggtcaagagtaacccactagccagcaaagaaatggaaagaatcaagggctaccagttgctggcaatgttgcttaagaagaaacgttcccttcttaacagccacatcctccatctaactttttctttggtgggaactgttgatagtggacatgagacctccattattccaaattcaactgctttccaggacctcctctgtgattttgaagtctggctccatgcaccatatgaacttcatctttccttatttgaacactttattgaactgctcacagagtccagtgaagcctcaaagaatgccaaattaatgagagaattccagttaatcccaaagctgctcctgactcttcgagatatgtctttatcccagcctactattgctgctattagtaatgtcctgagcttcttactgcaaggttttcctagcagcaatgatctgctcagatttgggcagtttatttcttctactttgccaacctttgcggtttgtgagaaatttgtagtaatggaaataaataatgaagagaagcttgacactggaactgaagaggagtttggaggtcttgtatcagctaatcttatacttttgaggaacagacttctggatatcttgctaaaactaatttatacatctaaagaaaagacaagcattaatttgcaagcttgtgaagaactggtgaagacactgggttttgactggatcatgatgtttatggaggaacacttacattccaccacagttacagcagccatgaggattcttgttgtcctactaagtaatcagtctattctcatcaagtttaaagaaggactcagtggtggaggatggcttgaacagacagattctgtcttaactaataagattggaactgtattaggattcaacgtgggcagaagtgctggtgggagatcgacggtcagggagattaaccgagatgcttgtcattttcctggttttccagtccttcagtcattccttcctaaacacactaatgtccctgccctctattttctcctcatggccttgtttctgcagcagccagttagtgagctgcctgagaacctgcaggtcagtgtgcctgtcatcagctgccggagtaagcagggttgccagtttgatttggattccatttggacattcatctttggagttcctgcctccagcggaactgtggtctcttctatccataacgtatgcacagaagctgtttttttattattgggaatgctccgcagcatgctgacttcaccttggcaatcagaagaagagggatcttggctccgagaatatcctgtgaccctgatgcagttcttcagatatttgtatcacaacgtgccagaccttgcctccatgtggatgagccctgacttcctgtgtgcattagcagccaccgtcttccccttcaatattcgcccttactcagagatggtgactgaccttgatgatgaagttggatctccagcagaagagtttaaagcgtttgcagcagacacagggatgaacaggagccaatcagagtactgcaatgtgggcaccaagacatatctgaccaatcacccggctaaaaagttcgtttttgacttcatgcgggtcttaatcatagacaacctctgtctcactcctgccagcaagcaaactccactaattgatcttttgttggaggcttcccctgaaaggtctacaagaactcagcaaaaagaatttcaaacttacattttggatagcgtgatggaccatttgcttgcagctgatgtgttattaggggaagatgcatctctgcctattaccagtggaggaagctaccaggtattggtgaacaatgtgttttatttcacacagcgtgtggtggacaagctttggcaaggcatgttcaacaaagaatctaaacttcttatagattttataattcaactaattgcacagtcaaagagaagatcacagggattgtcactggatgcagtgtatcattgcctcaataggaccatcttgtaccagttctcacgggcacacaaaaccgttcctcagcaagtagctctgcttgattcactcagggtcctcactgtaaacagaaacttgatcctgggacctgggaaccatgaccaagaattcattagctgtctggcccactgcttgataaatctacatgttggaagcaacgtggatggatttggactggaagcagaagcccgcatgaccacatggcacattatgatcccctcggacattgaaccagatggtagttacagccaagatattagtgaagggcgtcagcttctcataaaagctgtcaacagagtttggactgaactgatacatagtaagaaacaagtcttagaggaacttttcaaagtaactctacctgtgaatgaaaggggccacgtggacatagctacagcaaggccactcattgaagaagctgccctgaagtgctggcagaatcatttggcccatgaaaagaaatgcataagtcgaggagaagctttagcgcccaccacacagtccaaattatcccgtgtcagcagtggctttggtctttccaagttaacaggatcaagaaggaatcgaaaagaaagtggtcttaataaacacagtctttccacccaggagatttcgcagtggatgtttactcacattgctgttgttcgtgacttagtagatacacaatataaagaatatcaggagcgtcagcagaatgccctgaagtacgtgacagaagagtggtgtcagatcgagtgcgagctgttgagggagcgggggctgtggggccctcccatcggctcccacctcgacaagtggatgctggagatgacagaagggccctgcaggatgaggaaaaagatggtgcgaaatgatatgttttataaccattacccttacgtgccagaaactgagcaagagacaaatgtggcgtctgagatcccaagtaaacagcctgagacacccgatgatattcctcaaaagaaacctgctcgatatagaagagccgtaagttatgacagtaaagagtactacatgcgactggcctctggcaatcccgccattgtccaagacgccattgtggagagttcagaaggtgaagctgctcagcaagaaccagagcatggggaagacactattgctaaagtcaaaggtttggtcaagcctcctctaaaacgctcccgatctgcacctgatggaggagatgaggagaaccaggagcagctacaagaccagattgctgagggcagctccatagaagaggaggagaaaacagataatgctaccttactgcgcctgttagaggaaggagaaaagatccaacacatgtaccgctgtgctcgagtccagggcctagataccagtgaggggctccttctttttggtaaagagcatttttatgtgattgatggatttaccatgacagcaaccagggaaataagagatattgaaaccttacctccaaatatgcatgagcctattattcctagaggagccaggcaaggccctagtcaactcaagagaacatgcagcatttttgcatatgaagatatcaaggaagttcataaaaggagatatctcctgcagcctattgctgtggaagttttctctggagatggacggaattacctccttgcttttcagaaaggaatcagaaacaaagtctatcaaaggtttttggctgtagtgccatctctaacggacagttcagaatctgtatctgggcaacgaccaaacacgagtgtggagcagggatctgggttacttagcactttggttggagagaagtctgtgactcagagatgggagagaggtgaaatcagcaacttccaatatttgatgcatttgaacactttggctggcagatcatataatgatctcatgcagtatcctgtcttcccctggatccttgcagattatgactcagaggaggtggatcttactaatcccaagacgtttagaaacctggctaagccaatgggagcacaaacagatgaacgattagctcagtataagaagcggtataaagactgggaggatcctaatggagaaactcctgcataccactatgggacccactattcatctgcaatgattgtggcctcataccttgtaaggatggagcctttcacacagatattcttaaggctacagggtggccactttgacctggctgaccggatgtttcacagtgtgcgcgaggcctggtattcagcgtcaaagcacaatatggcagatgtaaaagaacttatcccagagttcttttatttaccagaattcctgttcaattccaacaactttgatctaggctgtaaacaaaatggcaccaagcttggagatgttatccttccaccctgggcaaaaggggacccacgagaattcatcagagtccatcgtgaggctttggagtgtgattacgtgagtgcccatctacatgagtggattgacttaatcttcggttataaacagcaaggccctgctgcagtagaagctgtaaatgtcttccatcatcttttttatgagggtcaagtggatatctacaacatcaatgacccactaaaggagacagccacaattgggttcattaataacttcggtcagatccctaaacagttatttaaaaaacctcatccaccaaagcgagtgagaagtcgactcaatggagacaatgcaggaatctctgtcctaccaggatctacaagtgacaagatcttttttcatcatctagacaacttgaggccttctctaacacctgtaaaagaactcaaagaacctgtaggacaaatcgtatgtacagataaaggtattcttgcggtggaacagaataaggttcttatcccaccaacctggaataaaacttttgcttggggctatgcagacctcagttgcagactgggaacctatgagtcagacaaggccatgactgtttatgaatgcttgtctgagtggggccagattctctgtgcaatctgccccaaccccaagctggtcatcacgggtggaacaagcacggttgtgtgtgtgtgggagatgggcacctccaaagaaaaggccaagaccgtcaccctcaaacaggccttactgggccacactgataccgtcacctgcgccacagcatcattagcctatcacataattgtcagtgggtcccgtgatcgaacctgtatcatttgggatttgaacaaactgtcatttctaacccagcttcgagggcatcgagctccagtttctgctctttgtatcaatgaattaacaggggacattgtgtcctgcgctggcacatatatccatgtgtggagcatcaatgggaaccctatcgtgagtgtcaacacgttcacaggtaggagccagcagatcatctgctgctgcatgtcggagatgaacgaatgggacacgcagaacgtcatagtgacaggacactcagatggagtggttcggttttggagaatggaatttttgcaagttcctgaaacaccagctcctgagcctgctgaagtcctagaaatgcaggaagactgtccagaagcacaaatagggcaggaagcccaagacgaggacagcagtgattcagaagcagatgagcagagcatcagccaggaccctaaggacactccaagccaacccagcagcaccagccacaggccccgggcagcctcctgccgcgcaacagccgcctggtgtactgacagtggctctgacgactccagacgctggtccgaccagctcagtctagatgagaaagacggcttcatatttgtgaactattcagagggccagaccagagcccatctgcagggcccccttagccacccccaccccaatcccattgaggtgcggaattacagcagattgaaacctgggtaccgatgggaacggcagctggtgttcaggagtaagctgactatgcacacagcctttgatcgaaaggacaatgcacacccagctgaggtcactgccttgggcatctccaaggatcacagtaggatcctcgttggtgacagtcgaggccgagttttcagctggtctgtgagtgaccagccaggccgttctgctgctgatcactgggtgaaggatgaaggtggtgacagctgctcaggctgctcggtgaggttttcactcacagaaagacgacaccattgcaggaactgtggtcagctcttctgccagaagtgcagtcgctttcaatctgaaatcaaacgcttgaaaatctcatccccggtgcgtgtttgtcagaactgttattataacttacagcatgagagaggttcagaagatgggcctcgaaattgttgaagattcaacaagctgagtggagaccatggtctgtagaccccttcccgattctcctgtcccagcttggaaggcattgaaaacagtctccgtttacacatctcttcataccacgtgtttgaagtgttaaaattcaaagggatcattgaataaaacgggtgtagagtacaggaatggggcagacgcgattcaggtgaacagcacaagaagaatatgaggtggttcctaggagcaacactttcgacctccagttctccctgatgacagtagctgtctccaagagaaaaatcctcacttattaactctcttttcttgcatctcatttttatagagctactcatccttatttggaaaaaccaacaacaaaaaaggcttttagaaaatggttgtaaatctgacttctttgcaagtaactatgtatattgtaaatagatataaaaggccttttttctaaataaggacttaactgcctgtaacatgaaacttcaaactaaaccactaactcaatgaactacttatggtttgtctgacatccctcacttaccaattaattataaatatgtttttttaaatccccaaagacattatctgtggtctttttttcctttcaagctcagcctgtgtgcctgatgtcatttctttcaagttgcccacagtatctccacttaaactaggctagtaaccaaaataatgtggaccttctttaggaaacagtgtgggagaataggagtccagccgtaagataaactggaaatatttgggcgtcttgtacctggctacgcaccacctcagtgttgttcctacataaacagggccccttttaaacttgtatgtggactgctgtttggtcaaagaataccttcttagcattgcagaaaggtggtcagatgaccagtgtagtgcaggaaacagccctgtctcaactaatggaaatatatttgcatgtaacccaaaattagcttatcttgcatagaacataataagtatgtgtctttggtgacactaatgttctactatagcttattttcaaacaaggggtaaaaaaaggaaagaaagaagtgtacagaattaacatataaactttgttgtaaaactgaatcatgtcagaactgcttaaaattaacctttaccatttaatgtcatctacctgaaaacagtgagatttatactgtatcaatgtctatttttttgtttttgctatgaatataattacagtattttaatatttagttatttaatttgttctactagttggatacagaacacacaaatccagggggattaaagctggaaggggctaagagattagtttacagagaaaaggcttggtggtgggatttttttaaatgtgtgttatgtacatatatatatatatataatatatattaaaaatgaaacaattaatctagattttaacattttcagaaacttagtgataacattatgaacaattctaaaagccctgtgatttgaaaaatatagaatcattaatggcccaagataggccttcacaccttcacaggtgcgaaaggaaaggccttcacaccctcacagaggcatcatgcaaaggacagcggctttggcttttccaattttccatctttaggccctggtgagaggcacacttatgcactaaaatgcacatatatgcacatgcattcaaaaataggcatttggtacaatggtgatcttgtacctgatgggctgaaaccagcttaagaacaaatttgttcttcctgatatgataactaggtctccaagagaaaatagaaaggctgctttagtgccttacgcttactaaatttaaatctttatttacctgggtttgagcctacagtctatttatgattacatatcaaaattgattaaaacacttccatttctaaaagttcaaatatacttgttaataaaaggattatcggcattaatactttaatttaaagaaaagttgtgttctgttttcctttctgtgtcttactccccccacactctccctcccccatcaccatcttcaattctaataaataatgctgatgttcaacagttgcagaaattgtgctattatgtaactgtgggccttgcccctgtctggccctctagatgatttgtagcagtgttattctacactttttaaaagaagcgtcctccttttgtccatgaatcatgtttaccccatacccagtggcagaggtgttctttaaagacttgaatatatgaatgtgtgtgtgtagttacttaaaggttattcctctttgtaataggaaactatatgggatgaacacttttaaactttccgacacaacttccattactaactttctaacagaacttccataactagaaggtggaaaccaaaaccctcatggtagtatttcctctggcagctggtgctgtgggcaactgttttgttcaatcgggtttcttttctttttgcctctaatgcagaaatcaacagaatcactcacacatacaagtacactcacatacataaactaattatttctctggatatctttctgtgttccatgtaaatttatttaccaacatctattgtcaacatgtacatctaccttagtatggtctgcattctttttctgagagtacctcatagggctcctgcctgatctttgtagtttgttcattcatccatccacctgttcatttgttcatccatgtattctaacatttctatgtagtgtgcaactctaatgtcatgcttttgaagaagagaatagctgcccatagcagccatccgtctggataatagcaaaacactctagataagttattttgcactttcttatgtataaagttggtagaaacttatttttgctttgtatcatttaaatacattttgttttggtaaatgaactgtgtataaaatatttatgccgttaaaactgtttttagaaagtatttttaatttcagcaagtttggttacttgttgcatgactcttaacacagctgactttttgtgtcagtgcaatgtatattttttgtcctgttattaacttgtaagccctagtaatggccaattatttgtacagcaacagaagtaaattgaagatactggctaagactggattgattgtggacttttatactatattgcagaaaccaatatctgtttcttggtggttatgtaaaagacctgaagaattactatctagtgtgcagtctgtgatatctgaatgttcattgtatatttgtctctgatgcaaaaaggtagagtaacacaattacaatacatgattaaatgc

SEQ ID NO: 199638 - DNA, 425 bp, Homo sapiens
  Payload ID: 19392
  Gene Name: WD repeat and FYVE domain containing 3
  ENST ID: ENST00000502713
  CDS Start-End: 398-425
gcggccgcagaatcgagctcgggccccggcccccggcccgcggcgcggggctcccgggccccgccgcggacgtcgcgccggtcgccccttccccgtagcccgtgcgccctcggcgcggagccccggcccgccgcggtcccgtctcctgggcctgtcccgcccgcgccctccgccggccctcaggtataatacttctccacgtctgcttcaggaagaaagtgcctgccattcttatcatttctaagcaggttcatgccagcccagaacagagaatcagatgtcttcaattgctgtggtgacaagaacatagtgaatataagctgctgaaagtagagctagtcgtggctggaacagagagaaattcagaattagaagtgcgtctcaccaaccagccaagatgaacatggtgaagaggatcatggggc

SEQ ID NO: 199639 - DNA, 1918 bp, Homo sapiens
  Payload ID: 19392
  Gene Name: WD repeat and FYVE domain containing 3
  ENST ID: ENST00000514711
  CDS Start-End: 1-1918
aggaaaaagatggtgcgaaatgatatgttttataaccattacccttacgtgccagaaactgagcaagagacaaatgtggcgaaacctgctcgatatagaagagccgtaagttatgacagtaaagagtactacatgcgactggcctctggcaatcccgccattgtccaagacgccattgtggagagttcagaaggtgaagctgctcagcaagaaccagagcatggggaagacactattgctaaagtcaaaggtttggtcaagcctcctctaaaacgctcccgatctgcacctgatggaggagatgaggagaaccaggagcagctacaagaccagattgctgagggcagctccatagaagaggaggagaaaacagataatgctaccttactgcgcctgttagaggaaggagaaaagatccaacacatgtaccgctgtgctcgagtccagggcctagataccagtgaggggctccttctttttggtaaagagcatttttatgtgattgatggatttaccatgacagcaaccagggaaataagagatattgaaaccttacctccaaatatgcatgagcctattattcctagaggagccaggcaaggccctagtcaactcaagagaacatgcagcatttttgcatatgaagatatcaaggaagttcataaaaggagatatctcctgcagcctattgctgtggaagttttctctggagatggacggaattacctccttgcttttcagaaaggaatcagaaacaaagtctatcaaaggtttttggctgtagtgccatctctaacggacagttcagaatctgtatctgggcaacgaccaaacacgagtgtggagcagggatctgggttacttagcactttggttggagagaagtctgtgactcagagatgggagagaggtgaaatcagcaacttccaatatttgatgcatttgaacactttggctggcagatcatataatgatctcatgcagtatcctgtcttcccctggatccttgcagattatgactcagaggaggtggatcttactaatcccaagacgtttagaaacctggctaagccaatgggagcacaaacagatgaacgattagctcagtataagaagcggtataaagactgggaggatcctaatggagaaactcctgcataccactatgggacccactattcatctgcaatgattgtggcctcataccttgtaaggatggagcctttcacacagatattcttaaggctacagggtggccactttgacctggctgaccggatgtttcacagtgtgcgcgaggcctggtattcagcgtcaaagcacaatatggcagatgtaaaagaacttatcccagagttcttttatttaccagaattcctgttcaattccaacaactttgatctaggctgtaaacaaaatggcaccaagcttggagatgttatccttccaccctgggcaaaaggggacccacgagaattcatcagagtccatcgtgaggctttggagtgtgattacgtgagtgcccatctacatgagtggattgacttaatcttcggttataaacagcaaggccctgctgcagtagaagctgtaaatgtcttccatcatcttttttatgagggtcaagtggatatctacaacatcaatgacccactaaaggagacagccacaattgggttcattaataacttcggtcagatccctaaacagttatttaaaaaacctcatccaccaaagcgagtgagaagtcgactcaatggagacaatgcaggaatctctgtcctaccaggatctacaagtgacaagatcttttttcatcatctagacaacttgaggccttctctaacacctgtaaaagaactcaaagaacctgtaggacaaatcgtatgtacagataaaggtattcttgcggtggaac

SEQ ID NO: 199640 - DNA, 453 bp, Homo sapiens
  Payload ID: 19392
  Gene Name: WD repeat and FYVE domain containing 3
  ENST ID: ENST00000509172
  CDS Start-End: 274-453
ggcgcggggctcccgggccccgccgcggacgtcgcgccggtcgccccttccccgtagcccgtgcgccctcggcgcggagccccggcccgccgcggtcccgtctcctgggcctgtcccgcccgcgccctccgccggccctcagctggagcccagatttcaagttttgagtaaaataccttcaagcgaatgggccctattgtgctcacacattcagaacctgttacccaaggaattccctaaagaattagaagtgcgtctcaccaaccagccaagatgaacatggtgaagaggatcatggggcggccgaggcaggaggagtgcagcccacaagacaacgccttaggactgatgcacctccgccggctcttcacggagttgtgccatcctccccggcacatgactcagaaggaacaagaagagaaactgtatatgatgctgccagtgtttaacagg

SEQ ID NO: 199641 - DNA, 240 bp, Homo sapiens
  Payload ID: 19392
  Gene Name: WD repeat and FYVE domain containing 3
  ENST ID: ENST00000514071
  CDS Start-End: 1-240
atgctccgccgaatacaatgacagaaaaattttctgatcttctgcagttcacaacacaagtctcacgactaatggtgacagaaattcgaaggagagcatcaaacaaatccacagaaaaacagtgtgccctgctgtcccccaaggatttcaaagccacaacaccttcagaggctgcaagtcgggccatagttcagttcctagagattaatcagagtgaagaagccagtagaggctggatgc

SEQ ID NO: 199642 - DNA, 5996 bp, Homo sapiens
  Payload ID: 19393
  Gene Name: WD repeat and HMG-box DNA binding protein 1
  Uniprot ID: O75717
  ENST ID: ENST00000360586
  CDS Start-End: 67-3456
gcgggaagcagctcttgtggatcctcagtggcggaggctcggtcacccggataggtaaaggaaaacatgcctgccacacggaagccaatgagatatgggcatacagagggacacacggaggtctgttttgatgattctgggagttttattgtgacttgtggaagtgatggtgatgtgaggatttgggaagacttggatgatgatgatcctaagttcattaatgttggagaaaaggcatattcatgtgctttgaagagtggaaaactggtcactgcagtttctaataatactattcaagtccacacatttcctgaaggagttccagatggtatattgactcgcttcactacaaatgcaaaccatgtggtctttaatggggatggtactaaaattgctgctggatctagtgattttctagtcaaaattgtggatgtgatggatagcagccaacagaaaacatttcgaggacatgatgcccctgttttaagtctttcctttgatcctaaggacatctttctggcatcagctagttgtgatggatctgtcagagtgtggcaaatttcagatcagacatgtgctattagttggccactgctacaaaaatgcaacgatgtgataaatgcaaaatcaatctgcagacttgcttggcagccaaaaagtgggaagttactggcaattcctgtggaaaaatctgttaagctatatagaagagaatcttggagtcatcaatttgatctttcagataatttcatctctcagaccctcaatatagtaacctggtctccctgtgggcaatatttagctgcaggtagtattaatggtctaatcatagtttggaatgtggaaaccaaagactgcatggaaagggtgaaacatgagaaaggttatgcaatttgtggtctggcatggcatcctacttgtggtcgaatatcgtatactgatgcggaaggaaatctagggcttctagagaatgtttgtgaccccagtggaaagacatcaagcagtaaggtatctagcagagtggaaaaggattataatgatctttttgatggagatgatatgagtaatgctggtgattttctaaatgacaatgcagttgagatcccttctttttcaaaagggattataaatgatgatgaggatgatgaagacctcatgatggcttcaggtcgtcctagacagcgaagtcacatcctagaagatgatgaaaactcagttgatatttcaatgctaaaaactggttctagtcttctcaaagaggaggaggaagatggtcaagaaggcagcattcacaatctaccacttgtaacatcccaaaggccattttatgatggacccatgccaactccccggcaaaagccatttcagtcaggttctacaccgttgcatctcactcacagattcatggtgtggaactctattggaattattcgctgctataatgatgagcaagacaatgccatagatgtggagttccatgatacctccatacaccatgcaacacacttatcaaacactttgaattatacaatagcagatctttcccacgaagctattttgttggcatgtgaaagcactgatgaactagcaagcaagcttcactgcctgcactttagttcttgggattcaagcaaagagtggataatagacttgcctcagaatgaggatattgaagccatatgtctcggtcaaggatgggctgctgccgctactagtgccctgcttcttcgattgtttactattggaggggttcaaaaagaggtattcagccttgctggacctgtggtgtcaatggcaggacatggagaacagcttttcattgtttatcacagaggtacaggatttgatggggatcagtgccttggagttcaactgctagagctggggaaaaagaaaaaacaaattttgcatggtgaccctcttcctcttacaaggaaatcctaccttgcatggattgggttttcagctgaaggtaccccttgttacgtggattcagaaggaattgttcgaatgcttaacagaggacttggtaatacgtggactcctatatgtaatacaagagagcactgcaaaggaaaatctgatcactactgggtggttggtatccatgaaaatccccagcaactaaggtgcattccttgtaaaggttctcggtttcccccaacccttccacgccctgctgttgctatattatcctttaagcttccttactgtcagattgcaacagagaaaggacaaatggaggagcaattttggcgttcagttatatttcacaaccaccttgattatttagctaaaaatggttatgaatatgaagagagcactaaaaatcaagcaacaaaagagcaacaggaacttttaatgaaaatgcttgcgctttcttgtaaactggagcgagaattccgttgtgtggaacttgctgatctaatgactcaaaatgctgtgaatttagccattaaatatgcttctcgctctcggaaattaatactggctcaaaaactaagtgaactggctgtagagaaggcagccgaattgacagcaacccaggtggaagaggaagaagaagaagaagatttcagaaaaaagctgaatgctggttacagcaatactgctacagagtggagccaaccaaggttcagaaatcaagttgaagaagatgctgaggacagtggagaagctgatgatgaagaaaaaccagaaatacataagcctggacagaactcgttttccaaaagtacaaattcctctgatgtttcagctaagtcaggtgcagttacctttagcagccaaggacgagtaaatccctttaaggtatcagccagttccaaagaaccagccatgtcaatgaattcagcacgttcaactaatattttagacaatatgggcaaatcatccaagaaatccactgcacttagtcgaactacaaataatgaaaagtctcccattataaagcctctgattccaaagccgaagcctaagcaggcatctgcagcatcctatttccagaaaagaaattctcaaactaataaaactgaggaagtgaaagaagaaaatcttaaaaatgtattatctgaaaccccagctatatgtcctcctcaaaacactgaaaaccaaaggccaaagaccgggttccagatgtggttagaagaaaatagaagtaatattttgtctgacaatcctgacttttcagatgaagcagacataataaaagaaggaatgattcgatttagagtattgtcaactgaagaaagaaaggtgtgggctaacaaagccaaaggagaaacggcaagtgaaggaactgaagcaaagaagcgaaaacgtgtggttgatgaaagtgatgaaacagaaaaccaggaagaaaaagcaaaagagaacctgaatttgtctaaaaagcagaaacctttagatttttctacaaatcagaaactatcagcttttgcatttaagcaggagtaaaggaagaaagtgaccctagggaagtaatggatttttttttactcatctttgaatatagactcgagtctttgggaaactcattatatatatattttttaaagagtttgaagcaactgtttgtctttataagataatgtagtaattatattggtgtaggtaacaggacatatgtaaaaactatcatctttgcagattactctgcctccaaatgcagggcctttcagagatgcattgtgattgtaattactgagttgaagctccaaccaatttgaatttgtttcttaaccttgaaaaatcattaaagccaaggtattaaaacctttgtgcattaataccttctaggggtttggttcatttggtttttgtcatgtgcaaggaaggacaatagtcctctttccaagtgtgttagcatagacttctctatatgtttctactagacctaggggatgacgtcttttaataatactggccctaaacatgtaaataatcttgtaggtgagactttttcttttgtgtttcggaaatttcctatgtggctttcagttgtctgtttgtatagcctggatttttttgaggtaaatgaaactttctcatttgtatatttggcttgatatggtcttaatattatctttccacgaaatggatatatttctagaaaatatatatttactaccataatttctaccaccacccccattttgctctgcattatacacagtagagaagaactgaagacactgctgtgacagtattgcagtccaaggcatcatgtgctcttggtgggatactctgattatcagcatcaacagtactttactgagcaagactttgaaggcctgagaagagagcaaagttatggaaagtatttaactcttattttatattgaacaaacaaggtttaatcatgtcatacatttttggttttctaagcagagactaatacaaatgcagccacataaaggcagtgtactgggggtgggagggaaggaaacaatcacataaaatcagctgactcaaaattgaggatagttaataggttgaaagggaaaaagtatgttgaaaatttagacataaatgaaccaagaatattccttatctggtgatgattaaagttaggaaaacatacattttttattttttaattagtagctgctatcagagacattatagcacagtggttatgagcacagattccaaagccagattacctaggttcggagacccgcttctctacctactactaatagttgggtcatgttgggccggtgacccaaattctagccttcattcactcatctgtaaaatggatataatgatagtacctactttataggttgttatgagaattgaatgaaatgaaagcccttagtttctgacacatagtaatcttttatataaatgttagttactattctgataatgatgatgctgttggttatttcatcttgctttgtcattaggtttgattctgaatactatacaaactaattttgatttcaagatcttaagtaaaggtttatttatagtacattggaaagcatgtttgtagacatgtattttgtgtttggttcctcaacttgctttgtatatattttataatactaggttgatataaaagtaaatgcagtttcgccatttcagtggcaaaaaccgcgatttcttttgtgccaacctaatgcttaaggatataatctgtgtatattgtatttcagattcatagcaacctaataacaaggatttacaaaagggtttttacttccctacttttttttggctgaaggaaggtttttgtattgacttggtttaacttacaaatcagaactttgaaaccaagaaacattatccttatttctctgctatataatagtaaacctgtttttttccagtgttcttttttttttttccagagaattgggactgaatagtatgaaagtgaaaatggaaataaattaattattaatcatcatcatatcaataatattgcctacttgagcttattgtatactatagaaaattgacatatacttaattttattctccaaaagcaaaaactcctcacaggaggttactttacagatttattttggagaacaagtgaataggcactggggttatgtgcagctctggggactgtgctatgatctaaagcctctcatatctgtgcagcaacctggggtgagtcactgtcactaacatggaacagatgccaggtagtccctttggacaaaaggatgaggcccatccatgtagaaagcatcttaatcagtgactgtcttatgggccctctttgtttcccatctgttttattatcagaatatataattttcccccaagttttcatcttgaatctctcaaacctacagaaaatttgaaatttgacagtaagcacctgtatatccttcctctagtttgtcttattgttgacattttatcatgtatgctttatagacaggatttttcctgaaccatttggaatatgcatatacttcatccctcagttcccagcatgtaccctaagaataaagattttcttctgcata

SEQ ID NO: 199643 - DNA, 3722 bp, Homo sapiens
  Payload ID: 19393
  Gene Name: WD repeat and HMG-box DNA binding protein 1
  Uniprot ID: O75717
  ENST ID: ENST00000420358
  CDS Start-End: 371-3391
aggcgcagtgtggtgagcgagccgaagcgcgggaagcagctcttgtggatcctcagtggcggaggctcggtcacccggttttattgtgacttgtggaagtgatggtgatgtgaggatttgggaagacttggatgatgatgatcctaagttcattaatgttggagaaaaggcatattcatgtgctttgaagagtggaaaactggtcactgcagtttctaataatactattcaagtccacacatttcctgaaggagttccagatggtatattgactcgcttcactacaaatgcaaaccatgtggtctttaatggggatggtactaaaattgctgctggatctagtgattttctagtcaaaattgtggatgtgatggatagcagccaacagaaaacatttcgaggacatgatgcccctgttttaagtctttcctttgatcctaaggacatctttctggcatcagctagttgtgatggatctgtcagagtgtggcaaatttcagatcagacatgtgctattagttggccactgctacaaaaatgcaacgatgtgataaatgcaaaatcaatctgcagacttgcttggcagccaaaaagtgggaagttactggcaattcctgtggaaaaatctgttaagctatatagaagagaatcttggagtcatcaatttgatctttcagataatttcatctctcagaccctcaatatagtaacctggtctccctgtgggcaatatttagctgcaggtagtattaatggtctaatcatagtttggaatgtggaaaccaaagactgcatggaaagggtgaaacatgagaaaggttatgcaatttgtggtctggcatggcatcctacttgtggtcgaatatcgtatactgatgcggaaggaaatctagggcttctagagaatgtttgtgaccccagtggaaagacatcaagcagtaaggtatctagcagagtggaaaaggattataatgatctttttgatggagatgatatgagtaatgctggtgattttctaaatgacaatgcagttgagatcccttctttttcaaaagggattataaatgatgatgaggatgatgaagacctcatgatggcttcaggtcgtcctagacagcgaagtcacatcctagaagatgatgaaaactcagttgatatttcaatgctaaaaactggttctagtcttctcaaagaggaggaggaagatggtcaagaaggcagcattcacaatctaccacttgtaacatcccaaaggccattttatgatggacccatgccaactccccggcaaaagccatttcagtcaggttctacaccgttgcatctcactcacagattcatggtgtggaactctattggaattattcgctgctataatgatgagcaagacaatgccatagatgtggagttccatgatacctccatacaccatgcaacacacttatcaaacactttgaattatacaatagcagatctttcccacgaagctattttgttggcatgtgaaagcactgatgaactagcaagcaagcttcactgcctgcactttagttcttgggattcaagcaaagagtggataatagacttgcctcagaatgaggatattgaagccatatgtctcggtcaaggatgggctgctgccgctactagtgccctgcttcttcgattgtttactattggaggggttcaaaaagaggtattcagccttgctggacctgtggtgtcaatggcaggacatggagaacagcttttcattgtttatcacagaggtacaggatttgatggggatcagtgccttggagttcaactgctagagctggggaaaaagaaaaaacaaattttgcatggtgaccctcttcctcttacaaggaaatcctaccttgcatggattgggttttcagctgaaggtaccccttgttacgtggattcagaaggaattgttcgaatgcttaacagaggacttggtaatacgtggactcctatatgtaatacaagagagcactgcaaaggaaaatctgatcactactgggtggttggtatccatgaaaatccccagcaactaaggtgcattccttgtaaaggttctcggtttcccccaacccttccacgccctgctgttgctatattatcctttaagcttccttactgtcagattgcaacagagaaaggacaaatggaggagcaattttggcgttcagttatatttcacaaccaccttgattatttagctaaaaatggttatgaatatgaagagagcactaaaaatcaagcaacaaaagagcaacaggaacttttaatgaaaatgcttgcgctttcttgtaaactggagcgagaattccgttgtgtggaacttgctgatctaatgactcaaaatgctgtgaatttagccattaaatatgcttctcgctctcggaaattaatactggctcaaaaactaagtgaactggctgtagagaaggcagccgaattgacagcaacccaggtggaagaggaagaagaagaagaagatttcagaaaaaagctgaatgctggttacagcaatactgctacagagtggagccaaccaaggttcagaaatcaagttgaagaagatgctgaggacagtggagaagctgatgatgaagaaaaaccagaaatacataagcctggacagaactcgttttccaaaagtacaaattcctctgatgtttcagctaagtcaggtgcagttacctttagcagccaaggacgagtaaatccctttaaggtatcagccagttccaaagaaccagccatgtcaatgaattcagcacgttcaactaatattttagacaatatgggcaaatcatccaagaaatccactgcacttagtcgaactacaaataatgaaaagtctcccattataaagcctctgattccaaagccgaagcctaagcaggcatctgcagcatcctatttccagaaaagaaattctcaaactaataaaactgaggaagtgaaagaagaaaatcttaaaaatgtattatctgaaaccccagctatatgtcctcctcaaaacactgaaaaccaaaggccaaagaccgggttccagatgtggttagaagaaaatagaagtaatattttgtctgacaatcctgacttttcagatgaagcagacataataaaagaaggaatgattcgatttagagtattgtcaactgaagaaagaaaggtgtgggctaacaaagccaaaggagaaacggcaagtgaaggaactgaagcaaagaagcgaaaacgtgtggttgatgaaagtgatgaaacagaaaaccaggaagaaaaagcaaaagagaacctgaatttgtctaaaaagcagaaacctttagatttttctacaaatcagaaactatcagcttttgcatttaagcaggagtaaaggaagaaagtgaccctagggaagtaatggatttttttttactcatctttgaatatagactcgagtctttgggaaactcattatatatatattttttaaagagtttgaagcaactgtttgtctttataagataatgtagtaattatattggtgtaggtaacaggacatatgtaaaaactatcatctttgcagattactctgcctccaaatgcagggcctttcagagatgcattgtgattgtaattactgagttgaagctccaaccaatttgaatttgtttcttaaccttgaaaaatcattaaagccaaggtattaaaacctttgtgcatta

SEQ ID NO: 199644 - DNA, 768 bp, Homo sapiens
  Payload ID: 19393
  Gene Name: WD repeat and HMG-box DNA binding protein 1
  ENST ID: ENST00000455555
  CDS Start-End: 265-768
agtggcggaggctcggtcacccgggtgagtccccactccggctgcccgcgtccaccaaggagatgcgtgttccctttccggcttattgtctgacagaccctctgccttatcccgctggtgtcactcgggtgggggaaaccgggctgcggagaacgggccctagaggagactaagctctcttcctatccctagcctcgctgcttttctcttttgaaataataagactggcttttataaaacattttcagataggtaaaggaaaacatgcctgccacacggaagccaatgagatatgggcatacagagggacacacggaggtctgttttgatgattctgggagttttattgtgacttgtggaagtgatggtgatgtgaggatttgggaagacttggatgatgatgatcctaagttcattaatgttggagaaaaggcatattcatgtgctttgaagagtggaaaactggtcactgcagtttctaataatactattcaagtccacacatttcctgaaggagttccagatggtatattgactcgcttcactacaaatgcaaaccatgtggtctttaatggggatggtactaaaattgctgctggatctagtgattttctagtcaaaattgtggatgtgatggatagcagccaacagaaaacatttcgaggacatgatgcccctgttttaagtctttcctttgatcctaaggacatctttctggcatcagctagttgtgatggatctgtcagagtgtggcaaatttcagatcag

SEQ ID NO: 199645 - DNA, 2348 bp, Homo sapiens
  Payload ID: 19393
  Gene Name: WD repeat and HMG-box DNA binding protein 1
  ENST ID: ENST00000567693
  CDS Start-End: 1-194
ctggttctagtcttctcaaagaggaggaggaagatggtcaagaaggcagcattcacaatctaccacttgtaacatcccaaaggccattttatgatggacccatgccaactccccggcaaaagccatttcagtcaggttctacaccgttgcatctcactcacagattcatgcaagcttcactgcctgcactttagttcttgggattcaagcaaagagtggataatagacttgcctcagaatgaggatattgaagccatatgtctcggtcaaggatgggctgctgccgctactagtgccctgcttcttcgattgtttactattggaggggttcaaaaagaggtattcagccttgctggacctgtggtgtcaatggcaggacatggagaacagcttttcattgtttatcacagaggtacaggatttgatggggatcagtgccttggagttcaactgctagagctggggaaaaagaaaaaacaaattttgcatggtgaccctcttcctcttacaaggaaatcctaccttgcatggattgggttttcagctgaaggtaccccttgttacgtggattcagaaggaattgttcgaatgcttaacagaggacttggtaatacgtggactcctatatgtaatacaagagagcactgcaaaggaaaatctgatcactactgggtggttggtatccatgaaaatccccagcaactaaggtgcattccttgtaaaggttctcggtttcccccaacccttccacgccctgctgttgctatattatcctttaagcttccttactgtcagattgcaacagagaaaggacaaatggaggagcaattttggcgttcagttatatttcacaaccaccttgattatttagctaaaaatggttatgaatatgaagagagcactaaaaatcaagcaacaaaagagcaacaggaacttttaatgaaaatgcttgcgctttcttgtaaactggagcgagaattccgttgtgtggaacttgctgatctaatgactcaaaatgctgtgaatttagccattaaatatgcttctcgctctcggaaattaatactggctcaaaaactaagtgaactggctgtagagaaggcagccgaattgacagcaacccaggtggaagaggaagaagaagaagaagatttcagaaaaaagctgaatgctggttacagcaatactgctacagagtggagccaaccaaggttcagaaatcaagttgaagaagatgctgaggacagtggagaagctgatgatgaagaaaaaccagaaatacataagcctggacagaactcgttttccaaaagtacaaattcctctgatgtttcagctaagtcaggtgcagttacctttagcagccaaggacgagtaaatccctttaaggtatcagccagttccaaagaaccagccatgtcaatgaattcagcacgttcaactaatattttagacaatatgggcaaatcatccaagaaatccactgcacttagtcgaactacaaataatgaaaagtctcccattataaagcctctgattccaaagccgaagcctaagcaggcatctgcagcatcctatttccagaaaagaaattctcaaactaataaaactgaggaagtgaaagaagaaaatcttaaaaatgtattatctgaaaccccagctatatgtcctcctcaaaacactgaaaaccaaaggccaaagaccgggttccagatgtggttagaagaaaatagaagtaatattttgtctgacaatcctgacttttcagatgaagcagacataataaaagaaggaatgattcgatttagagtattgtcaactgaagaaagaaaggtgtgggctaacaaagccaaaggagaaacggcaagtgaaggaactgaagcaaagaagcgaaaacgtgtggttgatgaaagtgatgaaacagaaaaccaggaagaaaaagcaaaagagaacctgaatttgtctaaaaagcagaaacctttagatttttctacaaatcagaaactatcagcttttgcatttaagcaggagtaaaggaagaaagtgaccctagggaagtaatggatttttttttactcatctttgaatatagactcgagtctttgggaaactcattatatatatattttttaaagagtttgaagcaactgtttgtctttataagataatgtagtaattatattggtgtaggtaacaggacatatgtaaaaactatcatctttgcagattactctgcctccaaatgcagggcctttcagagatgcattgtgattgtaattactgagttgaagctccaaccaatttgaatttgtttcttaaccttgaaaaatcattaaagccaaggtatt

SEQ ID NO: 199646 - DNA, 5139 bp, Homo sapiens
  Payload ID: 19394
  Gene Name: WD repeat and SOCS box containing 1
  Uniprot ID: Q9Y6I7
  ENST ID: ENST00000262394
  CDS Start-End: 317-1582
agatatctccggcgccgcccgccattttgactccagtgtctcgtttgcagtcggcgctttaggggaactgtcttcctccgcaggcgcgaggctgggtacagggtctattgtctgtggttgactccgtactttggtctgaggccttcgggagctttcccgaggcagttagcagaagccgcagcggccgcccccgcccgtctcctctgtccctgggcccgggagggaccaacttggcgtcacgcccctcagcggtcgccactctcttctctgttgttgggtccgcatcgtattcccggaatcagacggtgccccatagatggccagctttcccccgagggtcaacgagaaagagatcgtgagattacgtactataggtgaacttttagctcctgcagctccttttgacaagaaatgtggtcgtgaaaattggactgttgcttttgctccagatggttcatactttgcttggtcacaaggacatcgcacagtaaagcttgttccgtggtcccagtgccttcagaactttctcttgcatggcaccaagaatgttaccaattcaagcagtttaagattgccaagacaaaatagtgatggtggtcagaaaaataagcctcgtgaacatattatagactgtggagatatagtctggagtcttgcttttgggtcatcagttccagaaaaacagagtcgctgtgtaaatatagaatggcatcgcttcagatttggacaagatcagctacttcttgctacagggttgaacaatgggcgtatcaaaatatgggatgtatatacaggaaaactcctccttaacttggtagatcatactgaagtggtcagagatttaacttttgctccagatggaagcttgatcctggtgtcagcttcaagagacaaaactctcagagtatgggacctgaaagatgatggaaacatgatgaaagtattgagggggcatcagaattgggtgtacagctgtgcattctctcctgactcttctatgctgtgttcagtcggagccagtaaagcagttttcctttggaatatggataaatacaccatgatacggaaactagaaggacatcaccatgatgtggtagcttgtgacttttctcctgatggagcattactggctactgcatcttatgatactcgagtatatatctgggatccacataatggagacattctgatggaatttgggcacctgtttcccccacctactccaatatttgctggaggagcaaatgaccggtgggtacgatctgtatcttttagccatgatggactgcatgttgcaagccttgctgatgataaaatggtgaggttctggagaattgatgaggattatccagtgcaagttgcacctttgagcaatggtctttgctgtgccttctctactgatggcagtgttttagctgctgggacacatgacggaagtgtgtatttttgggccactccacggcaggtccctagcctgcaacatttatgtcgcatgtcaatccgaagagtgatgcccacccaagaagttcaggagctgccgattccttccaagcttttggagtttctctcgtatcgtatttagaagattctgccttccctagtagtagggactgacagaatacacttaacacaaacctcaagctttactgacttcaattatctgtttttaaagacgtagaagatttatttaatttgatatgttcttgtactgcattttgatcagttgagcttttaaaatattatttatagacaatagaagtatttctgaacatatcaaatataaatttttttaaagatctaactgtgaaaacatacatacctgtacatatttagatataagctgctatatgttgaatggacccttttgcttttctgatttttagttctgacatgtatatattgcttcagtagagccacaatatgtatctttgctgtaaagtgcaaggaaattttaaattctgggacactgagttagatggtaaatactgacttacgaaagttgaattgggtgaggcgggcaaatcacctgaggtcagcagtttgagactagcctggcaaacatgatgaaaccctgtctctactaaaaatacaaaaaaaaaaaaaattagccaggcgtggtggtgcacacctgtagtcctagctacttgggaggctgaggcaggagaattgcttgaacccaggaggtggaggttgcagtaagccaagatcacaccactgcactccaacctggacaacagagcgagactccatctcaaaaaaaaaaaaaaattgtgttgcctcatacgaaatgtatttggttttgttggagagtgtcagactgatctggaagtgaaacacagtttatgtacagggaaaaggattttattatccttaggaatgtcatccaagacgtagagcttgaatgtgacgttatttaaaaacaacaacaaagaaggcagagccaggatataactagaaaaaggatgtctttttttttttttttactccccctctaaacactgctgctgccttaattttagaaagcagcttactagtttacccttgtggtataaagtattataaattgttgtgaatttgaagaatccgtctactgtattattgctaaatattttgtttatactaagggacaattattttaagaccatggatttaaaaaaaaaaaaaaaaactctgtttctgcaggggatgatattggtgagttgccaaagaagcaatacagcatatctgcttttgccttctgttgtttatcttacctgcagatattaagaatgtatgcattatgtaaaatgctcaattatatatttttgttgagttttttaattaaagacttgtaaaaaaaaaaaacagtatattgcaaatgtttcttaaataggttaggtggagtactttctctctgtctccattgtaaggttgatggtacaccacaggcaaattaagcaaaaaggacaatgaagaaagaatgcaggactcaggcgctgctctagaattcattcagggctccccgagtgcagcagctcttatggtggttttgtttttaggagaactgttgtaataatgcatattttaaaagcatagggaagctctagaacacaggaaggtgactactaagcaagagaaaagtatcttttagtggggaactaccagcctatagtaagtctatctggttaaagtagttattatgaaaatctagcagtctgggtcctttgagaaggcattaaaaaagcaaaactcttatgagccatgtgtgattttgaagactcatttccactgagaaattatttggaagttcctatggttagctctgttaaggaatgtaaaaatttatagggggtgtagggttatcaatttgaaagccagtagaaaatctgctcaagttacttcttgaggatcatctgtattttacaaaaagaagcacaagaagcatctaatctttatacttcttgtgactttttttcccctgcattttactttgtaatatatcggctttataattttaaaatacactggccgggcgcagtggcccacacctataatcccagcactttgggaggccaaggcaggtgggtcacttaaggccgggagttcatgacaagcctgaccaacatagtgaaacccctgtctctactaaaattacaaaaattagctgggcatggtggtgggttcctgtactcctagctacttaggaggctgaggcaagagaattgcttgaactggagaaatggaggttgcagtgagctgagatcacgcaactgcactccagcctgggtgacagagtaagactctaaataaataagataccattacttttcatatcattgcattatttttgctttccacaccaacatatccagtcaagtaaaaacagctttttttattttttattttttattttttttgagacggagtctcacactgtcacctgggctggagtgcagtggtgcgatcttggctcactgcagcctccacctcctgggttcaagcaattctcctgcctcagcctcccaagcagctgggattacaggcgctcccccaccacgcccagctaatttttgttgtatttttaggacagacggcgtttcactgttggccagactggtctcaaactcctgacctcgtgatccgcccgcctcggcctcccagagtgctgggattataggtgtgagccaccgaacctggcccaaaacagcatttttggaagctacattctgtgagatgttcacctgtttgccacctcttctcgtgaaaaccatagtgagtgccagtgtgaaaggaagattgcagcgtatatgtcaagtagaaacatgtttgaattttccatttgtctgtggggaagaaggtaataacagtaataacagactgaaggaccaaaggaaaatagggaagacgttgattatggacttggatcagattctagctacatgatttgaaaatgacactgcctctcctattttgccacaagcctgtcatttggagaactggcagatcatttatgttcagatttaattttctgttttagaatcccatggagtacatgtgaacataggaaaatcacactcagcagccaagctatccttttgcgataatgaaatcactttaaaacctataacttgatcttaggttggcaaatcttaaacttaacgatccttgaaatttcctgcctgctgtgactgtgatgcagttggattcaactggtttacactgctcttgggtcggcaagaccaaaaaaggttggactgcactgtagcatgcttatgggttgaggcagtggcagaggcagaggacttggccgtcagccagccagcacaggcgtaagaaaatagcatgagaagtttcacgagcctgaaaccattgagacagtgattacaacctccatattaatcagatgagggtttgtaggtgacatagcattttacccaagtaattctgaacagactgtggcttatgataatacattttaactagcaagtgtgtggactataaaacaaatatctagagttatatatggatgtactatcatttggtgataaaagcatagaaaaagcataagttggagtatactgggtttttttgttgttgttaaattcttttccatcagaagtaagagctgttggcagcaactaataaaatgcaacctagtga

SEQ ID NO: 199647 - DNA, 1611 bp, Homo sapiens
  Payload ID: 19394
  Gene Name: WD repeat and SOCS box containing 1
  Uniprot ID: Q9Y6I7
  ENST ID: ENST00000348811
  CDS Start-End: 266-1093
cggcgctttaggggaactgtcttcctccgcaggcgcgaggctgggtacagggtctattgtctgtggttgactccgtactttggtctgaggccttcgggagctttcccgaggcagttagcagaagccgcagcggccgcccccgcccgtctcctctgtccctgggcccgggagggaccaacttggcgtcacgcccctcagcggtcgccactctcttctctgttgttgggtccgcatcgtattcccggaatcagacggtgccccatagatggccagctttcccccgagggtcaacgagaaagagatcggaaaactcctccttaacttggtagatcatactgaagtggtcagagatttaacttttgctccagatggaagcttgatcctggtgtcagcttcaagagacaaaactctcagagtatgggacctgaaagatgatggaaacatgatgaaagtattgagggggcatcagaattgggtgtacagctgtgcattctctcctgactcttctatgctgtgttcagtcggagccagtaaagcagttttcctttggaatatggataaatacaccatgatacggaaactagaaggacatcaccatgatgtggtagcttgtgacttttctcctgatggagcattactggctactgcatcttatgatactcgagtatatatctgggatccacataatggagacattctgatggaatttgggcacctgtttcccccacctactccaatatttgctggaggagcaaatgaccggtgggtacgatctgtatcttttagccatgatggactgcatgttgcaagccttgctgatgataaaatggtgaggttctggagaattgatgaggattatccagtgcaagttgcacctttgagcaatggtctttgctgtgccttctctactgatggcagtgttttagctgctgggacacatgacggaagtgtgtatttttgggccactccacggcaggtccctagcctgcaacatttatgtcgcatgtcaatccgaagagtgatgcccacccaagaagttcaggagctgccgattccttccaagcttttggagtttctctcgtatcgtatttagaagattctgccttccctagtagtagggactgacagaatacacttaacacaaacctcaagctttactgacttcaattatctgtttttaaagacgtagaagatttatttaatttgatatgttcttgtactgcattttgatcagttgagcttttaaaatattatttatagacaatagaagtatttctgaacatatcaaatataaatttttttaaagatctaactgtgaaaacatacatacctgtacatatttagatataagctgctatatgttgaatggacccttttgcttttctgatttttagttctgacatgtatatattgcttcagtagagccacaatatgtatctttgctgtaaagtgcaaggaaattttaaattctgggacactgagttagatggtaaatactgacttacgaaagttgaattgggtgaggcgggcaaatcacctgaggtcagcagtttgagactagcctggcaaacatgatgaaaccctgtctctactaaaaatacaaaaaaaaaa

SEQ ID NO: 199648 - DNA, 1149 bp, Homo sapiens
  Payload ID: 19394
  Gene Name: WD repeat and SOCS box containing 1
  ENST ID: ENST00000427287
  CDS Start-End: 283-924
agtgtctcgtttgcagtcggcgctttaggggaactgtcttcctccgcaggcgcgaggctgggtacagggtctattgtctgtggttgactccgtactttggtctgaggccttcgggagctttcccgaggcagttagcagaagccgcagcggccgcccccgcccgtctcctctgtccctgggcccgggagggaccaacttggcgtcacgcccctcagcggtcgccactctcttctctgttgttgggtccgcatcgtattcccggaatcagacggtgccccatagatggccagctttcccccgagggtcaacgagaaagagatcgatggttcatactttgcttggtcacaaggacatcgcacagtaaagcttgttccgtggtcccagtgccttcagaactttctcttgcatggcaccaagaatgttaccaattcaagcagtttaagattgccaagacaaaatagtgatggtggtcagaaaaataagcctcgtgaacatattatagactgtggagatatagtctggagtcttgcttttgggtcatcagttccagaaaaacagagtcgctgtgtaaatatagaatggcatcgcttcagatttggacaagatcagctacttcttgctacagggttgaacaatgggcgtatcaaaatatgggatgtatatacaggaaaactcctccttaacttggtagatcatactgaagtggtcagagatttaacttttgctccagatggaagcttgatcctggtgtcagcttcaagagacaaaactctcagagtatgggacctgaaagatgatggaaacatgatgaaagtattgagggggcatcagaattgggtgtacagctgtgcattctctcctgactcttctatgctgtgttcagtcggagccagtaaagcagtggtggcagcaatattggtgtgattgaggttatgctggcaccactcgcacacaggcgcacaatggtgttagctgggcagaaagagtggcatctctggctaccgggctgggggcgacctttaccataggatgaagtaaccttgcattcggctgcaaggtgtactgtacgtacacaggtgctggtcgatgtccactttctgcttttctttctttctttttttcttttttaaagtaatttcccccacagta

SEQ ID NO: 199649 - DNA, 1670 bp, Homo sapiens
  Payload ID: 19394
  Gene Name: WD repeat and SOCS box containing 1
  ENST ID: ENST00000579733
  CDS Start-End: 294-590
attttgactccagtgtctcgtttgcagtcggcgctttaggggaactgtcttcctccgcaggcgcgaggctgggtacagggtctattgtctgtggttgactccgtactttggtctgaggccttcgggagctttcccgaggcagttagcagaagccgcagcggccgcccccgcccgtctcctctgtccctgggcccgggagggaccaacttggcgtcacgcccctcagcggtcgccactctcttctctgttgttgggtccgcatcgtattcccggaatcagacggtgccccatagatggccagctttcccccgagggtcaacgagaaagagatcggaaaactcctccttaacttggtagatcatactgaagtggtcagagatttaacttttgctccagatggaagcttgatcctggtgtcagcttcaagagacaaaactctcagagtatgggacctgaaagatgatggaaacatgatgaaagtattgagggggcatcagaattgggtgtacagctgtgcattctctcctgactcttctatgctgtgttcagtcggagccagtaaagcagtggtggcagcaatattggtgtgattgaggttatgctggcaccactcgcacacaggcgcacaatggtgttagctgggcagaaagagtggcatctctggctaccgggctgggggcgacctttaccataggatgaagtaaccttgcattcggctgcaaggtgtactgtacgtacacaggtgctggtcgatgtccactttctgcttttctttctttctttttttcttttttaaagtaatttcccccacagtaaaatacactgactcctgagtaaattgattttccagttttatggaattgggagtctgacaagtgaaaccaatttaatgtaaagtatttggctttcaaatggtttctctgtgctattttttggaattctttcagattccagagatatcttacgtctttgattcaatttaaaatttgtacttattttcttttagaaataatgtattgtgtctgtgcagaaaaaaaaaaaaccaaaaaggattgctttactccaagaggagagattgtcttaggataaacctccaagctcacatttaatataacagactgaagtaaacattagaatcctgtttagagctattctgcacagttaactactgatctttagaatctaaaattgtatatgaacttattcttaaataattgaaccgttttatattcaaatgacttatgatcgtggttagtttgggaaaaataagatggttaaattttgatttattgaaatgtaattgtattattttcataaaatagcattttcattttgtaatgtggtttaacatccttgttgtttgccaaagaaatttcatttggctgtgaatattctatttgcttgcagtatctgtttctcttcctaggctcaagttggtgacccaagcctattgtaaacaagtgattatctcaaagggagatgccaatggagtaacaatttgttaaccttacgttttctgtctgtatatttttttaaaaatctggtagtttctggaaaaaaaagagaagggggtttgtagtacttaaccctatttatttccgtatattttagttaattagtttttggaataaatggatttcagtatagctttgtggttaaattgcattgcc

SEQ ID NO: 199650 - DNA, 544 bp, Homo sapiens
  Payload ID: 19394
  Gene Name: WD repeat and SOCS box containing 1
  ENST ID: ENST00000583742
  CDS Start-End: 310-544
tccggcgccgcccgccattttgactccagtgtctcgtttgcagtcggcgctttaggggaactgtcttcctccgcaggcgcgaggctgggtacagggtctattgtctgtggttgactccgtactttggtctgaggccttcgggagctttcccgaggcagttagcagaagccgcagcggccgcccccgcccgtctcctctgtccctgggcccgggagggaccaacttggcgtcacgcccctcagcggtcgccactctcttctctgttgttgggtccgcatcgtattcccggaatcagacggtgccccatagatggccagctttcccccgagggtcaacgagaaagagatcgctcctgcagctccttttgacaagaaatgtggtcgtgaaaattggactgttgcttttgctccagatggttcatactttgcttggtcacaaggacatcgcacagtaaagcttgttccgtggtcccagtgccttcagaactttctcttgcatggcaccaagaatgttaccaattcaagcagtttaagattgccaagac

SEQ ID NO: 199651 - DNA, 552 bp, Homo sapiens
  Payload ID: 19394
  Gene Name: WD repeat and SOCS box containing 1
  ENST ID: ENST00000583193
  CDS Start-End: 285-449
ccagtgtctcgtttgcagtcggcgctttaggggaactgtcttcctccgcaggcgcgaggctgggtacagggtctattgtctgtggttgactccgtactttggtctgaggccttcgggagctttcccgaggcagttagcagaagccgcagcggccgcccccgcccgtctcctctgtccctgggcccgggagggaccaacttggcgtcacgcccctcagcggtcgccactctcttctctgttgttgggtccgcatcgtattcccggaatcagacggtgccccatagatggccagctttcccccgagggtcaacgagaaagagatcggaaacatgatgaaagtattgagggggcatcagaattgggtgtacagctgtgcattctctcctgactcttctatgctgtgttcagtcggagccagtaaagcagtggtggcagcaatattggtgtgattgaggttatgctggcaccactcgcacacaggcgcacaatggtgttagctgggcagaaagagtggcatctctggctaccgggctgggggcgacctttaccata

SEQ ID NO: 199652 - DNA, 943 bp, Homo sapiens
  Payload ID: 19394
  Gene Name: WD repeat and SOCS box containing 1
  ENST ID: ENST00000581440
  CDS Start-End: 321-943
gcccagatatctccggcgccgcccgccattttgactccagtgtctcgtttgcagtcggcgctttaggggaactgtcttcctccgcaggcgcgaggctgggtacagggtctattgtctgtggttgactccgtactttggtctgaggccttcgggagctttcccgaggcagttagcagaagccgcagcggccgcccccgcccgtctcctctgtccctgggcccgggagggaccaacttggcgtcacgcccctcagcggtcgccactctcttctctgttgttgggtccgcatcgtattcccggaatcagacggtgccccatagatggccagctttcccccgagggtcaacgagaaagagatcgtatttttatttttccttttagtgagattacgtactataggtgaacttttagctcctgcagctccttttgacaagaaatgtggtcgtgaaaattggactgttgcttttgctccagatggttcatactttgcttggtcacaaggacatcgcacagtaaagcttgttccgtggtcccagtgccttcagaactttctcttgcatggcaccaagaatgttaccaattcaagcagtttaagattgccaagacaaaatagtgatggtggtcagaaaaataagcctcgtgaacatattatagactgtggagatatagtctggagtcttgcttttgggtcatcagttccagaaaaacagagtcgctgtgtaaatatagaatggcatcgcttcagatttggacaagatcagctacttcttgctacagggttgaacaatgggcgtatcaaaatatgggatgtatatacaggaaaactcctccttaacttggtagatcatactgaagtggtcagagatttaacttttgctccagatggaagcttgatcctggtgtcagcttcaagagacaaaactctcagagtatgggacctgaa

SEQ ID NO: 199653 - DNA, 479 bp, Homo sapiens
  Payload ID: 19394
  Gene Name: WD repeat and SOCS box containing 1
  ENST ID: ENST00000584114
  CDS Start-End: 51-479
tctgttgttgggtccgcatcgtattcccggaatcagacggtgccccatagatggccagctttcccccgagggtcaacgagaaagagatcggaaaactcctccttaacttggtagatcatactgaagtggtcagagatttaacttttgctccagatggaagcttgatcctggtgtcagcttcaagagacaaaactctcagagtatgggacctgaaagatgatggaaacatgatgaaagtattgagggggcatcagaattgggtgtacagctgtgcattctctcctgactcttctatgctgtgttcagtcggagccagtaaagcagttttcctttggaatatggataaatacaccatgatacggaaactagaaggacatcaccatgatgtggtagcttgtgacttttctcctgatggagcattactggctactgcatcttatgatactcgagtatatatctgggatccacataatggagac

SEQ ID NO: 199654 - DNA, 625 bp, Homo sapiens
  Payload ID: 19394
  Gene Name: WD repeat and SOCS box containing 1
  ENST ID: ENST00000582208
  CDS Start-End: 208-432
gtctgtggttgactccgtactttggtctgaggccttcgggagctttcccgaggcagttagcagaagccgcagcggccgcccccgcccgtctcctctgtccctgggcccgggagggaccaacttggcgtcacgcccctcagcggtcgccactctcttctctgttgttgggtccgcatcgtattcccggaatcagacggtgccccatagatggccagctttcccccgagggtcaacgagaaagagatcgtgagattacgtactataggtgaacttttagctcctgcagctccttttgacaagaaatgtggtcgtgaaaattggactgttgcttttgctccagatggttcatactttgcttggtcacaaggacatcgcacagtaaagcttgttccgtggtcccagtgccttcagaacttgaaaactcctccttaacttggtagatcatactgaagtggtcagagatttaacttttgctccagatggaagcttgatcctggtgtcagcttcaagagacaaaactctcagagtatgggacctgaaagatgatggaaacatgatgaaagtattgagggggcatcagaattgggtgtacagctgtgcattctctcctgactcttctatgctg

SEQ ID NO: 199655 - DNA, 1900 bp, Homo sapiens
  Payload ID: 19394
  Gene Name: WD repeat and SOCS box containing 1
  ENST ID: ENST00000581185
  CDS Start-End: 283-1026
agtgtctcgtttgcagtcggcgctttaggggaactgtcttcctccgcaggcgcgaggctgggtacagggtctattgtctgtggttgactccgtactttggtctgaggccttcgggagctttcccgaggcagttagcagaagccgcagcggccgcccccgcccgtctcctctgtccctgggcccgggagggaccaacttggcgtcacgcccctcagcggtcgccactctcttctctgttgttgggtccgcatcgtattcccggaatcagacggtgccccatagatggccagctttcccccgagggtcaacgagaaagagatcgtgagattacgtactataggtgaacttttagctcctgcagctccttttgacaagaaatgtggtcgtgaaaattggactgttgcttttgctccagatggttcatactttgcttggtcacaaggacatcgcacagtaaagcttgttccgtggtcccagtgccttcagaactttctcttgcatggcaccaagaatgttaccaattcaagcagtttaagattgccaagacaaaatagtgatggtggtcagaaaaataagcctcgtgaacatattatagactgtggagatatagtctggagtcttgcttttgggtcatcagttccagaaaaacagagtcgctgtgtaaatatagaatggcatcgcttcagatttggacaagatcagctacttcttgctacagggttgaacaatgggcgtatcaaaatatgggatgtatatacaggaaaactcctccttaacttggtagatcatactgaagtggtcagagatttaacttttgctccagatggaagcttgatcctggtgtcagcttcaagagacaaaactctcagagtatgggacctgaaagatgatggaaacatgatgaaagtattgagggggcatcagaattgggtgtacagctgtgcattctctcctgactcttctatgctgtgttcagtcggagccagtaaagcagtacgtgtcaaagttcttgtacattcattatgaattggattatgataatgtgtgcataatcattttaaatctaagtaacctatgaagtctgtgctcggtgtcatgaatattttaaatgttttatttcatgatgggggagaatttgcatgaaggaaattaaatatagttattgattgccaagtgagaagttggattgtttttagagataatagataataatgggcatatcagggttttttttttttgtaagtctagaaaagtttatgtgctgtagaagagatctagtctatatgttaagacattcccttgctaattattttcttctctgttgttctatttttttggtccagtttgctgtttttaaagttttgagtcccagctggtcctgtacatttaactgaaaaaaaagtaacttaaaataatataaaaatagcactcatgtatgtcctacagttataggtgaaatttgatattgtttgtcttacatagcatacctatagacagcttaagtaaagtgactgttaagagggttatgcttattgatgaactcttgtagttgtttaccagctctgttagtatagttaaattgatctcagtagcttcaagtatttataaaatggttgaagtccaaatacatgtgataattacaatacactttgaattaatggagggtgggaggctagttgaaatgcattttatttacccaaggagtatgttaaaatgatagttataaatgttggaagtttaaagcaagatactcagtttagttctttacaaatcataagaagaacaaaattagatgttgacattgctattttaggctgtgtgttttccatatgcttcttgctttccctgtcacaggtggtggcagcaatattggtgtgattgaggttatgctggcaccact

SEQ ID NO: 199656 - DNA, 2646 bp, Homo sapiens
  Payload ID: 19395
  Gene Name: WD repeat and SOCS box containing 2
  Uniprot ID: Q9NYS7
  ENST ID: ENST00000315436
  CDS Start-End: 143-1357
catgtgacgggaagcagctgatggcctctccgggcggcggcggcggcctggccggggcgggcggcgcgggggcggcatgagggcccgcggcccggggggctgaggcgcccgccgcctgccgcgggggccgctcgcgtcctccatggaggccggagaggaaccgctgctgctggccgaactcaagcccgggcgcccccaccagtttgattggaagtccagctgtgaaacctggagcgtcgccttctccccagatggctcctggtttgcttggtctcaaggacactgcatcgtcaaactgatcccctggccgttggaggagcagttcatccctaaagggtttgaagccaaaagccgaagtagcaaaaatgagacgaaagggcggggcagcccaaaagagaagacgctggactgtggtcagattgtctgggggctggccttcagcccgtggccttccccacccagcaggaagctctgggcacgccaccacccccaagtgcccgatgtctcttgcctggttcttgctacgggactcaacgatgggcagatcaagatctgggaggtgcagacagggctcctgcttttgaatctttccggccaccaagatgtcgtgagagatctgagcttcacacccagtggcagtttgattttggtctccgcgtcacgggataagactcttcgcatctgggacctgaataaacacggtaaacagattcaagtgttatcgggccacctgcagtgggtttactgctgttccatctccccagactgcagcatgctgtgctctgcagctggagagaagtcggtctttctatggagcatgaggtcctacacgttaattcggaagctagagggccatcaaagcagtgttgtctcttgtgacttctcccccgactctgccctgcttgtcacggcttcttacgataccaatgtgattatgtgggacccctacaccggcgaaaggctgaggtcactccaccacacccaggttgaccccgccatggatgacagtgacgtccacattagctcactgagatctgtgtgcttctctccagaaggcttgtaccttgccacggtggcagatgacagactcctcaggatctgggccctggaactgaaaactcccattgcatttgctcctatgaccaatgggctttgctgcacattttttccacatggtggagtcattgccacagggacaagagatggccacgtccagttctggacagctcctagggtcctgtcctcactgaagcacttatgccggaaagcccttcgaagtttcctaacaacttaccaagtcctagcactgccaatccccaagaaaatgaaagagttcctcacatacaggactttttaagcaacaccacatcttgtgcttctttgtagcagggtaaatcgtcctgtcaaagggagttgctggaataatgggccaaacatctggtcttgcattgaaatagcatttctttgggattgtgaatagaatgtagcaaaaccagattccagtgtactagtcatggatctttctctccctggcatgtgaaagtcagtcttagaggaagagattccacttgcacggcaacagagccttacgttaaattttcagtccagttatgaacagcaagtgttgaactctttctgcttgttttgattcaaagtgcagttactgatgttgttttgattatgcaactaagtaggcctccagagcctctctagtggcagagcagctcacactccctccgctgggaacgatggcttctgcctagtacctatccttgtgtttctgatgcagtggtagcattggttcaagttctctcctgctgtggtcagagttgcttcgatgttggccaagtgcttttcttcttgggctcccttctgacctgcaggacagttttcctggagccatttggtatgaggtattaatttagcttaactaaattacaggggactcagaggccgtgctcctgaccgatccagacactattactggctttttttttttttttttaacaatggtgtgcatgtgcaggaaatgacaaatttgtatgtcagattatacaaggatgtattcttaaaccgcatgactattcagatggctactgagttatcagtggccatttattagcatcatatttatttgtattttctcaacagatgttaaggtacaactgtgtttttctcgattatctaaaaaccatagtacttaaattgaacagttgcaaagatgtcttaattgtgtaaagaattggtgtagtcatgactttagctgatactcttatgtacgagatctgtctctgctgtttaacttcattggattaatcagctggtttcaactctactgcgaaacaaaaatagctccttaaaagtactgttctccttcagtggcatgtagttatctaatcaagacacctcattcaaacaaaacctgccttaggaaaatttaatatattttaaattattttaaaagaaatacaacatcttattctttagctttcttaatcggtgctttatggaggccagtgtaacgttacatgactcgttgagaaagttgaggaatttcctctaccacctttgttgcttgaagaaaaacatgtcttttcaaaatgagaggctttcattgaagaaaagaaaaaaacaacagttaaaagc

SEQ ID NO: 199657 - DNA, 1353 bp, Homo sapiens
  Payload ID: 19395
  Gene Name: WD repeat and SOCS box containing 2
  Uniprot ID: Q9NYS7
  ENST ID: ENST00000441406
  CDS Start-End: 13-1278
tttcttgaggctatgcgggtagacagggagagcaggtttctcagggggacggggacaggcgaggctgtcgccgtagaggaaccgctgctgctggccgaactcaagcccgggcgcccccaccagtttgattggaagtccagctgtgaaacctggagcgtcgccttctccccagatggctcctggtttgcttggtctcaaggacactgcatcgtcaaactgatcccctggccgttggaggagcagttcatccctaaagggtttgaagccaaaagccgaagtagcaaaaatgagacgaaagggcggggcagcccaaaagagaagacgctggactgtggtcagattgtctgggggctggccttcagcccgtggccttccccacccagcaggaagctctgggcacgccaccacccccaagtgcccgatgtctcttgcctggttcttgctacgggactcaacgatgggcagatcaagatctgggaggtgcagacagggctcctgcttttgaatctttccggccaccaagatgtcgtgagagatctgagcttcacacccagtggcagtttgattttggtctccgcgtcacgggataagactcttcgcatctgggacctgaataaacacggtaaacagattcaagtgttatcgggccacctgcagtgggtttactgctgttccatctccccagactgcagcatgctgtgctctgcagctggagagaagtcggtctttctatggagcatgaggtcctacacgttaattcggaagctagagggccatcaaagcagtgttgtctcttgtgacttctcccccgactctgccctgcttgtcacggcttcttacgataccaatgtgattatgtgggacccctacaccggcgaaaggctgaggtcactccaccacacccaggttgaccccgccatggatgacagtgacgtccacattagctcactgagatctgtgtgcttctctccagaaggcttgtaccttgccacggtggcagatgacagactcctcaggatctgggccctggaactgaaaactcccattgcatttgctcctatgaccaatgggctttgctgcacattttttccacatggtggagtcattgccacagggacaagagatggccacgtccagttctggacagctcctagggtcctgtcctcactgaagcacttatgccggaaagcccttcgaagtttcctaacaacttaccaagtcctagcactgccaatccccaagaaaatgaaagagttcctcacatacaggactttttaagcaacaccacatcttgtgcttctttgtagcagggtaaatcgtcctgtcaaagggagttgctggaataatgggcca

SEQ ID NO: 199658 - DNA, 935 bp, Homo sapiens
  Payload ID: 19395
  Gene Name: WD repeat and SOCS box containing 2
  ENST ID: ENST00000543218
  CDS Start-End: 67-252
atgagggcccgcggcccggggggctgaggcgcccgccgcctgccgcgggggccgctcgcgtcctccatggaggccggagaggaaccgctgctgctggccgaactcaagcccgggcgcccccaccagtttgattggaagtccagctgtgaaacctggagcgtcgccttctccccagatggctcctggtttgcttggtctcaaggacactgcatcgtcaaactgatcccctggccgttggaggagcagttgtaaacagattcaagtgttatcgggccacctgcagtgggtttactgctgttccatctccccagactgcagcatgctgtgctctgcagctggagagaagtcggtctttctatggagcatgaggtcctacacgttaattcggaagctagagggccatcaaagcagtgttgtctcttgtgacttctcccccgactctgccctgcttgtcacggcttcttacgataccaatgtgattatgtgggacccctacaccggcgaaaggctgaggtcactccaccacacccaggttgaccccgccatggatgacagtgacgtccacattagctcactgagatctgtgtgcttctctccagaaggcttgtaccttgccacggtggcagatgacagactcctcaggatctgggccctggaactgaaaactcccattgcatttgctcctatgaccaatgggctttgctgcacattttttccacatggtggagtcattgccacagggacaagagatggccacgtccagttctggacagctcctagggtcctgtcctcactgaagcacttatgccggaaagcccttcgaagtttcctaacaacttaccaagtcctagcactgccaatccccaagaaaatgaaagagttcctcacatacaggactttttaagcaacaccacatcttgtgcttctttgtagca

SEQ ID NO: 199659 - DNA, 1328 bp, Homo sapiens
  Payload ID: 19395
  Gene Name: WD repeat and SOCS box containing 2
  ENST ID: ENST00000535496
  CDS Start-End: 108-1328
aagtgacaactccctctgggaatggatagtgtggctctttgccacagggagacagtggctttcctgtgtctgggtggtcagggagcaagggggtgtgtgtttgaagcatgttgtctcctgccccagaggaaccgctgctgctggccgaactcaagcccgggcgcccccaccagtttgattggaagtccagctgtgaaacctggagcgtcgccttctccccagatggctcctggtttgcttggtctcaaggacactgcatcgtcaaactgatcccctggccgttggaggagcagttcatccctaaagggtttgaagccaaaagccgaagtagcaaaaatgagacgaaagggcggggcagcccaaaagagaagacgctggactgtggtcagattgtctgggggctggccttcagcccgtggccttccccacccagcaggaagctctgggcacgccaccacccccaagtgcccgatgtctcttgcctggttcttgctacgggactcaacgatgggcagatcaagatctgggaggtgcagacagggctcctgcttttgaatctttccggccaccaagatgtcgtgagagatctgagcttcacacccagtggcagtttgattttggtctccgcgtcacgggataagactcttcgcatctgggacctgaataaacacggtaaacagattcaagtgttatcgggccacctgcagtgggtttactgctgttccatctccccagactgcagcatgctgtgctctgcagctggagagaagtcggtctttctatggagcatgaggtcctacacgttaattcggaagctagagggccatcaaagcagtgttgtctcttgtgacttctcccccgactctgccctgcttgtcacggcttcttacgataccaatgtgattatgtgggacccctacaccggcgaaaggctgaggtcactccaccacacccaggttgaccccgccatggatgacagtgacgtccacattagctcactgagatctgtgtgcttctctccagaaggcttgtaccttgccacggtggcagatgacagactcctcaggatctgggccctggaactgaaaactcccattgcatttgctcctatgaccaatgggctttgctgcacattttttccacatggtggagtcattgccacagggacaagagatggccacgtccagttctggacagctcctagggtcctgtcctcactgaagcacttatgccggaaagcccttcgaagtttcctaacaacttaccaagtcctagcactgccaatccccaagaaaatgaaagagttcctcacatacaggactttttaa

SEQ ID NO: 199660 - DNA, 795 bp, Homo sapiens
  Payload ID: 19395
  Gene Name: WD repeat and SOCS box containing 2
  ENST ID: ENST00000537945
  CDS Start-End: 60-795
caagaaccgcgggaagagcttgggcccaaagcaggaaagggaagcgctcgagttggggcatgttgtctcctgccccagaggaaccgctgctgctggccgaactcaagcccgggcgcccccaccagtttgattggaagtccagctgtgaaacctggagcgtcgccttctccccagatggctcctggtttgcttggtctcaaggacactgcatcgtcaaactgatcccctggccgttggaggagcagttcatccctaaagggtttgaagccaaaagccgaagtagcaaaaatgagacgaaagggcggggcagcccaaaagagaagacgctggactgtggtcagattgtctgggggctggccttcagcccgtggccttccccacccagcaggaagctctgggcacgccaccacccccaagtgcccgatgtctcttgcctggttcttgctacgggactcaacgatgggcagatcaagatctgggaggtgcagacagggctcctgcttttgaatctttccggccaccaagatgtcgtgagagatctgagcttcacacccagtggcagtttgattttggtctccgcgtcacgggataagactcttcgcatctgggacctgaataaacacggtaaacagattcaagtgttatcgggccacctgcagtgggtttactgctgttccatctccccagactgcagcatgctgtgctctgcagctggagagaagtcggtctttctatggagcatgaggtcctacacgttaattcggaagctagagggccatcaaagcagtgttgtct

SEQ ID NO: 199661 - DNA, 2503 bp, Homo sapiens
  Payload ID: 19395
  Gene Name: WD repeat and SOCS box containing 2
  Uniprot ID: Q9NYS7
  ENST ID: ENST00000544233
  CDS Start-End: 417-1001
gtctccgcccgcgcccaccgccatgtgacgggaagcagctgatggcctctccgggcggcggcggcggcctggccggggcgggcggcgcgggggcggcatgagggcccgcggcccggggggctgaggcgcccgccgcctgccgcgggggccgctcgcgtcctccatggaggccggagaggaaccgctgctgctggccgaactcaagcccgggcgcccccaccagtttgattggaagtccagctgtgaaacctggagcgtcgccttctccccagatggctcctggtttgcttggtctcaaggacactgcatcgtcaaactgatcccctggccgttggaggagcagttgtaaacagattcaagtgttatcgggccacctgcagtgggtttactgctgttccatctccccagactgcagcatgctgtgctctgcagctggagagaagtcggtctttctatggagcatgaggtcctacacgttaattcggaagctagagggccatcaaagcagtgttgtctcttgtgacttctcccccgactctgccctgcttgtcacggcttcttacgataccaatgtgattatgtgggacccctacaccggcgaaaggctgaggtcactccaccacacccaggttgaccccgccatggatgacagtgacgtccacattagctcactgagatctgtgtgcttctctccagaaggcttgtaccttgccacggtggcagatgacagactcctcaggatctgggccctggaactgaaaactcccattgcatttgctcctatgaccaatgggctttgctgcacattttttccacatggtggagtcattgccacagggacaagagatggccacgtccagttctggacagctcctagggtcctgtcctcactgaagcacttatgccggaaagcccttcgaagtttcctaacaacttaccaagtcctagcactgccaatccccaagaaaatgaaagagttcctcacatacaggactttttaagcaacaccacatcttgtgcttctttgtagcagggtaaatcgtcctgtcaaagggagttgctggaataatgggccaaacatctggtcttgcattgaaatagcatttctttgggattgtgaatagaatgtagcaaaaccagattccagtgtactagtcatggatctttctctccctggcatgtgaaagtcagtcttagaggaagagattccacttgcacggcaacagagccttacgttaaattttcagtccagttatgaacagcaagtgttgaactctttctgcttgttttgattcaaagtgcagttactgatgttgttttgattatgcaactaagtaggcctccagagcctctctagtggcagagcagctcacactccctccgctgggaacgatggcttctgcctagtacctatccttgtgtttctgatgcagtggtagcattggttcaagttctctcctgctgtggtcagagttgcttcgatgttggccaagtgcttttcttcttgggctcccttctgacctgcaggacagttttcctggagccatttggtatgaggtattaatttagcttaactaaattacaggggactcagaggccgtgctcctgaccgatccagacactattactggctttttttttttttttttaacaatggtgtgcatgtgcaggaaatgacaaatttgtatgtcagattatacaaggatgtattcttaaaccgcatgactattcagatggctactgagttatcagtggccatttattagcatcatatttatttgtattttctcaacagatgttaaggtacaactgtgtttttctcgattatctaaaaaccatagtacttaaattgaacagttgcaaagatgtcttaattgtgtaaagaattggtgtagtcatgactttagctgatactcttatgtacgagatctgtctctgctgtttaacttcattggattaatcagctggtttcaactctactgcgaaacaaaaatagctccttaaaagtactgttctccttcagtggcatgtagttatctaatcaagacacctcattcaaacaaaacctgccttaggaaaatttaatatattttaaattattttaaaagaaatacaacatcttattctttagctttcttaatcggtgctttatggaggccagtgtaacgttacatgactcgttgagaaagttgaggaatttcctctaccacctttgttgcttgaagaaaaacatgtcttttcaaaatgagaggctttcattgaagaaaagaaaaaaacaacagttaaaagcttttggctctctgtttcatttttttccattaagaaaaaaaaaagtccccttttaaaacaagcagggctgggtgtgacggcacatgcctgtaatcccagcactttgggaggctgaggtgggaggactgcttgagcccaggagttcaagatcagcctgggcaacagagtgagataagacccaatctttatttaaaaaataaataaataaatagcc

SEQ ID NO: 199662 - DNA, 393 bp, Homo sapiens
  Payload ID: 19395
  Gene Name: WD repeat and SOCS box containing 2
  ENST ID: ENST00000543186
  CDS Start-End: 110-280
ggataagactcttcgcatctgggacctgaataaacacggtaaacagattcaagtgttatcgggccacctgcagtgggtttactgctgttccatctccccagactgcagcatgctgtgctctgcagctggagagaagtcggtctttctatggagcatgaggtcctacacgttaattcggaagctagagggccatcaaagcagtgttgtctcttgtgacttctcccccgactctgccctgcttgtcacggcttcttacgataccaatccacacccaggttgaccccgccatggatgacagtgacgtccacattagctcactgagatctgtgtgcttctctccagaaggcttgtaccttgccacggtggcagatgacagactcctcaggatctggg

SEQ ID NO: 199663 - DNA, 3392 bp, Homo sapiens
  Payload ID: 19396
  Gene Name: WD repeat containing planar cell polarity effector
  Uniprot ID: O95876
  ENST ID: ENST00000272321
  CDS Start-End: 529-2769
actgcgctctgcgccgattgcaaagtagtccctgaggatgagcccctgtgattggaggacgacaacaaacggatggtttgggctcaggaggaaaggacctgcctgatggagcccggcaattggcgggagagatagcgtgtgtaactctagggaggggagaatcaccccttagcgacatcacccccacgcgcgtgactgagactgcatcctcccatgagggtaaacgtgggaggtaaagagaccttccgctgcgtaaagctggatcgacccggaaacaaaatcttttaaaaaacgattgacactctggaggggcgggggaattgataagttgggacgaccggacagcttctcaggttgctaagcgacgaggcgggagcgcacgcacaccctggctgctttgtagcacctgaggaaactgtggcggcggcggcggcgtcctggagacccaagagaccaagcgagcgtgtcgctccctctcgggtccgaggacctagcctaggaaccttctgcccggggtagtgtctggtgatgaggcgagagttttgctgggacgcctactccaaagcggccgggagtcgcgcttcttccccactcccgagacaggatagagattccttctgccatcagatgtctttctgcttgactgaactgcacctgtggtctttgaagaataccttacacattgcggatagagacattgggatctaccagtattatgacaagaaagatccaccagcgacagagcatggtaacttagaaaagaagcagaagctggcagagtcacgagattatccttggacgctcaaaaacagacgcccagaaaaactccgagactcgctcaaagagttggaggagctgatgcaaaacagtcggtgtgtgctgagcaaatggaagaacaaatatgtctgtcagctcctttttggttcaggtgtgctggtgtctctaagcctttctgggccgcagctggagaaagtggtgattgacagaagcctggtggggaagctcatctcagacaccatcagtgatgctcttctcacagacagttttatcatcttatcatttttggcacaaaacaaactatgttttattcagtttaccaagaagatggagtcttctgatgtaaacaaaagactggaaaaactctcagccttggattataagattttctattatgaaatacccggcccaataaacaagacaacagagcgacatctagctatcaactgtgttcatgatagagttgtttgctggtggccactggtcaacgatgatgcttggccttgggcccccatttcttctgagaaggacagagccaatctactcctcctgggttatgctcaaggaagactagaggttctgagttctgtccgcacagaatgggacccactggatgttcgctttggcaccaaacagccttatcaggtgttcacagtggagcactccgtaagtgtagacaaagagcccatggctgacagctgcatctatgaatgcattcggaataaaatccagtgtgtgtcagtcaccagaataccactaaagtcaaaggccatcagctgctgcaggaatgttactgaagacaaactgattctgggctgtgaagattcttcgctaattctttatgaaactcaccgtagagtgactctcttagcacagactgaacttttgccttcattaataagctgccacccaagtggtgccattctgctagttggcagcaaccaaggggagttgcaaatttttgatatggctctatcccctattaacatccaactgttggctgaagaccgcttacccagggagactctgcaattcagtaaattatttgatgcctccagcagtcttgttcaaatgcaatggatagctcctcaggttgtttctcagaagggtgaaggtagtgatatctatgatctcctcttcctcaggtttgaaagaggacctttgggtgtgctgttgtttaaactaggcgtcttcactcgaggacagctgggcctgatagacatcatcttccagtacattcactgtgatgagatctatgaggcaataaacatcctgagcagcatgaactgggacactctgggccaccagtgctttatcagcatgagcgccattgtaaaccatcttcttagacagaagctcactccagagagagaagcacagcttgagacaagccttggaaccttctatgctccaacaagaccacttctggattccactatattggaatatagagatcaaatcagcaaatatgcaaggagattcttccatcacttgctcaggtaccagaggtttgaaaaggcatttctcctagctgttgacgttggtgctcgtgacctctttatggatattcattaccttgcactagataaaggtgaattggcactagctgaagtggcaagaaaaagagctagtgacattgatgcagaatcaataacctctggggttgaactcctgggacccttggacagaggggatatgctaaatgaagcatttattggcctgtctttagcacctcaaggagaagactcatttccagataacctccctccctcttgcccaacccacagacatattttacaacaaagaatactgaatggctcttctaacagacaaataattgacagaaggaatgaacttgaaaaagacatctgttctggatttttgatgactaatacctgtaatgcagaagacggagaactgagagaagacggcagagaacaggaaatcagagatggtggttctctcaaaatgattcactttggtctggtgtaaacattaagaaaaaaagaaaactgccttcttcatatctaaacttttcatggcctgatacagacttaaaatcccccgtgtggatttttaacaagagacagtatgaatcatataaattagttaagagttttgagttgagtgtttgttttcaaaataaagttttattatttcaaaaacatgcagcataacagcaaagtgatcgtaagtaaaagtcttcaacctacttattttcaataatgtaaaattttgaaagtgtcttaaattgtatgttaattaggtgctacaaaaatagaatatttaaactttgttctcccaggtactttaaaaaaggggcagtagggggcaggcatagtgctcatgcctgtagtcccagtgctttaggaggccaaggctgaaggatcacttgagcccaggagttcaagactagcctgtgcaacatagtgaaacgctgtctctagaaaaaattttaaaaattagccaggcatggtggtacatgcttgtgaagctgaggcagaagaattgcttgagcccaggagttcaaggctacagtgagctgtgatcgcgccactgcactctaacctgggcaacagagagtgaccctgtctccaaaaaaaaaaaaaaaaaaa

SEQ ID NO: 199664 - DNA, 2063 bp, Homo sapiens
  Payload ID: 19396
  Gene Name: WD repeat containing planar cell polarity effector
  Uniprot ID: O95876
  ENST ID: ENST00000398544
  CDS Start-End: 125-1888
aaattttttaaataaatagactggtagagaacactgatcagtatcccctaataaatccactttatcctcggatggtttctatcatgtaaacataggattaaactcttagcacaaataaaatggaatgttttcgtctctacattcagctcttctcacagacagttttatcatcttatcatttttggcacaaaacaaactatgttttattcagtttaccaagaagatggagtcttctgatgtaaacaaaagactggaaaaactctcagccttggattataagattttctattatgaaatacccggcccaataaacaagacaacagagcgacatctagctatcaactgtgttcatgatagagttgtttgctggtggccactggtcaacgatgatgcttggccttgggcccccatttcttctgagaaggacagagccaatctactcctcctgggttatgctcaaggaagactagaggttctgagttctgtccgcacagaatgggacccactggatgttcgctttggcaccaaacagccttatcaggtgttcacagtggagcactccgtaagtgtagacaaagagcccatggctgacagctgcatctatgaatgcattcggaataaaatccagtgtgtgtcagtcaccagaataccactaaagtcaaaggccatcagctgctgcaggaatgttactgaagacaaactgattctgggctgtgaagattcttcgctaattctttatgaaactcaccgtagagtgactctcttagcacagactgaacttttgccttcattaataagctgccacccaagtggtgccattctgctagttggcagcaaccaaggggagttgcaaatttttgatatggctctatcccctattaacatccaactgttggctgaagaccgcttacccagggagactctgcaattcagtaaattatttgatgcctccagcagtcttgttcaaatgcaatggatagctcctcaggttgtttctcagaagggtgaaggtagtgatatctatgatctcctcttcctcaggtttgaaagaggacctttgggtgtgctgttgtttaaactaggcgtcttcactcgaggacagctgggcctgatagacatcatcttccagtacattcactgtgatgagatctatgaggcaataaacatcctgagcagcatgaactgggacactctgggccaccagtgctttatcagcatgagcgccattgtaaaccatcttcttagacagaagctcactccagagagagaagcacagcttgagacaagccttggaaccttctatgctccaacaagaccacttctggattccactatattggaatatagagatcaaatcagcaaatatgcaaggagattcttccatcacttgctcaggtaccagaggtttgaaaaggcatttctcctagctgttgacgttggtgctcgtgacctctttatggatattcattaccttgcactagataaaggtgaattggcactagctgaagtggcaagaaaaagagctagtgacattgatgcagaatcaataacctctggggttgaactcctgggacccttggacagaggggatatgctaaatgaagcatttattggcctgtctttagcacctcaaggagaagactcatttccagataacctccctccctcttgcccaacccacagacatattttacaacaaagaatactgaatggctcttctaacagacaaataattgacagaaggaatgaacttgaaaaagacatctgttctggatttttgatgactaatacctgtaatgcagaagacggagaactgagagaagacggcagagaacaggaaatcagagatggtggttctctcaaaatgattcactttggtctggtgtaaacattaagaaaaaaagaaaactgccttcttcatatctaaacttttcatggcctgatacagacttaaaatcccccgtgtggatttttaacaagagacagtatgaatcatataaattagttaagagttttgagttgagtgtttgttttcaaaataaagttttattatttcaaaaaca

SEQ ID NO: 199665 - DNA, 2466 bp, Homo sapiens
  Payload ID: 19396
  Gene Name: WD repeat containing planar cell polarity effector
  ENST ID: ENST00000409199
  CDS Start-End: 198-1862
atctctgcaagacaaaagtcagaaatggcttccctggggactgagagcccatagttctcttcccactgctgcttctacccttttgttttgcttggctctctaaaattgtctcagctccagctcttctcacagacagttttatcatcttatcatttttggcacaaaacaaactatgttttattcagtttaccaagaagatggagtcttctgatgtaaacaaaagactggaaaaactctcagccttggattataagattttctattatgaaatacccggcccaataaacaagacaacagagcgacatctagctatcaactgtgttcatgatagagttgtttgctggtggccactggtcaacgatgatgcttggccttgggcccccatttcttctgagaaggacagagccaatctactcctcctgggttatgctcaaggaagactagaggttctgagttctgtccgcacagaatgggacccactggatgttcgctttggcaccaaacagccttatcaggtgttcacagtggagcactccgtaagtgtagacaaagagcccatggctgacagctgcatctatgaatgcattcggaataaaatccagtgtgtgtcagtcaccagaataccactaaagtcaaaggccatcagctgctgcaggaatgttactgaagacaaactgattctgggctgtgaagattcttcgctaattctttatgaaactcaccgtagagtgactctcttagcacagactgaacttttgccttcattaataagctgccacccaagtggtgccattctgctagttggcagcaaccaaggggagttgcaaatttttgatatggctctatcccctattaacatccaactgttggctgaagaccgcttacccagggagactctgcaattcagtaaattatttgatgcctccagcagtcttgttcaaatgcaatggatagctcctcaggttgtttctcagaagggtgaaggtagtgatatctatgatctcctcttcctcaggtttgaaagaggacctttgggtgtgctgttgtttaaactaggcgtcttcactcgaggacagctgggcctgatagacatcatcttccagtacattcactgtgatgagatctatgaggcaataaacatcctgagcagcatgaactgggacactctgggccaccagtgctttatcagcatgagcgccattgtaaaccatcttcttagacagaagctcactccagagagagaagcacagcttgagacaagccttggaaccttctatgctccaacaagaccacttctggattccactatattggaatatagagatcaaatcagcaaatatgcaaggagattcttccatcacttgctcaggtaccagaggtttgaaaaggcatttctcctagctgttgacgttggtgctcgtgacctctttatggatattcattaccttgcactagataaaggtgaattggcactagctgaagtggcaagaaaaagagctagtgacattgatgcagaatcaataacctctggggttgaactcctgggacccttggacagaggggatatgctaaatgaagcatttattggcctgtctttagcacctcaaggagaagactcatttccagataacctccctccctcttgcccaacccacagacatattttacaacaaagaatactgaatggctcttctaacagacaaataattgacagaaggaatgaacttgaaaaagacatctgttctggatttttgatgactaatacctgtaatgcagaagacggagaactgagagaagacggcagagaacaggaaatcagagatggtggttctctcaaaatgattcactttggtctggtgtaaacattaagaaaaaaagaaaactgccttcttcatatctaaacttttcatggcctgatacagacttaaaatcccccgtgtggatttttaacaagagacagtatgaatcatataaattagttaagagttttgagttgagtgtttgttttcaaaataaagttttattatttcaaaaacatgcagcataacagcaaagtgatcgtaagtaaaagtcttcaacctacttattttcaataatgtaaaattttgaaagtgtcttaaattgtatgttaattaggtgctacaaaaatagaatatttaaactttgttctcccaggtactttaaaaaaggggcagtagggggcaggcatagtgctcatgcctgtagtcccagtgctttaggaggccaaggctgaaggatcacttgagcccaggagttcaagactagcctgtgcaacatagtgaaacgctgtctctagaaaaaattttaaaaattagccaggcatggtggtacatgcttgtgaagctgaggcagaagaattgcttgagcccaggagttcaaggctacagtgagctgtgatcgcgccactgcactctaacctgggcaacagagagtgaccctgtctcc

SEQ ID NO: 199666 - DNA, 5408 bp, Homo sapiens
  Payload ID: 19396
  Gene Name: WD repeat containing planar cell polarity effector
  ENST ID: ENST00000409120
  CDS Start-End: 3552-5216
ggctccatgaggccagggagggcaagggcattgtctgttttgttcattgctgtattctcagcacttggaacagtgcctggctcatatgatatactaaatatatatattttggggtaaatgagtgaatttatgaaaaagtggctgtacctattctttgagaaggattctgaaggaatgtccaacctcacttggcaggatccatagtctccaaatcactgctcctgcctccatgcatagatcagttatctaaccagtgtatgcatgcttttggctccatgacactcacccctctgaatcttttccggcataagttccctcatttacttactctcacaggctgtactttccttcttcatctcataaaagtgggtttttaaaagaattttataacaaacgctcatacatagaaaaagcagtttttgttaggatatgagatttatttcatgagagcagtggtgagaacagaaaacaaggtaaaagaaattagacacttggaaaaattaaattccagagttctgaaggaacttgcaaatattttggagataatatccttgtgaaatcatagccaatgggagaggcaacaaaagattgcattttttactaattgtaactcacctgagtgtcacacatctaacattgagtccaacctgggttacaaggtttttaaaaagacaaatgtgctcagagttggttaacaacgtagtgaggatatttgttatttgatataggattcaaagggatgaacgtcatggaggcaagagcatgcatacattggttagataactaatctatgcctggaggcaggagcagtgatttggagactatggacagcatcctacaattaatggttgaataataataataattgcaaacactgtgtgccaggcattattctaaatgttttttgtaaaaagttatttaatcctcatcctatgaagtagatactatcatgtttattttcaggtgaggaaatgaagggacagagaggttaaattacactgtcagtgtcacacagctagtaacaagtagccaatattgattttattctgatttcagagtctgtgctcttaaccactgtgttattatccttgaatatttgaggtgggtgctactgaagaataattggggtgactgttgaagttgtagggagtcagttgtatcctcagcctcaatctcaagagtcaccacctccttctcagtcagactctgagtctacccagtatgtacttctataataggtctggtaaactggtaacagcactttattagttatttgctttgatctcgacctctttctattaacctactttatttaacctactttaagaattatatttgatttctttttgagcccttaaatttaatttagtgcttggcatataatgaatattcagtttttggtgaattaaaaaaatgaatgaaggatctttaaattgattacaactgacccatggtagaatagttttcctgtgaagcagtgagctcctgatcactggcaatattcaagcatgggctagatgcttgaagggatgctgcagaaggaacatccatgtcatatgaaaatggaaaattagaccaagtttttttttttttgtaactgcaaattatctggtgttccattgagttagttgtgattctttctccaaacatttgttgagcacctactgtattcctggcactacaaagataaatgtggccaagccaacatccataaggagctggtagtcagtgagtaattaggaaaagaagtgcttaagagtataggtgtaaagctttagtagataaaaataaatagaaaagggtagattttagagatgttttgaataaaggaggaaggggagaagtagatataaaagatgtccctaaaattgcccgtctgagaaggaatttggggagttaagaccacctgctgtgttgctatggggggattcttcaaaagggaaatatcaccatttgccattaaggtatgtggtagggctgggtgtaattcagtagagattaagttgtgaagcattttaaatttcttgaaacaaatgtgccttctcttagtagtctccaaaacccataaagatgattaagtaccctccccccaactctctgcccctgtagaggtattaacgcaaaatggaataatctgttaagtcaaataaaggtaagctttctggtgactaggacaagagttctaacagtaaatgcaaagcaactcttcagtttcttttctgaatcatgtgcctggaatctgttaggcagtgaggaatggtggtctgtctttatattaccctggtccctcatgctgcttatctttcacacatgtccaaatatgtctcaacacagaatcatcctctctagctgggacatgatgcctaggtgggtgggggattcccctgttttgtttaaaatcaaagttgtctttgaatttggctagcatgtttgtgattagtttactgacaattggttttttttcttcttataccatatgttattccatgattcatcagctttgagtctgttgccttgaaggtgaaacaatttcttccaatgttgatatttcataatctcatagataacaagcatacgcatatgcatagtcctttcagaagttttaaacatttggagatgaatgaattatgctgccacaaatggaaaggagcagtataaaattataatggtgatatccaatcatcttttgttgagtggttttgtgaacactgacattgataaagcctggatgctctactatattcctttatttctccttgtgaaattgtttctgatatgtgttgtttatgattttaaaaatttaacattttacttaattgccttgatttacatgtattttaacattttagactgacaagatctttatttttagaagtaaatagtgtttaacttccaaataaatgcataacattagctgtttatattgtaatagtggcatctcttctatatttaatgtgtagcaatgactattcaaacctcaagaaatgttttagtttataatagtaatttttcaaaataatagaatacattacattttctgaatccaaaacaaagcagttatgtctgcatatgtgctttctaagtatttagaagattagatttctaataaacatggcctaaattaggtttctgcatgtagctttaatcaatgcatttattgtgttgcatcctttagccacctttctctttttactcacaatgtcagtaattgtttttcagtgaagaaaatctttataattttgtagtgtagatgcatgtgtaaaatatctgtataagttgtatatttggagagaggttttttaaagattctaaatcacagcatgtcttcctccctctctcccccacttacctggttttagctcctttttggttcaggtgtgctggtgtctctaagcctttctgggccgcagctggagaaagtggtgattgacagaagcctggtggggaagctcatctcagacaccatcagtgatgctcttctcacagacagttttatcatcttatcatttttggcacaaaacaaactatgttttattcagtttaccaagaagatggagtcttctgatgtaaacaaaagactggaaaaactctcagccttggattataagattttctattatgaaatacccggcccaataaacaagacaacagagcgacatctagctatcaactgtgttcatgatagagttgtttgctggtggccactggtcaacgatgatgcttggccttgggcccccatttcttctgagaaggacagagccaatctactcctcctgggttatgctcaaggaagactagaggttctgagttctgtccgcacagaatgggacccactggatgttcgctttggcaccaaacagccttatcaggtgttcacagtggagcactccgtaagtgtagacaaagagcccatggctgacagctgcatctatgaatgcattcggaataaaatccagtgtgtgtcagtcaccagaataccactaaagtcaaaggccatcagctgctgcaggaatgttactgaagacaaactgattctgggctgtgaagattcttcgctaattctttatgaaactcaccgtagagtgactctcttagcacagactgaacttttgccttcattaataagctgccacccaagtggtgccattctgctagttggcagcaaccaaggggagttgcaaatttttgatatggctctatcccctattaacatccaactgttggctgaagaccgcttacccagggagactctgcaattcagtaaattatttgatgcctccagcagtcttgttcaaatgcaatggatagctcctcaggttgtttctcagaagggtgaaggtagtgatatctatgatctcctcttcctcaggtttgaaagaggacctttgggtgtgctgttgtttaaactaggcgtcttcactcgaggacagctgggcctgatagacatcatcttccagtacattcactgtgatgagatctatgaggcaataaacatcctgagcagcatgaactgggacactctgggccaccagtgctttatcagcatgagcgccattgtaaaccatcttcttagacagaagctcactccagagagagaagcacagcttgagacaagccttggaaccttctatgctccaacaagaccacttctggattccactatattggaatatagagatcaaatcagcaaatatgcaaggagattcttccatcacttgctcaggtaccagaggtttgaaaaggcatttctcctagctgttgacgttggtgctcgtgacctctttatggatattcattaccttgcactagataaaggtgaattggcactagctgaagtggcaagaaaaagagctagtgacattgatgcagaatcaataacctctggggttgaactcctgggacccttggacagaggggatatgctaaatgaagcatttattggcctgtctttagcacctcaaggagaagactcatttccagataacctccctccctcttgcccaacccacagacatattttacaacaaagaatactgaatggctcttctaacagacaaataattgacagaaggaatgaacttgaaaaagacatctgttctggatttttgatgactaatacctgtaatgcagaagacggagaactgagagaagacggcagagaacaggaaatcagagatggtggttctctcaaaatgattcactttggtctggtgtaaacattaagaaaaaaagaaaactgccttcttcatatctaaacttttcatggcctgatacagacttaaaatcccccgtgtggatttttaacaagagacagtatgaatcatataaattagttaagagttttgagttgagtgtttgttttcaaaataaagttttattatttcaaaaacatgcagcataacagcaaa

SEQ ID NO: 199667 - DNA, 2122 bp, Homo sapiens
  Payload ID: 19396
  Gene Name: WD repeat containing planar cell polarity effector
  ENST ID: ENST00000409354
  CDS Start-End: 1-1209
tattatgaaatacccggcccaataaacaagacaacagagcgacatctagctatcaactgtgttcatgatagagttgtttgctggtggccactggtcaacgatgatgcttggccttgggcccccatttcttctgagaaggacagagccaatctactcctcctgggttatgctcaaggaagactagaggttctgagttctgtccgcacagaatgggacccactggatgttcgctttggcaccaaacagccttatcaggtgttcacagtggagcactccgtaagtgtagacaaagagcccatggctgacagctgcatctatgaatgcattcggaataaaatccagtgtgtgtcagtcaccagaataccactaaagtcaaaggccatcagctgctgcaggaatgttactgaagacaaactgattctgggctgtgaagattcttcgctaattctttatgaaactcaccgtagagtgactctcttagcacagactgaacttttgccttcattaataagctgccacccaagtggtgccattctgctagttggcagcaaccaaggggagttgcaaatttttgatatggctctatcccctattaacatccaactgttggctgaagaccgcttacccagggagactctgcaattcagtaaattatttgatgcctccagcagtcttgttcaaatgcaatggatagctcctcaggttgtttctcagaagggtgaaggtagtgatatctatgatctcctcttcctcaggtttgaaagaggacctttgggtgtgctgttgtttaaactaggcgtcttcactcgaggacagctgggcctgatagacatcatcttccagtacattcactgtgatgagatctatgaggcaataaacatcctgagcagcatgaactgggacactctgggccaccagtgctttatcagcatgagcgccattgtaaaccatcttcttagacagaagctcactccagagagagaagcacagcttgagacaagccttggaaccttctatgctccaacaagaccacttctggattccactatattggaatatagagatcaaatcagcaaatatgcaaggagattcttccatcacttgctcaggtaccagaggtttgaaaaggcatttctcctagctgttgacgttggtgctcgtgacctctttatgaactcctgggacccttggacagaggggatatgctaaatgaagcatttattggcctgtctttagcacctcaaggagaagactcatttccagataacctccctccctcttgcccaacccacagacatattttacaacaaagaatactgaatggctcttctaacagacaaataattgacagaaggaatgaacttgaaaaagacatctgttctggatttttgatgactaatacctgtaatgcagaagacggagaactgagagaagacggcagagaacaggaaatcagagatggtggttctctcaaaatgattcactttggtctggtgtaaacattaagaaaaaaagaaaactgccttcttcatatctaaacttttcatggcctgatacagacttaaaatcccccgtgtggatttttaacaagagacagtatgaatcatataaattagttaagagttttgagttgagtgtttgttttcaaaataaagttttattatttcaaaaacatgcagcataacagcaaagtgatcgtaagtaaaagtcttcaacctacttattttcaataatgtaaaattttgaaagtgtcttaaattgtatgttaattaggtgctacaaaaatagaatatttaaactttgttctcccaggtactttaaaaaaggggcagtagggggcaggcatagtgctcatgcctgtagtcccagtgctttaggaggccaaggctgaaggatcacttgagcccaggagttcaagactagcctgtgcaacatagtgaaacgctgtctctagaaaaaattttaaaaattagccaggcatggtggtacatgcttgtgaagctgaggcagaagaattgcttgagcccaggagttcaaggctacagtgagctgtgatcgcgccactgcactctaacctgggcaacagagagtgaccctgtctccaaaaaaaaaaaaaaaaaaa

SEQ ID NO: 199668 - DNA, 3544 bp, Homo sapiens
  Payload ID: 19396
  Gene Name: WD repeat containing planar cell polarity effector
  Uniprot ID: O95876
  ENST ID: ENST00000409562
  CDS Start-End: 248-2104
cttttaaaaaacgattgacactctggaggggcgggggaattgataagttgggacgaccggacagcttctcaggttgctaagcgacgaggcgggagcgcacgcacaccctggctgctttgtagcacctgaggaaactgtggcggcggcggcggcgtcctggagacccaagagaccaagcgagcgtgtcgctccctctcgggtccgaggacctagcctaggaaccttctgcccggggtagtgtctggtgatgaggcgagagttttgctgggacgcctactccaaagcggccgggagtcgcgcttcttccccactcccgagacaggatagagattccttctgccatcagatgtctttctgcttgactgaactgcacctgtggtctttgaagaataccttacacattgcggatagagacattgggatctaccagtattatgacaagaaagatccaccagcgacagagcatggtaacttagaaaagaagcagaagctggcagagtcacgagattatccttggacgctcaaaaacagacgcccagaaaaactccgagactcgctcaaagagttggaggagctgatgcaaaacagtcggtgtgtgctgagcaaatggaagaacaaatatgtctgtcagctcctttttggttcaggtgtgctggtgtctctaagcctttctgggccgcagctggagaaagtggtgattgacagaagcctggtggggaagctcatctcagacaccatcagtgatgctcttctcacagacagttttatcatcttatcatttttggcacaaaacaaactatgttttattcagtttaccaagaagatggagtcttctgatgtaaacaaaagactggaaaaactctcagccttggattataagattttctattatgaaatacccggcccaataaacaagacaacagagcgacatctagctatcaactgtgttcatgatagagttgtttgctggtggccactggtcaacgatgatgcttggccttgggcccccatttcttctgagaaggacagagccaatctactcctcctgggttatgctcaaggaagactagaggttctgagttctgtccgcacagaatgggacccactggatgttcgctttggcaccaaacagccttatcaggtgttcacagtggagcactccgtaagtgtagacaaagagcccatggctgacagctgcatctatgaatgcattcggaataaaatccagtgtgtgtcagtcaccagaataccactaaagtcaaaggccatcagctgctgcaggaatgttactgaagacaaactgattctgggctgtgaagattcttcgctaattctttatgaaactcaccgtagagtgactctcttagcacagactgaacttttgccttcattaataagctgccacccaagtggtgccattctgctagttggcagcaaccaaggggagttgcaaatttttgatatggctctatcccctattaacatccaactgttggctgaagaccgcttacccagggagactctgcaattcagtaaattatttgatgcctccagcagtcttgttcaaatgcaatggatagctcctcaggttgtttctcagaagggtgaaggtagtgatatctatgatctcctcttcctcaggtttgaaagaggacctttgggtgtgctgttgtttaaactaggcgtcttcactcgaggacagctgggcctgatagacatcatcttccagtacattcactgtgatgagatctatgaggcaataaacatcctgagcagcatgaactgggacactctgggccaccagtgctttatcagcatgagcgccattgtaaaccatcttcttagacagaagctcactccagagagagaagcacagcttgagacaagccttggaaccttctatgctccaacaagaccacttctggattccactatattggaatatagagatcaaatcagcaaatatgcaaggagattcttccatcacttgctcaggtaccagaggtttgaaaaggcatttctcctagctgttgacgttggtgctcgtgacctctttatggcatcatgctacctgacttcaaactacactacaaggctacagtaaccaaaacagcatggtactggtcccaaaacagagatatagaccaatggaacagaacagagccctcagaaataatgccgcatatctacaactatctgatctttgacaaacctgacaaaaacaagaaatggggaaaggattccctatttaataaatggtgctgggaaaactggctagccatatgtagaaagctgaaactggatcccttccttacaccttatacaaaaattaattcaagatggattaaagacttaaatgttagacctaaaaccataaaagccctagaagaaaacctaggcaataccattcaggacacaggcatgggcaaggacttcatgtctaaaacaccaaaagcaatggcaacaaaagccaaaattgacaaatgggatctaattaaactaaagagcttctgcacagcaaaagaaactaccatcagagtggacaggcaacctacagaatgggagaaaatttttgcaacctactcatctgacaaagggctaatatccagaatctacaaagaactcaaataaatttacaagaaaaaaacaaacaaccccatccaaaagtgggcaaaggatatgaacagacacttctcaaaagaagacatttatgcagccaaaaaacacatgaaaaaatgctcatcatcactggccatcagagaaatgcaaatcaaaaccacaatgagataccgtctcacaccagttagaatggtgatcattaaaaagtcagcaaacaacatgtgctggagaggatgtggagaaataggaacacttttacactgttggtgggactgtaaactagttcaaccattgtggaagtcagtgtggcgattcctcagggatctggaactagaaataccatttgacccagccatcccattactgggtatatacccaaaggattataaatcatgctgctataaagacacatgcacacgtatgtttattgcagcactattcacaatagctaagacttggaaccaacctaagtgtccaacaatgatagactgggttaagaaaatgtggcacatatacaccatggaatactatgcagccataaaaaaggatgagttcatgtcctttgtagggacatggatgaagctggaaaccatcattctcagcaaactaccgcaaggacaaaaaaccaaacaccatatgttctcactcataggtgggaatggaacaatgagaacacatggacacaagaaggggaacatcacacaccggggactgttgtgtggtgggggtaggggggagggatagcattaggagatatacctaatgctaaatgacgagttaatgggtgcagcacaccaccatggcacatgtatacatatgtaacaaacctgcacgttgtgcacatgtaccctaaaacttaaagtaaaataaaatttgaaaaaagaatatagaatcaatcaaaaaattcaaaaaaaaaaaaaaaaaa

SEQ ID NO: 199669 - DNA, 782 bp, Homo sapiens
  Payload ID: 19396
  Gene Name: WD repeat containing planar cell polarity effector
  ENST ID: ENST00000431065
  CDS Start-End: 529-782
actgcgctctgcgccgattgcaaagtagtccctgaggatgagcccctgtgattggaggacgacaacaaacggatggtttgggctcaggaggaaaggacctgcctgatggagcccggcaattggcgggagagatagcgtgtgtaactctagggaggggagaatcaccccttagcgacatcacccccacgcgcgtgactgagactgcatcctcccatgagggtaaacgtgggaggtaaagagaccttccgctgcgtaaagctggatcgacccggaaacaaaatcttttaaaaaacgattgacactctggaggggcgggggaattgataagttgggacgaccggacagcttctcaggttgctaagcgacgaggcgggagcgcacgcacaccctggctgctttgtagcacctgaggaaactgtggcggcggcggcggcgtcctggagacccaagagaccaagcgagcgtgtcgctccctctcgggtccgaggacctagcctaggaaccttctgcccggggtagtgtctggtgatgaggcgagagttttgctgggacgcctactccaaagcggccgggagtcgcgcttcttccccactcccgagacaggatagagattccttctgccatcagatgtctttctgcttgactgaactgcacctgtggtctttgaagaataccttacacattgcggatagagacattgggatctaccagtattatgacaagaaagatccaccagcacgagattatccttggacgctcaaaaacagacgcccagaaaaact

SEQ ID NO: 199670 - DNA, 576 bp, Homo sapiens
  Payload ID: 19396
  Gene Name: WD repeat containing planar cell polarity effector
  ENST ID: ENST00000418148
  CDS Start-End: 1-397
gcgagagttttgctgggacgcctactccaaagcggccgggagtcgcgcttcttccccactcccgagacaggatagagattccttctgccatcagatgtctttctgcttgactgaactgcacctgtggtctttgaagaataccttacacattgcggatagagacattgggatctaccagtattatgacaagaaagatccaccagcgacagagcatggtaacttagaaaagaagcagaagctggcagagtcacgagattatccttggacgctcaaaaacagacgcccagaaaaactccgagactcgctcaaagagttggaggagctgatgcaaaacagtcggtgtgtgctgagcaaatggaagaacaaatatgtctgtcaggtgtgctggtgtctctaagcctttctgggccgcagctggagaaagtggtgattgacagaagcctggtggggaagctcatctcagacaccatcagtgatgctcttctcacagacagttttatcatcttatcatttttggcacaaaacaaactatgttttattcagtttaccaagaagatggagtcttctgatgtaaac

SEQ ID NO: 199671 - DNA, 2883 bp, Homo sapiens
  Payload ID: 19396
  Gene Name: WD repeat containing planar cell polarity effector
  ENST ID: ENST00000417238
  CDS Start-End: 248-388
cttttaaaaaacgattgacactctggaggggcgggggaattgataagttgggacgaccggacagcttctcaggttgctaagcgacgaggcgggagcgcacgcacaccctggctgctttgtagcacctgaggaaactgtggcggcggcggcggcgtcctggagacccaagagaccaagcgagcgtgtcgctccctctcgggtccgaggacctagcctaggaaccttctgcccggggtagtgtctggtgatgaggcgagagttttgctgggacgcctactccaaagcggccgggagtcgcgcttcttccccactcccgagacagaaaaccatgataaattctggacaaaatacagaaaacccacaactctctgaaggcactggagagtgaccatagcaggcataaactgaaaggaagtctatacttggaaagagggagtatcaccgaataaacaaaaatgaggttttgttgccagcagaccttcactgcaagaaatgctaaaggaaattcttcaggctgaaaggaaatgataccagatggaaacttggatctgaggaatggagaactccagaaatggatagagattccttctgccatcagatgtctttctgcttgactgaactgcacctgtggtctttgaagaataccttacacattgcggatagagacattgggatctaccagtattatgacaagaaagatccaccagcgacagagcatggtaacttagaaaagaagcagaagctggcagagtcacgagattatccttggacgctcaaaaacagacgcccagaaaaactccgagactcgctcaaagagttggaggagctgatgcaaaacagtcggtgtgtgctgagcaaatggaagaacaaatatgtctgtcagctcctttttggttcaggtgtgctggtgtctctaagcctttctgggccgcagctggagaaagtggtgattgacagaagcctggtggggaagctcatctcagacaccatcagtgatgctcttctcacagacagttttatcatcttatcatttttggcacaaaacaaactatgttttattcagtttaccaagaagatggagtcttctgatgtaaacaaaagactggaaaaactctcagccttggattataagattttctattatgaaatacccggcccaataaacaagacaacagagcgacatctagctatcaactgtgttcatgatagagttgtttgctggtggccactggtcaacgatgatgcttggccttgggcccccatttcttctgagaaggacagagccaatctactcctcctgggttatgctcaaggaagactagaggttctgagttctgtccgcacagaatgggacccactggatgttcgctttggcaccaaacagccttatcaggtgttcacagtggagcactccgtaagtgtagacaaagagcccatggctgacagctgcatctatgaatgcattcggaataaaatccagtgtgtgtcagtcaccagaataccactaaagtcaaaggccatcagctgctgcaggaatgttactgaagacaaactgattctgggctgtgaagattcttcgctaattctttatgaaactcaccgtagagtgactctcttagcacagactgaacttttgccttcattaataagctgccacccaagtggtgccattctgctagttggcagcaaccaaggggagttgcaaatttttgatatggctctatcccctattaacatccaactgttggctgaagaccgcttacccagggagactctgcaattcagtaaattatttgatgcctccagcagtcttgttcaaatgcaatggatagctcctcaggttgtttctcagaagggtgaaggtagtgatatctatgatctcctcttcctcaggtttgaaagaggacctttgggtgtgctgttgtttaaactaggcgtcttcactcgaggacagctgggcctgatagacatcatcttccagtacattcactgtgatgagatctatgaggcaataaacatcctgagcagcatgaactgggacactctgggccaccagtgctttatcagcatgagcgccattgtaaaccatcttcttagacagaagctcactccagagagagaagcacagcttgagacaagccttggaaccttctatgctccaacaagaccacttctggattccactatattggaatatagagatcaaatcagcaaatatgcaaggagattcttccatcacttgctcagtgagtgaggacctgggtagaggaccacttttataagagagtgaactgcatctgcagacccaccatactcctgatcaagacagttgttgacctcaaactccagactgtcccctgctgatgacctcatcatgcttcttgtcagcaagcttggctctctttagtttggcaaggattaaaagacatacagtgcctatattcactgtattaagtaactggcctttaaggacatttgattatagtaccagcagaaattagtatgtactggagatggctatagacacttctgttacaaagctacagttgtattaaagctgtgggatgaggacagcctttaccaacatggtcaaaatcaaagatttttttttttctactatgtagtgaagggcatacatagtatgtgcaaactgcagctattaagagagatatgatgatttttggctgtttacattcatgaatactttataaaatccaggaaaaattttgttagatattctactctattgaagtctgaaaagaaacatgcagagaaaatataatcaagaatttatttggcagatttataacatctgcagagctcagagctcaaggaaagaccataacacataaaatatgaacatcaataaatgttcagaatgtg

SEQ ID NO: 199672 - DNA, 534 bp, Homo sapiens
  Payload ID: 19396
  Gene Name: WD repeat containing planar cell polarity effector
  ENST ID: ENST00000473678
  CDS Start-End: 510-534
agtaaatgcaaagcaactcttcagtttcttttctgaatcatgtgcctggaatctgttaggcagtgaggaatggtggtctgtctttatattaccctggtccctcatgctgcttatctttcacacatgtccaaatatgtctcaacacagaatcatcctctctagctgggacatgatgcctaggtgggtgggggattcccctgttttgtttaaaatcaaagttgtctttgaatttggctagcatgtttgtgattagtttactgacaattggttttttttcttcttataccatatgttattccatgattcatcagctttgagtctgttgccttgaaggtgtgctggtgtctctaagcctttctgggccgcagctggagaaagtggtgattgacagaagcctggtggggaagctcatctcagacaccatcagtgatgctcttctcacagacagttttatcatcttatcatttttggcacaaaacaaactatgttttattcagtttaccaagaagatggagtcttctgatgtaaacaaaa

SEQ ID NO: 199673 - DNA, 4011 bp, Homo sapiens
  Payload ID: 19397
  Gene Name: WD repeat containing, antisense to TP53
  Uniprot ID: Q9BUR4
  ENST ID: ENST00000316024
  CDS Start-End: 2349-3995
ttctttttttttttcctccgggaagatgagatatactcattcttgaaaatacctccgggcttgccttctgcacacttctttccctccctgtctcacgccatggtagcgtccgcctaggttgcaggcgacccgcggggtggggcacaccattcaaagaaggggagggattgaggtttgcatcaaaacaaatacccctgcctttgcaaaggccataactaagtaatccagaaaaagaaatgcaggcggagaatagcagcctccctctgccaagtaagaggaaccggcctaaaggacattttctctctctctcctcccctctcatcgggtgaatagtgagctgctccggcaaaaagaaaccggaaatgctgctgcaagaggcagaaatgtaaatgtggagccaaacaataacagggctgccgggcctctcagattgcgacggtcctcctcggcctggcgggcaaacccctggtttagcacttctcacttccacgactgacagccttcaattggattttctccatctagcggagccgggggctgcctggaaagatcgctccaggaaggacaaaggtccggaagttgtgggaccttagcagcttgggctccccggatcacccccaaatgatcatttcggaatggagccccagttttcactaggatgccatgggctctaaaatatacagctatgagttctcaatgtttcgagatccaaaagtctcagacctcaatgctttgtgcatcttttatttcagggattccctacgcccagcaccgggtggatgtgcaaagaagtacgctttaggccggctcaaggttccccaaagctccactcctctgcctaggcgttcaactttgagttcggatggtcctaacatccccatcatctacacccaggtctcccaacaatgcaactcctatgatgatccctctagccaagcttccatcccactcacccccaaactcgctaagtccccactgccccacccccagccccagcgattttcccgagctgaaaatacacggagccgagagcccgtgactcagagaggactcatcaagttcagtcaggagcttacccaatccagggaagcgtgtcaccgtcgtggaaagcacgctcccagcccgaacgcaaagtgtccccggagcccagcagctacctgctccctggacggtggctctagacttttgagaagctcaaaacttttagcgccagtcttgagcacatgggaggggaaaaccccaatcccatcaacccctgcgaggctcctggcacaaagctggacagtcgccatgacaagtaagggcaagtaatccgcctgccggaggaagcaaaggaaatggagttggggaggagggtgcagagtcaggattctcgccgacctggtgccgtagatactaacattttggggtggaaaattctgcaagccagagctgtgagggcagaattggtggaaatcattttggaggaatcctgcattgtgtcaaatatgaagggtggaaggaagaaagcttttgcgtttgctctcagctggatcctttcttctcatcagttaaaatgtcattttttaggaaggctttccgtaatatcacaccctaacgttttctcccagatactttatatcacaccatcttatttaatctccttcacaacccttatcactctgataagatttatttgttcattgctttcagtacatggaaacgtaagccttatgaggatatagaatttttctactatcttattcattgttgtattcctgagtgcctatatcagtgctgggtagcaagtaagagctcgataataaatattttttgaatgagggagacaggtctgaagcctggagaatgagatgcagaagaggtgcaagacctgctgcgccctctgcaggcggcgggggggcggtgcaggtgctttaagaattaccgcgggactcggtagggggagcgtaggcgcttctcgccaagatagaagcgttcagactacaactcccagcagccacgaggagccctagggcttgatgggaacgggaaaccttctaacctttcacgtcccggctccgcgggttccgtgggtcgcccgcgaaatctgatccgggatgcggcggcccaatcggaaggtggaccgaaatcccgcgacagcaagaggcccgtagcgacccgcggtgctaaggaacacagtgctttcaaaagaattggcgtccgctgttcgcctctcctcccgggagtcttctgcctactcccagaagaggagggaagcacaggtgggtttctttagctctgcgtcggatccctgagaacttcgaagccatcctggctgaggctaatctccgctgtgcttcctctgcagtatgaagactttggagactcaaccgttagctccggactgctgtccttcagaccaggacccagctccagcccatccttctccccacgcttccccgatgaataaaaatgcggactctgaactgatgccaccgcctcccgaaaggggggatccgccccggttgtccccagatcctgtggctggctcagctgtgtcccaggagctacgggagggggacccagtttctctctccactcccctggaaacagagtttggttcccctagtgagttgagtcctcgaatcgaggagcaagaactttctgaaaatacaagccttcctgcagaagaagcaaacgggagcctttctgaagaagaagcgaacgggccagagttggggtctggaaaagccatggaagatacctctggggaacccgctgcagaggacgagggagacaccgcttggaactacagcttctcccagctgcctcgatttctcagtggttcctggtcagagttcagcacccaacctgagaacttcttgaaaggctgtaagtgggctcctgacggttcctgcatcttgaccaatagtgctgataacatcttgcgaatttataacctgcccccagagctgtaccatgagggggagcaggtggaatatgcagaaatggtccctgtccttcgaatggtggaaggtgataccatctatgattactgctggtattctctgatgtcctcagcccagccagacacctcctacgtggccagcagcagccgggagaacccgattcatatctgggacgcattcactggagagctccgggcttcctttcgcgcctacaaccacctggatgagctgacggcagcccattcgctctgcttctccccggatggctcccagctcttctgtggcttcaaccggactgtgcgtgttttttccacggcccggcctggccgagactgcgaggtccgagccacatttgcaaaaaagcagggccagagcggcatcatctcctgcatagccttcagcccagcccagcccctctatgcctgtggctcctacggccgctccctgggtctgtatgcctgggatgatggctcccctctcgccttgctgggagggcaccaagggggcatcacccacctctgctttcatcccgatggcaaccgcttcttctcaggagcccgcaaggatgctgagctcctgtgctgggatctccggcagtctggttacccactgtggtccctgggtcgagaggtgaccaccaatcagcgcatctacttcgatctggacccgaccgggcagttcctagtgagtggcagcacgagcggggctgtctctgtgtgggacacggacgggcctggcaatgatgggaagccggagcccgtgttgagttttctgccccagaaggactgcaccaatggcgtgagcctgcaccctagcctgcctctcctggccactgcctccggtcagcgtgtgtttcctgagcccacagagagtggggacgaaggagaggagctgggccttcccttgctctccacgcgccacgtccaccttgaatgtcggcttcagctctggtggtgtgggggggcgccagactccagcatccctgatgatcaccagggcgagaaagggcagggaggaacggagggaggtgtgggtgagctgatataaaaaggtttttatgata

SEQ ID NO: 199674 - DNA, 1905 bp, Homo sapiens
  Payload ID: 19397
  Gene Name: WD repeat containing, antisense to TP53
  Uniprot ID: Q9BUR4
  ENST ID: ENST00000396463
  CDS Start-End: 243-1889
gggaacgggaaaccttctaacctttcacgtcccggctccgcgggttccgtgggtcgcccgcgaaatctgatccgggatgcggcggcccaatcggaaggtggaccgaaatcccgcgacagcaagaggcccgtagcgacccgcggtgctaaggaacacagtgctttcaaaagaattggcgtccgctgttcgcctctcctcccgggagtcttctgcctactcccagaagaggagggaagcacagtatgaagactttggagactcaaccgttagctccggactgctgtccttcagaccaggacccagctccagcccatccttctccccacgcttccccgatgaataaaaatgcggactctgaactgatgccaccgcctcccgaaaggggggatccgccccggttgtccccagatcctgtggctggctcagctgtgtcccaggagctacgggagggggacccagtttctctctccactcccctggaaacagagtttggttcccctagtgagttgagtcctcgaatcgaggagcaagaactttctgaaaatacaagccttcctgcagaagaagcaaacgggagcctttctgaagaagaagcgaacgggccagagttggggtctggaaaagccatggaagatacctctggggaacccgctgcagaggacgagggagacaccgcttggaactacagcttctcccagctgcctcgatttctcagtggttcctggtcagagttcagcacccaacctgagaacttcttgaaaggctgtaagtgggctcctgacggttcctgcatcttgaccaatagtgctgataacatcttgcgaatttataacctgcccccagagctgtaccatgagggggagcaggtggaatatgcagaaatggtccctgtccttcgaatggtggaaggtgataccatctatgattactgctggtattctctgatgtcctcagcccagccagacacctcctacgtggccagcagcagccgggagaacccgattcatatctgggacgcattcactggagagctccgggcttcctttcgcgcctacaaccacctggatgagctgacggcagcccattcgctctgcttctccccggatggctcccagctcttctgtggcttcaaccggactgtgcgtgttttttccacggcccggcctggccgagactgcgaggtccgagccacatttgcaaaaaagcagggccagagcggcatcatctcctgcatagccttcagcccagcccagcccctctatgcctgtggctcctacggccgctccctgggtctgtatgcctgggatgatggctcccctctcgccttgctgggagggcaccaagggggcatcacccacctctgctttcatcccgatggcaaccgcttcttctcaggagcccgcaaggatgctgagctcctgtgctgggatctccggcagtctggttacccactgtggtccctgggtcgagaggtgaccaccaatcagcgcatctacttcgatctggacccgaccgggcagttcctagtgagtggcagcacgagcggggctgtctctgtgtgggacacggacgggcctggcaatgatgggaagccggagcccgtgttgagttttctgccccagaaggactgcaccaatggcgtgagcctgcaccctagcctgcctctcctggccactgcctccggtcagcgtgtgtttcctgagcccacagagagtggggacgaaggagaggagctgggccttcccttgctctccacgcgccacgtccaccttgaatgtcggcttcagctctggtggtgtgggggggcgccagactccagcatccctgatgatcaccagggcgagaaagggcagggaggaacggagggaggtgtgggtgagctgatataaaaaggtttttatgata

SEQ ID NO: 199675 - DNA, 1818 bp, Homo sapiens
  Payload ID: 19397
  Gene Name: WD repeat containing, antisense to TP53
  Uniprot ID: Q9BUR4
  ENST ID: ENST00000431639
  CDS Start-End: 156-1802
tgaattcgagttccgcctcctaccaggaagaaccggctcgggccggagggctgcacggaggaccacacggacgcctgcgggcccgccccttccgcttcacgacgttcagcctgcgtctggaactggaatggcctagcccaaagctagataacagtatgaagactttggagactcaaccgttagctccggactgctgtccttcagaccaggacccagctccagcccatccttctccccacgcttccccgatgaataaaaatgcggactctgaactgatgccaccgcctcccgaaaggggggatccgccccggttgtccccagatcctgtggctggctcagctgtgtcccaggagctacgggagggggacccagtttctctctccactcccctggaaacagagtttggttcccctagtgagttgagtcctcgaatcgaggagcaagaactttctgaaaatacaagccttcctgcagaagaagcaaacgggagcctttctgaagaagaagcgaacgggccagagttggggtctggaaaagccatggaagatacctctggggaacccgctgcagaggacgagggagacaccgcttggaactacagcttctcccagctgcctcgatttctcagtggttcctggtcagagttcagcacccaacctgagaacttcttgaaaggctgtaagtgggctcctgacggttcctgcatcttgaccaatagtgctgataacatcttgcgaatttataacctgcccccagagctgtaccatgagggggagcaggtggaatatgcagaaatggtccctgtccttcgaatggtggaaggtgataccatctatgattactgctggtattctctgatgtcctcagcccagccagacacctcctacgtggccagcagcagccgggagaacccgattcatatctgggacgcattcactggagagctccgggcttcctttcgcgcctacaaccacctggatgagctgacggcagcccattcgctctgcttctccccggatggctcccagctcttctgtggcttcaaccggactgtgcgtgttttttccacggcccggcctggccgagactgcgaggtccgagccacatttgcaaaaaagcagggccagagcggcatcatctcctgcatagccttcagcccagcccagcccctctatgcctgtggctcctacggccgctccctgggtctgtatgcctgggatgatggctcccctctcgccttgctgggagggcaccaagggggcatcacccacctctgctttcatcccgatggcaaccgcttcttctcaggagcccgcaaggatgctgagctcctgtgctgggatctccggcagtctggttacccactgtggtccctgggtcgagaggtgaccaccaatcagcgcatctacttcgatctggacccgaccgggcagttcctagtgagtggcagcacgagcggggctgtctctgtgtgggacacggacgggcctggcaatgatgggaagccggagcccgtgttgagttttctgccccagaaggactgcaccaatggcgtgagcctgcaccctagcctgcctctcctggccactgcctccggtcagcgtgtgtttcctgagcccacagagagtggggacgaaggagaggagctgggccttcccttgctctccacgcgccacgtccaccttgaatgtcggcttcagctctggtggtgtgggggggcgccagactccagcatccctgatgatcaccagggcgagaaagggcagggaggaacggagggaggtgtgggtgagctgatataaaaaggtttttatgata

SEQ ID NO: 199676 - DNA, 1828 bp, Homo sapiens
  Payload ID: 19397
  Gene Name: WD repeat containing, antisense to TP53
  Uniprot ID: Q9BUR4
  ENST ID: ENST00000457584
  CDS Start-End: 166-1812
ccggagcccagcagctacctgctccctggacggtggctctagacttttgagaagctcaaaacttttagcgccagtcttgagcacatgggaggggaaaaccccaatcccatcaacccctgcgaggctcctggcacaaagctggacagtcgccatgacaagtaaggtatgaagactttggagactcaaccgttagctccggactgctgtccttcagaccaggacccagctccagcccatccttctccccacgcttccccgatgaataaaaatgcggactctgaactgatgccaccgcctcccgaaaggggggatccgccccggttgtccccagatcctgtggctggctcagctgtgtcccaggagctacgggagggggacccagtttctctctccactcccctggaaacagagtttggttcccctagtgagttgagtcctcgaatcgaggagcaagaactttctgaaaatacaagccttcctgcagaagaagcaaacgggagcctttctgaagaagaagcgaacgggccagagttggggtctggaaaagccatggaagatacctctggggaacccgctgcagaggacgagggagacaccgcttggaactacagcttctcccagctgcctcgatttctcagtggttcctggtcagagttcagcacccaacctgagaacttcttgaaaggctgtaagtgggctcctgacggttcctgcatcttgaccaatagtgctgataacatcttgcgaatttataacctgcccccagagctgtaccatgagggggagcaggtggaatatgcagaaatggtccctgtccttcgaatggtggaaggtgataccatctatgattactgctggtattctctgatgtcctcagcccagccagacacctcctacgtggccagcagcagccgggagaacccgattcatatctgggacgcattcactggagagctccgggcttcctttcgcgcctacaaccacctggatgagctgacggcagcccattcgctctgcttctccccggatggctcccagctcttctgtggcttcaaccggactgtgcgtgttttttccacggcccggcctggccgagactgcgaggtccgagccacatttgcaaaaaagcagggccagagcggcatcatctcctgcatagccttcagcccagcccagcccctctatgcctgtggctcctacggccgctccctgggtctgtatgcctgggatgatggctcccctctcgccttgctgggagggcaccaagggggcatcacccacctctgctttcatcccgatggcaaccgcttcttctcaggagcccgcaaggatgctgagctcctgtgctgggatctccggcagtctggttacccactgtggtccctgggtcgagaggtgaccaccaatcagcgcatctacttcgatctggacccgaccgggcagttcctagtgagtggcagcacgagcggggctgtctctgtgtgggacacggacgggcctggcaatgatgggaagccggagcccgtgttgagttttctgccccagaaggactgcaccaatggcgtgagcctgcaccctagcctgcctctcctggccactgcctccggtcagcgtgtgtttcctgagcccacagagagtggggacgaaggagaggagctgggccttcccttgctctccacgcgccacgtccaccttgaatgtcggcttcagctctggtggtgtgggggggcgccagactccagcatccctgatgatcaccagggcgagaaagggcagggaggaacggagggaggtgtgggtgagctgatataaaaaggtttttatgata

SEQ ID NO: 199677 - DNA, 2657 bp, Homo sapiens
  Payload ID: 19397
  Gene Name: WD repeat containing, antisense to TP53
  ENST ID: ENST00000498311
  CDS Start-End: 964-1827
aagggcaagtaatccgcctgccggaggaagcaaaggaaatggagttggggaggagggtgcagagtcaggattctcgccgacctggtgccgtagatactaacattttggggtggaaaattctgcaagccagagctgtgagggcagaattggtggaaatcattttggaggaatcctgcattgtgtcaaatatgaagggtggaaggaagaaagcttttgcgtttgctctcagctggatcctttcttctcatcagttaaaatgtcattttttaggaaggctttccgtaatatcacaccctaacgttttctcccagatactttatatcacaccatcttatttaatctccttcacaacccttatcactctgataagatttatttgttcattgctttcagtacatggaaacgtaagccttatgaggatatagaatttttctactatcttattcattgttgtattcctgagtgcctatatcagtgctgggtagcaagtaagagctcgataataaatattttttgaatgagggagacaggtctgaagcctggagaatgagatgcagaagaggtgcaagacctgctgcgccctctgcaggcggcgggggggcggtgcaggtgctttaagaattaccgcgggactcggtagggggagcgtaggcgcttctcgccaagatagaagcgttcagactacaactcccagcagccacgaggagccctagggcttgatgggaacgggaaaccttctaacctttcacgtcccggctccgcgggttccgtgggtcgcccgcgaaatctgatccgggatgcggcggcccaatcggaaggtggaccgaaatcccgcgacagcaagaggcccgtagcgacccgcggtgctaaggaacacagtgctttcaaaagaattggcgtccgctgttcgcctctcctcccgggagtcttctgcctactcccagaagaggagggaagcacagtatgaagactttggagactcaaccgttagctccggactgctgtccttcagaccaggacccagctccagcccatccttctccccacgcttccccgatgaataaaaatgcggactctgaactgatgccaccgcctcccgaaaggggggatccgccccggttgtccccagatcctgtggctggctcagctgtgtcccaggagctacgggagggggacccagtttctctctccactcccctggaaacagagtttggttcccctagtgagttgagtcctcgaatcgaggagcaagaactttctgaaaatacaagccttcctgcagaagaagcaaacgggagcctttctgaagaagaagcgaacgggccagagttggggtctggaaaagccatggaagatacctctggggaacccgctgcagaggacgagggagacaccgcttggaactacagcttctcccagctgcctcgatttctcagtggttcctggtcagagttcagcacccaacctgagaacttcttgaaaggctgtaagtgggctcctgacggttcctgcatcttgaccaatagtgctgataacatcttgcgaatttataacctgcccccagagctgtaccatgagggggagcaggtggaatatgcagaaatggtccctgtccttcgaatggtggaaggtgataccatctatgattactgctggtattctctgatgtcctcagcccagccagacacctcctacaccggggtttcagtgtccatgtctctctcagcgtggccagcagcagccgggagaacccgattcatatctgggacgcattcactggagagctccgggcttcctttcgcgcctacaaccacctggatgagctgacggcagcccattcgctctgcttctccccggatggctcccagctcttctgtggcttcaaccggactgtgcgtgttttttccacggcccggcctggccgagactgcgaggtccgagccacatttgcaaaaaagcagggccagagcggcatcatctcctgcatagccttcagcccagcccagcccctctatgcctgtggctcctacggccgctccctgggtctgtatgcctgggatgatggctcccctctcgccttgctgggagggcaccaagggggcatcacccacctctgctttcatcccgatggcaaccgcttcttctcaggagcccgcaaggatgctgagctcctgtgctgggatctccggcagtctggttacccactgtggtccctgggtcgagaggtgaccaccaatcagcgcatctacttcgatctggacccgaccgggcagttcctagtgagtggcagcacgagcggggctgtctctgtgtgggacacggacgggcctggcaatgatgggaagccggagcccgtgttgagttttctgccccagaaggactgcaccaatggcgtgagcctgcaccctagcctgcctctcctggccactgcctccggtcagcgtgtgtttcctgagcccacagagagtggggacgaaggagaggagctgggccttcccttgctctccacgcgccacgtccaccttgaatgtcggcttcagctctggtggtgtgggggggcgccagactccagcatccctgatgatcaccagggcgagaaagggcagggaggaacggagggaggtgtgggtgagctgatataaaaaggtttttatgat

SEQ ID NO: 199678 - DNA, 1736 bp, Homo sapiens
  Payload ID: 19397
  Gene Name: WD repeat containing, antisense to TP53
  ENST ID: ENST00000534050
  CDS Start-End: 173-1720
agtgctttcaaaagaattggcgtccgctgttcgcctctcctcccgggagtcttctgcctactcccagaagaggagggaagcacaggtgggtttctttagctctgcgtcggatccctgagaacttcgaagccatcctggctgaggctaatctccgctgtgcttcctctgcagtatgaagactttggagactcaaccgttagctccggactgctgtccttcagaccaggacccagctccagcccatccttctccccacgcttccccgatgaataaaaatgcggactctgaactgatgccaccgcctcccgaaaggggggatccgccccggttgtccccagatcctgtggctggctcagctgtgtcccaggagctacgggagggggacccagtttctctctccactcccctggaaacagagtttggttcccctagtgagttgagtcctcgaatcgaggagcaagaactttctgaaaatacaagccttcctgcagaagaagcaaacgggagcctttctgaagaagaagcgaacgggccagagttggggtctggaaaagccatggaagatacctctggggaacccgctgcagaggacgagggagacacggctcctgacggttcctgcatcttgaccaatagtgctgataacatcttgcgaatttataacctgcccccagagctgtaccatgagggggagcaggtggaatatgcagaaatggtccctgtccttcgaatggtggaaggtgataccatctatgattactgctggtattctctgatgtcctcagcccagccagacacctcctacgtggccagcagcagccgggagaacccgattcatatctgggacgcattcactggagagctccgggcttcctttcgcgcctacaaccacctggatgagctgacggcagcccattcgctctgcttctccccggatggctcccagctcttctgtggcttcaaccggactgtgcgtgttttttccacggcccggcctggccgagactgcgaggtccgagccacatttgcaaaaaagcagggccagagcggcatcatctcctgcatagccttcagcccagcccagcccctctatgcctgtggctcctacggccgctccctgggtctgtatgcctgggatgatggctcccctctcgccttgctgggagggcaccaagggggcatcacccacctctgctttcatcccgatggcaaccgcttcttctcaggagcccgcaaggatgctgagctcctgtgctgggatctccggcagtctggttacccactgtggtccctgggtcgagaggtgaccaccaatcagcgcatctacttcgatctggacccgaccgggcagttcctagtgagtggcagcacgagcggggctgtctctgtgtgggacacggacgggcctggcaatgatgggaagccggagcccgtgttgagttttctgccccagaaggactgcaccaatggcgtgagcctgcaccctagcctgcctctcctggccactgcctccggtcagcgtgtgtttcctgagcccacagagagtggggacgaaggagaggagctgggccttcccttgctctccacgcgccacgtccaccttgaatgtcggcttcagctctggtggtgtgggggggcgccagactccagcatccctgatgatcaccagggcgagaaagggcagggaggaacggagggaggtgtgggtgagctgatataaaaaggtttttatgata

SEQ ID NO: 199679 - DNA, 504 bp, Homo sapiens
  Payload ID: 19397
  Gene Name: WD repeat containing, antisense to TP53
  ENST ID: ENST00000463804
  CDS Start-End: 1-141
gatgagctgacggcagcccattcgctctgcttctccccggatggctcccagctcttctgtggcttcaaccggactgtgcgtgttttttccacggcccggcctggccgagactgcgaggtccgagccacatttggatgctgagctcctgtgctgggatctccggcagtctggttacccactgtggtccctgggtcgagaggtgaccaccaatcagcgcatctacttcgatctggacccgaccgggcagttcctagtgagtggcagcacgagcggggctgtctctgtgtgggacacggacgggcctggcaatgatgggaagccggagcccgtgttgagttttctgccccagaaggactgcaccaatggcgtgagcctgcaccctagcctgcctctcctggccactgcctccggtcagcgtgtgtttcctgagcccacagagagtggggacgaaggagaggagctgggccttcccttgctctccacgcgccacgtccaccttgaatg

SEQ ID NO: 199680 - DNA, 1665 bp, Homo sapiens
  Payload ID: 19398
  Gene Name: WD repeat containing, antisense to TP73
  Uniprot ID: Q9P2S5
  ENST ID: ENST00000270708
  CDS Start-End: 75-1457
gttgcagcctgctgcgcgcccaggggtcccgcgggttttcgggcgcagggtggcgcccgcggcaggcggcggccatgaacttctccgaggtattcaagctctccagcttactctgcaagttctccccggacggcaagtacctggcttcctgtgtccagtaccggttagtggtccgggatgtgaacacccttcagatccttcagctgtacacgtgcctagaccagatccagcacatcgagtggtcggcagactcgctcttcatcctgtgcgccatgtacaagcgagggctggtgcaggtctggtctttagagcagcccgaatggcactgcaaaatagacgagggctcagccgggctggtggcctcgtgctggagcccggacgggcgccacattctcaacaccacggaattccatctgcggataaccgtctggtccttgtgcacaaaatccgtgtcttacatcaaatacccgaaagcttgtctgcagggaatcaccttcaccagggacggccgctacatggcgctggcagaacggcgcgactgcaaagattacgtgagcatcttcgtctgcagtgattggcagctcctgcggcattttgatacggacacccaggatctcacagggattgagtgggccccaaacggctgtgtgctggcagtgtgggacacctgcttggagtacaagattctgctgtactcattggatggccggttgttgtccacgtacagcgcttacgagtggtccctgggcatcaagtctgtggcctggagccccagcagtcagttcctggcagttgggagctatgatggaaaggtgcgcatccttaatcacgtgacttggaaaatgatcacggagtttgggcatcctgcagccattaatgatcccaagatagtggtgtataaggaggccgagaagagcccacagctgggactgggctgcctctccttcccgccgccccgggccggggccggccctctcccgagctcagagagtaaatatgagatcgcctctgtcccagtctccttacagacactgaaacctgttaccgacagagcaaacccgaaaatcggcataggaatgctggcatttagtcctgacagctacttcctggcgacaaggaacgacaacattcccaatgccgtctgggtctgggacattcagaagctgaggctgttcgcggtgctcgagcagctgtccccagtgcgcgcatttcagtgggacccgcagcagccgcggctggccatctgcacgggaggcagcaggctctacctgtggtccccagcgggctgcatgtcggtgcaggtgcctggggaaggcgactttgcagtgctctctctgtgctggcatttaagcggagactcgatggccctcctcagcaaggatcacttctgcctctgcttcctggagacagaggcagtggtcggcacagcctgcagacagctgggcggccacacgtagcagcggtgcactaacgtgtgcagaaacagggctactctgtgtttccagtgtgggaaaaaacacagcttcaccaggaggttctccactgtggtggtctggattcagtgattgattctatttttctatagcaaagcatttttgtaaatatgtatggtataaaactgtagttttattatttaaaataaatacttgctgatttatacaacta

SEQ ID NO: 199681 - DNA, 1998 bp, Homo sapiens
  Payload ID: 19398
  Gene Name: WD repeat containing, antisense to TP73
  ENST ID: ENST00000378322
  CDS Start-End: 60-1367
gcgcccaggggtcccgcgggttttcgggcgcagggtggcgcccgcggcaggcggcggccatgaacttctccgaggtattcaagctctccagcttactctgcaagttctccccggacggcaagtacctggcttcctgtgtccagtaccggttagtggtccgggatgtgaacacccttcagatccttcagctgtacacgtgcctagaccagatccagcacatcgagtggtcggcagactcgctcttcatcctgtgcgccatgtacaagcgagggctggtgcaggtctggtctttagagcagcccgaatggcactgcaaaatagacgagggctcagccgggctggtggcctcgtgctggagcccggacgggcgccacattctcaacaccacggaattccatctgcggataaccgtctggtccttgtgcacaaaatccgtgtcttacatcaaatacccgaaagcttgtctgcagggaatcaccttcaccagggacggccgctacatggcgctggcagaacggcgcgactgcaaagattacgtgagcatcttcgtctgcagtgattggcagctcctgcggcattttgatacggacacccaggatctcacagggattgagtgggccccaaacggctgtgtgctggcagtgtgggacacctgcttggagtacaagattctgctgtactcattggatggccggttgttgtccacgtacagcgcttacgagtggtccctgggcatcaagtctgtggcctggagccccagcagtcagttcctggcagttgggagctatgatggaaaggtgcgcatccttaatcacgtgacttggaaaatgatcacggagtttgggcatcctgcagccattaatgatcccaagatagtggtgtataaggaggccgagaagagcccacagctgggactgggctgcctctccttcccgccgccccgggccggggccggccctctcccgagctcagagagtaaatatgagatcgcctctgtcccagtctccttacagacactgaaacctgttaccgacagagcaaacccgaaaatcggcataggaatgctggcatttagtcctgacagctacttcctggcgacaaggaacgacaacattcccaatgccgtctgggtctgggacattcagaagctgaggctgttcgcggtgctcgagcagctgtccccagtgcgcgcatttcagtgggacccgcagcagccgcggctggccatctgcacgggaggcagcaggctctacctgtggtccccagcgggctgcatgtcggtgcaggtgcctggggaaggtaagcacatccccgaggccacggacgtggcagccttgctgtgtgcagtctggcatcacacgggctgaactgttgaagcccagctgctgtctccggcagcactccagggaaactgccctcagagtctttgcgtaaacctcaagacggacacacaggggacccgctgccctcagctttatgggctagaagcagcctctccctgacttgaggcagctctggggctccaccctggctctgcctatgtgggtcactccaggcactgtgctggcctgcaggacaagggggtgcccatcccccagaatctgggcctcccctgctgtaatcctctggccacctgtctctctctaggcgactttgcagtgctctctctgtgctggcatttaagcggagactcgatggccctcctcagcaaggatcacttctgcctctgcttcctggagacagaggcagtggtcggcacagcctgcagacagctgggcggccacacgtagcagcggtgcactaacgtgtgcagaaacagggctactctgtgtttccagtgtgggaaaaaacacagcttcaccaggaggttctccactgtggtggtctggattcagtgattgattctatttttctatagcaaagcatttttgtaaatatgtatggtataaaactgtagttttattatttaaaataaatacttgctgatttatacaacta

SEQ ID NO: 199682 - DNA, 603 bp, Homo sapiens
  Payload ID: 19398
  Gene Name: WD repeat containing, antisense to TP73
  ENST ID: ENST00000419924
  CDS Start-End: 65-603
gctgcgcgcccaggggtcccgcgggttttcgggcgcagggtggcgcccgcggcaggcggcggccatgaacttctccgaggtattcaagctctccagcttactctgcaagttctccccggacggcaagtacctggcttcctgtgtccagtaccggttagtggtccgggatgtgaacacccttcagatccttcagctgtacacgtgcctagaccagatccagcacatcgagtggtcggcagactcgctcttcatcctgtgcgccatgtacaagcgagggctggtgcaggtctggtctttagagcagcccgaatggcactgcaaaatagacgagggctcagccgggctggtggcctcgtgctggagcccggacgggcgccacattctcaacaccacggaattccatctgcggataaccgtctggtccttgtgcacaaaatccgtgtcttacatcaaatacccgaaagcttgtctgcagggaatcaccttcaccagggacggccgctacatggcgctggcagaacggcgcgactgcaaagattacgtgagcatcttcgtctgcagtgattggcagctcctgcggtacaagattctgctgtactcatt

SEQ ID NO: 199683 - DNA, 940 bp, Homo sapiens
  Payload ID: 19398
  Gene Name: WD repeat containing, antisense to TP73
  ENST ID: ENST00000424367
  CDS Start-End: 28-940
gggtggcgcccgcggcaggcggcggccatgaacttctccgaggtattcaagctctccagcttactctgcaagttctccccggacggcaagtacctggcttcctgtgtccagtaccggttagtggtccgggatgtgaacacccttcagatccttcagctgtacacgtgcctagaccagatccagcacatcgagtggtcggcagactcgctcttcatcctgtgcgccatgtacaagcgagggctggtgcaggtctggtctttagagcagcccgaatggcactgcaaaatagacgagggctcagccgggctggtggcctcgtgctggagcccggacgggcgccacattctcaacaccacggaattccatctgcggataaccgtctggtccttgtgcacaaaatccgtgtcttacatcaaatacccgaaagcttgtctgcagggaatcaccttcaccagggacggccgctacatggcgctggcagaacggcgcgactgcaaagattacgtgagcatcttcgtctgcagtgattggcagctcctgcggcattttgatacggacacccaggatctcacagggattgagtgggccccaaacggctgtgtgctggcagtgtgggacacctgcttggaggtgcgcatccttaatcacgtgacttggaaaatgatcacggagtttgggcatcctgcagccattaatgatcccaagatagtggtgtataaggaggccgagaagagcccacagctgggactgggctgcctctccttcccgccgccccgggccggggccggccctctcccgagctcagagagtaaatatgagatcgcctctgtcccagtctccttacagacactgaaacctgttaccgacagagcaaacccgaaaatcggcataggaatgctggcatttagtcctgacagctacttcctggcgacaaggaacg

SEQ ID NO: 199684 - DNA, 779 bp, Homo sapiens
  Payload ID: 19398
  Gene Name: WD repeat containing, antisense to TP73
  ENST ID: ENST00000465916
  CDS Start-End: 179-779
tccccgatcgctctcccctcacctcccagcttcggagctgcgagcccaggcttcctgtgtccagtaccggttagtggtccgggatgtgaacacccttcagatccttcagctgtacacgtgcctagaccagatccagcacatcgagtggtcggcagactcgctcttcatcctgtgcgccatgtacaagcgagggctggtgcaggtctggtctttagagcagcccgaatggcactgcaaaatagacgagggctcagccgggctggtggcctcgtgctggagcccggacgggcgccacattctcaacaccacggaattccatctgcggataaccgtctggtccttgtgcacaaaatccgtgtcttacatcaaatacccgaaagcttgtctgcagggaatcaccttcaccagggacggccgctacatggcgctggcagaacggcgcgactgcaaagattacgtgagcatcttcgtctgcagtgattggcagctcctgcggcattttgatacggacacccaggatctcacagggattgagtgggccccaaacggctgtgtgctggcagtgtgggacacctgcttggagtacaagattctgctgtactcattggatggccggttgttgtccacgtacagcgcttacgagtggtccctgggcatcaagtctgtggcctggagccccagcagtcagttcctggcagttgggagctatgatggaaaggtgcgcatccttaatcacgtgacttggaaaatgatcacggagtttgggcatcctgcagcca

SEQ ID NO: 199685 - DNA, 2722 bp, Homo sapiens
  Payload ID: 19399
  Gene Name: WD repeat domain 1
  Uniprot ID: O75083
  ENST ID: ENST00000382451
  CDS Start-End: 284-1684
ccgcagccgccgagccgagcgcttgactatatatggtcaaagctgggggcgagccgcgcgcgggaccgcgcttccgggttcggggcgtccgcaaccacagcgcgcagggcaggcgcgagctggcctctgagccccggcctcggaccgcccactccactcccggcacgcccggtgccgccttccggctccagtccccgggctcggcctcggcgaggtgtaattcgcagcgcgggccggccccggaggctctcggcgagcgcggcgcggtaacaagtgggcgaggatgccgtacgagatcaagaaggtgttcgccagcctcccgcaggtggagaggggcgtctccaagatcatcggcggcgaccctaagggcaacaattttctgtacaccaatggaaagtgcgtcatcctaaggaacatcgacgaccacagccgctttgtcaactgtgtgcgattctctcctgatgggaacagatttgccacagccagtgctgacggccagatatacatctatgacgggaagactggggagaaggtgtgcgcgctgggcggaagcaaggcccacgacggtgggatttacgcaattagttggagtcccgacagcacccatttgctttctgcttctggggacaaaacttccaagatttgggacgtcagcgtgaactccgtggtcagcacatttcccatgggctccacggttctggaccagcagctgggctgcctatggcagaaggaccacctgctcagtgtctccctgtccgggtacatcaactatctggacagaaacaaccccagcaagcccctgcacgtcatcaagggtcacagtaaatcgatccagtgtctgacggtgcataaaaacggcggcaagtcctacatttactctgggagccacgacggacacattaattactgggattcagagacgggggagaacgactccttcgctgggaaaggccacacgaaccaggtgtccaggatgaccgtggatgagtcggggcagctcatcagctgcagcatggacgacaccgtgcggtacaccagcctcatgctgcgggactacagcggacaaggagttgtgaaactggacgttcagccaaagtgcgtagccgtcggccccgggggatacgccgtggtcgtgtgcattggacagattgtcctgctgaaggatcagaggaagtgcttcagcatcgacaaccccggctacgagcccgaagttgtggcagtgcaccccggcggggacacggtggcaattgggggtgtggacggcaacgtccgcctgtattccatcctgggcaccacgctgaaggatgagggcaagctcctagaggccaagggccccgtgaccgacgtggcctactcccacgacggcgccttcctcgcggtgtgcgacgccagcaaggtggtcacagtgttcagcgttgctgacggctactcggagaacaatgttttttatggacaccatgcaaaaatcgtctgcctggcctggtccccagacaatgaacactttgcctccggtggcatggacatgatggtgtatgtttggaccctgagtgacccggaaaccagagtcaagatccaagatgcacaccggctgcaccatgtcagcagcctggcctggctggacgagcacacgctggtcacgacctcccatgatgcctctgtcaaggagtggacaatcacctactgaggagccccacccccgcctctggatggaccgaatcagggactagagtttaactgcagcggaacatgtcatttctctatttctgtgacgcgcccccatgcccccaccccaccacaagaggcaggagggcccagtcatgaccctcgtctctgcagggtgtctgtacacgttcttctgaaagctttagacagtaacagtttgcacatgaaaaataaagcgagcacctaaacaatgtgtggagcataactaaaacccacagcccaaccaaaccttgagaatgcgaaacattccagaggcagtagcctccaaagcacacagagcccctggccccgccgcggctctcactatctgtcaggggaggttgtacaggtgaatgagccggggggctcatgttcctgcctgcagaacatttctgtactagtgagaagagggaatatgcattgcagttcagcaaagccggaattctgtgttgaacagatgtctgtctccctagtgtgtgactcacaccttgtggctgccttcagagcgccacctccagatcagatggggacacacaacccctggatatgtttcattgtcagattttgtgcttgattttaagaatggaattgtgggtatctttcctttttttttaatgtatcttaactgttgcctgtcagtgtttacaaactagtgcgttgacggcaccgtgtccaagtttttagaacccttgttagccagaccgaggtgtcctggtcaccgtttcaccatcatgctttgatgttcccctgtctttccctcttctgctctcaagagcaaaggttaatttaaggacaaagatgaagtcactgtaaactaatctgtcattgtttttaccttccttttctttttcagtgcagaaattaaaagtaagtataaagcaccgtgattgggagtgtttttgcgtgtgtcggaatcactggtaaatgttggctgagaacaatccctccccttgcacttgtgaaaacactttgagcgctttaagagattagcctgagaaataattaaatatcttttctcttc

SEQ ID NO: 199686 - DNA, 3142 bp, Homo sapiens
  Payload ID: 19399
  Gene Name: WD repeat domain 1
  Uniprot ID: O75083
  ENST ID: ENST00000382452
  CDS Start-End: 284-2104
ccgcagccgccgagccgagcgcttgactatatatggtcaaagctgggggcgagccgcgcgcgggaccgcgcttccgggttcggggcgtccgcaaccacagcgcgcagggcaggcgcgagctggcctctgagccccggcctcggaccgcccactccactcccggcacgcccggtgccgccttccggctccagtccccgggctcggcctcggcgaggtgtaattcgcagcgcgggccggccccggaggctctcggcgagcgcggcgcggtaacaagtgggcgaggatgccgtacgagatcaagaaggtgttcgccagcctcccgcaggtggagaggggcgtctccaagatcatcggcggcgaccctaagggcaacaattttctgtacaccaatggaaagtgcgtcatcctaaggaacatcgacaacccagcccttgctgacatctacacagagcacgcccatcaggtggtggtggccaagtatgcgcccagcggattctacattgcctccggagatgtgtctgggaagctgaggatctgggataccacgcagaaggagcacctgttgaagtatgagtaccagcctttcgctgggaagatcaaagacattgcttggactgaagacagtaagaggatcgccgtggtcggggaaggaagggagaagtttggagcagtcttcctctgggatagtggctcttctgtgggcgagattacaggacacaacaaagtcatcaacagcgtggacatcaagcagagccggccataccggctggccacgggaagcgatgataactgcgcggcattctttgagggacccccattcaagttcaagttcacaattggcgaccacagccgctttgtcaactgtgtgcgattctctcctgatgggaacagatttgccacagccagtgctgacggccagatatacatctatgacgggaagactggggagaaggtgtgcgcgctgggcggaagcaaggcccacgacggtgggatttacgcaattagttggagtcccgacagcacccatttgctttctgcttctggggacaaaacttccaagatttgggacgtcagcgtgaactccgtggtcagcacatttcccatgggctccacggttctggaccagcagctgggctgcctatggcagaaggaccacctgctcagtgtctccctgtccgggtacatcaactatctggacagaaacaaccccagcaagcccctgcacgtcatcaagggtcacagtaaatcgatccagtgtctgacggtgcataaaaacggcggcaagtcctacatttactctgggagccacgacggacacattaattactgggattcagagacgggggagaacgactccttcgctgggaaaggccacacgaaccaggtgtccaggatgaccgtggatgagtcggggcagctcatcagctgcagcatggacgacaccgtgcggtacaccagcctcatgctgcgggactacagcggacaaggagttgtgaaactggacgttcagccaaagtgcgtagccgtcggccccgggggatacgccgtggtcgtgtgcattggacagattgtcctgctgaaggatcagaggaagtgcttcagcatcgacaaccccggctacgagcccgaagttgtggcagtgcaccccggcggggacacggtggcaattgggggtgtggacggcaacgtccgcctgtattccatcctgggcaccacgctgaaggatgagggcaagctcctagaggccaagggccccgtgaccgacgtggcctactcccacgacggcgccttcctcgcggtgtgcgacgccagcaaggtggtcacagtgttcagcgttgctgacggctactcggagaacaatgttttttatggacaccatgcaaaaatcgtctgcctggcctggtccccagacaatgaacactttgcctccggtggcatggacatgatggtgtatgtttggaccctgagtgacccggaaaccagagtcaagatccaagatgcacaccggctgcaccatgtcagcagcctggcctggctggacgagcacacgctggtcacgacctcccatgatgcctctgtcaaggagtggacaatcacctactgaggagccccacccccgcctctggatggaccgaatcagggactagagtttaactgcagcggaacatgtcatttctctatttctgtgacgcgcccccatgcccccaccccaccacaagaggcaggagggcccagtcatgaccctcgtctctgcagggtgtctgtacacgttcttctgaaagctttagacagtaacagtttgcacatgaaaaataaagcgagcacctaaacaatgtgtggagcataactaaaacccacagcccaaccaaaccttgagaatgcgaaacattccagaggcagtagcctccaaagcacacagagcccctggccccgccgcggctctcactatctgtcaggggaggttgtacaggtgaatgagccggggggctcatgttcctgcctgcagaacatttctgtactagtgagaagagggaatatgcattgcagttcagcaaagccggaattctgtgttgaacagatgtctgtctccctagtgtgtgactcacaccttgtggctgccttcagagcgccacctccagatcagatggggacacacaacccctggatatgtttcattgtcagattttgtgcttgattttaagaatggaattgtgggtatctttcctttttttttaatgtatcttaactgttgcctgtcagtgtttacaaactagtgcgttgacggcaccgtgtccaagtttttagaacccttgttagccagaccgaggtgtcctggtcaccgtttcaccatcatgctttgatgttcccctgtctttccctcttctgctctcaagagcaaaggttaatttaaggacaaagatgaagtcactgtaaactaatctgtcattgtttttaccttccttttctttttcagtgcagaaattaaaagtaagtataaagcaccgtgattgggagtgtttttgcgtgtgtcggaatcactggtaaatgttggctgagaacaatccctccccttgcacttgtgaaaacactttgagcgctttaagagattagcctgagaaataattaaatatcttttctcttc

SEQ ID NO: 199687 - DNA, 812 bp, Homo sapiens
  Payload ID: 19399
  Gene Name: WD repeat domain 1
  ENST ID: ENST00000508079
  CDS Start-End: 78-812
agtcaacaggtgaccggccgagaccggtccggggctccttctcccttctgtccccgccgtccccgccctgccctgacatgccccgccgcatttgtgtctccgcagagaaggtgttcgccagcctcccgcaggtggagaggggcgtctccaagatcatcggcggcgaccctaagggcaacaattttctgtacaccaatggaaagtgcgtcatcctaaggaacatcgacaacccagcccttgctgacatctacacagagcacgcccatcaggtggtggtggccaagtatgcgcccagcggattctacattgcctccggagatgtgtctgggaagctgaggatctgggataccacgcagaaggagcacctgttgaagtatgagtaccagcctttcgctgggaagatcaaagacattgcttggactgaagacagtaagaggatcgccgtggtcggggaaggaagggagaagtttggagcagtcttcctctgggatagtggctcttctgtgggcgagattacaggacacaacaaagtcatcaacagcgtggacatcaagcagagccggccataccggctggccacgggaagcgatgataactgcgcggcattctttgagggacccccattcaagttcaagttcacaattggcgaccacagccgctttgtcaactgtgtgcgattctctcctgatgggaacagatttgccacagccagtgctgacggccagatatacatctatgacgggaagactggggagaaggtgtgcgcgctgggcggaagcaaggcccacgacggtgggatttacgcagtgagt

SEQ ID NO: 199688 - DNA, 1691 bp, Homo sapiens
  Payload ID: 19399
  Gene Name: WD repeat domain 1
  Uniprot ID: O75083
  ENST ID: ENST00000502702
  CDS Start-End: 62-1462
cgcagcgcgggccggccccggaggctctcggcgagcgcggcgcggtaacaagtgggcgaggatgccgtacgagatcaagaaggtgttcgccagcctcccgcaggtggagaggggcgtctccaagatcatcggcggcgaccctaagggcaacaattttctgtacaccaatggaaagtgcgtcatcctaaggaacatcgacgaccacagccgctttgtcaactgtgtgcgattctctcctgatgggaacagatttgccacagccagtgctgacggccagatatacatctatgacgggaagactggggagaaggtgtgcgcgctgggcggaagcaaggcccacgacggtgggatttacgcaattagttggagtcccgacagcacccatttgctttctgcttctggggacaaaacttccaagatttgggacgtcagcgtgaactccgtggtcagcacatttcccatgggctccacggttctggaccagcagctgggctgcctatggcagaaggaccacctgctcagtgtctccctgtccgggtacatcaactatctggacagaaacaaccccagcaagcccctgcacgtcatcaagggtcacagtaaatcgatccagtgtctgacggtgcataaaaacggcggcaagtcctacatttactctgggagccacgacggacacattaattactgggattcagagacgggggagaacgactccttcgctgggaaaggccacacgaaccaggtgtccaggatgaccgtggatgagtcggggcagctcatcagctgcagcatggacgacaccgtgcggtacaccagcctcatgctgcgggactacagcggacaaggagttgtgaaactggacgttcagccaaagtgcgtagccgtcggccccgggggatacgccgtggtcgtgtgcattggacagattgtcctgctgaaggatcagaggaagtgcttcagcatcgacaaccccggctacgagcccgaagttgtggcagtgcaccccggcggggacacggtggcaattgggggtgtggacggcaacgtccgcctgtattccatcctgggcaccacgctgaaggatgagggcaagctcctagaggccaagggccccgtgaccgacgtggcctactcccacgacggcgccttcctcgcggtgtgcgacgccagcaaggtggtcacagtgttcagcgttgctgacggctactcggagaacaatgttttttatggacaccatgcaaaaatcgtctgcctggcctggtccccagacaatgaacactttgcctccggtggcatggacatgatggtgtatgtttggaccctgagtgacccggaaaccagagtcaagatccaagatgcacaccggctgcaccatgtcagcagcctggcctggctggacgagcacacgctggtcacgacctcccatgatgcctctgtcaaggagtggacaatcacctactgaggagccccacccccgcctctggatggaccgaatcagggactagagtttaactgcagcggaacatgtcatttctctatttctgtgacgcgcccccatgcccccaccccaccacaagaggcaggagggcccagtcatgaccctcgtctctgcagggtgtctgtacacgttcttctgaaagctttagacagtaacagtttgcacatgaaaaataaagcgagcacctaaacaa

SEQ ID NO: 199689 - DNA, 3054 bp, Homo sapiens
  Payload ID: 19399
  Gene Name: WD repeat domain 1
  Uniprot ID: O75083
  ENST ID: ENST00000499869
  CDS Start-End: 195-2015
cgcaaccacagcgcgcagggcaggcgcgagctggcctctgagccccggcctcggaccgcccactccactcccggcacgcccggtgccgccttccggctccagtccccgggctcggcctcggcgaggtgtaattcgcagcgcgggccggccccggaggctctcggcgagcgcggcgcggtaacaagtgggcgaggatgccgtacgagatcaagaaggtgttcgccagcctcccgcaggtggagaggggcgtctccaagatcatcggcggcgaccctaagggcaacaattttctgtacaccaatggaaagtgcgtcatcctaaggaacatcgacaacccagcccttgctgacatctacacagagcacgcccatcaggtggtggtggccaagtatgcgcccagcggattctacattgcctccggagatgtgtctgggaagctgaggatctgggataccacgcagaaggagcacctgttgaagtatgagtaccagcctttcgctgggaagatcaaagacattgcttggactgaagacagtaagaggatcgccgtggtcggggaaggaagggagaagtttggagcagtcttcctctgggatagtggctcttctgtgggcgagattacaggacacaacaaagtcatcaacagcgtggacatcaagcagagccggccataccggctggccacgggaagcgatgataactgcgcggcattctttgagggacccccattcaagttcaagttcacaattggcgaccacagccgctttgtcaactgtgtgcgattctctcctgatgggaacagatttgccacagccagtgctgacggccagatatacatctatgacgggaagactggggagaaggtgtgcgcgctgggcggaagcaaggcccacgacggtgggatttacgcaattagttggagtcccgacagcacccatttgctttctgcttctggggacaaaacttccaagatttgggacgtcagcgtgaactccgtggtcagcacatttcccatgggctccacggttctggaccagcagctgggctgcctatggcagaaggaccacctgctcagtgtctccctgtccgggtacatcaactatctggacagaaacaaccccagcaagcccctgcacgtcatcaagggtcacagtaaatcgatccagtgtctgacggtgcataaaaacggcggcaagtcctacatttactctgggagccacgacggacacattaattactgggattcagagacgggggagaacgactccttcgctgggaaaggccacacgaaccaggtgtccaggatgaccgtggatgagtcggggcagctcatcagctgcagcatggacgacaccgtgcggtacaccagcctcatgctgcgggactacagcggacaaggagttgtgaaactggacgttcagccaaagtgcgtagccgtcggccccgggggatacgccgtggtcgtgtgcattggacagattgtcctgctgaaggatcagaggaagtgcttcagcatcgacaaccccggctacgagcccgaagttgtggcagtgcaccccggcggggacacggtggcaattgggggtgtggacggcaacgtccgcctgtattccatcctgggcaccacgctgaaggatgagggcaagctcctagaggccaagggccccgtgaccgacgtggcctactcccacgacggcgccttcctcgcggtgtgcgacgccagcaaggtggtcacagtgttcagcgttgctgacggctactcggagaacaatgttttttatggacaccatgcaaaaatcgtctgcctggcctggtccccagacaatgaacactttgcctccggtggcatggacatgatggtgtatgtttggaccctgagtgacccggaaaccagagtcaagatccaagatgcacaccggctgcaccatgtcagcagcctggcctggctggacgagcacacgctggtcacgacctcccatgatgcctctgtcaaggagtggacaatcacctactgaggagccccacccccgcctctggatggaccgaatcagggactagagtttaactgcagcggaacatgtcatttctctatttctgtgacgcgcccccatgcccccaccccaccacaagaggcaggagggcccagtcatgaccctcgtctctgcagggtgtctgtacacgttcttctgaaagctttagacagtaacagtttgcacatgaaaaataaagcgagcacctaaacaatgtgtggagcataactaaaacccacagcccaaccaaaccttgagaatgcgaaacattccagaggcagtagcctccaaagcacacagagcccctggccccgccgcggctctcactatctgtcaggggaggttgtacaggtgaatgagccggggggctcatgttcctgcctgcagaacatttctgtactagtgagaagagggaatatgcattgcagttcagcaaagccggaattctgtgttgaacagatgtctgtctccctagtgtgtgactcacaccttgtggctgccttcagagcgccacctccagatcagatggggacacacaacccctggatatgtttcattgtcagattttgtgcttgattttaagaatggaattgtgggtatctttcctttttttttaatgtatcttaactgttgcctgtcagtgtttacaaactagtgcgttgacggcaccgtgtccaagtttttagaacccttgttagccagaccgaggtgtcctggtcaccgtttcaccatcatgctttgatgttcccctgtctttccctcttctgctctcaagagcaaaggttaatttaaggacaaagatgaagtcactgtaaactaatctgtcattgtttttaccttccttttctttttcagtgcagaaattaaaagtaagtataaagcaccgtgattgggagtgtttttgcgtgtgtcggaatcactggtaaatgttggctgagaacaatccctccccttgcacttgtgaaaacactttgagcgctttaagagattagcctgagaaataattaaatatcttttctcttca

SEQ ID NO: 199690 - DNA, 4732 bp, Homo sapiens
  Payload ID: 19400
  Gene Name: WD repeat domain 11
  Uniprot ID: Q9BZH6
  ENST ID: ENST00000263461
  CDS Start-End: 247-3921
agcacaaccgcctaagcggcggaactctggagagtgcggaacctaggatcctaggaaactgaaggcaacggaacctgggggcgatggaatccgggagcggtggaacccggagcctgtagaacttgaatctagaggaacctgacagcggcgccgagggggccacccggactctgtttggaacggaagcacagtgtccgccgcttcctggttgcgggtcagcgcccaggtcctgggctggccgccgggatgttgccctacacagtgaacttcaaggtgtcggcgcgcaccctcacgggggccctcaacgcccacaacaaggcggcggtggactggggctggcaaggtttaattgcttatggatgtcattcacttgtggtagtgattgattccattactgcccaaactcttcaagttttagaaaagcataaagctgatgttgtaaaggttaaatgggccagggaaaactatcaccataacattggctcaccatattgcttacggttagcttctgctgatgtcaatgggaagatcatcgtctgggatgtagcagcaggagtagctcagtgtgagatccaagagcatgccaagcctatccaggatgttcagtggttgtggaatcaagatgcttcccgcgatttactgcttgctatccacccgccaaattacattgtgctctggaatgccgacactggcaccaaactatggaagaagagctatgcagataacattctttctttttcttttgacccttttgatccctcacatttaactttgcttaccagcgagggtattgttttcatctcagacttctccccatccaagcctccctcaggccctgggaaaaaagtttacatatccagcccacactctagcccagctcataacaagctggccacagccacaggtgccaagaaagctctaaataaagtaaaaattttaatcactcaagagaaacctagtgctgaattcataactctcaatgattgccttcagttggcatacctgccttcaaaaaggaatcacatgttgttgctctatcctcgagagattttaatccttgaccttgaggtgaatcagacggtgggtgtgattgcaatagaacgcacaggagttccatttttacaggtaataccctgctttcagcgtgatggtttattttgtctacatgaaaatggttgtataactttacgtgttcgaagatcttataataacatttttaccacttcaaatgaggaaccagatccagatccagttcaggagcttacctatgatttacgaagccagtgtgatgcaatcagggtgacaaaaaccgtccgtcccttcagtatggtgtgctgtcctgtcaatgagaatgcagccgccctcgtagtgagtgatggcagggtcatgatatgggaactcaagtctgcagtttgtaatcgaaattcacggaacagtagttctggtgtgtcacctttatattcaccagtgtctttctgtggaattcctgtaggagtgctacagaataaactcccagacctttccttagataacatgattgggcaaagtgcaattgctggggaagaacatcccagaggttcaattctgcgggaagtgcacctcaagttcctgctgacgggactgctttcaggactgcccgcaccacagtttgctattcgtatgtgtccaccgttgaccacaaaaaacatcaagatgtatcagccactgctggctgttggtacaagtaatggttctgtcctggtgtaccatctcaccagtggtctgctacacaaagagttaagcatccactcatgtgaagtcaagggtattgaatggacaagtttgactagttttctttcttttgctacctcaacaccaaacaatatgggattagtgagaaatgaacttcaactggttgatcttccaacaggtaggagcattgcttttcgtggtgaaagaggcaatgatgaatctgccatcgaaatgattaaagtatctcatttgaagcagtatttggcagtcgtattcagagataaacccctggagctatgggatgttaggacttgtacccttcttagagagatgtccaaaaacttccctacaataactgctttggagtggtcaccatctcacaacttgaagagcctgagaaagaagcaacttgcaactcgagaggccatggcccgccagaccgtagtctcagacacagagctgagtattgttgaatcatctgtgatcagcttgctgcaggaggcagaaagtaaatctgaacttagtcagaacatctctgcccgggaacattttgtatttaccgatattgatggccaagtgtatcatctcactgttgaaggaaactcagtaaaagacagtgctcggattccaccagatggaagtatgggtagtattacctgcatcgcttggaaaggtgatacattagtgcttggagatatggatggaaatttaaatttctgggacttgaaaggcagagtatccagaggaatacccacacaccgaagttgggtgaggaagattcgttttgctcctggtaaaggaaatcaaaaattaatagcaatgtacaatgatggagctgaagtgtgggatactaaagaggttcagatggtgagcagtttaagaagtggcagaaatgtgacctttcgtatattggatgtggactggtgtacgtcagataaagtgatcttggcctcagatgatgggtgcatcagagtcctagagatgtctatgaagtctgcgtgctttagaatggatgaacaagagttaaccgagcctgtgtggtgcccctatctccttgttccaagggcctctcttgccttgaaagccttcttattacaccagccttggaatggacagtattctttggacatttctcatgttgactatccagaaaatgaagaaataaagaatctcctccaagaacagttgaattcattgtctaatgacataaagaaactgttgcttgatccagaattcactctcttgcagaggtgcctgcttgtttcaaggctctatggtgatgaatcggagctgcacttctggactgtcgctgcccactacctgcacagcttatcccaggaaaagtcagccagcacaacagctcctaaagaagctgctcctcgagacaaactgagcaacccactggatatatgctatgacgtgctctgtgaaaatgcctactttcagaaatttcagctagaaagggttaatctgcaggaagtgaaacggtcaacttatgatcatacaaggaaatgtacagaccagctactgctcttgggtcaaacagacagagctgtgcagttgctgttggaaacaagtgcagataaccagcattattactgtgattcactgaaagcctgtttagtcactactgtcacctcgtcaggcccctctcagagcaccattaagttggtggcaacgaatatgattgccaatggcaaattggcagagggcgttcagttgctctgcctgatagataaggctgcagacgcctgccgctacctgcagacatacggcgagtggaatcgggctgcatggctggcaaaagtccgtttgaatcctgaggagtgtgccgatgttttaaggcggtgggttgaccacctttgttctccacaagtcaatcagaaatcaaaggctctcctggttctcctctctctgggctgcttttttagcgtggcagagacgcttcacagcatgagatactttgatagagcagccttatttgtggaagcttgcctcaagtatggagcatttgaagtcactgaggacacagagaaactcatcactgctatatatgcagattatgcccggagtttgaagaacctcggttttaagcagggagcagttctctttgcttcaaaagccggagcagctggcaaagacttattgaatgagcttgagtcccccaaggaagaacccattgaagagtgacagcttaataaatgccagggaatctgacctggaaggcagatgggagggggctggtctggctgtggccaccgtcacagtccaggatgaagaggagtacagggtcctgtgagctgtttgaccactgttctaagactatgtgtgcccaaaagcacataagcatctatgttgagagtaagtttgtatcctgcgttggtctcagaaagaacgtgaatgcttaagattttgaaagtacataatattttatactttgggagagagctttaagagtccctggaaatactttttaatttttttaacttaaaattcaagagactgaatcacttttctcattgattaaatgtaaagattattgagaaacctatagtaaatgaaatttgtgagatgttttctcaaatatatgctgtgcctgtacttatatacagtctttcaagagagatacaaacaaggcagaaacatttaaactagtattaaaggtagtttaccaaagcattttttgttttcttaccttgaaaacacagaaccgttaattccttggtttaagcagttgctaagttttgtaattttaggctcagaggaccataggaggttttaagatttatgtttagtccgataggtgaggtctttgatattttgaattttaactccttttatgatacatcacagtaacctcatttttgaagtctttctttgtactttaatgttctctctgttctaatagttgaagtatgagatgtaactattataaactgttgctgaaaacataaatgtctgtaacttacaaacatgataaataaattaaaaattccatcca

SEQ ID NO: 199691 - DNA, 4954 bp, Homo sapiens
  Payload ID: 19400
  Gene Name: WD repeat domain 11
  ENST ID: ENST00000497136
  CDS Start-End: 600-1199
ataaagctgatgttgtaaaggttaaatgggccagggaaaactatcaccataacattggctcaccatattgcttacggttagcttctgctgatgtcaatgggaagatcatcgtctgggatgtagcagcaggagtagctcagtgtgagatccaagagcatgccaagcctatccaggatgttcagtggttgtggaatcaagatgcttcccgcgatttactgcttgctatccacccgccaaattacattgtgctctggaatgccgacactggcaccaaactatggaagaagagctatgcagataacattctttctttttcttttgacccttttgatccctcacatttaactttgcttaccagcgagggtattgttttcatctcagacttctccccatccaagcctccctcaggccctgggaaaaaagtttacatatccagcccacactctagcccagctcataacaagctggccacagccacaggtgccaagaaagctctaaataaagtaaaaattttaatcactcaagagaaacctagtgctgaattcataactctcaatgattgccttcagttggcatacctgccttcaaaaaggaatcacatgttgttgctctatcctcgagagattttaatccttgaccttgaggtgaatcagacggtgggtgtgattgcaatagaacgcacaggagttccatttttacaggtaataccctgctttcagcgtgatggtttattttgtctacatgaaaatggttgtataactttacgtgttcgaagatcttataataacatttttaccacttcaaatgaggaaccagatccagatccagttcaggagcttacctatgatttacgaagccagtgtgatgcaatcagggtgacaaaaaccgtccgtcccttcagtatggtgtgctgtcctgtcaatgagaatgcagccgccctcgtagtgagtgatggcagggtcatgatatgggaactcaagtctgcagtttgtaatcgaaattcacggaacagggcaaagtgcaattgctggggaagaacatcccagaggttcaattctgcgggaagtgcacctcaagttcctgctgacgggactgctttcaggactgcccgcaccacagtttgctattcgtatgtgtccaccgttgaccacaaaaaacatcaagatgtatcagccactgctggctgttggtacaagtaatggttctgtcctggtgtaccatctcaccagtggtctgctacacaaagagttaagcatccactcatgtgaagtcaagggtattgaatggacaagtttgactagttttctttcttttgctacctcaacaccaaacaatatgggattagtgagaaatgaacttcaactggttgatcttccaacaggtaggagcattgcttttcgtggtgaaagaggcaatgatgaatctgccatcgaaatgattaaagtatctcatttgaagcagtatttggcagtcgtattcagagataaacccctggagctatgggatgttaggacttgtacccttcttagagagatgtccaaaaacttccctacaataactgctttggagtggtcaccatctcacaacttgaagagcctgagaaagaagcaacttgcaactcgagaggccatggcccgccagaccgtagtctcagacacagagctgagtattgttgaatcatctgtgatcagcttgctgcaggaggcagaaagtaaatctgaacttagtcagaacatctctgcccgggaacattttgtatttaccgatattgatggccaagtgtatcatctcactgttgaaggaaactcagtaaaagacagtgctcggattccaccagatggaagtatgggtagtattacctgcatcgcttggaaaggtgatacattagtgcttggagatatggatggaaatttaaatttctgggacttgaaaggcagagtatccagaggaatacccacacaccgaagttgggtgaggaagattcgttttgctcctggtaaaggaaatcaaaaattaatagcaatgtacaatgatggagctgaagtgtgggatactaaagaggttcagatggtgagcagtttaagaagtggcagaaatgtgacctttcgtatattggatgtggactggtgtacgtcagataaagtgatcttggcctcagatgatgggtgcatcagagtcctagagatgtctatgaagtctgcgtgctttagaatggatgaacaagagttaaccgagcctgtgtggtgcccctatctccttgttccaagggcctctcttgccttgaaagccttcttattacaccagccttggaatggacagtattctttggacatttctcatgttgactatccagaaaatgaagaaataaagaatctcctccaagaacagttgaattcattgtctaatgacataaagaaactgttgcttgatccagaattcactctcttgcagaggtgcctgcttgtttcaaggctctatggtgatgaatcggagctgcacttctggactgtcgctgcccactacctgcacagcttatcccaggaaaagtcagccagcacaacagctcctaaagaagctgctcctcgagacaaactgagcaacccactggatatatgctatgacgtgctctgtgaaaatgcctactttcagaaatttcagctagaaagggttaatctgcaggaagtgaaacggtcaacttatgatcatacaaggaaatgtacagaccagctactgctcttgggtcaaacagacagagctgtgcagttgctgttggaaacaagtgcagataaccagcattattactgtgattcactgaaagcctgtttagtcactactgtcacctcgtcaggcccctctcagagcaccattaagttggtggcaacgaatatgattgccaatggcaaattggcagagggcgttcagttgctctgcctgatagataaggctgcagacgcctgccgctacctgcagacatacggcgagtggaatcgggctgcatggctggcaaaagtccgtttgaatcctgaggagtgtgccgatgttttaaggcggtgggttgaccacctttgttctccacaagtcaatcagaaatcaaaggctctcctggttctcctctctctgggctgcttttttagcgtggcagagacgcttcacaggtaaaccgagagttcacatgggctgctcaggcctgcccgtgagcagtcacttcatgttctctcgcggttctagcaggtcatggtactcgatgtgtaaagtgaaaggagaagtatacatttcaggtttgtcaaaaaacccaaaggagaatggaactgtccgtattcattacatcttcattcggtctaggagctatgctagtttcctactaatatgctgatcagacttaacaggcacctagtaaaagggaatttaaaagtcttcagagaattggggtccattcagctttgactagagcaactgagaggaggcccagagagcagggggagaggcgacagaaggcatggtgaggtggagacatcccgtctgaaaatctggaagaggaacaaccatcactaattgtggagcatttcatttattcaaaactaagggaggtagattacggaaatatgacaaaagattacttgtcaactctggacaggggtacatgggcacttgtcatatctctgtagatttttgtgtatttaaactatttcacaattttttaaagtattaattttaaaaagcttgtgtttggagatgtgagtattcttccctccttttttcaacaaactagggcttagaaaagtgcttgtatcttaatgcagtatgcaggtttccagggaaaatgtgtaaatgtctttatacccttcgatgctgctgcccaccagtgatgtaaatcacaaagcataactcttgttttgttctgttgagcagcatgagatactttgatagagcagccttatttgtggaagcttgcctcaagtatggagcatttgaagtcactgaggacacagagaaactcatcactgctatatatgcagattatgcccggagtttgaagaacctcggttttaagcagggagcagttctctttgcttcaaaagccggagcagctggcaaagacttattgaatgagcttgagtcccccaaggaagaacccattgaagagtgacagcttaataaatgccagggaatctgacctggaaggcagatgggagggggctggtctggctgtggccaccgtcacagtccaggatgaagaggagtacagggtcctgtgagctgtttgaccactgttctaagactatgtgtgcccaaaagcacataagcatctatgttgagagtaagtttgtatcctgcgttggtctcagaaagaacgtgaatgcttaagattttgaaagtacataatattttatactttgggagagagctttaagagtccctggaaatactttttaatttttttaacttaaaattcaagagactgaatcacttttctcattgattaaatgtaaagattattgagaaacctatagtaaatgaaatttgtgagatgttttctcaaatatatgctgtgcctgtacttatatacagtctttcaagagagatacaaacaaggcagaaacatttaaactagtattaaaggtagtttaccaaagcattttttgttttcttaccttgaaaacacagaaccgttaattccttggtttaagcagttgctaagttttgtaattttaggctcagaggaccataggaggttttaagatttatgtttagtccgataggtgaggtctttgatattttgaattttaactccttttatgatacatcacagtaacctcatttttgaagtctttctttgtactttaatgttctctctgttctaatagttgaagtatgagatgtaactattataaactgttgctgaaaacataaatgtctgtaacttacaaacatgataaataaattaaaaattcca

SEQ ID NO: 199692 - DNA, 1781 bp, Homo sapiens
  Payload ID: 19400
  Gene Name: WD repeat domain 11
  ENST ID: ENST00000604585
  CDS Start-End: 846-1781
aacaaggcggcggtggactggtgaggacgccgagcttccaggtcgccaggatcggccaggaatgtgtgagggggaagggggaaggacaagaggtttcaccccctggggctggcaaggtttaattgcttatggatgtcattcacttgtggtagtgattgattccattactgcccaaactcttcaagttttagaaaagcataaagctgatgttgtaaaggtccaagtttcagtctggtattatattcccatcgactgaagaatttactgttaaatgggccagggaaaactatcaccataacattggctcaccatattgcttacggttagcttctgctgatgtcaatgggaagatcatcgtctgggatgtagcagcaggagtagctcagtgtgagatccaagagcatgccaagcctatccaggatgttcagtggttgtggaatcaagatgcttcccgcgatttactgcttgctatccacccgccaaattacattgtgctctggaatgccgacactggcaccaaactatggaagaagagctatgcagataacattctttctttttcttttgacccttttgatccctcacatttaactttgcttaccagcgagggtattgttttcatctcagacttctccccatccaagcctccctcaggccctgggaaaaaagtttacatatccagcccacactctagcccagctcataacaagctggccacagccacaggtgccaagaaagctctaaataaagtaaaaattttaatcactcaagagaaacctagtgctgaattcataactctcaatgattgccttcagttggcatacctgccttcaaaaaggaatcacatgttgttgctctatcctcgagagattttaatccttgaccttgaggtgaatcagacggtgggtgtgattgcaatagaacgcacaggagttccatttttacaggtaataccctgctttcagcgtgatggtttattttgtctacatgaaaatggttgtataactttacgtgttcgaagatcttataataacatttttaccacttcaaatgaggaaccagatccagatccagttcaggagcttacctatgatttacgaagccagtgtgatgcaatcagggtgacaaaaaccgtccgtcccttcagtatggtgtgctgtcctgtcaatgagaatgcagccgccctcgtagtgagtgatggcagggtcatgatatgggaactcaagtctgcagtttgtaatcgaaattcacggaacagtagttctggtgtgtcacctttatattcaccagtgtctttctgtggaattcctgtaggagtgctacagaataaactcccagacctttccttagataacatgattgggcaaagtgcaattgctggggaagaacatcccagaggttcaattctgcgggaagtgcacctcaagttcctgctgacgggactgctttcaggactgcccgcaccacagtttgctattcgtatgtgtccaccgttgaccacaaaaaacatcaagatgtatcagccactgctggctgttggtacaagtaatggttctgtcctggtgtaccatctcaccagtggtctgctacacaaagagttaagcatccactcatgtgaagtcaagggtattgaatggacaagtttgactagttttctttcttttgctacctcaacaccaaacaatatgggattagtgagaaatgaacttcaactggttgatcttccaacaggtaggagcattgcttttcgtggtgaaagaggcaatgatgaatctgccatc

SEQ ID NO: 199693 - DNA, 3010 bp, Homo sapiens
  Payload ID: 19400
  Gene Name: WD repeat domain 11
  ENST ID: ENST00000605543
  CDS Start-End: 60-347
acagtgtccgccgcttcctggttgcgggtcagcgcccaggtcctgggctggccgccgggatgttgccctacacagtgaacttcaaggtgtcggcgcgcaccctcacgggggccctcaacgcccacaacaaggcggcggtggactggggctggcaaggtttaattgcttatggatgtcattcacttgtggtagtgattgattccattactgcccaaactcttcaagttcctgctgacgggactgctttcaggactgcccgcaccacagtttgctattcgtatgtgtccaccgttgaccacaaaaaacatcaagatgtatcagccactgctggctgttggtacaagtaatggttctgtcctggtgtaccatctcaccagtggtctgctacacaaagagttaagcatccactcatgtgaagtcaagggtattgaatggacaagtttgactagttttctttcttttgctacctcaacaccaaacaatatgggattagtgagaaatgaacttcaactggttgatcttccaacaggtaggagcattgcttttcgtggtgaaagaggcaatgatgaatctgccatcgaaatgattaaagtatctcatttgaagcagtatttggcagtcgtattcagagataaacccctggagctatgggatgttaggacttgtacccttcttagagagatgtccaaaaacttccctacaataactgctttggagtggtcaccatctcacaacttgaagagcctgagaaagaagcaacttgcaactcgagaggccatggcccgccagaccgtagtctcagacacagagctgagtattgttgaatcatctgtgatcagcttgctgcaggaggcagaaagtaaatctgaacttagtcagaacatctctgcccgggaacattttgtatttaccgatattgatggccaagtgtatcatctcactgttgaaggaaactcagtaaaagacagtgctcggattccaccagatggaagtatgggtagtattacctgcatcgcttggaaaggtgatacattagtgcttggagatatggatggaaatttaaatttctgggacttgaaaggcagagtatccagaggaatacccacacaccgaagttgggtgaggaagattcgttttgctcctggtaaaggaaatcaaaaattaatagcaatgtacaatgatggagctgaagtgtgggatactaaagaggttcagatggtgagcagtttaagaagtggcagaaatgtgacctttcgtatattggatgtggactggtgtacgtcagataaagtgatcttggcctcagatgatgggtgcatcagagtcctagagatgtctatgaagtctgcgtgctttagaatggatgaacaagagttaaccgagcctgtgtggtgcccctatctccttgttccaagggcctctcttgccttgaaagccttcttattacaccagccttggaatggacagtattctttggacatttctcatgttgactatccagaaaatgaagaaataaagaatctcctccaagaacagttgaattcattgtctaatgacataaagaaactgttgcttgatccagaattcactctcttgcagaggtgcctgcttgtttcaaggctctatggtgatgaatcggagctgcacttctggactgtcgctgcccactacctgcacagcttatcccaggaaaagtcagccagcacaacagctcctaaagaagctgctcctcgagacaaactgagcaacccactggatatatgctatgacgtgctctgtgaaaatgcctactttcagaaatttcagctagaaagggttaatctgcaggaagtgaaacggtcaacttatgatcatacaaggaaatgtacagaccagctactgctcttgggtcaaacagacagagctgtgcagttgctgttggaaacaagtgcagataaccagcattattactgtgattcactgaaagcctgtttagtcactactgtcacctcgtcaggcccctctcagagcaccattaagttggtggcaacgaatatgattgccaatggcaaattggcagagggcgttcagttgctctgcctgatagataaggctgcagacgcctgccgctacctgcagacatacggcgagtggaatcgggctgcatggctggcaaaagtccgtttgaatcctgaggagtgtgccgatgttttaaggcggtgggttgaccacctttgttctccacaagtcaatcagaaatcaaaggctctcctggttctcctctctctgggctgcttttttagcgtggcagagacgcttcacagcatgagatactttgatagagcagccttatttgtggaagcttgcctcaagtatggagcatttgaagtcactgaggacacagagaaactcatcactgctatatatgcagattatgcccggagtttgaagaacctcggttttaagcagggagcagttctctttgcttcaaaagccggagcagctggcaaagacttattgaatgagcttgagtcccccaaggaagaacccattgaagagtgacagcttaataaatgccagggaatctgacctggaaggcagatgggagggggctggtctggctgtggccaccgtcacagtccaggatgaagaggagtacagggtcctgtgagctgtttgaccactgttctaagactatgtgtgcccaaaagcacataagcatctatgttgagagtaagtttgtatcctgcgttggtctcagaaagaacgtgaatgcttaagattttgaaagtacataatattttatactttgggagagagctttaagagtccctggaaatactttttaatttttttaacttaaaattcaagagactgaatcacttttctcattgattaaatgtaaagattattgagaaacctatagtaaatgaaatttgtgagatgttttctcaaatatatgctgtgcctgtacttatatacagtctttcaagagagatacaaacaaggcagaaacatttaaactagtatt

SEQ ID NO: 199694 - DNA, 8100 bp, Homo sapiens
  Payload ID: 19401
  Gene Name: WD repeat domain 12
  Uniprot ID: Q9GZL7
  ENST ID: ENST00000261015
  CDS Start-End: 751-2022
atcggccaccgtcgaccgtttcctctctcatccgttcttttctttgtatttccgcctctcgcctctctctaaaagccgcagttagaggcgagatttaggaaaaacctctgccgagtgagcctctggttgggaatatgtatgagaaaaaaaaactggcaaggcgttagtcaagcaaagctgaaggcagaggaaatttgatatctggctggagtctagaggatttaatgcaaataagatactctgagggcagcgtggcaaaaaaagactacaattcccggtggtcacagcgtttgagaagcgatgctttctgagacttgtagtaactaggagctgtgtttgaactatccaggctcaggacagcctcttgaaaaaaaattttttattaataaagcggatttgagtgggatctttttcctaatcgattacgggcccacacgtatgggaagaattctaacaatgattaaagggacatgctacctttacgactatccttttctaatcgatgactcctaaatctaggagtaggtagtcgatgtttgtggtctgggcgtctgtagaagggcaacctcgtgctttctgcagaggagaccggagggcagaaggcagagtccaggcttagactgcagttcctcgcttacctgtgcagtctaattttgagctgcctctttgtagtcttaaaaggcaggagcttcgtgttgtgggtctgctaacccgtacgtttccgtgggcaagtcgtgtgtactcctcgccatggctcagctccaaacacgcttctacactgataacaagaaatatgccgtagatgatgttcccttctcaatccctgctgcctctgaaattgccgaccttagtaacatcatcaataaactactaaaggacaaaaatgagttccacaaacatgtggagtttgatttccttattaagggccagtttctgcgaatgcccttggacaaacacatggaaatggagaacatctcatcagaagaagttgtggaaatagaatacgtggagaagtatactgcaccccagccagagcaatgcatgttccatgatgactggatcagttcaattaaaggggcagaggaatggatcttgactggttcttatgataagacttctcggatctggtccttggaaggaaagtcaataatgacaattgtgggacatacggatgttgtaaaagatgtggcctgggtgaaaaaagatagtttgtcctgcttattattgagtgcttctatggatcagactattctcttatgggagtggaatgtagagagaaacaaagtgaaagccctacactgctgtagaggtcatgctggaagtgtagattctatagctgttgatggctcaggaactaaattttgcagtggctcctgggataagatgctaaagatctggtctacagtccctacagatgaagaagatgaaatggaggagtccacaaatcgaccaagaaagaaacagaagacagaacagttgggactaacaaggactcccatagtgaccctctctggccacatggaggcagtttcctcagttctgtggtcagatgctgaagaaatctgcagtgcatcttgggaccatacaattagagtgtgggatgttgagtctggcagtcttaagtcaactttgacaggaaataaagtgtttaattgtatttcctattctccactttgtaaacgtttagcatctggaagcacagataggcatatcagactgtgggatccccgaactaaagatggttctttggtgtcgctgtccctaacgtcacatactggttgggtgacatcagtaaaatggtctcctacccatgaacagcagctgatttcaggatctttagataacattgttaagctgtgggatacaagaagttgtaaggctcctctctatgatctggctgctcatgaagacaaagttctgagtgtagactggacagacacagggctacttctgagtggaggagcagacaataaattgtattcctacagatattcacctaccacttcccatgttggggcatgaaagtgaacaataatttgactatagagattatttctgtaaatgaaattggtagagaaccatgaaattacatagatgcagatgcagaaagcagccttttgaagtttatataatgttttcacccttcataacagctaacgtatcactttttcttattttgtatttataataagataggttgtgtttataaaatacaaactgtggcatacattctctatacaaacttgaaattaaactgagttttacatttctctttaaaggtattggtttgaattcagatttgcttttttatttttatttgttttttttttttttgagatggagtcttgctctgttgcctaggctggagtgcagtggcgcaatctcaactcactgcaacctccgcttcctaggttcaatcgattctcctgtctcaacctcccaagtagctgggattacaggcacacatcacgatgtcctgctaatttttgtatttttagtagagacggggttttgccatgttggccaggctggtcttgaactcctgacctcaggtgatctgcccacctcagcctcccaaagtgagccactgtgcctggccgaattaagatttgtttttgaaatgctgtaaaaggttatattggaaatccagtaattgattgttgagatttttatttctgttagagacttagatttttttaagttagctattttaaaaaagcattcaaaaagattaatgaaaattgtaatagagaaaaagttagaaattcagttccttttggcagaataaatgttcaagaaaattaggctgtgagggtactcagaacattaaaaaaaatgtaggctgggcatggtggctcacacctgtaatcccagcacattgggaggccgaggcaggtggatcacctgaggtcaggagtttgagaccaccctggccaacatgtcaaaaccctgtctctgctaaaactacaaaaattagctgggcatggtggcgaccgcctgtaatcccaactacttgggaggctaaggcaggagaattgcttgaacccgggaggcaggggttgtagtgagctgagattgtgccactgcactccagcctgggtgacagtgcaagactctgtctcaacaacaacgataacaaaatattgattcggcagggcacggtggctcatgcttgtaatcccagcattttgggtggccaaggcaggcggctcacctgaggtcaggggttcgagaccagcctgaccaacatggtgaaactttgtctctactaaaaaaaaaaaaatccaaaacaaattagccgggtgtggtggcacactcctgtggtcccaagtacttgggaggctgaggcaggagaattggttgaacccaggaggtggaggttgcagtgagctgagatcataccactgtgctccagcctgggcagcagagccagactctatctcaaaataaagacaagtagattgccaatttttgaagaattcatcaagatattttaaggaaggcactttatattaaatatatgtcagatcctttagaaattgcatacagttggttgggcacggtggctcacgcctgtaatcccagcactttgggaggctgaggcgggcggattgcctgagctcaggagttcgaaaccagcctgggcaacacagtgaaacctcgtctctaataaaatacaaaaaattagctgggcgtggcagcatgtgcctgtagtcccagctactccggaggctgaggcaggcaaattgcttgaacccgagaggcagaggttgcagtgagctgagattgtgccactgcatttcagcctgggcaacagagcaagactctgtctcaaaaaaaaataaaaaattgcattgcatacagttttcactgtaaccctaatctttcctcatgtgtagattagaataaattttttagacaaaacctttcatcagtattaaacattctacagattttatgatatcattagcatttatctttatgcatgtgttatataaaaatatttaaagtaaatgtattttttaaatgttatttccattattaatggattgatactccttaagtagagcattcacaaccttttagtaatatttgggaaatatgtttggtctcattattagatggtattacatctcaaatgatgttcctgttgcagaagtctgcgaaacaatatctaaacttggctgcagttgagagctaaacagtgtattgaaccagttaggagtttagttctctgtagaaaaccagaggcagtccagggctgatgtaggttttgttccacattctttaggatcctaggctccctccatccctggtatgtggtcctcattttcatatagaccaagagctagagctccagttaccatttcttaaagtatattttaatgccaaatagtgaataaaggtggccagaaaattcatgcacagaatccttctttttctcattttgtgctgattggtataaattttattgtatttgtagtctctggaaatcttctaactttgagaggacaaagatgaattcctagtcctgttttggatggtcttcaaatgatccttaagggcagttatttaaaatgtctttcttaactcacccaacctaggctgaccgaatgtagtctgtataaactagatggttaaagataaagaagcctatatatcagatgcatagacaaagaataaaatggcatccagaactggtccccacctattcccaatcctggttccacagcagaatacattcatagttcaggcattcttccttgagatagatataatgtaagtgaccaagtctcttggacaagtattgtctctgatcaatccctgccaaactcctttccttggttaactcaagtggttagatcttactccctgaacagaaggaatatgagaggtcaatacatgcctagactattcagtcctctgatattgctccacaccctttccctcaaaagccatgagacctttcaatggtcccagttcctctaccagaacaccagagatgcctgctttacatggacttatatattcccaagaatcacttggataaatgagtggtgctgctttcccgtggttggggaaaagctaggaacctgacaatgcagtgctcagaacctgctgaccggtactagttatgctgtcttgccatagtagtgcagttctttaaaatgttgatacttgctctcttatcaaaggttggtttttttgtttttttgtcaagacagggtctcactatgtcacccatactggagtacaatggtgtaatcttggcttactgcaacctccaccttctgggctcaagctggcctctcacctcagccttccaagtagctgggaccacacccagtcaattttttattttttattttttaatttatttttattattactttttttgtagagagagggtttcgccatgtagcccatgctggtcttgaactcctgggctcaagctgtctgcccacctggacctcccaaagtgctgagattacaggcatgagccaccgcacccagcccaaataaagttttaagaaattacttggccaggcatagtggggcctttgtagaaaaacatagcttttctatgagaagatgatcaatattttcttttcctttgaatttggaattaccattttggaactgttgtcaacaatgcataataatatatcagaatgcttcctagtatattattggagaaagaacaaacaaaagtttaaattgatataaaatgcatataatggaacaagcaaccctgcaaaaaaaaaaatatatatatatatataccatctgggaatttctgataataacattgaaatctgttcacacagtctaaaattcttttgatgtatcgtagttttgaaaaaaaggtaacagtttactatatataacaaatataaggaaaatattaaattttttgaaagatactagtttttatttttgttcattttttagagacagggtctcactatgttgcccaagctagagtgcagcggcccgattatagctcactgcagcctctaactcccggactcaagggatcctcccacctcatcctcctaactaggaccacaggcgcatgtcaccacatctggctgattttaaaatttttttgtggagacagtcttgctgtgttgcccaggctggttatgaactcttggcctcaggcagtcctcatgcctcagcctccctaagtgctcggattataggcatgccactgtgcctggccaaaaatacagattttttaatagatattactatggctcctattcttaaaggaaaaaatatgacattttaagactatatgcaagggatattccaataatatcttttttatttaaaaagccactaattagaatcagatttcattaggcaagtgaaatccagattttactagccagaaactgccaggtgtagaaacagcaagaacattttagtcacttcattgttgacatttttgactatcatagattaagtatcaaacacaataacagtattttgttatatgaaccaaatatatctctttttacgagacatagtctagctctgccatccaggctcaactcctgggttcaagggatcctcctgccccagcttcctgagtacgtacctgggagtacaattgcatgctgccacacccagctattttttttatttttgtggagatggcgtcttgctatgttgcccaggctggactccaactcctgacctcaagcaatcatctcaccttggcctcaaaagtgctaagattacaggcatgagccactgcatccagcctgaaccaaatatatctttattataacttaggagagaaacgtttttggctggttagttttacagaattaaacctaatggttgttctaatagcagttccaatgatttgcagatttgaggaagtaaattattttcttacagtgtccataaaagtaacaatgaaactatatcctaccataataatcctctataggtaataaattatttgcattttataggagagaaaaatatatgttaaagtttttgaacagtcacacaggcaggaaataaatggcagtgaatttgaacttggacttatcttggacaagctcttaactggtatatattttgtcaatcttatgtcgtgcacaagaatgatgtttttataaatggaaagaatgagtgtggaagtgtcttcacttgcctaacagaaaggttatatgtggctgggcgccgtggctaacgcctgtaatcccaacattttgggaggctgaggtgggcatatcatctgaggtcgggagttcaagaatagcctgaccaacatggagaaaccccgtctctactaaaaatacaaaattagccagtcatagtggcacatgcctgtaatcccagctacttggaaggctgaggcagaagaattgcttgaacccaggaggtggaggttgtggtgagccaagatcgcgccattgcactccatcctgggcaacaagagcgaaactccgtctcaaaaaaaaaaaaaaaaaaagtaatacataaatttaagtgacatttgtgggtactaaattacaataatatgttcagctttgcatttttttgcctttaaaattaatttcaattttagcgtgccactaaacgtattactgtaatagtatataaatgtataaagatcaatttctgtatattctaataggaattgtatataagcaaaaatgaattttagaaattatcctattattcatgtaattatgtcattcatgttatttaaaggaaaccacaatgcagacaggttaagtacctagtgtgaaggtatgtaaccaattaatggagctgtgcgacatacatctgagtaataaagactacagagaaagtatcttgttaggtactatctgatacaaagtttagaaacatgtcaaacaattctatgtatagttggtgaaagtgtaataacatggctgagacttaataccagatgaagttcagtggtttcagggggaggaaataatttttaaaacgatgtcgataacacttcacatttaaaatcatcataataattctaattctagaattgtgtctaattctaatactgtttctagctttgcttgaataaacagaaatgtagtagggaagaga

SEQ ID NO: 199695 - DNA, 2124 bp, Homo sapiens
  Payload ID: 19402
  Gene Name: WD repeat domain 13
  Uniprot ID: Q9H1Z4
  ENST ID: ENST00000218056
  CDS Start-End: 506-1963
ctttctgatagcaggcagccatcttgcctggagcctgagaaagggaggagagacagaaggaaccggcgacagtggtctcagggccgctccggggggcctcaagaaccggaggcagccccggaggtggtccccgatcccgggctatgctcttggatctgagaagggaaggcggagggcggcggggacaagatgggtggagaatgtcaagcaaggaatgctaggcgggggaggggcgttgctatggcgactggggaggggcggtgtctgttctgaatcgctgtgtgtcacccgggcgctgcccaggaagggcagggctggggtgatgaccatggtaacacccgggggggagttcgtgacatctccggcgcggagggactcgatgtctatggcaatggtcgcctggtggaagggacggaactagatcccttcgctcgggacgctcacattccaggcccttgtcctgcaggctgccgcgggcggacacgccagaggaggaggccggggaatggccgcggtgtggcagcaagtcttagcagtggacgcgaggtacaacgcgtaccgcacaccaacgtttccacagtttcggacgcagtatatccgccggcgcagccagctgctgcgggagaatgccaaggctgggcaccccccagcgctgcgtcggcagtacctgaggcttcgggggcagctgctgggccagcgctacgggcccctctccgagccaggcagtgctcgtgcctatagcaacagcatcgtccgcagtagccgcactactcttgaccgcatggaggactttgaggatgatcctcgggccctgggggcccgtgggcaccgtcgttctgtcagcagaggctcctaccagctgcaggcgcagatgaaccgtgccgtctatgaggacaggccccctggcagcgtggtgcccacgtcagcagcagaggcaagtcgggccatggccggggacacgtcactgagcgagaactatgcctttgcgggcatgtatcatgtttttgaccagcacgtggatgaggcagtcccaagggtgcgcttcgccaatgatgaccgacaccgcctggcctgctgctcactcgacggcagcatctccctgtgccagctggtgcctgccccacccacagtgcttcgcgtgctacggggccacacccgtggtgtctccgacttcgcctggtccctctccaatgacatcctcgtgtccacctcactggatgccaccatgcgcatctgggcctctgaggatggtcgctgcatccgagagatccctgaccccgatagcgctgaactgctctgctgcaccttccagcctgtcaacaacaacctcactgtggtggggaacgccaagcacaacgtgcatgtcatgaacatctccacaggcaagaaagtgaaggggggctccagcaagctgacaggccgtgtccttgctctgtcctttgatgcccctggccggctgctctgggcgggtgatgaccgtggcagtgtcttctctttcctctttgatatggccacagggaagctgaccaaagccaagcgtttggtggtgcatgaggggagccctgtgaccagcatctcagcccggtcctgggtcagccgcgaggcccgggatccctcactgctcatcaatgcttgcctcaacaagttgctgctctacagggtggtagacaacgaggggaccctgcagctgaagagaagcttccccatcgagcagagctcacatcctgtgcgcagcatcttctgtcccctcatgtccttccgccagggggcctgcgtggtgacgggcagtgaggacatgtgcgtgcacttctttgatgtggagcgggcggccaaggctgctgtcaacaagctgcagggccacagtgcacctgtgcttgatgtcagcttcaactgcgacgagagcctactggcctccagtgacgccagcggcatggtcatcgtctggaggcgggagcagaagtagggtcctgtcggccctgctgctgtcctccatcccacccctcttactccagcctcgtgttgtaaataaagtttcggtggtcatgctgagggccggctcccagctctgccggggacggacagggcagagggcagcgggcagctccaggaacacggtggaacggg

SEQ ID NO: 199696 - DNA, 5469 bp, Homo sapiens
  Payload ID: 19402
  Gene Name: WD repeat domain 13
  Uniprot ID: Q9H1Z4
  ENST ID: ENST00000376729
  CDS Start-End: 177-1634
tgggctcggcagttctttctgatagcaggcagccatcttgcctggagcctgagaaagggaggagagacagaaggaaccggcgacagtggtctcagggccgctccggggggcctcaagaaccggaggcagccccggaggctgccgcgggcggacacgccagaggaggaggccggggaatggccgcggtgtggcagcaagtcttagcagtggacgcgaggtacaacgcgtaccgcacaccaacgtttccacagtttcggacgcagtatatccgccggcgcagccagctgctgcgggagaatgccaaggctgggcaccccccagcgctgcgtcggcagtacctgaggcttcgggggcagctgctgggccagcgctacgggcccctctccgagccaggcagtgctcgtgcctatagcaacagcatcgtccgcagtagccgcactactcttgaccgcatggaggactttgaggatgatcctcgggccctgggggcccgtgggcaccgtcgttctgtcagcagaggctcctaccagctgcaggcgcagatgaaccgtgccgtctatgaggacaggccccctggcagcgtggtgcccacgtcagcagcagaggcaagtcgggccatggccggggacacgtcactgagcgagaactatgcctttgcgggcatgtatcatgtttttgaccagcacgtggatgaggcagtcccaagggtgcgcttcgccaatgatgaccgacaccgcctggcctgctgctcactcgacggcagcatctccctgtgccagctggtgcctgccccacccacagtgcttcgcgtgctacggggccacacccgtggtgtctccgacttcgcctggtccctctccaatgacatcctcgtgtccacctcactggatgccaccatgcgcatctgggcctctgaggatggtcgctgcatccgagagatccctgaccccgatagcgctgaactgctctgctgcaccttccagcctgtcaacaacaacctcactgtggtggggaacgccaagcacaacgtgcatgtcatgaacatctccacaggcaagaaagtgaaggggggctccagcaagctgacaggccgtgtccttgctctgtcctttgatgcccctggccggctgctctgggcgggtgatgaccgtggcagtgtcttctctttcctctttgatatggccacagggaagctgaccaaagccaagcgtttggtggtgcatgaggggagccctgtgaccagcatctcagcccggtcctgggtcagccgcgaggcccgggatccctcactgctcatcaatgcttgcctcaacaagttgctgctctacagggtggtagacaacgaggggaccctgcagctgaagagaagcttccccatcgagcagagctcacatcctgtgcgcagcatcttctgtcccctcatgtccttccgccagggggcctgcgtggtgacgggcagtgaggacatgtgcgtgcacttctttgatgtggagcgggcggccaaggctgctgtcaacaagctgcagggccacagtgcacctgtgcttgatgtcagcttcaactgcgacgagagcctactggcctccagtgacgccagcggcatggtcatcgtctggaggcgggagcagaagtagggtcctgtcggccctgctgctgtcctccatcccacccctcttactccagcctcgtgttgtaaataaagtttcggtggtcatgctgagggccggctcccagctctgccggggacggacagggcagagggcagcgggcagctccaggaacacggtggaacggggttcattgactcatttgtgcattcatgcatcgacggattcattcattccacaagcattgattgaatgtctgctgggttacaggccctgccttaactgttttacacacttatgcattcgatagacattagtgagccctgaccgtgtgccaggaactgttctaggcactggggatactgctctgacctaaactgatggaaatgcctgccttcattgggcttgcatcatagcggagacagtagataaaaacatggaacaggccagctaatgatgagtggtatgaagaaaataaagcaaggatgggagacagagctgcagaagttgggggagtgggctctttatggtgacagcatcagggaagatgatcctgacagggtgacttttttgtttttgagacagggtctcactctgtcacccaggttggaatgcagtggcatgaccatagctcactgcagcctcaacctccagggctcaagtgatcctcacttaagcctcccaagtagctgggactacaggtgtgtgccaccacactcgggtaatttttgtatttttagtagagacggggtctcgccatgttgctcaggctggtcttgaactcctgggctcaagcgatccactcgcctcagcctcccaaagtgctgggattacaggcatgaaccaccacgcctggctcagggtgacatttaaagacctgaatgaagtgagtgggagtcatagtgtagggggagaacattccaggcagagagaaagccagcctaaaggcactgaggctggagcgctccagaaggatcattgtgtatgccagagtcttgctggaccagagtgtgacagtacatgaggtcagacaggccagatgcttcatgggccacagttaggactttggctttttttctgagtgggggtgaccagaaggtgtcaagcagaggaggaacatgatctgacttggtcatagaggctccctctggctgctgaaggggacagattgggggtgggggtagaagcaggggacccagcaggagacccctctgagcgcagtgatggggacttgcaccagggtagtgacagtggaggagttggcgggggaatgttgggtcggacccccagggggttcactatgttaggctgcaggactctgctgcctcctcagggggcgatattcccaacccttctgtgcattgtgttgtttattaaaagcagggagcagaggtgttgagtcctggagccccaagctggtgcaggagcaacgggaagttaaggctgacctggggcctcctgctgtgtggcggaatctccatccctcagaccacccctgtctcctcccagccccatccagggtacaaattccagccctggaacagctcagagaccaaaaagtgatgttaagtatttgaggggagccccaagagaggagaaaaagctttgagtattgatgggggtaaataaccaaaatcacttatcagtggcctgcgtcaccagaaaatgtcaaagttacctgaagcagcaaagaggctcttgctccggcccctcccttccttctcagctccatttgttgccacatatgcgttgactggaactgcgactgacatcttgggaccttagggtcagtccacagcgtggtagagactccagcttggcccagcattgctgagctgctgaactcgcaccaacagtcttgttggagggaaataatctcccgtttgttcagtccagttatttgacagtgtggttacttgcaccccaagcatttctaactggcacttccatctaatagacctcagggtacatggtggtgagatagggacatcagtgagctggattgttcccatggtaaaggtcatgtatgtgtgtgtgtgtcatggtcctcaataccagccccaagcccagtgatttgctaggaggactcccaagactcagtatgtggttgtattcatggctacgattgacttattacaacaaaaagatatggagcaaaatcagcaaaaagaaatggtgtgcaggaccaactcccagagagacccaggcacaagtttccagggcttctctctcattggagtcacacaagatgtgctcggttcacagtaatgggttgtgacaatacatgcgaaatgttgctgaccaaggaagctcaattagagactcagcacccagaggttttttttgttgttgttgttgttttggtttttttttggcgggggggggggggtcttgctctgacgcccaggctggaatgcagtggcatgatcttggctcactgcagcctccacctcctgggttcaagcgatcctcgggcctcagcttcccgaatagctggaactacaggcgcgcaccagcaagctcggctaatttttgtatttttagtagggatggggtttcaccatgttggccaggctgatcttgaactcctgacctcaagtgatcctcccacctcagcctcccaaactgctgggattacaggcgtgagcacctggctggtatcaagtttttattggggcatggtcacataggcaccccctgcctggcacctacccaaatcccaggctcccaaaaggaaagcaggggctcagcataaaccacctttttttttttttttttaattgagacggagtctcgctttgtcgccaggctggagtgcagtggcgtgatctcggcttactgtaacctccgcctcctgggttcaagcaattctcctgcctcagcttcctgaatagctgggactacaggcgcctgccaccaccacgcccagctaatttttgtatttttagtagagacggggtttcaccatattggccaggctggtctccatctcttgaccttgtgatccgcctgcctcgacctcccaaagtgctgggattacaggcatgagccaccgctcctggcccacttttttatacaaacagcttaggtagagtaagccattcttttttttctttctttctttttttttttttttgagacagggtctcactttgttgcccaggctggagtgcagtggctcaaacatggttcgctgcagcctcaacctcccaggctcaagcggtcctgctgcctcatcctccaaagtagctgggaccacagacatgcaccaccatgaccccagctgatttttgcagagatgggttttgccatgttgcccaggctggccttgaactcctgggctcaagtgatcctctcaccttggcctaccaaagtgctggcgttacaggtgtgagccaccacacccggcccgagtgagccattcttatctcttagggaatggtgggaaccctcctggagtctatgttcttagacaccacccaagggccaaccttgaagcaggcctttccaaggatcgcagttgaggcctgctctgttactgtttttctgcacagtgtgcaacaccacacagatgcccagtttctaccaaggtctgtggatggcaggataattttgaggaacctcctttttcgctaacactttcttcttttgtttacactcttcacattgtctattgagtctggattcaagatgattgattgtgaatattgttgtgcatgattttgggggtttcctccttgtgaaattttgaggtggcagatttgacattctactttaaactcatcttggtggcacttttcttgactcaccacctaagggggaataaataatgaagaaagaataaaaatagtgttatcagtca

SEQ ID NO: 199697 - DNA, 437 bp, Homo sapiens
  Payload ID: 19402
  Gene Name: WD repeat domain 13
  ENST ID: ENST00000470124
  CDS Start-End: 115-437
ctatctaccaaggagcctgttgtgagacagttttctccccacctcctgaggttctggtggggtttgaggctttctacccctcacctctgggctatagaactgcttagctgcagcatgaaattagctcctcagcaacaaggtgtcctgccacctggtgtgtggtcatctcgcccctttcatttcggtgttgcccggcacaagggacatgaaccagaatctgtggatgttcttgctttcgtggtccacgctgccgcgggcggacacgccagaggaggaggccggggaatggccgcggtgtggcagcaagtcttagcagtggacgcgaggtacaacgcgtaccgcacaccaacgtttccacagtttcggacgcagtatatccgccggcgcagccagctgctgcgggagaatgccaaggctgggcaccccccagcgctgcg

SEQ ID NO: 199698 - DNA, 936 bp, Homo sapiens
  Payload ID: 19402
  Gene Name: WD repeat domain 13
  ENST ID: ENST00000486125
  CDS Start-End: 483-614
ttgcctggagcctgagaaagggaggagagacagaaggaaccggcgacagtggtctcagggccgctccggggggcctcaagaaccggaggcagccccggaggtggtccccgatcccgggctatgctcttggatctgagaagggaaggcggagggcggcggggacaagatgggtggagaatgtcaagcaaggaatgctaggcgggggaggggcgttgctatggcgactggggaggggcggtgtctgttctgaatcgctgtgtgtcacccgggcgctgcccaggaagggcagggctggggtgatgaccatggtaacacccgggggggagttcgtgacatctccggcgcggagggactcgatgtctatggcaatggtcgcctggtggaagggacggaactagatcccttcgctcgggacgctcacattccaggcccttgtcctgcaggctgccgcgggcggacacgccagaggaggaggccggggaatggccgcggtgtggcagcaagtcttagcagtggacgcgagtttcggacgcagtatatccgccggcgcagccagctgctgcgggagaatgccaaggctgggcaccccccagcgctgcgtcggcagtacctgaggcttcgggggcagctgctgggccagcgctacgggcccctctccgagccaggcagtgctcgtgcctatagcaacagcatcgtccgcagtagccgcactactcttgaccgcatggaggactttgaggatgatcctcgggccctgggggcccgtgggcaccgtcgttctgtcagcagaggctcctaccagctgcaggcgcagatgaaccgtgccgtctatgaggacaggccccctggcagcgtggtgcccacgtcagcagcagaggcaagtcgggccatggccggggacacgtcactgagcgagaactatgcctttgcgggcat

SEQ ID NO: 199699 - DNA, 562 bp, Homo sapiens
  Payload ID: 19402
  Gene Name: WD repeat domain 13
  ENST ID: ENST00000482760
  CDS Start-End: 1-562
ctgctctgctgcaccttccagcctgtcaacaacaacctcactgtggtcaggctccaggacacccactcaccaagggtggggaacgccaagcacaacgtgcatgtcatgaacatctccacaggcaagaaagtgaaggggggctccagcaagctgacaggccgtgtccttgctctgtcctttgatgcccctggccggctgctctgggcgggtgatgaccgtggcagtgtcttctctttcctctttgatatggccacagggaagctgaccaaagccaagcgtttggtggtgcatgaggggagccctgtgaccagcatctcagcccggtcctgggtcagccgcgaggcccgggatccctcactgctcatcaatgcttgcctcaacaagttgctgctctacagggtggtagacaacgaggggaccctgcagctgaagagaagcttccccatcgagcagagctcacatcctgtgcgcagcatcttctgtcccctcatgtccttccgccagggggcctgcgtggtgacgggcagtgaggacatgtgcgtgcacttctttgatgtggagc

SEQ ID NO: 199700 - DNA, 859 bp, Homo sapiens
  Payload ID: 19402
  Gene Name: WD repeat domain 13
  ENST ID: ENST00000498631
  CDS Start-End: 148-279
cagccatcttgcctggagcctgagaaagggaggagagacagaaggaaccggcgacagtggtctcagggccgctccggggggcctcaagaaccggaggcagccccggaggctgccgcgggcggacacgccagaggaggaggccggggaatggccgcggtgtggcagcaagtcttagcagtggacgcgagtttcggacgcagtatatccgccggcgcagccagctgctgcgggagaatgccaaggctgggcaccccccagcgctgcgtcggcagtacctgaggcttcgggggcagctgctgggccagcgctacgggcccctctccgagccaggcagtgctcgtgcctatagcaacagcatcgtccgcagtagccgcactactcttgaccgcatggaggactttgaggatgatcctcgggccctgggggcccgtgggcaccgtcgttctgtcagcagaggctcctaccagctgcaggcgcagatgaaccgtgccgtctatgaggacaggccccctggcagcgtggtgcccacgtcagcagcagaggcaagtcgggccatggccggggacacgtcactgagcgagaactatgcctttgcgggcatgtatcatgtttttgaccagcacgtggatgaggcagtcccaagggtgcgcttcgccaatgatgaccgacaccgcctggcctgctgctcactcgacggcagcatctccctgtgccagctggtgcctgccccacccacagtgcttcgcgtgctacggggccacacccgtggtgtctccgacttcgcctggtccctctccaatgacatcctcgtgtccacctcactggatgccaccatgcgcatctgggcctctgaggatgg

SEQ ID NO: 199701 - DNA, 4705 bp, Homo sapiens
  Payload ID: 19403
  Gene Name: WD repeat domain 17
  Uniprot ID: Q8IZU2
  ENST ID: ENST00000280190
  CDS Start-End: 157-4125
gcggggagggtccgcgcgttggtggtgctcgcctcgcagctgcgcccgccggcttcagcaccttccgctgtccgccgctgcagccgcctcctcctccaggtgctgactattctgatgccgagtttccaattgccttgattaaagtagaaacattctatggcttggatgacttacatttcaaattggtttgagcaagatgattggtatgaaggactacaaagagcaaacatgtcccaggtaaggcaagtgggattgctggctgctggatgtcagccatggaacaaggatgtatgtgctgccagtggagacaggtttgcatattgtgcgaccctggctatctatatttatcagttggatcaccgttataatgaattcaaacttcacgcaattatgtctgaacataaaaaaacaatcacagcaatttcttggtgtccacataatcctgatctgtttgcaagtggcagtactgataatttagtgatcatttggaatgttgcagaacaaaaagtcattgctaaactcgacagtacaaaagggatccctgcttctcttagttggtgctggaatgcagaggatgtggtggcatttgtttcccacagaggcccactgttcatttggaccatctcaggaccagatagtggagtgattgtacacaaagatgctcatagcttcttgtctgatatctgtatgttcagatggcatacacaccaaaaggggaaagttgtgtttggtcatattgatggaagtctatcaatttttcatccaggtaataaaaatcagaaacatgttttgagaccagaatctcttgaagggacagatgaagaggatccagttacggccttggaatgggacccactatctactgattatcttctagtggttaatttgcattatggaattcgcctggtagattctgaatcactttcttgcataacaacatttaatcttcccagtgcagcagcttctgtacagtgcttagcctgggttcccagtgctcctgggatgtttataactggagattctcaagtgggtgttttacgcatttggaatgtttcaagaacaacacctattgataatcttaaattaaagaaaacaggatttcactgcttacatgtacttaattctcctccaagaaaaaagttttcagtccaatctccaaccaaaaatcattatacatcctcaacaagcgaagcagttccacccccaactttaacacagaatcaagcattttctcttcctcctggtcatgcagtgtgttgtttcttggatggtggagttggactttatgatatgggagctaagaagtgggattttcttagagacttgggacatgtggaaactatctttgactgcaaattcaaacctgacgatcctaatcttttagcaacagcttcatttgatggcactataaaagtctgggatataaacacattaacagcagtgtacacatccccgggtaatgaaggtgttatttattccctttcttgggctccaggtggtttaaattgtattgctgggggaacttcccgaaatggtgcttttatttggaatgttcaaaagggcaaaattatacaacgatttaatgagcatggaacaaatggaatattctgcattgcctggagtcataaagattctaaaagaatagcaacctgcagcagtgatggtttctgtattattcgaacaattgatggtaaagtgctacacaaatataaacatccagctgcagtgtttggttgtgattggagccaaaacaataaagacatgatagccactggctgtgaagacacaaatgttcgtgtttattatgtagccaccagctcagatcaaccattgaaagtatttagtgggcatacagcaaaagtgtttcatgttaaatggtctcctctgagagagggaattctttgcagtggttctgatgatggtaccgttcgaatctgggattatactcaggatgcttgcatcaatattcttaatggacacactgcacctgtgagaggattaatgtggaatactgagattccatatctgctcatatctggcagctgggactatactataaaagtatgggacactcgagaaggaacttgtgtggatactgtgtatgatcacggtgcagatgtatatggtttaacctgccatcccagtcgccccttcactatggcctcttgctcccgtgactctacagtgagactctggtcattaacagccttagtcactcctgtacaaataaatattctggcagacagatcttgggaagaaattattgggaacactgattatgctatagaaccaggcactcctcctctactgtgtggtaaagtgtcaagagatattagacaggaaatagaaaaactaactgctaattctcaagtgaaaaaactaagatggttctcagaatgtttatctcctccaggtggcagtgacaatttatggaacttggttgctgtgataaaaggacaggatgatagcttacttcctcagaactactgcaaaggaataatgcacttgaaacatctgattaaatttagaacatctgaagctcaagaactaacaacagtcaagatgtctaaatttggtggtggtattggtgtacctgctaaagaggaaagactgaaggaagctgctgaaatccacttgagattaggacaaattcagagatactgtgaacttatggttgaacttggagagtgggacaaagccctgtcaattgcaccaggagtctctgtgaaatactggaagaagttaatgcagaggagagctgaccaattaatccaggaagataaggatgatgtcattccatactgcatagccattggtgatgtgaaaaagctagtccattttttcatgtcaagaggtcagcttaaagaagctctgcttgttgcacaggctgcttgtgaaggaaatatgcagcccttacatgtttccgtgcctaaaggagcttcatattctgatgatatctacaaggaagactttaatgaactcctgcacaaagtcagtaaagaactggcagaatggtattttcaagatggtcgagcagtactagccgcatgttgccatcttgccatagataatattgagcttgctatggcatacctgattcgcggaaatgaactggagttggcagtctgtgtgggcacagtactaggagagtctgcagcaccagcaacccactatgccttagaattactggcgagaaagtgcatgatgatttcagtatgctttccatgtgttggatacagtgtccccttttgttacgttaacaggaatttggcagctgatcttcttctgatgattcctgataatgaactacatttaataaaactctgtgctttctacccaggatgtactgaagagataaatgaccttcatgataagtgtaagctacccacagtggaagaatgtatgcagttagctgagacagcccgtgcagatgacaatatatttgaaactgtaaaatattacttgttaagtcaagaacctgaaaaagcccttcctattggtattagctttgttaaagaatacatcagtagctcagactggactttggataccatataccctgttcttgacctactgagctatattcgtactgaaaaattactcttgcatacgtgtactgaagctcgaaatgagttgctgatattatgtggttacattggtgcattactggctatcagaagacagtaccaaagcattgttccagcactttatgagtacacaagtcagctattaaaacgtcgggaggtgtcagtacctttaaaaattgaatatctttctgaggaattggatgcatggagagcttgcacacagtccaccaacagatcattagaagactctccgtatacacccccttctgattcacaaagaatgatttatgcaactttattaaagagactaaaagaagagtcactgaaaggaattattggaccagattatgtgactggatcaaatcttccaagtcattctgatattcacatttcttgtcttacgggattaaaaatccagggccctgtgtttttccttgaagacgggaaatctgctatctccttgaatgatgctttgatgtgggcaaaggtgaatccattctcacctttagggactggaatacgactcaatccattctgatagaagatttttgtccatgcttgatttttttttttaaagaaaaactttcatgggttagcattaccttaatctttgttgctcaagtgccagaggttgggagaaggattgcaggttgggagaggtgggaaatagcagtgaattttagtcattaacttcaaaatatatatatatatataatttaaaggaaaaataggtgcctcctttataaacagtaatagctacgtttgggaaggaggaaacatttaaattataaaggactgaataatctaaaaagcatataaaagtttcacacagcataaaagataccaaaatatcatatggttgaaatattgaaacatattaaattgtgcaacacctagaatagtgctagacatacagtaagtacttaatggatatttgaatgattgaatatcttgaaatgttgaaatgtaaggtgtgcacagtgatcttcaacttaacaaacacttacgttctcctttataaaatgcatagtaaaccactaacgttagctgttttaataaaagttttcagttataagtttagtaaatattaataaatggatacacattcaaaatacttt

SEQ ID NO: 199702 - DNA, 4119 bp, Homo sapiens
  Payload ID: 19403
  Gene Name: WD repeat domain 17
  ENST ID: ENST00000507824
  CDS Start-End: 36-3929
gtttccaattgccttgattaaagtagaaacattctatggcttggatgacttacatttcaaattggtttgagcaagatgattggtatgaaggactacaaagagcaaacatgtcccaggtaaggcaagtgggattgctggctgctggatgtcagccatggaacaaggatgtatgtgctgccagtggagacaggtttgcatattgtgcgaccctggctatctatatttatcagttggatcaccgttataatgaattcaaacttcacgcaattatgtctgaacataaaaaaacaatcacagcaatttcttggtgtccacataatcctgatctgtttgcaagtggcagtactgataatttagtgatcatttggaatgttgcagaacaaaaagtcattgctaaactcgacagtacaaaagggatccctgcttctcttagttggtgctggaatgcagaggatgtggtggcatttgtttcccacagaggcccactgttcatttggaccatctcaggaccagatagtggagtgattgtacacaaagatgctcatagcttcttgtctgatatctgtatgttcagatggcatacacaccaaaaggggaaagttgtgtttggtcatattgatggaagtctatcaatttttcatccagatgaagaggatccagttacggccttggaatgggacccactatctactgattatcttctagtggttaatttgcattatggaattcgcctggtagattctgaatcactttcttgcataacaacatttaatcttcccagtgcagcagcttctgtacagtgcttagcctgggttcccagtgctcctgggatgtttataactggagattctcaagtgggtgttttacgcatttggaatgtttcaagaacaacacctattgataatcttaaattaaagaaaacaggatttcactgcttacatgtacttaattctcctccaagaaaaaagttttcagtccaatctccaaccaaaaatcattatacatcctcaacaagcgaagcagttccacccccaactttaacacagaatcaagcattttctcttcctcctggtcatgcagtgtgttgtttcttggatggtggagttggactttatgatatgggagctaagaagtgggattttcttagagacttgggacatgtggaaactatctttgactgcaaattcaaacctgacgatcctaatcttttagcaacagcttcatttgatggcactataaaagtctgggatataaacacattaacagcagtgtacacatccccgggtaatgaaggtgttatttattccctttcttgggctccaggtggtttaaattgtattgctgggggaacttcccgaaatggtgcttttatttggaatgttcaaaagggcaaaattatacaacgatttaatgagcatggaacaaatggaatattctgcattgcctggagtcataaagattctaaaagaatagcaacctgcagcagtgatggtttctgtattattcgaacaattgatggtaaagtgctacacaaatataaacatccagctgcagtgtttggttgtgattggagccaaaacaataaagacatgatagccactggctgtgaagacacaaatgttcgtgtttattatgtagccaccagctcagatcaaccattgaaagtatttagtgggcatacagcaaaagtgtttcatgttaaatggtctcctctgagagagggaattctttgcagtggttctgatgatggtaccgttcgaatctgggattatactcaggatgcttgcatcaatattcttaatggacacactgcacctgtgagaggattaatgtggaatactgagattccatatctgctcatatctggcagctgggactatactataaaagtatgggacactcgagaaggaacttgtgtggatactgtgtatgatcacggtgcagatgtatatggtttaacctgccatcccagtcgccccttcactatggcctcttgctcccgtgactctacagtgagactctggtcattaacagccttagtcactcctgtacaaataaatattctggcagacagatcttgggaagaaattattgggaacactgattatgctatagaaccaggcactcctcctctactgtgtggtaaagtgtcaagagatattagacaggaaatagaaaaactaactgctaattctcaagtgaaaaaactaagatggttctcagaatgtttatctcctccaggtggcagtgacaatttatggaacttggttgctgtgataaaaggacaggatgatagcttacttcctcagaactactgcaaaggaataatgcacttgaaacatctgattaaatttagaacatctgaagctcaagaactaacaacagtcaagatgtctaaatttggtggtggtattggtgtacctgctaaagaggaaagactgaaggaagctgctgaaatccacttgagattaggacaaattcagagatactgtgaacttatggttgaacttggagagtgggacaaagccctgtcaattgcaccaggagtctctgtgaaatactggaagaagttaatgcagaggagagctgaccaattaatccaggaagataaggatgatgtcattccatactgcatagccattggtgatgtgaaaaagctagtccattttttcatgtcaagaggtcagcttaaagaagctctgcttgttgcacaggctgcttgtgaaggaaatatgcagcccttacatgtttccgtgcctaaaggagcttcatattctgatgatatctacaaggaagactttaatgaactcctgcacaaagtcagtaaagaactggcagaatggtattttcaagatggtcgagcagtactagccgcatgttgccatcttgccatagataatattgagcttgctatggcatacctgattcgcggaaatgaactggagttggcagtctgtgtgggcacagtactaggagagtctgcagcaccagcaacccactatgccttagaattactggcgagaaagtgcatgatgatttcagtatgctttccatgtgttggatacaggaatttggcagctgatcttcttctgatgattcctgataatgaactacatttaataaaactctgtgctttctacccaggatgtactgaagagataaatgaccttcatgataagtgtaagctacccacagtggaagaatgtatgcagttagctgagacagcccgtgcagatgacaatatatttgaaactgtaaaatattacttgttaagtcaagaacctgaaaaagcccttcctattggtattagctttgttaaagaatacatcagtagctcagactggactttggataccatataccctgttcttgacctactgagctatattcgtactgaaaaattactcttgcatacgtgtactgaagctcgaaatgagttgctgatattatgtggttacattggtgcattactggctatcagaagacagtaccaaagcattgttccagcactttatgagtacacaagtcagctattaaaacgtcgggaggtgtcagtacctttaaaaattgaatatctttctgaggaattggatgcatggagagcttgcacacagtccaccaacagatcattagaagactctccgtatacacccccttctgattcacaaagaatgatttatgcaactttattaaagagactaaaagaagagtcactgaaaggaattattggaccagattatgtgactggatcaaatcttccaagtcattctgatattcacatttcttgtcttacgggattaaaaatccagggccctgtgtttttccttgaagacgggaaatctgctatctccttgaatgatgctttgatgtgggcaaaggtgaatccattctcacctttagggactggaatacgactcaatccattctgatagaagatttttgtccatgcttgatttttttttttaaagaaaaactttcatgggttagcattaccttaatctttgttgctcaagtgccagaggttgggagaaggattgcaggttgggagaggtgggaaatagcagtgaattttagtcattaacttcaaaatatatatatatatataatttaaaggaaaaa

SEQ ID NO: 199703 - DNA, 4294 bp, Homo sapiens
  Payload ID: 19403
  Gene Name: WD repeat domain 17
  Uniprot ID: Q8IZU2
  ENST ID: ENST00000508596
  CDS Start-End: 253-4104
gcctctggggcagaccctggagatcgggctcgcggcgccttccatcgtggctccgcgctggggcttgcggagcacgcttcccgcccctcggagcccgcgggcccggccgccccgcccccgggcgccctgagcgagcaggcggggagggcggggagggtccgcgcgttggtggtgctcgcctcgcagctgcgcccgccggcttcagcaccttccgctgtccgccgctgcagccgcctcctcctccaggcaaacatgtcccaggtaaggcaagtgggattgctggctgctggatgtcagccatggaacaaggatgtatgtgctgccagtggagacaggtttgcatattgtgcgaccctggctatctatatttatcagttggatcaccgttataatgaattcaaacttcacgcaattatgtctgaacataaaaaaacaatcacagcaatttcttggtgtccacataatcctgatctgtttgcaagtggcagtactgataatttagtgatcatttggaatgttgcagaacaaaaagtcattgctaaactcgacagtacaaaagggatccctgcttctcttagttggtgctggaatgcagaggatgtggtggcatttgtttcccacagaggcccactgttcatttggaccatctcaggaccagatagtggagtgattgtacacaaagatgctcatagcttcttgtctgatatctgtatgttcagatggcatacacaccaaaaggggaaagttgtgtttggtcatattgatggaagtctatcaatttttcatccaggtaataaaaatcagaaacatgttttgagaccagaatctcttgaagggacagatgaagaggatccagttacggccttggaatgggacccactatctactgattatcttctagtggttaatttgcattatggaattcgcctggtagattctgaatcactttcttgcataacaacatttaatcttcccagtgcagcagcttctgtacagtgcttagcctgggttcccagtgctcctgggatgtttataactggagattctcaagtgggtgttttacgcatttggaatgtttcaagaacaacacctattgataatcttaaattaaagaaaacaggatttcactgcttacatgtacttaattctcctccaagaaaaaagttttcagtccaatctccaaccaaaaatcattatacatcctcaacaagcgaagcagttccacccccaactttaacacagaatcaagcattttctcttcctcctggtcatgcagtgtgttgtttcttggatggtggagttggactttatgatatgggagctaagaagtgggattttcttagagacttgggacatgtggaaactatctttgactgcaaattcaaacctgacgatcctaatcttttagcaacagcttcatttgatggcactataaaagtctgggatataaacacattaacagcagtgtacacatccccgggtaatgaaggtgttatttattccctttcttgggctccaggtggtttaaattgtattgctgggggaacttcccgaaatggtgcttttatttggaatgttcaaaagggcaaaattatacaacgatttaatgagcatggaacaaatggaatattctgcattgcctggagtcataaagattctaaaagaatagcaacctgcagcagtgatggtttctgtattattcgaacaattgatggtaaagtgctacacaaatataaacatccagctgcagtgtttggttgtgattggagccaaaacaataaagacatgatagccactggctgtgaagacacaaatgttcgtgtttattatgtagccaccagctcagatcaaccattgaaagtatttagtgggcatacagcaaaagtgtttcatgttaaatggtctcctctgagagagggaattctttgcagtggttctgatgatggtaccgttcgaatctgggattatactcaggatgcttgcatcaatattcttaatggacacactgcacctgtgagaggattaatgtggaatactgagattccatatctgctcatatctggcagctgggactatactataaaagtatgggacactcgagaaggaacttgtgtggatactgtgtatgatcacggtgcagatgtatatggtttaacctgccatcccagtcgccccttcactatggcctcttgctcccgtgactctacagtgagactctggtcattaacagccttagtcactcctgtacaaataaatattctggcagacagatcttgggaagaaattattgggaacactgattatgctatagaaccaggcactcctcctctactgtgtggtaaagtgtcaagagatattagacaggaaatagaaaaactaactgctaattctcaagtgaaaaaactaagatggttctcagaatgtttatctcctccaggtggcagtgacaatttatggaacttggttgctgtgataaaaggacaggatgatagcttacttcctcagaactactgcaaaggaataatgcacttgaaacatctgattaaatttagaacatctgaagctcaagaactaacaacagtcaagatgtctaaatttggtggtggtattggtgtacctgctaaagaggaaagactgaaggaagctgctgaaatccacttgagattaggacaaattcagagatactgtgaacttatggttgaacttggagagtgggacaaagccctgtcaattgcaccaggagtctctgtgaaatactggaagaagttaatgcagaggagagctgaccaattaatccaggaagataaggatgatgtcattccatactgcatagccattggtgatgtgaaaaagctagtccattttttcatgtcaagaggtcagcttaaagaagctctgcttgttgcacaggctgcttgtgaaggaaatatgcagcccttacatgtttccgtgcctaaaggagcttcatattctgatgatatctacaaggaagactttaatgaactcctgcacaaagtcagtaaagaactggcagaatggtattttcaagatggtcgagcagtactagccgcatgttgccatcttgccatagataatattgagcttgctatggcatacctgattcgcggaaatgaactggagttggcagtctgtgtgggcacagtactaggagagtctgcagcaccagcaacccactatgccttagaattactggcgagaaagtgcatgatgatttcagtatggaatttggcagctgatcttcttctgatgattcctgataatgaactacatttaataaaactctgtgctttctacccaggatgtactgaagagataaatgaccttcatgataagtgtaagctacccacagtggaagaatgtatgcagttagctgagacagcccgtgcagatgacaatatatttgaaactgtaaaatattacttgttaagtcaagaacctgaaaaagcccttcctattggtattagctttgttaaagaatacatcagtagctcagactggactttggataccatataccctgttcttgacctactgagctatattcgtactgaaaaattactcttgcatacgtgtactgaagctcgaaatgagttgctgatattatgtggttacattggtgcattactggctatcagaagacagtaccaaagcattgttccagcactttatgagtacacaagtcagctattaaaacgtcgggaggtgtcagtacctttaaaaattgaatatctttctgaggaattggatgcatggagagcttgcacacagtccaccaacagatcattagaagactctccgtatacacccccttctgattcacaaagaatgatttatgcaactttattaaagagactaaaagaagagtcactgaaaggaattattggaccagattatgtgactggatcaaatcttccaagtcattctgatattcacatttcttgtcttacgggattaaaaatccagggccctgtgtttttccttgaagacgggaaatctgctatctccttgaatgatgctttgatgtgggcaaaggtgaatccattctcacctttagggactggaatacgactcaatccattctgatagaagatttttgtccatgcttgatttttttttttaaagaaaaactttcatgggttagcattaccttaatctttgttgctcaagtgccagaggttgggagaaggattgcaggttgggagaggtgggaaatagcagtgaattttagtcattaacttcaaaatatatatatatatataatttaaaggaaaaa

SEQ ID NO: 199704 - DNA, 677 bp, Homo sapiens
  Payload ID: 19403
  Gene Name: WD repeat domain 17
  ENST ID: ENST00000505894
  CDS Start-End: 1-677
ggatccctgcttctcttagttggtgctggaatgcagaggatgtggtggcatttgtttcccacagaggcccactgttcatttggaccatctcaggaccagatagtggagtgattgtacacaaagatgctcatagcttcttgtctgatatctgtatgttcagatggcatacacaccaaaaggggaaagttgtgtttggtcatattgatggaagtctatcaatttttcatccagtttcagtccaatctccaaccaaaaatcattatacatcctcaacaagcgaagcagttccacccccaactttaacacagaatcaagcattttctcttcctcctggtcatgcagtgtgttgtttcttggatggtggagttggactttatgatatgggagctaagaagtgggattttcttagagacttgggacatgtggaaactatctttgactgcaaattcaaacctgacgatcctaatcttttagcaacagcttcatttgatggcactataaaagtctgggatataaacacattaacagcagtgtacacatccccgggtaatgaaggtgttatttattccctttcttgggctccaggtggtttaaattgtattgctgggggaacttcccgaaatggtgcttttatttggaatgttcaaaagggcaaaattatacaacgatttaatgag

SEQ ID NO: 199705 - DNA, 4911 bp, Homo sapiens
  Payload ID: 19403
  Gene Name: WD repeat domain 17
  ENST ID: ENST00000443118
  CDS Start-End: 1-1672
atggaacttggttgctgtgataaaaggacaggatgatagcttacttcctcagaactactgcaaaggaataatgcacttgaaacatctgattaaatttagaacatctgaagctcaagaactaacaacagtcaagatgtctaaatttggtggtggtattggtgtacctgctaaagaggaaagactgaaggaagctgctgaaatccacttgagattaggacaaattcagagatactgtgaacttatggttgaacttggagagtgggacaaagccctgtcaattgcaccaggagtctctgtgaaatactggaagaagttaatgcagaggagagctgaccaattaatccaggaagataaggatgatgtcattccatactgcatagccattggtgatgtgaaaaagctagtccattttttcatgtcaagaggtcagcttaaagaagctctgcttgttgcacaggctgcttgtgaaggaaatatgcagcccttacatgtttccgtgcctaaaggagcttcatattctgatgatatctacaaggaagactttaatgaactcctgcacaaagtcagtaaagaactggcagaatggtattttcaagatggtcgagcagtactagccgcatgttgccatcttgccatagataatattgagcttgctatggcatacctgattcgcggaaatgaactggagttggcagtctgtgtgggcacagtactaggagagtctgcagcaccagcaacccactatgccttagaattactggcgagaaagtgcatgatgatttcagtatgctttccatgtgttggatacaggaatttggcagctgatcttcttctgatgattcctgataatgaactacatttaataaaactctgtgctttctacccaggatgtactgaagagataaatgaccttcatgataagtgtaagctacccacagtggaagaatgtatgcagttagctgagacagcccgtgcagatgacaatatatttgaaactgtaaaatattacttgttaagtcaagaacctgaaaaagcccttcctattggtattagctttgttaaagaatacatcagtagctcagactggactttggataccatataccctgttcttgacctactgagctatattcgtactgaaaaattactcttgcatacgtgtactgaagctcgaaatgagttgctgatattatgtggttacattggtgcattactggctatcagaagacagtaccaaagcattgttccagcactttatgagtacacaagtcagctattaaaacgtcgggaggtgtcagtacctttaaaaattgaatatctttctgaggaattggatgcatggagagcttgcacacagtccaccaacagatcattagaagactctccgtatacacccccttctgattcacaaagaatgatttatgcaactttattaaagagactaaaagaagagtcactgaaaggaattattggaccagattatgtgactggatcaaatcttccaagtcattctgatattcacatttcttgtcttacgggattaaaaatccagggccctgtgtttttccttgaagacgggaaatctgctatctccttgaatgatgctttgatgtgggcaaaggtgaatccattctcacctttagggactggaatacgactcaatccattctgatagaagatttttgtccatgcttgatttttttttttaaagaaaaactttcatgggttagcattaccttaatctttgttgctcaagtgccagaggttgggagaaggattgcaggttgggagaggtgggaaatagcagtgaattttagtcattaacttcaaaatatatatatatatataatttaaaggaaaaataggtgcctcctttataaacagtaatagctacgtttgggaaggaggaaacatttaaattataaaggactgaataatctaaaaagcatataaaagtttcacacagcataaaagataccaaaatatcatatggttgaaatattgaaacatattaaattgtgcaacacctagaatagtgctagacatacagtaagtacttaatggatatttgaatgattgaatatcttgaaatgttgaaatgtaaggtgtgcacagtgatcttcaacttaacaaacacttacgttctcctttataaaatgcatagtaaaccactaacgttagctgttttaataaaagttttcagttataagtttagtaaatattaataaatggatacacattcaaaatacttttaaaaaaaagaaaatgttaccagtttttttatctgaagtttaactgtcccattgtaaaggtgtaagttatataggcttgaaaaaaattggcgggtaaaaatcacaaaatgcagtcgaatatatatatgaaaacttgcattaggtgataaagtgactattttaagagattcagcatgcatggatattagttttgattaatgtgtacaataatttacacagtatactctagtcaatttatgttaactttatttaaaacacaatttatttggccgggcacggtggctcacacctgtaatctcagcactttggcaggccaaggcaggtggatcacctgaggtcaggagttcatgaccagcctggccagcatggtaaaaccctgtctccactaaaaatacaaaaattagccaggcatggtggcgggcacctgtaatcccagttacttgggaagctgaggcaggagaatcccttgaacctgggaggcagaggttccagtgagccaagatcgcaccactgcactccagcctgggcaacaaagagcgaaactctgtctcaaaaaacaaaccaacaaaaaccacaattgatttgatgaaaattagttttaagtaaatgtttgtaaatagatattggttgaatttttggatatattatgttgatttaacttttaaaatgttgtttaaaagtgtgaagctatgaaaagcctgataatgtgactacagatatttcagttggactagaattctgactttgaaacttattaaattaatgcatactggaagtactttgatactcaagttgtttcacaagatttataatatagatggttttgtttgactaaagaataatctcatataactagaatacttgtggcttttattatctttaaacttgttgcatttaaaatatttttaaaaccttcttaacaaaacttcttaaaactggaaaaaatatatattatgtatctatgtatcatatttatcacatgaccacttttgattccttaaaaagacattacaggcttaaattccattttattaaaaaaaaaaaattgcctgtaatcccagcacttcaggaggccgagatgggcagatcttgaggtcggtagatggagaccatcctggccaacatggtgaaaccctgtctctactaaaaatacaaaaattagctgggtgtggtggtgtgtacctgtagtcccagctacccaggaagctaaggcaggagaatcgcttgaatccaggaggcggaggttgcagtgagctgagatcgcactactgcactccagcctgggcgacagagcaagaccaccatctccaaaaattatatatataaaaataattaatattatagaagagaatatacacaactcagagatgcaatggataatataaaaagagtacctgagatgtatttttttaaactcttagagatatctgtaactcaaatttttcttaggtgaggaggattattaactggcacatatgtactaaaaacccctcacttaaaaatggcagtctcaatcctactgtcattctttttattttaaaataaataaataagcctatctttttgtgcttacatacttaaaaggatatcattaagtatataaacaatcattacttctgtatttttaatgaatgcaggaaaataatatttttatgtataaaagatgaagaaaaaattttgcaagtctttaagcacataaatacaacagaatagccacccaatttctgtctgaaatctaaattggatggatttgaccatcattctattatctttgatttctacaatgtctatatcttattacctataactattaatttttcatagaattataaatgtcatttgactatgtcaatctgtatatattgtaccttaatatgaaaaacaaattttttaattcataaaagtatttttattagatttcatatgcatgaaacccaagcaaattatatgaatttattttactatttgaaaatgttcatattaccaataatgtggacaaattactttgcaggtttaaatatgcctctgtaaaggaagagtctcattagacaatgatttttaaagcattggaaaaatattttgcctgtaaaagttagtaactaggtggttcacaaaattacaacatcaaaatagttacatcttgtgaaaatatatgatttttatgtcaatcaagacaaatgaaatatatatgtatgtgtatatatatacatgtatgtatgaaatatatatatgtgcgtgtgtgtgtgtatatatatatatatatatatatatttctatgaaattgtccagatgtgttcaggaacatgattgcattagagcaatgactgtattttgttgtccttataacatttatattatttcagttttaagtcaaaaggtattctgaatataataaaagcctcacaaattatttgtaaaatttagtagttcatatttagtatatcagtaatatagaagacatctttatagtcaactcttaattaatgcttattgtaccaaatctttgagatatttgtacataaatgaaatatgtactttcatgctaaaattatatatcatgactgtgctataatttggcatgtcattatctagatttatatgtatgtacgtatttcaggtccttgaaattttaataaatattacagttaaatcctgatat

SEQ ID NO: 199706 - DNA, 466 bp, Homo sapiens
  Payload ID: 19403
  Gene Name: WD repeat domain 17
  ENST ID: ENST00000513261
  CDS Start-End: 11-316
gaaacattctatggcttggatgacttacatttcaaattggtttgagcaagatgattggtatgaaggactacaaagagcaaacatgtcccaggtaaggcaagtgggattgctggctgctggatgtcagccatggaacaaggatgtatgtgctgccagtggagacaggtttgcatattgtgcgaccctggctatctatatttatcagggatccctgcttctcttagttggtgctggaatgcagaggatgtggtggcatttgtttcccacagaggcccactgttcatttggaccatctcaggaccagatagtggagtgattgtacacaaagatgctcatagcttcttgtctgatatctgtatgttcagatggcatacacaccaaaaggggaaagttgtgtttggtcatattgatggaagtctatcaatttttcatccaggtaataaaaatcagaaacatgttttgagac

SEQ ID NO: 199707 - DNA, 1501 bp, Homo sapiens
  Payload ID: 19404
  Gene Name: WD repeat domain 18
  ENST ID: ENST00000251289
  CDS Start-End: 1-1289
cggcgcccatggaggtggccgtgtgtacggactcggcggccccgatgtggagctgcatcgtgtgggaacttcactcgggcgccaacctgctcacctaccgcggcggccaggcgggaccccgcggcctggcgctgctcaatggcgagtatctgctggcggcgcagctgggcaagaattacatcagcgcctgggagctccagcggaaggaccagctccagcagaagatcatgtgccccgggcctgtcacctgtctgactgcatcacccaatggtctctacgtcctggcaggagttgcagaaagcatccacctgtgggaggtctccaccgggaaccttctggtcatcctgagtcgacactaccaggacgtctcctgccttcagttcacaggggacagcagccacttcatctcagggggcaaggactgcctggtgctggtttggagcctctgcagcgtgctgcaggccgacccctccaggattccggcgcccaggcacgtctggtctcaccacgcgctccccatcacggacctgcactgcggctttgggggccccctggcccgggtggccacctcctcactggaccagacggtgaagctatgggaggtctcctcgggggagctgctgctctccgtcctctttgacgtgtccatcatggcagtgaccatggacctggctgagcaccatatgttctgcgggggcagtgagggctccatcttccaggtcgacctcttcacctggcccggacagagggagaggagcttccacccagagcaggacgccgggaaggtcttcaaagggaaccaggtgacttgcctgtcagtgtccactgacggcagcgtgctgctctcaggctcccacgacgagaccgtgcgcctctgggacgtgcagagcaagcagtgcatccggacggtggccctcaaaggcccagtcaccaatgccgccatcctgctggcgcccgtcagcatgctgagctcagacttcaggcccagcctgccgctgccccacttcaacaagcacctgctgggcgccgagcacggggacgagccgcgccacgggggcctcactctgcgcctgggcctccaccagcagggctcggagcccagctacctggaccgcacggagcagctgcaggccgtcctgtgcagcaccatggagaagagcgtgctcggcggccaggaccagctgcgcgtccgtgtgacggagctggaggacgaggtgcgcaacctgcgcaagatcaatcgggacctgttcgacttctccacgcgcttcatcacgcggccggccaagtgaggcccggagaccccggcccgaggcgcccaggcctgagccccatgcctcccagcaaccagggcccgcgggtgtggcccccaccagcccaggcctggactctcctcagttctgtgtcgtgttcgggtttttcctctgtgactgggccgtcttggtgtctcgtggcacgcgtcacagtggtgctagtctgtttttaacaaaagaggatgaaaagc

SEQ ID NO: 199708 - DNA, 1465 bp, Homo sapiens
  Payload ID: 19404
  Gene Name: WD repeat domain 18
  ENST ID: ENST00000587001
  CDS Start-End: 23-1252
ccggggcggtggggaaggcaagatggcggcgcccatggaggtggccgtgtgtacggactcggcggccccgatgtggagctgcatcgtgtgggaacttcactcgggcgccaacctgctcacctaccgcggcggccaggcgggaccccgcggcctggcgctgctcaatggcgagtatctgctggcggcgcagctgggcaagaattacatcagcgcctgggagctccagcggaaggaccagctccagcagaagatcatgtgccccgggcctgtcacctgtctgactgcatcacccaatggtctctacgtcctggcaggagttgcagaaagcatccacctgtgggaggtctccaccgggaaccttctggtcatcctgagtcgacactaccaggacgtctcctgccttcagttcacaggggacagcagccacttcatctcagggggcaaggactgcctggtgctggtttggagcctctgcagcgtgctgcaggccgacccctccaggattccggcgcccaggcacgtctggtctcaccacgcgctccccatcacggacctgcactgcggctttgggggccccctggcccgggtggccacctcctcactggaccagacggtgaagctatgggaggtctcctcgggggagctgctgctctccgtcctctttgacgtgtccatcatggcagtgaccatggacctggctgagcaccatatgttctgcgggggcagtgagggctccatcttccaggtcgacctcttcacctggcccggacagagggagaggagcttccacccagagcaggacgccgggaaggtcttcaaagggcacaggaaccaggtgacttgcctgtcagtgtccactgacggcagcgtgctgctctcaggctcccacgacgagaccgtgcgcctctgggacgtgcagagcaagcagtgcatccggacggtggccctcaaaggcccagtcaccaatgccgccatcctgctggcgcccgtcagcatgctgagctcagacttcaggcccagcctgccgctgccccacttcaacaagcacctgctgggcgccgagcacggggacgagccgcgccacgggggcctcactctgcgcctgggcctccaccagcagagcgtgctcggcggccaggaccagctgcgcgtccgtgtgacggagctggaggacgaggtgcgcaacctgcgcaagatcaatcgggacctgttcgacttctccacgcgcttcatcacgcggccggccaagtgaggcccggagaccccggcccgaggcgcccaggcctgagccccatgcctcccagcaaccagggcccgcgggtgtggcccccaccagcccaggcctggactctcctcagttctgtgtcgtgttcgggtttttcctctgtgactgggccgtcttggtgtctcgtggcacgcgtcacagtggtgctagtctgtttttaacaaaagaggatgaaaagcc

SEQ ID NO: 199709 - DNA, 1083 bp, Homo sapiens
  Payload ID: 19404
  Gene Name: WD repeat domain 18
  ENST ID: ENST00000590397
  CDS Start-End: 10-468
gaaggcaagatggcggcgcccatggaggtggccgtgtgtacggactcggcggccccgatgtggagctgcatcgtgtgggaacttcactcgggcgccaacctgctcacctaccgcggcggccaggcgggaccccgcggcctggcgctgctcaatggcgagtatctgctggcggcgcagctgggcaagaattacatcagcgcctgggagctccagcggaaggaccagctccagcagaagatcatgtgccccgggcctgtcacctgtctgactgcatcacccaatggtctctacgtcctggcaggagttgcagaaagcatccacctgtgggaggtctccaccgggaaccttctggtcatcctgagtcgacactaccaggacgtctcctgccttcagttcacaggggacagcagccacttcatctcagggggcaaggactgcctggtgctggtttggagcctctgcaggtagcgccttgcgcactcaggcctgcacctggaactgcacccgggctcaggcggggagaggaggcgccaaggcccctggcgggaaggggcttctctcttgggggctggagtgcagaggacggagtgatcatcccaggggtcctggctgcccacactggggtctggtttgttctgggggccgtgggggcccagccttgagtttactcagcgtgctgcaggccgacccctccaggattccggcgcccaggcacgtctggtctcaccacgcgctccccatcacggacctgcactgcggctttgggggccccctggcccgggtggccacctcctcactggaccagacggtgaagctatgggaggtctcctcgggggagctgctgctctccgtcctctttgacgtgtccatcatggcagtgaccatggacctggctgagcaccatatgttctgcgggggcagtgagggctccatcttccaggtcgacctcttcacctggcccggacagagggagaggagcttccacccagagcaggacgccgggaaggtcttcaaagggcacaggaaccaggtgacttgcctgtcagtgtccactgacggcagcgtgctgctctcaggctccca

SEQ ID NO: 199710 - DNA, 1498 bp, Homo sapiens
  Payload ID: 19404
  Gene Name: WD repeat domain 18
  ENST ID: ENST00000591985
  CDS Start-End: 1-806
cggcgcccatggaggtggccgtgtgtacggactcggcggccccgatgtggagctgcatcgtgtgggaacttcactcgggcgccaacctgctcacctaccgcggcggccaggcgggaccccgcggcctggcgctgctcaatggcgagtatctgctggcggcgcagctgggcaagaattacatcagcgcctgggagctccagcggaaggaccagctccagcagaagatcatgtgccccgggcctgtcacctgtctgactgcatcacccaatggtctctacgtcctggcaggagttgcagaaagcatccacctgtgggaggtctccaccgggaaccttctggtcatcctgagtcgacactaccaggacgtctcctgccttcagttcacaggggacagcagccacttcatctcagggggcaaggactgcctggtgctggtttggagcctctgcagcgtgctgcaggccgacccctccaggattccggcgcccaggcacgtctggtctcaccacgcgctccccatcacggacctgcactgcggctttgggggccccctggcccgggtggccacctcctcactggaccagacggtgaagctatgggaggtctcctcgggggagctgctgctctccgtcctctttgacgtgtccatcatggcagtgaccatggacctggctgagcaccatatgttctgcgggggcagtgagggctccatcttccaggtcgacctcttcacctggcccggacagagggagaggagcttccacccagagcaggacgccgggaaggtcttcaaagggcacaggtgacttgcctgtcagtgtccactgacggcagcgtgctgctctcaggctcccacgacgagaccgtgcgcctctgggacgtgcagagcaagcagtgcatccggacggtggccctcaaaggcccagtcaccaatgccgccatcctgctggcgcccgtcagcatgctgagctcagacttcaggcccagcctgccgctgccccacttcaacaagcacctgctgggcgccgagcacggggacgagccgcgccacgggggcctcactctgcgcctgggcctccaccagcagggctcggagcccagctacctggaccgcacggagcagctgcaggccgtcctgtgcagcaccatggagaagagcgtgctcggcggccaggaccagctgcgcgtccgtgtgacggagctggaggacgaggtgcgcaacctgcgcaagatcaatcgggacctgttcgacttctccacgcgcttcatcacgcggccggccaagtgaggcccggagaccccggcccgaggcgcccaggcctgagccccatgcctcccagcaaccagggcccgcgggtgtggcccccaccagcccaggcctggactctcctcagttctgtgtcgtgttcgggtttttcctctgtgactgggccgtcttggtgtctcgtggcacgcgtcacagtggtgctagtctgtttttaacaaaagaggatgaaaa

SEQ ID NO: 199711 - DNA, 1397 bp, Homo sapiens
  Payload ID: 19404
  Gene Name: WD repeat domain 18
  ENST ID: ENST00000607440
  CDS Start-End: 1-1184
cggcgcccatggaggtggccgtgtgtacggactcggcggccccgatgtggagctgcatcgtgtgggaacttcactcgggcgccaacctgctcacctaccgcggcggccaggcgggaccccgcggcctggcgctgctcaatggcgagtatctgctggcggcgcagctgggcaagaattacatcagcgcctgggagctccagcggaaggtctccaccgggaaccttctggtcatcctgagtcgacactaccaggacgtctcctgccttcagttcacaggggacagcagccacttcatctcagggggcaaggactgcctggtgctggtttggagcctctgcagcgtgctgcaggccgacccctccaggattccggcgcccaggcacgtctggtctcaccacgcgctccccatcacggacctgcactgcggctttgggggccccctggcccgggtggccacctcctcactggaccagacggtgaagctatgggaggtctcctcgggggagctgctgctctccgtcctctttgacgtgtccatcatggcagtgaccatggacctggctgagcaccatatgttctgcgggggcagtgagggctccatcttccaggtcgacctcttcacctggcccggacagagggagaggagcttccacccagagcaggacgccgggaaggtcttcaaagggcacaggaaccaggtgacttgcctgtcagtgtccactgacggcagcgtgctgctctcaggctcccacgacgagaccgtgcgcctctgggacgtgcagagcaagcagtgcatccggacggtggccctcaaaggcccagtcaccaatgccgccatcctgctggcgcccgtcagcatgctgagctcagacttcaggcccagcctgccgctgccccacttcaacaagcacctgctgggcgccgagcacggggacgagccgcgccacgggggcctcactctgcgcctgggcctccaccagcagggctcggagcccagctacctggaccgcacggagcagctgcaggccgtcctgtgcagcaccatggagaagagcgtgctcggcggccaggaccagctgcgcgtccgtgtgacggagctggaggacgaggtgcgcaacctgcgcaagatcaatcgggacctgttcgacttctccacgcgcttcatcacgcggccggccaagtgaggcccggagaccccggcccgaggcgcccaggcctgagccccatgcctcccagcaaccagggcccgcgggtgtggcccccaccagcccaggcctggactctcctcagttctgtgtcgtgttcgggtttttcctctgtgactgggccgtcttggtgtctcgtggcacgcgtcacagtggtgctagtctgtttttaacaaaagaggatgaaaagcc

SEQ ID NO: 199712 - DNA, 678 bp, Homo sapiens
  Payload ID: 19404
  Gene Name: WD repeat domain 18
  ENST ID: ENST00000590354
  CDS Start-End: 1-145
caaagggcacaggaaccaggtgacttgcctgtcagtgtccactgacggcagcgtgctgctctcaggctcccacgacgagaccgtgcgcctctgggacgtgcagagcaagcagtgcatccggacggtggccctcaaagcatgctgagctcagacttcaggcccagcctgccgctgccccacttcaacaagcacctgctgggcgccgagcacggggacgagccgcgccacgggggcctcactctgcgcctgggcctccaccagcagggctcggagcccagctacctggaccgcacggagcagctgcaggccgtcctgtgcagcaccatggagaagagcgtgctcggcggccaggaccagctgcgcgtccgtgtgacggagctggaggacgaggtgcgcaacctgcgcaagatcaatcgggacctgttcgacttctccacgcgcttcatcacgcggccggccaagtgaggcccggagaccccggcccgaggcgcccaggcctgagccccatgcctcccagcaaccagggcccgcgggtgtggcccccaccagcccaggcctggactctcctcagttctgtgtcgtgttcgggtttttcctctgtgactgggccgtcttggtgtctcgtggcacgcgtcacagtggtgctagtctgtttttaacaaaagaggatgaaaagcc

SEQ ID NO: 199713 - DNA, 1608 bp, Homo sapiens
  Payload ID: 19404
  Gene Name: WD repeat domain 18
  Uniprot ID: Q9BV38
  ENST ID: ENST00000585809
  CDS Start-End: 84-1382
ggggccgccgctctggcccgcgtggggcagtcgtccgcgtctcgctcatgatgacgcacgtccggggcggtggggaaggcaagatggcggcgcccatggaggtggccgtgtgtacggactcggcggccccgatgtggagctgcatcgtgtgggaacttcactcgggcgccaacctgctcacctaccgcggcggccaggcgggaccccgcggcctggcgctgctcaatggcgagtatctgctggcggcgcagctgggcaagaattacatcagcgcctgggagctccagcggaaggaccagctccagcagaagatcatgtgccccgggcctgtcacctgtctgactgcatcacccaatggtctctacgtcctggcaggagttgcagaaagcatccacctgtgggaggtctccaccgggaaccttctggtcatcctgagtcgacactaccaggacgtctcctgccttcagttcacaggggacagcagccacttcatctcagggggcaaggactgcctggtgctggtttggagcctctgcagcgtgctgcaggccgacccctccaggattccggcgcccaggcacgtctggtctcaccacgcgctccccatcacggacctgcactgcggctttgggggccccctggcccgggtggccacctcctcactggaccagacggtgaagctatgggaggtctcctcgggggagctgctgctctccgtcctctttgacgtgtccatcatggcagtgaccatggacctggctgagcaccatatgttctgcgggggcagtgagggctccatcttccaggtcgacctcttcacctggcccggacagagggagaggagcttccacccagagcaggacgccgggaaggtcttcaaagggcacaggaaccaggtgacttgcctgtcagtgtccactgacggcagcgtgctgctctcaggctcccacgacgagaccgtgcgcctctgggacgtgcagagcaagcagtgcatccggacggtggccctcaaaggcccagtcaccaatgccgccatcctgctggcgcccgtcagcatgctgagctcagacttcaggcccagcctgccgctgccccacttcaacaagcacctgctgggcgccgagcacggggacgagccgcgccacgggggcctcactctgcgcctgggcctccaccagcagggctcggagcccagctacctggaccgcacggagcagctgcaggccgtcctgtgcagcaccatggagaagagcgtgctcggcggccaggaccagctgcgcgtccgtgtgacggagctggaggacgaggtgcgcaacctgcgcaagatcaatcgggacctgttcgacttctccacgcgcttcatcacgcggccggccaagtgaggcccggagaccccggcccgaggcgcccaggcctgagccccatgcctcccagcaaccagggcccgcgggtgtggcccccaccagcccaggcctggactctcctcagttctgtgtcgtgttcgggtttttcctctgtgactgggccgtcttggtgtctcgtggcacgcgtcacagtggtgctagtctgtttttaacaaaagaggatgaaaagcccctcctctccggc

SEQ ID NO: 199714 - DNA, 577 bp, Homo sapiens
  Payload ID: 19404
  Gene Name: WD repeat domain 18
  ENST ID: ENST00000591997
  CDS Start-End: 1-435
gtgtgtacggactcggcggccccgatgtggagctgcatcgtgtgggaacttcactcgggcgccaacctgctcacctaccgcggcggccaggcgggaccccgcggcctggcgctgctcaatggcgagtatctgctggcggcgcagctgggcaagaattacatcagcgcctgggagctccagcggaaggaccagctccagcagaagatcatgtgccccgggcctgtcacctgtctgactgcatcacccaatggtctctacgtcctggcaggagttgcagaaagcatccacctgtgggaggtctccaccgggaaccttctggtcatcctgagtcgacactaccaggacgtctcctgccttcagttcacaggggacagcagccacttcatctcagggggcaaggactgcctggtgctggtttggagcctctgcaggtagcgccttgcgcactcaggagggtggtaagggctacatagcaaggagtgtgcttaatgtgcctgagctgtgcacctagaaatggccaagatggcaggtttcatgttatgactattttcccacaataaaacattttttaaaagtc

SEQ ID NO: 199715 - DNA, 4520 bp, Homo sapiens
  Payload ID: 19405
  Gene Name: WD repeat domain 19
  Uniprot ID: Q8NEZ3
  ENST ID: ENST00000399820
  CDS Start-End: 155-4183
ggcccggcccctcgaggcaccgcctttcaattagcactcgctgattggtcgctgctcgcgcggtctcctgggtgacgggaacgcggtagcctgcttggtggagaccgggtgcgcctgcgtacttcatagttcgcgtagcggctcgagcgtggagatgaagcgtattttctcactgctagaaaagacttggcttggcgcaccaatacagtttgcctggcaaaaaacatcaggaaactaccttgcagtaacaggagctgattatattgtgaaaatctttgatcgccatggtcaaaaaagaagtgaaattaacttacctggtaactgtgttgccatggattgggataaagatggagatgtcctagcagtgattgctgagaaatctagctgcatttatctttgggatgccaacacaaataagaccagccagttagacaatggcatgagggatcaaatgtctttccttctttggtcaaaagttggaagtttcctggctgttggaactgttaaaggaaatttgcttatttataatcatcagacatctcgaaagattcctgtccttggaaaacatactaagagaatcacttgtggatgttggaatgcagaaaatctgcttgctttaggtggtgaagataaaatgattacagttagtaatcaggaaggtgacacgataagacagacacaagtgagatcagagcctagcaacatgcagtttttcttgatgaagatggatgaccgaacctctgctgctgaaagcatgataagtgtggtgcttggcaagaaaactttgttttttttaaatctgaatgaaccagataacccagctgatcttgaatttcagcaggactttggcaacattgtctgctataattggtatggtgatggccgcatcatgattggtttttcatgtggacattttgtggtcatttctactcatactggagagcttggtcaagagatatttcaggctcgtaaccataaagataatctaaccagcattgcagtatcacagactcttaacaaagttgctacatgtggagataactgcattaaaatccaagacttggttgacttaaaagacatgtatgttatactcaacctggatgaggaaaataaaggattgggtaccttgtcctggactgatgatggccagttgctagcactctctacccaaaggggctcacttcatgttttcctgaccaagcttcccatacttggggatgcctgcagcacaaggattgcctatctcacctccctccttgaagtcaccgtagccaaccctgttgaaggagagctaccaatcacagtttctgttgatgtggaacccaactttgtggcagtaggtctttatcatctggctgtaggaatgaataatcgagcttggttttatgtccttggagaaaatgctgtgaaaaaattgaaagatatggagtatctgggaacagtagccagtatttgccttcattctgactatgctgctgcactttttgaaggcaaagtccagttacatttgatagaaagcgaaatcttggatgctcaagaagaacgtgagactcggcttttcccagcagtggatgataagtgccgtatcttatgccatgccttaactagtgatttcctcatctatggtacagatactggtgtcgttcagtatttctacattgaagactggcaattcgttaatgattatcgacatcctgtcagtgtgaaaaagatttttcccgacccaaatgggaccagattagttttcattgatgaaaaaagtgatggatttgtttactgtccagtcaatgacgctacctatgagattccagatttttcaccaaccattaaaggtgttctttgggaaaactggccaatggataaaggtgtatttattgcttatgatgatgataaggtgtacacttatgtctttcacaaggacactatacaaggagccaaggttattttggctggtagcaccaaagttccttttgctcataaacctttgctgctatataatggagagctgacctgccaaacacagagtggaaaagtaaacaacatctaccttagcacccatggctttctcagcaacttaaaagatacggggcctgacgaactgagaccaatgctggcacagaatttaatgctaaagaggttttctgatgcttgggaaatgtgcaggattctgaatgatgaggctgcctggaatgagttggccagagcttgtctacatcacatggaagtggagtttgcaatccgtgtttatcggagaattggaaatgttggcatagtgatgtccttggaacaaataaagggaatagaggactacaatcttttggcaggacaccttgccatgtttaccaacgattataacctggctcaggacttgtaccttgcatccagctgtcctattgctgccctggagatgagaagggatttacagcattgggacagtgctctacaactggcaaagcatttggccccagaccagataccttttatatcaaaagaatatgctattcagcttgaattcgcgggtgattatgtaaatgctttggctcattatgagaaaggaataacaggtgataataaggaacatgatgaagcttgtctggctggagtggcccagatgtccataagaatgggagacatacgtcgaggggttaaccaagccctcaagcatcccagcagggtccttaaaagagactgtggagccatattggagaatatgaagcaattttcagaagcggcccaactgtatgaaaaaggtctctactacgataaagcagcatctgtttacatccgctctaagaattgggcaaaagttggtgatcttctgccccacgtttcttctcctaagatccatttgcagtatgccaaagccaaggaagcagatggaagatacaaagaagctgttgtagcttatgaaaatgcaaaacagtggcaaagtgtaatccgcatctatctggatcacctcaataatcctgaaaaagctgtcaatattgttagagagacccagtctctggatggagccaaaatggtagccaggttttttctacagcttggtgactatgggtctgccatccagtttcttgtcatgtccaaatgcaacaatgaagctttcacactggctcagcaacacaacaaaatggaaatctatgcagatattattggttctgaagacactactaatgaagactatcaaagcattgccttatactttgaaggagaaaagagatatcttcaggctggaaaattcttcttgctgtgtggccaatattcacgagcacttaaacacttcctgaaatgcccaagctcggaagataatgtggcaatagaaatggcaattgaaactgttggtcaggccaaagatgaactgctgaccaatcagctgatagaccatctcctgggggagaacgatggcatgcctaaggatgccaagtacctgttccgcttgtacatggctctgaagcaataccgagaagctgcccagactgccatcatcattgccagagaagagcagtctgcaggcaactaccggaatgcacacgatgttctcttcagtatgtatgcagaactgaaatcccagaagatcaaaattccctccgagatggccaccaacctcatgattctgcacagctatatactagtaaagattcatgttaaaaatggagatcacatgaaaggggctcgcatgctcattcgggtggccaacaacatcagcaaatttccatcacacattgtacccatcctgacgtcaactgtgattgagtgtcacagggcaggcctgaagaactctgctttcagcttcgcagctatgttgatgaggcctgaataccgcagcaaaatagatgccaaatacaaaaagaagatcgagggaatggtcaggagacccgatatatctgagatagaagaggccacgactccatgtccattctgcaaatttcttctcccagagtgtgaactcctctgtcctggatgtaaaaacagtatcccatattgcattgcaacaggtcgacacatgttgaaagatgactggacggtgtgtccacattgtgacttccctgctctatactcagaattgaagatcatgctaaacactgaaagcacatgtcctatgtgttcagaaagattaaacgctgctcagctgaaaaagatttcagactgtacccagtacctgcgaacggaggaggaactgtgattggcacgtgcagatacaatgctcctgagaagacagcattttccacaggaggctgtttcctcccctggtggatttaagagacggtcctttctggatacagagaaatgaaacaacggtgacctctccaggtcggcactttccacttctgtacggtggcaaaacgatgacatgtaaccttgctgtttattgtactttgtatattatttcctcttcaaagtctttcttacacactctatcctctgcactgttaatagtaacctatgacataattgtaaatattcagctttttgctaacttttgtattttgaaaaactttaaaataaaattgttgactaga

SEQ ID NO: 199716 - DNA, 571 bp, Homo sapiens
  Payload ID: 19405
  Gene Name: WD repeat domain 19
  ENST ID: ENST00000507228
  CDS Start-End: 1-407
ataaacctttgctgctatataatggagagctgacctgccaaacacagagtggaaaagtaaacaacatctaccttagcacccatggctttctcagcaacttaaaagatacggggcctgacgaactgagaccaatgctggcacagaatttaatgctaaagaggttttctgatgcttgggaaatgtgcaggattctgaatgatgaggctgcctggaatgagttggccagagcttgtctacatcacatggaagtggagtttgcaatccgtgtttatcggagaattggaaatgttggcatagtgatgtccttggaacaaataaaggacaccttgccatgtttaccaacgattataacctggctcaggacttgtaccttgcatccagctgtcctattgctgccctggagatgagaagggatttacagcattgggacagtgctctacaactggcaaagcatttggccccagaccagataccttttatatcaaaagaatatgctattcagcttgaattcgcgggtgattatgtaaatgctttggctcattatgagaaaggaataacaggtgataataag

SEQ ID NO: 199717 - DNA, 429 bp, Homo sapiens
  Payload ID: 19405
  Gene Name: WD repeat domain 19
  ENST ID: ENST00000512112
  CDS Start-End: 302-429
atagttcgcgtagcggctcgagcgtggagatgaagagctgattatattgtgaaaatctttgatcgccatggtcaaaaaagaagtgaaattaacttacctggtaactgtgttgccatggattgggataaagatggagatgtcctagcagtgattgctgagaaatctagctgcatttatctttgggatgccaacacaaataagaccagccagttagacaatggcatgaggaaaacatactaagagaatcacttgtggatgttggaatgcagaaaatctgcttgctttaggtggtgaagataaaatgattacagttagtaatcaggaaggtgacacgataagacagacacaagtgagatcagagcctagcaacatgcagtttttcttgatgaagatggatgaccgaacctctgctgctgaaagcatggtaag

SEQ ID NO: 199718 - DNA, 2513 bp, Homo sapiens
  Payload ID: 19405
  Gene Name: WD repeat domain 19
  ENST ID: ENST00000506503
  CDS Start-End: 11-1456
gagcgtggagatgaagcgtattttctcactgctagaaaagacttggcttggcgcaccaatacagtttgcctggcaaaaaacatcaggaaactaccttgcagtaacaggagctgattatattgtgaaaatctttgatcgccatggtcaaaaaagaagtgaaattaacttacctggtaactgtgttgccatggattgggataaagatggagatgtcctagcagtgattgctgagaaatctagctgcatttatctttgggatgccaacacaaataagaccagccagttagacaatggcatgagggatcaaatgtctttccttctttggtcaaaagttggaagtttcctggctgttggaactgttaaaggaaatttgcttatttataatcatcagacatctcgaaagattcctgtccttggaaaacatactaagagaatcacttgtggatgttggaatgcagaaaatctgcttgctttaggtggtgaagataaaatgattacagttagtaatcaggaaggtgacacgataagacagacacaagtgagatcagagcctagcaacatgcagtttttcttgatgaagatggatgaccgaacctctgctgctgaaagcatgataagtgtggtgcttggcaagaaaactttgttttttttaaatctgaatgaaccagataacccagctgatcttgaatttcagcaggactttggcaacattgtctgctataattggtatggtgatggccgcatcatgattggtttttcatgtggacattttgtggtcatttctactcatactggagagcttggtcaagagatatttcaggctcgtaaccataaagataatctaaccagcattgcagtatcacagactcttaacaaagttgctacatgtggagataactgcattaaaatccaagacttggttgacttaaaagacatgtatgttatactcaacctggatgaggaaaataaaggattgggtaccttgtcctggactgatgatggccagttgctagcactctctacccaaaggggctcacttcatgttttcctgaccaagcttcccatacttggggatgcctgcagcacaaggattgcctatctcacctccctccttgaagtcaccgtagccaaccctgttgaaggagagctaccaatcacagtttctgttgatgtggaacccaactttgtggcagtaggtctttatcatctggctgtaggaatgaataatcgagcttggttttatgtccttggagaaaatgctgtgaaaaaattgaaagatatggagtatctgggaacagtagccagtatttgccttcattctgactatgctgctgcactttttgaaggcaaagtccagttacatttgaaagcgaaatcttggatgctcaagaagaacgtgagactcggcttttcccagcagtggatgataagtgccgtatcttatgccatgccttaactagtgatttcctcatctatggtacagatgtatgtattgccttcttttttagagaacactgggaatttttaatttttattttgtgatctcagtcattctcttttcctaccagtcttttttctatattgaatccaatacaattaatgaagttatctgtgattaattatatacattcatgtgtctctttgcagtggggatacattctgagaaacgtgtcattgggcaatttcatcattgtgtggatgtcatagagtgtgcttacaggaacctagatggtacagcccactgcacacctagcctgtgtggtagagcctattgctcctaggctacaaaccagtacagcatgtgactgtactgaatactataggtaattgtaacacaatgctatctagacatagacaaggtacagtatatgtgtgatataaaatatttaaaatggcatgcctgtatagggcacttaccatgacaggagcttgcaggactggaaatggctctgggtgagtgagtgagtgagtggtgagtgaacgtgaaggcctgcagcattactgtacactaccatagatttttatcaacactgtacacttagggacactaaacttatttaaacattttttcttcaaaaataaattaaccttagctcactgtaactttataagctttatatttaaaaaaactttttgactcttttgtagtaacacttagcttaaaacacaaacacattgtacagttacacaaaatattttcttaaaaaatattttattatatcctattctataagcttttccttgtttttcactttttttaacttttaaactttttataaaaactaagacacaaacacacacattagtgcaggcctgcatagcatcaggatcatcagtatcactgtctcccacctccgcatcttgtcccactgaaaggtcttcagcgggaataacatgcatggagctgtcatctcctgtgataacaatgccttcttctggatacctcctgaaggacctggttgagcctgttttacagttaacttttttttaataaatagaagtgcactccaaaa

SEQ ID NO: 199719 - DNA, 862 bp, Homo sapiens
  Payload ID: 19405
  Gene Name: WD repeat domain 19
  ENST ID: ENST00000503697
  CDS Start-End: 55-354
gagaccgggtgcgcctgcgtacttcatagttcgcgtagcggctcgagcgtggagatgaagcgtattttctcactgctagaaaagacttggcttggcgcaccaatacagtttgcctggcaaaaaacatcaggaaactaccttgcagtaacaggagctgattatattgtgaaaatctttgatcgccatggtcaaaaaagaagtgaaattaacttacctggtaactgtgttgccatggattgggataaagatggagatgtcctagcagtgattgctgagaaatctagctgcatttatctttgggatgccaacacaaataagaccagccagttagacaatggcatgagacacaagtgagatcagagcctagcaacatgcagtttttcttgatgaagatggatgaccgaacctctgctgctgaaagcatgataagtgtggtgcttggcaagaaaactttgttttttttaaatctgaatgaaccagataacccagctgatcttgaatttcagcaggactttggcaacattgtctgctataattggtatggtgatggccgcatcatgattggtttttcatgtggacattttgtggtcatttctactcatactggagagcttggtcaagagatatttcaggctcgtaaccataaagataatctaaccagcattgcagtatcacagactcttaacaaagttgctacatgtggagataactgcattaaaatccaagacttggttgacttaaaagacatgtatgttatactcaacctggatgaggaaaataaaggattgggtaccttgtcctggactgatgatggccagttgctagcactctctacccaaaggggctcacttcatgttttcct

SEQ ID NO: 199720 - DNA, 4249 bp, Homo sapiens
  Payload ID: 19405
  Gene Name: WD repeat domain 19
  ENST ID: ENST00000506869
  CDS Start-End: 30-332
atagttcgcgtagcggctcgagcgtggagatgaagcgtattttctcactgctagaaaagacttggcttggcgcaccaatacagtttgcctggcaaaaaacatcaggaaactaccttgcagtaacaggagctgattatattgtgaaaatctttgatcgccatggtcaaaaaagaagtgaaattaacttacctggtaactgtgttgccatggattgggataaagatggagatgtcctagcagtgattgctgagaaatctagctgcatttatctttgggatgccaacacaaataagaccagccagttagacaatggcatgaggaaaacatactaagagaatcacttgtggatgttggaatgcagaaaatctgcttgctttaggtggtgaagataaaatgattacagttagtaatcaggaaggtgacacgataagacagacacaagtgagatcagagcctagcaacatgcagtttttcttgatgaagatggatgaccgaacctctgctgctgaaagcatgataagtgtggtgcttggcaagaaaactttgttttttttaaatctgaatgaaccagataacccagctgatcttgaatttcagcaggactttggcaacattgtctgctataattggtatggtgatggccgcatcatgattggtttttcatgtggacattttgtggtcatttctactcatactggagagcttggtcaagagatatttcaggctcgtaaccataaagataatctaaccagcattgcagtatcacagactcttaacaaagttgctacatgtggagataactgcattaaaatccaagacttggttgacttaaaagacatgtatgttatactcaacctggatgaggaaaataaaggattgggtaccttgtcctggactgatgatggccagttgctagcactctctacccaaaggggctcacttcatgttttcctgaccaagcttcccatacttggggatgcctgcagcacaaggattgcctatctcacctccctccttgaagtcaccgtagccaaccctgttgaaggagagctaccaatcacagtttctgttgatgtggaacccaactttgtggcagtaggtctttatcatctggctgtaggaatgaataatcgagcttggttttatgtccttggagaaaatgctgtgaaaaaattgaaagatatggagtatctgggaacagtagccagtatttgccttcattctgactatgctgctgcactttttgaaggcaaagtccagttacatttgatagaaagcgaaatcttggatgctcaagaagaacgtgagactcggcttttcccagcagtggatgataagtgccgtatcttatgccatgccttaactagtgatttcctcatctatggtacagatactggtgtcgttcagtatttctacattgaagactggcaattcgttaatgattatcgacatcctgtcagtgtgaaaaagatttttcccgacccaaatgggaccagattagttttcattgatgaaaaaagtgatggatttgtttactgtccagtcaatgacgctacctatgagattccagatttttcaccaaccattaaaggtgttctttgggaaaactggccaatggataaaggtgtatttattgcttatgatgatgataaggtgtacacttatgtctttcacaaggacactatacaaggagccaaggttattttggctggtagcaccaaagttccttttgctcataaacctttgctgctatataatggagagctgacctgccaaacacagagtggaaaagtaaacaacatctaccttagcacccatggctttctcagcaacttaaaagatacggggcctgacgaactgagaccaatgctggcacagaatttaatgctaaagaggttttctgatgcttgggaaatgtgcaggattctgaatgatgaggctgcctggaatgagttggccagagcttgtctacatcacatggaagtggagtttgcaatccgtgtttatcggagaattggaaatgttggcatagtgatgtccttggaacaaataaagggaatagaggactacaatcttttggcaggacaccttgccatgtttaccaacgattataacctggctcaggacttgtaccttgcatccagctgtcctattgctgccctggagatgagaagggatttacagcattgggacagtgctctacaactggcaaagcatttggccccagaccagataccttttatatcaaaagaatatgctattcagcttgaattcgcgggtgattatgtaaatgctttggctcattatgagaaaggaataacaggtgataataaggaacatgatgaagcttgtctggctggagtggcccagatgtccataagaatgggagacatacgtcgaggggttaaccaagccctcaagcatcccagcagggtccttaaaagagactgtggagccatattggagaatatgaagcaattttcagaagcggcccaactgtatgaaaaaggtctctactacgataaagcagcatctgtttacatccgctctaagaattgggcaaaagttggtgatcttctgccccacgtttcttctcctaagatccatttgcagtatgccaaagccaaggaagcagatggaagatacaaagaagctgttgtagcttatgaaaatgcaaaacagtggcaaagtgtaatccgcatctatctggatcacctcaataatcctgaaaaagctgtcaatattgttagagagacccagtctctggatggagccaaaatggtagccaggttttttctacagcttggtgactatgggtctgccatccagtttcttgtcatgtccaaatgcaacaatgaagctttcacactggctcagcaacacaacaaaatggaaatctatgcagatattattggttctgaagacactactaatgaagactatcaaagcattgccttatactttgaaggagaaaagagatatcttcaggctggaaaattcttcttgctgtgtggccaatattcacgagcacttaaacacttcctgaaatgcccaagctcggaagataatgtggcaatagaaatggcaattgaaactgttggtcaggccaaagatgaactgctgaccaatcagctgatagaccatctcctgggggagaacgatggcatgcctaaggatgccaagtacctgttccgcttgtacatggctctgaagcaataccgagaagctgcccagactgccatcatcattgccagagaagagcagtctgcaggcaactaccggaatgcacacgatgttctcttcagtatgtatgcagaactgaaatcccagaagatcaaaattccctccgagatggccaccaacctcatgattctgcacagctatatactagtaaagattcatgttaaaaatggagatcacatgaaaggggctcgcatgctcattcgggtggccaacaacatcagcaaatttccatcacacattgtacccatcctgacgtcaactgtgattgagtgtcacagggcaggcctgaagaactctgctttcagcttcgcagctatgttgatgaggcctgaataccgcagcaaaatagatgccaaatacaaaaagaagatcgagggaatggtcaggagacccgatatatctgagatagaagaggccacgactccatgtccattctgcaaatttcttctcccagagtgtgaactcctctgtcctggatgtaaaaacagtatcccatattgcattgcaacaggtcgacacatgttgaaagatgactggacggtgtgtccacattgtgacttccctgctctatactcagaattgaagatcatgctaaacactgaaagcacatgtcctatgtgttcagaaagattaaacgctgctcagctgaaaaagatttcagactgtacccagtacctgcgaacggaggaggaactgtgattggcacgtgcagatacaatgctcctgagaagacagcattttccacaggaggctgtttcctcccctggtggatttaagagacggtcctttctggatacagagaaatgaaacaacggtgacctctccaggtcggcactttccacttctgtacggtggcaaaacgatgacatgtaaccttgctgtttattgtactttgtatattatttcctcttcaaagtctttcttacacactctatcctctgcactgttaatagtaacctatgacataattgtaaatattcagctttttgctaacttttgtattttg

SEQ ID NO: 199721 - DNA, 573 bp, Homo sapiens
  Payload ID: 19405
  Gene Name: WD repeat domain 19
  ENST ID: ENST00000505055
  CDS Start-End: 30-266
atagttcgcgtagcggctcgagcgtggagatgaagcgtattttctcactgctagaaaagacttggcttggcgcaccaatacagtttgcctggcaaaaaacatcaggaaactaccttgcagtaacaggtaactgtgttgccatggattgggataaagatggagatgtcctagcagtgattgctgagaaatctagctgcatttatctttgggatgccaacacaaataagaccagccagttagacaatggcatgaggaaaacatactaagagaatcacttgtggatgttggaatgcagaaaatctgcttgctttaggtggtgaagataaaatgattacagttagtaatcaggaaggtgacacgataagacagacacaagtgagatcagagcctagcaacatgcagtttttcttgatgaagatggatgaccgaacctctgctgctgaaagcatgataagtgtggtgcttggcaagaaaactttgttttttttaaatctgaatgaaccagataacccagctgatcttgaatttcagcaggactttggcaacattgtctgctataattggtatggtgat

SEQ ID NO: 199722 - DNA, 540 bp, Homo sapiens
  Payload ID: 19405
  Gene Name: WD repeat domain 19
  ENST ID: ENST00000509560
  CDS Start-End: 115-540
atagttcgcgtagcggctcgagcgtggagatgaagagctgattatattgtgaaaatctttgatcgccatggtcaaaaaagaagtgaaattaacttacctggtaactgtgttgccatggattgggataaagatggagatgtcctagcagtgattgctgagaaatctagctgcatttatctttgggatgccaacacaaataagaccagccagttagacaatggcatgagggatcaaatgtctttccttctttggtcaaaagttggaagtttcctggctgttggaactgttaaaggaaatttgcttatttataatcatcagacatctcgaaagattcctgtccttggaaaacatactaagagaatcacttgtggatgttggaatgcagaaaatctgcttgctttaggtggtgaagataaaatgattacagttagtaatcaggaaggtgacacgataagacagacacaagtgagatcagagcctagcaacatgcagtttttcttgatgaagatggatgaccgaacctctgctgctgaaagcatg

SEQ ID NO: 199723 - DNA, 2198 bp, Homo sapiens
  Payload ID: 19406
  Gene Name: WD repeat domain 20
  Uniprot ID: Q8TBZ3
  ENST ID: ENST00000299135
  CDS Start-End: 14-274
gctgctttccaagatggcgacggagggaggagggaaggagatgaacgagattaagacccaattcaccacccgggaaggtctgtacaagctgctgccgcactcggagtacagccggcccaaccgggtgcccttcaactcgcagggatccaaccctgtccgcgtctccttcgtaaacctcaacgaccagtctggcaacggcgaccgcctctgcttcaatgtgggccgggagctgtacttctatatctacaagggggtccgcaagacaatcccatgagagactaatagacaagtcacgagttacctgtgtcaaatgggttcccggttcggaaagccttttcctagtagcccactcgagtgggaacatgtacttatataatgtggagcacacttgtggcaccacagccccccactaccagcttctgaagcagggagagagctttgccgtgcacacttgcaagagcaaatccacgaggaaccctctccttaagtggacggtgggcgagggggccctcaacgagtttgctttctccccagatggcaagttcttagcgtgcgtgagccaggacgggtttctgcgggtgttcaactttgactcagtggagctgcacggtacgatgaaaagctactttgggggcttgctgtgtgtgtgctggagcccggatggcaagtacatcgtgacaggtggggaggacgacttggtgacagtctggtcctttgtagactgccgagtaatagccagaggccacgggcacaagtcctgggtcagtgttgtagcgtttgacccttataccactagtgtagaagaaggtgaccctatggagtttagtggcagcgatgaggacttccaagaccttcttcattttggcagagatcgagcaaatagtacacagtccaggctctccaaacggaactctacagacagccgccccgtaagtgtcacgtatcggtttggttccgtgggccaggacacacagctctgtttatgggaccttacagaagatatccttttccctcaccaacccctctcaagagcaaggacacacacaaatgtcatgaatgccacgagtcctcctgctggaagcaatgggaacagtgttacaacacccgggaactctgtgccgcctcctctgccacggtccaacagccttccacattcagcagtctcaaatgctggcagcaaaagcagtgtcatggacggggccattgcttctggggtcagcaaatttgcaacactttcactacatgaccggaaggagaggcaccacgagaaagatcacaagcgaaatcatagcatgggacacatttctagcaagagcagtgacaaactgaatctagttaccaaaaccaaaacggaccctgctaaaactctgggaacgcccctgtgtcctcgaatggaagatgttcccttgttagagccgctgatatgtaaaaagatagcacatgagagactgactgtactaatatttcttgaagactgtatagtcactgcttgtcaggagggatttatttgcacatggggaaggcctggtaaagtggtaagttttaatccttaatgctgcaccagatctagaacttgaataggtagtgacttttttctttttcgtgggaggggtggggtgtacaatgaatgtgaatgacacttcttattcttaatgtaaatctcaatgcatcagagccataattttggatactgcatgccatgtaattctgaatcatttgataatttaccttagagcatttaaaaaaatataatcaaactaattgccagccaagtcagtcatcctcctgggagtatatagagtcccaaggttagcgctcctgtattagactatttcaattttaggaaaatcatgaccatgtggggaaacaatgactttaaaatgctgaaattaaaatttatgctttaactggaatattttttgcttaactactcaattagaatattgtacacctgatcaatgtgtgttcagcacagatggccatgaattgtcatttatagtccaattttttatcttaatcataaaatgtttaggaatctatgaaatttaactttaggaacaaaacgtttagcagggttgattgatattatttttacattgttctggcaatccacagaaagagaagagccttaatttttaaaacccattttagtcattttatgacaattaaagttgtttaataaacatcttttttcaaag

SEQ ID NO: 199724 - DNA, 3060 bp, Homo sapiens
  Payload ID: 19406
  Gene Name: WD repeat domain 20
  Uniprot ID: Q8TBZ3
  ENST ID: ENST00000322340
  CDS Start-End: 50-637
ggtgggcgtgatccgggcacttagggcaggatgaacgctgctttccaagatggcgacggagggaggagggaaggagatgaacgagattaagacccaattcaccacccgggaaggtctgtacaagctgctgccgcactcggagtacagccggcccaaccgggtgcccttcaactcgcagggatccaaccctgtccgcgtctccttcgtaaacctcaacgaccagtctggcaacggcgaccgcctctgcttcaatgtgggccgggagctgtacttctatatctacaagggggtccgcaaggctgctgacttgagtaaaccaatagataaaaggatatacaaaggaacacagcctacttgtcatgacttcaaccacctaacagccacagcagaaagtgtctctctcctagtgggcttttccgcaggccaagtccagcttatagacccaatcaaaaaagaaactagcaaactttttaatgaggaaaactcttgtcagcacttgtggaaggtggattggaatgaagaaagacagaatgaaggtagcaagaccagtgaggaggctctagtaactgtccagccggcagagcacttctgcaggcaggaggacaggatgcaaggtgttctccaagaccagaactaaaagtgcccaacagcttgagaagagggcactggagagaggggcagggaagcgcccttctcctcggctgtgcttctgagtaatggctcccgcagacctggggagggcctggggaggggtggccgcggtggttcctgatatcaggtgtgtaaggtgcaatgcgtgctgctaaccctaggagaaatttggggaaaatatttgtagttttctcgccaaactttgagcttcctcattgaaatttttcagtctttcagcctaaacgttattatgagcaagaatatcttttctaacctaatctgtggaataaaacacagcatttggcaagaagaggctgttaaatactcagtcagcatcactgttccagcgtgtaccaaaccacagagatgaaaggctcagacgaaagtcaggtgcacgctgcgtggctggagaatcccgctcccacccggcaagggggcgagctggtccctgggcggtgtcagacaccttctgaaggtgccaggccagggccaggggagcttcaactcgccctccttgggttggcctttttcaccagaattcaagaagccagatttgtgctgtgactgcgatggggcaggcttctaaacactactggtggccctggagcctttctctgaggcttttttcttattcagaaggagaattaaaaattcccccagcggcctggagaagggaacctttggaaaagcttgccttcttttaaaagcaaatgcatgtgcaggagtagacactttacaaataaccagtagccttggggtcgaaatttgcttaaatcatggtaaaggatctcatttctcttttgtgctgattgaaccttctagcagtttggaagtgttttcctgtgaacccttagctggggactgagggtaaatgccttaaaaatggaggcatggaaaatcagaaaggagctatcacaatcattcttttctcaaaggcgttcaggaattctgaggaagaaatgcagtgacaggatgggattttaggggcaaggacaccgtccgggcggggcccagggctctccactggctgacttcacccccagggcccagctggcacgtggccaggcagccatttctccccagttcctccacttcctggggttcattttaaataataaattgtaaagtatgaaatgagtgctgaagttgcctgcatacaaggtcctcatcacctctcgcctgggagggagacgttttctttctttgttgagcgagctcaaagtgtgaggcggagaaaacctaggggttgggggcggctggagaagggatccacggaaacccaagcgccacatcatgcgtgtctgactgcccacggaagaactagaagcagttcaccagtggattttctggggaacgattcatggaacacagcgtctggcgtccagctttgtgggtgagggcatggcgggggatccggtggccctgccctgcctccggtgccggtggatgggggagggactggcctctgactgcggggttgcaccatggcggcggtcggtgtgcccttggctgaggtttcgttccttagcagtgagaacctccacatgcgtgggtaggggtcgggtgacctggagacgcctcctccggtctggtctgggtgacaaaggtgaaggtttatagtctaccaccctggcagcagcctgcagggcccccccttgtctggagcacacccttcgccacgggctgattgggactgtcgggtgttgctttaagttaacaaggtgcacatcacagcgaccccaagtgatgtcccaaagggaggagacattagtctggccgaagtgaagtctgtggctttatatgtaaaagcactcgtatgcaactgttacctttgaaactcagatcctagttacgaactataagaacgtgcccctccagtagagggagactgtctcactgatgttgatttctttattcatttccgcatctgttacacgaacttcgtgtcataaattgctatcctttcatttgaaagtgtaaaaaatttcctgcatttttatcatttctgtatacttgagtttattagagattgttatgttaggcgacactgtataaaattgtatggatattttgagtgaaaatcaaaagtaaaattcacatgtatttccttttttatattttcatccaatttcttgacaacttgaataaatttcataaagagccttcctaacatgaaatattggtaaattaaattctttactgttgcaataattaatgaaactttagtatcagtattgttttataattttaaggaaatcatgtttgtttcactgctttgtttttttttttagctgttgccttgtcactgtcacagctaacaagacttactacatacttgatattctgaagtactgtggggctgtcctctgtatactgacattaaataaacgtgtgtgagtgaactgtaaa

SEQ ID NO: 199725 - DNA, 2616 bp, Homo sapiens
  Payload ID: 19406
  Gene Name: WD repeat domain 20
  Uniprot ID: Q8TBZ3
  ENST ID: ENST00000335263
  CDS Start-End: 81-1826
gaagagggagcaccaggaacagcgcctgcgcggtgggcgtgatccgggcacttagggcaggatgaacgctgctttccaagatggcgacggagggaggagggaaggagatgaacgagattaagacccaattcaccacccgggaaggtctgtacaagctgctgccgcactcggagtacagccggcccaaccgggtgcccttcaactcgcagggatccaaccctgtccgcgtctccttcgtaaacctcaacgaccagtctggcaacggcgaccgcctctgcttcaatgtgggccgggagctgtacttctatatctacaagggggtccgcaaggctgctgacttgagtaaaccaatagataaaaggatatacaaaggaacacagcctacttgtcatgacttcaaccacctaacagccacagcagaaagtgtctctctcctagtgggcttttccgcaggccaagtccagcttatagacccaatcaaaaaagaaactagcaaactttttaatgaggaaagactaatagacaagtcacgagttacctgtgtcaaatgggttcccggttcggaaagccttttcctagtagcccactcgagtgggaacatgtacttatataatgtggagcacacttgtggcaccacagccccccactaccagcttctgaagcagggagagagctttgccgtgcacacttgcaagagcaaatccacgaggaaccctctccttaagtggacggtgggcgagggggccctcaacgagtttgctttctccccagatggcaagttcttagcgtgcgtgagccaggacgggtttctgcgggtgttcaactttgactcagtggagctgcacggtacgatgaaaagctactttgggggcttgctgtgtgtgtgctggagcccggatggcaagtacatcgtgacaggtggggaggacgacttggtgacagtctggtcctttgtagactgccgagtaatagccagaggccacgggcacaagtcctgggtcagtgttgtagcgtttgacccttataccactagtgtagaagaaggtgaccctatggagtttagtggcagcgatgaggacttccaagaccttcttcattttggcagagatcgagcaaatagtacacagtccaggctctccaaacggaactctacagacagccgccccgtaagtgtcacgtatcggtttggttccgtgggccaggacacacagctctgtttatgggaccttacagaagatatccttttccctcaccaacccctctcaagagcaaggacacacacaaatgtcatgaatgccacgagtcctcctgctggaagcaatgggaacagtgttacaacacccgggaactctgtgccgcctcctctgccacggtccaacagccttccacattcagcagtctcaaatgctggcagcaaaagcagtgtcatggacggggccattgcttctggggtcagcaaatttgcaacactttcactacatgaccggaaggagaggcaccacgagaaagatcacaagcgaaatcatagcatgggacacatttctagcaagagcagtgacaaactgaatctagttaccaaaaccaaaacggaccctgctaaaactctgggaacgcccctgtgtcctcgaatggaagatgttcccttgttagagccgctgatatgtaaaaagatagcacatgagagactgactgtactaatatttcttgaagactgtatagtcactgcttgtcaggagggatttatttgcacatggggaaggcctggtaaagtgggctcattgtcatccccaagccaggccagttctccaggtggaactgtagtgtagcgacctcactgctgcgcgcacagtctcccgggacttggactcgagggagtgacgaggaggagctccgagctgcgcctgagccgtgccagccggcggacctcaggcggtggacgtcggcgatagccgtgtggacggtgaccggctcactctgcggcgccgtgctcccgctgctcacccaaagaagttgtttccattttaaaccggtcttttggggctgcagtaaaaaataagaaatggagttttcttgctttttactctaaaattcaatgtaattaaatttcatatatatataatatatacatatatacatagtgtaaaataaaatgtttcttggacaagaaatcccctgaaattcagctgttatagtgcttcactgtttttgcactgatttttctataccttaggtggtcagaagacaaccttgaatgcactcatagagaaaactgttactttctgacgtaatgtaattcaggaagacagacgctgcaatcacagattttaaaaaattgtttgcacttaaaaatagttgaatgctggtggaaagttactttgcagatgggtgtaaggactcatggccctctgaggtgcggcgtgaagatgccctttttacccgttgacgtttattttacgtaaaataaactgttgtttccaatgcaatcaactctgtattatatgtataaatattgtaattctgcaattggggaaaatagttacttcactagtaattttcatcatttaagagtgatatttctaattcacaaaagttaatattaaaactatcttgaatata

SEQ ID NO: 199726 - DNA, 2391 bp, Homo sapiens
  Payload ID: 19406
  Gene Name: WD repeat domain 20
  Uniprot ID: Q8TBZ3
  ENST ID: ENST00000342702
  CDS Start-End: 32-1741
acttagggcaggatgaacgctgctttccaagatggcgacggagggaggagggaaggagatgaacgagattaagacccaattcaccacccgggaaggtctgtacaagctgctgccgcactcggagtacagccggcccaaccgggtgcccttcaactcgcagggatccaaccctgtccgcgtctccttcgtaaacctcaacgaccagtctggcaacggcgaccgcctctgcttcaatgtgggccgggagctgtacttctatatctacaagggggtccgcaaggctgctgacttgagtaaaccaatagataaaaggatatacaaaggaacacagcctacttgtcatgacttcaaccacctaacagccacagcagaaagtgtctctctcctagtgggcttttccgcaggccaagtccagcttatagacccaatcaaaaaagaaactagcaaactttttaatgaggaaagactaatagacaagtcacgagttacctgtgtcaaatgggttcccggttcggaaagccttttcctagtagcccactcgagtgggaacatgtacttatataatgtggagcacacttgtggcaccacagccccccactaccagcttctgaagcagggagagagctttgccgtgcacacttgcaagagcaaatccacgaggaaccctctccttaagtggacggtgggcgagggggccctcaacgagtttgctttctccccagatggcaagttcttagcgtgcgtgagccaggacgggtttctgcgggtgttcaactttgactcagtggagctgcacggtacgatgaaaagctactttgggggcttgctgtgtgtgtgctggagcccggatggcaagtacatcgtgacaggtggggaggacgacttggtgacagtctggtcctttgtagactgccgagtaatagccagaggccacgggcacaagtcctgggtcagtgttgtagcgtttgacccttataccactagtgtagaagaaggtgaccctatggagtttagtggcagcgatgaggacttccaagaccttcttcattttggcagagatcgagcaaatagtacacagtccaggctctccaaacggaactctacagacagccgccccgtaagtgtcacgtatcggtttggttccgtgggccaggacacacagctctgtttatgggaccttacagaagatatccttttccctcaccaacccctctcaagagcaaggacacacacaaatgtcatgaatgccacgagtcctcctgctggaagcaatgggaacagtgttacaacacccgggaactctgtgccgcctcctctgccacggtccaacagccttccacattcagcagtctcaaatgctggcagcaaaagcagtgtcatggacggggccattgcttctggggtcagcaaatttgcaacactttcactacatgaccggaaggagaggcaccacgagaaagatcacaagcgaaatcatagcatgggacacatttctagcaagagcagtgacaaactgaatctagttaccaaaaccaaaacggaccctgctaaaactctgggaacgcccctgtgtcctcgaatggaagatgttcccttgttagagccgctgatatgtaaaaagatagcacatgagagactgactgtactaatatttcttgaagactgtatagtcactgcttgtcaggagggatttatttgcacatggggaaggcctggtaaagtggtaagttttaatccttaatgctgcaccagatctagaacttgaataggtagtgacttttttctttttcgtgggaggggtggggtgtacaatgaatgtgaatgacacttcttattcttaatgtaaatctcaatgcatcagagccataattttggatactgcatgccatgtaattctgaatcatttgataatttaccttagagcatttaaaaaaatataatcaaactaattgccagccaagtcagtcatcctcctgggagtatatagagtcccaaggttagcgctcctgtattagactatttcaattttaggaaaatcatgaccatgtggggaaacaatgactttaaaatgctgaaattaaaatttatgctttaactggaatattttttgcttaactactcaattagaatattgtacacctgatcaatgtgtgttcagcacagatggccatgaattgtcatttatagtccaattttttatcttaatcataaaatgtttaggaatctatgaaatttaactttaggaacaaaacgtttagcagggttgattgatattatttttacattgttctggcaatccacagaaagagaagagccttaatttttaaaacccattttagtcattttatgacaattaaagttgtttaataaacatcttttttcaaagaagca

SEQ ID NO: 199727 - DNA, 2695 bp, Homo sapiens
  Payload ID: 19406
  Gene Name: WD repeat domain 20
  ENST ID: ENST00000424963
  CDS Start-End: 73-1911
agcaccaggaacagcgcctgcgcggtgggcgtgatccgggcacttagggcaggatgaacgctgctttccaagatggcgacggagggaggagggaaggagatgaacgagattaagacccaattcaccacccgggaaggtctgtacaagctgctgccgcactcggagtacagccggcccaaccgggtgcccttcaactcgcagggatccaaccctgtccgcgtctccttcgtaaacctcaacgaccagtctggcaacggcgaccgcctctgcttcaatgtgggccgggagctgtacttctatatctacaagggggtccgcaaggctgctgacttgagtaaaccaatagataaaaggatatacaaaggaacacagcctacttgtcatgacttcaaccacctaacagccacagcagaaagtgtctctctcctagtgggcttttccgcaggccaagtccagcttatagacccaatcaaaaaagaaactagcaaactttttaatgaggaaaactcttgtcagcacttgtggaaggtggattggaatgaagaaagacagaatgaaggtagcaagaccagtgaggaggctctagtaactgtccagagactaatagacaagtcacgagttacctgtgtcaaatgggttcccggttcggaaagccttttcctagtagcccactcgagtgggaacatgtacttatataatgtggagcacacttgtggcaccacagccccccactaccagcttctgaagcagggagagagctttgccgtgcacacttgcaagagcaaatccacgaggaaccctctccttaagtggacggtgggcgagggggccctcaacgagtttgctttctccccagatggcaagttcttagcgtgcgtgagccaggacgggtttctgcgggtgttcaactttgactcagtggagctgcacggtacgatgaaaagctactttgggggcttgctgtgtgtgtgctggagcccggatggcaagtacatcgtgacaggtggggaggacgacttggtgacagtctggtcctttgtagactgccgagtaatagccagaggccacgggcacaagtcctgggtcagtgttgtagcgtttgacccttataccactagtgtagaagaaggtgaccctatggagtttagtggcagcgatgaggacttccaagaccttcttcattttggcagagatcgagcaaatagtacacagtccaggctctccaaacggaactctacagacagccgccccgtaagtgtcacgtatcggtttggttccgtgggccaggacacacagctctgtttatgggaccttacagaagatatccttttccctcaccaacccctctcaagagcaaggacacacacaaatgtcatgaatgccacgagtcctcctgctggaagcaatgggaacagtgttacaacacccgggaactctgtgccgcctcctctgccacggtccaacagccttccacattcagcagtctcaaatgctggcagcaaaagcagtgtcatggacggggccattgcttctggggtcagcaaatttgcaacactttcactacatgaccggaaggagaggcaccacgagaaagatcacaagcgaaatcatagcatgggacacatttctagcaagagcagtgacaaactgaatctagttaccaaaaccaaaacggaccctgctaaaactctgggaacgcccctgtgtcctcgaatggaagatgttcccttgttagagccgctgatatgtaaaaagatagcacatgagagactgactgtactaatatttcttgaagactgtatagtcactgcttgtcaggagggatttatttgcacatggggaaggcctggtaaagtgggctcattgtcatccccaagccaggccagttctccaggtggaactgtagtgtagcgacctcactgctgcgcgcacagtctcccgggacttggactcgagggagtgacgaggaggagctccgagctgcgcctgagccgtgccagccggcggacctcaggcggtggacgtcggcgatagccgtgtggacggtgaccggctcactctgcggcgccgtgctcccgctgctcacccaaagaagttgtttccattttaaaccggtcttttggggctgcagtaaaaaataagaaatggagttttcttgctttttactctaaaattcaatgtaattaaatttcatatatatataatatatacatatatacatagtgtaaaataaaatgtttcttggacaagaaatcccctgaaattcagctgttatagtgcttcactgtttttgcactgatttttctataccttaggtggtcagaagacaaccttgaatgcactcatagagaaaactgttactttctgacgtaatgtaattcaggaagacagacgctgcaatcacagattttaaaaaattgtttgcacttaaaaatagttgaatgctggtggaaagttactttgcagatgggtgtaaggactcatggccctctgaggtgcggcgtgaagatgccctttttacccgttgacgtttattttacgtaaaataaactgttgtttccaatgcaatcaactctgtattatatgtataaatattgtaattctgcaattggggaaaatagttacttcactagtaattttcatcatttaagagtgatatttctaattcacaaaagttaatattaaaactatcttg

SEQ ID NO: 199728 - DNA, 2067 bp, Homo sapiens
  Payload ID: 19406
  Gene Name: WD repeat domain 20
  Uniprot ID: Q8TBZ3
  ENST ID: ENST00000454394
  CDS Start-End: 11-1813
gctttccaagatggcgacggagggaggagggaaggagatgaacgagattaagacccaattcaccacccgggaaggtctgtacaagctgctgccgcactcggagtacagccggcccaaccgggtgcccttcaactcgcagggatccaaccctgtccgcgtctccttcgtaaacctcaacgaccagtctggcaacggcgaccgcctctgcttcaatgtgggccgggagctgtacttctatatctacaagggggtccgcaaggctgctgacttgagtaaaccaatagataaaaggatatacaaaggaacacagcctacttgtcatgacttcaaccacctaacagccacagcagaaagtgtctctctcctagtgggcttttccgcaggccaagtccagcttatagacccaatcaaaaaagaaactagcaaactttttaatgaggaaaactcttgtcagcacttgtggaaggtggattggaatgaagaaagacagaatgaaggtagcaagaccagtgaggaggctctagtaactgtccagagactaatagacaagtcacgagttacctgtgtcaaatgggttcccggttcggaaagccttttcctagtagcccactcgagtgggaacatgtacttatataatgtggagcacacttgtggcaccacagccccccactaccagcttctgaagcagggagagagctttgccgtgcacacttgcaagagcaaatccacgaggaaccctctccttaagtggacggtgggcgagggggccctcaacgagtttgctttctccccagatggcaagttcttagcgtgcgtgagccaggacgggtttctgcgggtgttcaactttgactcagtggagctgcacggtacgatgaaaagctactttgggggcttgctgtgtgtgtgctggagcccggatggcaagtacatcgtgacaggtggggaggacgacttggtgacagtctggtcctttgtagactgccgagtaatagccagaggccacgggcacaagtcctgggtcagtgttgtagcgtttgacccttataccactagtgtagaagaaggtgaccctatggagtttagtggcagcgatgaggacttccaagaccttcttcattttggcagagatcgagcaaatagtacacagtccaggctctccaaacggaactctacagacagccgccccgtaagtgtcacgtatcggtttggttccgtgggccaggacacacagctctgtttatgggaccttacagaagatatccttttccctcaccaacccctctcaagagcaaggacacacacaaatgtcatgaatgccacgagtcctcctgctggaagcaatgggaacagtgttacaacacccgggaactctgtgccgcctcctctgccacggtccaacagccttccacattcagcagtctcaaatgctggcagcaaaagcagtgtcatggacggggccattgcttctggggtcagcaaatttgcaacactttcactacatgaccggaaggagaggcaccacgagaaagatcacaagcgaaatcatagcatgggacacatttctagcaagagcagtgacaaactgaatctagttaccaaaaccaaaacggaccctgctaaaactctgggaacgcccctgtgtcctcgaatggaagatgttcccttgttagagccgctgatatgtaaaaagatagcacatgagagactgactgtactaatatttcttgaagactgtatagtcactgcttgtcaggagggatttatttgcacatggggaaggcctggtaaagtggtaagttttaatccttaatgctgcaccagatctagaacttgaataggtagtgacttttttctttttcgtgggaggggtggggtgtacaatgaatgtgaatgacacttcttattcttaatgtaaatctcaatgcatcagagccataattttggatactgcatgccatgtaattctgaatcatttgataatttaccttagagcatttaaaaaaatataatcaaactaattgccagccaagtcagtcatcctcctgggagtatatagagtcccaa

SEQ ID NO: 199729 - DNA, 2382 bp, Homo sapiens
  Payload ID: 19406
  Gene Name: WD repeat domain 20
  Uniprot ID: Q8TBZ3
  ENST ID: ENST00000556807
  CDS Start-End: 32-1594
acttagggcaggatgaacgctgctttccaagatggcgacggagggaggagggaaggagatgaacgagattaagacccaattcaccacccgggaaggtctgtacaagctgctgccgcactcggagtacagccggcccaaccgggtgcccttcaactcgcagggatccaaccctgtccgcgtctccttcgtaaacctcaacgaccagtctggcaacggcgaccgcctctgcttcaatgtgggccgggagctgtacttctatatctacaagggggtccgcaagagactaatagacaagtcacgagttacctgtgtcaaatgggttcccggttcggaaagccttttcctagtagcccactcgagtgggaacatgtacttatataatgtggagcacacttgtggcaccacagccccccactaccagcttctgaagcagggagagagctttgccgtgcacacttgcaagagcaaatccacgaggaaccctctccttaagtggacggtgggcgagggggccctcaacgagtttgctttctccccagatggcaagttcttagcgtgcgtgagccaggacgggtttctgcgggtgttcaactttgactcagtggagctgcacggtacgatgaaaagctactttgggggcttgctgtgtgtgtgctggagcccggatggcaagtacatcgtgacaggtggggaggacgacttggtgacagtctggtcctttgtagactgccgagtaatagccagaggccacgggcacaagtcctgggtcagtgttgtagcgtttgacccttataccactagtgtagaagaaggtgaccctatggagtttagtggcagcgatgaggacttccaagaccttcttcattttggcagagatcgagcaaatagtacacagtccaggctctccaaacggaactctacagacagccgccccgtaagtgtcacgtatcggtttggttccgtgggccaggacacacagctctgtttatgggaccttacagaagatatccttttccctcaccaacccctctcaagagcaaggacacacacaaatgtcatgaatgccacgagtcctcctgctggaagcaatgggaacagtgttacaacacccgggaactctgtgccgcctcctctgccacggtccaacagccttccacattcagcagtctcaaatgctggcagcaaaagcagtgtcatggacggggccattgcttctggggtcagcaaatttgcaacactttcactacatgaccggaaggagaggcaccacgagaaagatcacaagcgaaatcatagcatgggacacatttctagcaagagcagtgacaaactgaatctagttaccaaaaccaaaacggaccctgctaaaactctgggaacgcccctgtgtcctcgaatggaagatgttcccttgttagagccgctgatatgtaaaaagatagcacatgagagactgactgtactaatatttcttgaagactgtatagtcactgcttgtcaggagggatttatttgcacatggggaaggcctggtaaagtgggctcattgtcatccccaagccaggccagttctccaggtggaactgtagtgtagcgacctcactgctgcgcgcacagtctcccgggacttggactcgagggagtgacgaggaggagctccgagctgcgcctgagccgtgccagccggcggacctcaggcggtggacgtcggcgatagccgtgtggacggtgaccggctcactctgcggcgccgtgctcccgctgctcacccaaagaagttgtttccattttaaaccggtcttttggggctgcagtaaaaaataagaaatggagttttcttgctttttactctaaaattcaatgtaattaaatttcatatatatataatatatacatatatacatagtgtaaaataaaatgtttcttggacaagaaatcccctgaaattcagctgttatagtgcttcactgtttttgcactgatttttctataccttaggtggtcagaagacaaccttgaatgcactcatagagaaaactgttactttctgacgtaatgtaattcaggaagacagacgctgcaatcacagattttaaaaaattgtttgcacttaaaaatagttgaatgctggtggaaagttactttgcagatgggtgtaaggactcatggccctctgaggtgcggcgtgaagatgccctttttacccgttgacgtttattttacgtaaaataaactgttgtttccaatgcaatcaactctgtattatatgtataaatattgtaattctgcaattggggaaaatagttacttcactagtaattttcatcatttaagagtgatatttctaattcacaaaagttaatattaaaactatcttgaata

SEQ ID NO: 199730 - DNA, 2117 bp, Homo sapiens
  Payload ID: 19406
  Gene Name: WD repeat domain 20
  Uniprot ID: Q8TBZ3
  ENST ID: ENST00000556511
  CDS Start-End: 1-1527
atggcgacggagggaggagggaaggagatgaacgagattaagacccaattcaccacccgggaaggtctgtacaagctgctgccgcactcggagtacagccggcccaaccgggtgcccttcaactcgcagggatccaaccctgtccgcgtctccttcgtaaacctcaacgaccagtctggcaacggcgaccgcctctgcttcaatgtgggccgggagctgtacttctatatctacaagggggtccgcaagagactaatagacaagtcacgagttacctgtgtcaaatgggttcccggttcggaaagccttttcctagtagcccactcgagtgggaacatgtacttatataatgtggagcacacttgtggcaccacagccccccactaccagcttctgaagcagggagagagctttgccgtgcacacttgcaagagcaaatccacgaggaaccctctccttaagtggacggtgggcgagggggccctcaacgagtttgctttctccccagatggcaagttcttagcgtgcgtgagccaggacgggtttctgcgggtgttcaactttgactcagtggagctgcacggtacgatgaaaagctactttgggggcttgctgtgtgtgtgctggagcccggatggcaagtacatcgtgacaggtggggaggacgacttggtgacagtctggtcctttgtagactgccgagtaatagccagaggccacgggcacaagtcctgggtcagtgttgtagcgtttgacccttataccactagtgtagaagaaggtgaccctatggagtttagtggcagcgatgaggacttccaagaccttcttcattttggcagagatcgagcaaatagtacacagtccaggctctccaaacggaactctacagacagccgccccgtaagtgtcacgtatcggtttggttccgtgggccaggacacacagctctgtttatgggaccttacagaagatatccttttccctcaccaacccctctcaagagcaaggacacacacaaatgtcatgaatgccacgagtcctcctgctggaagcaatgggaacagtgttacaacacccgggaactctgtgccgcctcctctgccacggtccaacagccttccacattcagcagtctcaaatgctggcagcaaaagcagtgtcatggacggggccattgcttctggggtcagcaaatttgcaacactttcactacatgaccggaaggagaggcaccacgagaaagatcacaagcgaaatcatagcatgggacacatttctagcaagagcagtgacaaactgaatctagttaccaaaaccaaaacggaccctgctaaaactctgggaacgcccctgtgtcctcgaatggaagatgttcccttgttagagccgctgatatgtaaaaagatagcacatgagagactgactgtactaatatttcttgaagactgtatagtcactgcttgtcaggagggatttatttgcacatggggaaggcctggtaaagtggtaagttttaatccttaatgctgcaccagatctagaacttgaataggtagtgacttttttctttttcgtgggaggggtggggtgtacaatgaatgtgaatgacacttcttattcttaatgtaaatctcaatgcatcagagccataattttggatactgcatgccatgtaattctgaatcatttgataatttaccttagagcatttaaaaaaatataatcaaactaattgccagccaagtcagtcatcctcctgggagtatatagagtcccaaggttagcgctcctgtattagactatttcaattttaggaaaatcatgaccatgtggggaaacaatgactttaaaatgctgaaattaaaatttatgctttaactggaatattttttgcttaactactcaattagaatattgtacacctgatcaatgtgtgttcagcacagatggccatgaattgtcatttatagtccaattttttatcttaatcataaaatgtttaggaatctatgaaatttaactttaggaacaaaacgtttagcagggttgattgatattatttttacattgttctggcaatccacagaaagagaagagccttaatttttaaaacc

SEQ ID NO: 199731 - DNA, 2175 bp, Homo sapiens
  Payload ID: 19406
  Gene Name: WD repeat domain 20
  Uniprot ID: Q8TBZ3
  ENST ID: ENST00000555879
  CDS Start-End: 32-292
acttagggcaggatgaacgctgctttccaagatggcgacggagggaggagggaaggagatgaacgagattaagacccaattcaccacccgggaaggtctgtacaagctgctgccgcactcggagtacagccggcccaaccgggtgcccttcaactcgcagggatccaaccctgtccgcgtctccttcgtaaacctcaacgaccagtctggcaacggcgaccgcctctgcttcaatgtgggccgggagctgtacttctatatctacaagggggtccgcaagacaatcccatgaggttggtagaacagagattctcatctccgttttaactgaggctgctgacttgagtaaaccaatagataaaaggatatacaaaggaacacagcctacttgtcatgacttcaaccacctaacagccacagcagaaagtgtctctctcctagtgggcttttccgcaggccaagtccagcttatagacccaatcaaaaaagaaactagcaaactttttaatgaggaaatggcaagttcttagcgtgcgtgagccaggacgggtttctgcgggtgttcaactttgactcagtggagctgcacggtacgatgaaaagctactttgggggcttgctgtgtgtgtgctggagcccggatggcaagtacatcgtgacaggtggggaggacgacttggtgacagtctggtcctttgtagactgccgagtaatagccagaggccacgggcacaagtcctgggtcagtgttgtagcgtttgacccttataccactagtgtagaagaaggtgaccctatggagtttagtggcagcgatgaggacttccaagaccttcttcattttggcagagatcgagcaaatagtacacagtccaggctctccaaacggaactctacagacagccgccccgtaagtgtcacgtatcggtttggttccgtgggccaggacacacagctctgtttatgggaccttacagaagatatccttttccctcaccaacccctctcaagagcaaggacacacacaaatgtcatgaatgccacgagtcctcctgctggaagcaatgggaacagtgttacaacacccgggaactctgtgccgcctcctctgccacggtccaacagccttccacattcagcagtctcaaatgctggcagcaaaagcagtgtcatggacggggccattgcttctggggtcagcaaatttgcaacactttcactacatgaccggaaggagaggcaccacgagaaagatcacaagcgaaatcatagcatgggacacatttctagcaagagcagtgacaaactgaatctagttaccaaaaccaaaacggaccctgctaaaactctgggaacgcccctgtgtcctcgaatggaagatgttcccttgttagagccgctgatatgtaaaaagatagcacatgagagactgactgtactaatatttcttgaagactgtatagtcactgcttgtcaggagggatttatttgcacatggggaaggcctggtaaagtggtaagttttaatccttaatgctgcaccagatctagaacttgaataggtagtgacttttttctttttcgtgggaggggtggggtgtacaatgaatgtgaatgacacttcttattcttaatgtaaatctcaatgcatcagagccataattttggatactgcatgccatgtaattctgaatcatttgataatttaccttagagcatttaaaaaaatataatcaaactaattgccagccaagtcagtcatcctcctgggagtatatagagtcccaaggttagcgctcctgtattagactatttcaattttaggaaaatcatgaccatgtggggaaacaatgactttaaaatgctgaaattaaaatttatgctttaactggaatattttttgcttaactactcaattagaatattgtacacctgatcaatgtgtgttcagcacagatggccatgaattgtcatttatagtccaattttttatcttaatcataaaatgtttaggaatctatgaaatttaactttaggaacaaaacgtttagcagggttgattgatattatttttacattgttctggcaatccacagaaagagaagagccttaatttttaaaacccattttagtcattttatgacaattaaagttgtttaataaacatcttttttc

SEQ ID NO: 199732 - DNA, 785 bp, Homo sapiens
  Payload ID: 19406
  Gene Name: WD repeat domain 20
  ENST ID: ENST00000556094
  CDS Start-End: 10-81
ctttccaagatggcgacggagggaggagggaaggagatgaacgagattaagacccaattcaccacccgggaaggctgctgacttgagtaaaccaatagataaaaggatatacaaaggaacacagcctacttgtcatgacttcaaccacctaacagccacagcagaaagtgtctctctcctagtgggcttttccgcaggccaagtccagcttatagacccaatcaaaaaagaaactagcaaactttttaatgaggaaggctcattgtcatccccaagccaggccagttctccaggtggaactgtagtgtagcgacctcactgctgcgcgcacagtctcccgggacttggactcgagggagtgacgaggaggagctccgagctgcgcctgagccgtgccagccggcggacctcaggcggtggacgtcggcgatagccgtgtggacggtgaccggctcactctgcggcgccgtgctcccgctgctcacccaaagaagttgtttccattttaaaccggtcttttggggctgcagtaaaaaataagaaatggagttttcttgctttttactctaaaattcaatgtaattaaatttcatatatatataatatatacatatatacatagtgtaaaataaaatgtttcttggacaagaaatcccctgaaattcagctgttatagtgcttcactgtttttgcactgatttttctataccttaggtggtcagaagacaaccttgaatgcactcatagagaaaactgttactttctgacgtaatgtaattcaggaa

SEQ ID NO: 199733 - DNA, 422 bp, Homo sapiens
  Payload ID: 19406
  Gene Name: WD repeat domain 20
  ENST ID: ENST00000559478
  CDS Start-End: 1-217
cttgagtaaaccaatagataaaaggatatacaaaggaacacagcctacttgtcatgacttcaaccacctaacagccacagcagaaagtgtctctctcctagtgggcttttccgcaggccaagtccagcttatagacccaatcaaaaaagaaactagcaaactttttaatgaggaagcttttgaggggaggtatgctacattttcaccatttgtatgaatgcagccacggaaaacttcacatcagctcagccctcggtttagttttcttcggaggagacattagttacagcttgagttctcagcctgccccactcgaaggcgccagcagggactctggatcacggggccatgaactatggagtgagtcttctagaaagagaaataataaaagacactaagacttgctgttctaaatgaaagaa

SEQ ID NO: 199734 - DNA, 586 bp, Homo sapiens
  Payload ID: 19406
  Gene Name: WD repeat domain 20
  ENST ID: ENST00000558567
  CDS Start-End: 28-558
agggcaggatgaacgctgctttccaagatggcgacggagggaggagggaaggagatgaacgagattaagacccaattcaccacccgggaaggtctgtacaagctgctgccgcactcggagtacagccggcccaaccgggtgcccttcaactcgcagggatccaaccctgtccgcgtctccttcgtaaacctcaacgaccagtctggcaacggcgaccgcctctgcttcaatgtgggccgggagctgtacttctatatctacaagggggtccgcaaggctgctgacttgagtaaaccaatagataaaaggatatacaaaggaacacagcctacttgtcatgacttcaaccacctaacagccacagcagaaagtgtctctctcctagtgggcttttccgcaggccaagtccagcttatagacccaatcaaaaaagaaactagcaaactttttaatgaggaaagacgggatttcaccatgttggccaggctagtctggaactcctggcttcaagtgatccacccacctcagcttcccaaagtgctggaattacaggcgtgagccaccacgcctggccaacacagaggtc

SEQ ID NO: 199735 - DNA, 532 bp, Homo sapiens
  Payload ID: 19406
  Gene Name: WD repeat domain 20
  ENST ID: ENST00000558854
  CDS Start-End: 333-532
aaaacaacaaaaaacagttgtaaggagtccatggcacagaaagtttaagcaccctgatttaggctgctgacttgagtaaaccaatagataaaaggatatacaaaggaacacagcctacttgtcatgacttcaaccacctaacagccacagcagaaagtgtctctctcctagtgggcttttccgcaggccaagtccagcttatagacccaatcaaaaaagaaactagcaaactttttaatgaggaaagactaatagacaagtcacgagttacctgtgtcaaatgggttcccggttcggaaagccttttcctagtagcccactcgagtgggaacatgtacttatataatgtggagcacacttgtggcaccacagccccccactaccagcttctgaagcagggagagagctttgccgtgcacacttgcaagagcaaatccacgaggaaccctctccttaagtggacggtgggcgagggggccctcaacgagtttgctttctccccagatggcaagttcttagcgtgcgtgagcca

SEQ ID NO: 199736 - DNA, 2763 bp, Homo sapiens
  Payload ID: 19407
  Gene Name: WD repeat domain 24
  Uniprot ID: Q96S15
  ENST ID: ENST00000248142
  CDS Start-End: 1-2763
atgggtaagaagaggaccacttccggcgagggacgggaaagacagcggcttccggcgcggcggttccggacaaccagccccgccgccctcagggctgacagtgtggacggcgggagtctcctcgctcccctgctgggattgactgaccgagcgtttagtgactgcccagatctggctgatggggccatggagaagatgtcccgtgtgaccacagccctgggtggcagcgtgctgacaggccgcaccatgcactgccacctggatgctcccgccaatgccatcagtgtgtgccgcgacgcagcccaggtggtcgtggcaggccgtagcatcttcaagatctatgccatcgaggaggaacagttcgtggaaaagctgaacctgcgtgtggggcgcaagccttcgcttaacctgagctgtgctgacgtggtctggcaccagatggatgagaacctgctggccacagcagccaccaatggcgtggtggtcacgtggaacctgggccggccatcccgcaacaagcaggaccagctgttcacagaacacaagcgcacggtaaacaaagtctgcttccaccccaccgaagcccacgtgctgctcagtggctcccaggatggcttcatgaagtgctttgacctccgcagaaaggactctgtcagcaccttctcgggtgaggccacagaggcagggccacgggagtgggcgatggctgggtgcgttcctattctcccagtgctcagctgccgcatcctgaggctgcaccacagctttgctcatggaccgatgcaggatgcagaatctacggcaaatgacgcccgggaatcttggggatgtccactctaccctctgggcctctgttctgggccacaggcaggccagtcggagagcgtgcgggacgtgcagttcagtatccgggactacttcaccttcgcctccacctttgagaacggcaatgtgcagctctgggacatccggcgtcccgaccggtgcgagaggatgttcacagcccacaacggacccgtcttctgctgcgactggcaccccgaggacaggggctggttggccactggagggcgcgacaagatggtgaaggtctgggacatgaccacgcaccgtgccaaggagatgcactgtgtgcagaccatcgcctcggtggcccgtgtgaagtggcggccagagtgccgccaccacctggccacgtgctccatgatggtggaccacaacatctatgtttgggacgtgcgccggcccttcgtgccagctgccatgtttgaggaacaccgagacgtcaccacgggaattgcctggcgccacccccacgacccctccttcctgctgtctggctccaaggacagctcgctgtgccagcacctgttccgcgacgccagccagcccgtcgagcgcgccaaccctgagggcctctgctacggcctcttcggggacctggccttcgccgccaaggagagcctcgtggctgccgagtcggggcgcaagccctacactggcgaccggcgccaccccatcttctttaagcgcaagctggaccctgccgagcccttcgcaggcctcgcctccagtgccctcagtgtctttgagacggagccaggtggcggcggcatgcgctggtttgtggacacagctgagcgttatgcgctggctggccggccactggccgagctctgtgaccacaacgcaaaggtggctcgagagcttggccgcaaccaggtggcgcaaacgtggaccatgctgcggatcatctactgcagccctggcctagtgcccactgcaaacctcaaccacagtgtgggcaagggtggctcctgtggcctcccgctcatgaacagtttcaacctgaaggatatggccccagggttgggcagtgagacgcggctggaccgcagcaaaggagatgcacggagcgacacagttctgctcgactcctcggccacactcatcaccaatgaggataacgaggaaaccgagggcagcgacgtacctgccgactacctgctgggtgacgtggaaggtgaggaggacgagctgtacctgctggatccggaacacgcgcaccccgaggaccctgagtgcgtgctgccgcaggaggcctttccgctgcgccacgagatcgtggacacgcctcccgggcccgagcacctgcaggacaaggccgactccccgcacgtgagcggcagcgaggcggatgtggcctccctggcccccgtggactcctccttctcgctcctgtctgtctcacacgcgctctacgacagccgcctgccgcccgacttcttcggcgtgctggtgcgcgacatgctgcacttctacgctgagcagggcgacgtgcagatggctgtgtctgtgctcatcgtcctgggtgaacgggtgcgcaaggacatcgacgagcagacccaggagcactggtacacttcctacatcgacctgctgcagcgcttccgcctctggaacgtgtccaacgaggtggtcaagctgagcaccagccgcgccgtcagctgcctcaaccaggcctccaccaccctgcacgtcaactgcagccactgcaagcggcccatgagcagccggggctgggtctgcgacaggtgccaccgctgcgccagcatgtgtgccgtctgccaccacgtagtcaagggtctcttcgtgtggtgccagggctgcagccacggcggccacctgcagcacatcatgaagtggctggaaggcagctcccactgtcccgcaggctgcggccacctctgcgagtactcctga

SEQ ID NO: 199737 - DNA, 3245 bp, Homo sapiens
  Payload ID: 19407
  Gene Name: WD repeat domain 24
  Uniprot ID: Q96S15
  ENST ID: ENST00000293883
  CDS Start-End: 761-3133
gcggcttccggcgcggcggttccggacaaccgtgcgcttttagtaaaagattggggttcgcgcgggggagaagggctgccccgggccctctggttctcgtcccgcagcgtccgctcccccgcgccactgcgccgctcccaggaaccctgtactccggggtcgccggcttctctcctgcctccggtcccgccagacacctcgagctccttaagtagctcggtccttgacgtccctctgggcccttcccgcgtctatcgcctgagtccccgggcccctctagccctctgttccctcccctcttttgttcctccctagagccccgccgccctcagggctgacagtgtggacggcgggagtctcctcgctcccctgctgggattgactgaccgagcgtttagtgactgcccagatctggctgatgggggtaccgagaggtggcctgggccgggaatgtccagctagagtcttccgtggaagtcagacatgaaactgacaggcctaagggaagctaggaagtcccctcaccgctcagccagggtgatgggctggactgacagactccagtgaatttgagcttgcctgtcaggctgattggctgatagacagccctggattggctcactaagactgaccagcccgggaccaagcagttctggggtcccaacctgggtggaaggtctgaactgatgacccacccaggctgaccaggccagcccacctcactgacctcctgacccctgacctcatcacctgtgcagccatggagaagatgtcccgtgtgaccacagccctgggtggcagcgtgctgacaggccgcaccatgcactgccacctggatgctcccgccaatgccatcagtgtgtgccgcgacgcagcccaggtggtcgtggcaggccgtagcatcttcaagatctatgccatcgaggaggaacagttcgtggaaaagctgaacctgcgtgtggggcgcaagccttcgcttaacctgagctgtgctgacgtggtctggcaccagatggatgagaacctgctggccacagcagccaccaatggcgtggtggtcacgtggaacctgggccggccatcccgcaacaagcaggaccagctgttcacagaacacaagcgcacggtaaacaaagtctgcttccaccccaccgaagcccacgtgctgctcagtggctcccaggatggcttcatgaagtgctttgacctccgcagaaaggactctgtcagcaccttctcgggccagtcggagagcgtgcgggacgtgcagttcagtatccgggactacttcaccttcgcctccacctttgagaacggcaatgtgcagctctgggacatccggcgtcccgaccggtgcgagaggatgttcacagcccacaacggacccgtcttctgctgcgactggcaccccgaggacaggggctggttggccactggagggcgcgacaagatggtgaaggtctgggacatgaccacgcaccgtgccaaggagatgcactgtgtgcagaccatcgcctcggtggcccgtgtgaagtggcggccagagtgccgccaccacctggccacgtgctccatgatggtggaccacaacatctatgtttgggacgtgcgccggcccttcgtgccagctgccatgtttgaggaacaccgagacgtcaccacgggaattgcctggcgccacccccacgacccctccttcctgctgtctggctccaaggacagctcgctgtgccagcacctgttccgcgacgccagccagcccgtcgagcgcgccaaccctgagggcctctgctacggcctcttcggggacctggccttcgccgccaaggagagcctcgtggctgccgagtcggggcgcaagccctacactggcgaccggcgccaccccatcttctttaagcgcaagctggaccctgccgagcccttcgcaggcctcgcctccagtgccctcagtgtctttgagacggagccaggtggcggcggcatgcgctggtttgtggacacagctgagcgttatgcgctggctggccggccactggccgagctctgtgaccacaacgcaaaggtggctcgagagcttggccgcaaccaggtggcgcaaacgtggaccatgctgcggatcatctactgcagccctggcctagtgcccactgcaaacctcaaccacagtgtgggcaagggtggctcctgtggcctcccgctcatgaacagtttcaacctgaaggatatggccccagggttgggcagtgagacgcggctggaccgcagcaaaggagatgcacggagcgacacagttctgctcgactcctcggccacactcatcaccaatgaggataacgaggaaaccgagggcagcgacgtacctgccgactacctgctgggtgacgtggaaggtgaggaggacgagctgtacctgctggatccggaacacgcgcaccccgaggaccctgagtgcgtgctgccgcaggaggcctttccgctgcgccacgagatcgtggacacgcctcccgggcccgagcacctgcaggacaaggccgactccccgcacgtgagcggcagcgaggcggatgtggcctccctggcccccgtggactcctccttctcgctcctgtctgtctcacacgcgctctacgacagccgcctgccgcccgacttcttcggcgtgctggtgcgcgacatgctgcacttctacgctgagcagggcgacgtgcagatggctgtgtctgtgctcatcgtcctgggtgaacgggtgcgcaaggacatcgacgagcagacccaggagcactggtacacttcctacatcgacctgctgcagcgcttccgcctctggaacgtgtccaacgaggtggtcaagctgagcaccagccgcgccgtcagctgcctcaaccaggcctccaccaccctgcacgtcaactgcagccactgcaagcggcccatgagcagccggggctgggtctgcgacaggtgccaccgctgcgccagcatgtgtgccgtctgccaccacgtagtcaagggtctcttcgtgtggtgccagggctgcagccacggcggccacctgcagcacatcatgaagtggctggaaggcagctcccactgtcccgcaggctgcggccacctctgcgagtactcctgacggggcatctgctgggcttgcccgggcggccgcgtgcagaaccccgcctggtcttgtgcccgagacgggcggaggctggaacttgagacctcaataaaggaagtagagccgc

SEQ ID NO: 199738 - DNA, 2123 bp, Homo sapiens
  Payload ID: 19408
  Gene Name: WD repeat domain 25
  Uniprot ID: Q64LD2
  ENST ID: ENST00000335290
  CDS Start-End: 227-1861
cggtgcgtgtggtgagcggcgggccccgggctggaggggccgggactgggcagcgcctaaagcgccccgtgccgcttaacgcggtctctcatagccgctcgccttcctttcacttcctgttccttcagaaagcgctgtgccttggaccaaccttacttcttactattgacagctcagctaactcctattcatccttcaaaacccatctctggtggtttggctttgaatgacagcaagaactctgtctttaatggcttcattggtagcgtatgatgattcggactcggaggctgagacagagcatgcaggaagttttaatgctaccggccagcagaaagacacttctggtgtggccagaccacctgggcaggattttgcatctggtacactggatgtgcccaaagcaggggcacagcccacaaagcatggctcctgtgaagacccagggggctatcgccttccattggctcagcttgggagaagcgattggggatcttgccccagccagaggctacagtggcccgggaaggagcctcaagtcaccttccccatcaaagagccttcttgttcttctctgtggacgagccatgttccagccagccacatgcccctggcagctgcccgctttaagcaagtaaaactctccaggaactttcccaagtcatctttccatgctcaaagtgagtctgaaaccgtaggtaaaaatggcagctcttttcagaagaaaaaatgtgaggactgtgtggtaccctatactcccagaagactaagacagcggcaggcattaagcacggagacaggcaagggtaaagacgtggagccacaggggccccctgcagggcgtgccccagcccctctctacgtgggcccgggagtgtctgagtttattcagccatatttgaatagccattataaagaaaccacagttccccggaaagtgcttttccacctgagaggccacaggggccctgtcaacaccattcagtggtgtccagtcctttctaagagccacatgcttctctccacttctatggataaaactttcaaggtatggaacgccgtggactccgggcactgcctgcagacctactccctgcacacagaggcagtgcgggccgcccggtgggctccctgtggccggcgcatcctcagtggtggctttgacttcgcgctgcacctaacagaccttgaaacaggaacccagctatttagtggtcgaagtgactttagaatcactaccttgaaattccatccaaaagaccacaacatctttttatgtggaggcttcagctctgaaatgaaagcttgggatataaggactggcaaggtgatgagaagctacaaggcgaccatccagcagaccttggacatcctgttcctccgggaaggctccgagttcctgagcagcacagacgcttccacccgggactcagctgaccgcaccattattgcctgggatttccggacctctgccaaaatctccaaccagattttccacgagaggttcacctgccccagcctcgccttgcacccgagagagcccgtgttcctggcacagaccaatggcaactacctggcccttttctccactgtgtggccctaccggatgagcagacggcggcgctatgaagggcacaaggtggagggctactcagtgggctgcgagtgctccccaggcggtgacttgctggtgacgggcagcgccgatggccgggtcctgatgtacagcttccgcacagccagccgagcatgcacactgcaggggcacacacaggcctgtgtcggcaccacctatcaccccgtgctgccctccgtcctcgccacctgctcctggggaggggacatgaagatctggcactgagctttttgtcactgaaccttcccgatgccagctgggctcttggactcccctcttcctcaagggtagatgagaggaacgagcacagaggttggctgtgggtcctgggtaccaccttctgagcctcagtttcctcatctgtaaagtggggagaaaagtctgtttgcctcaggagtgtgaggactacactagtgaaagcgcctggcgggcagccggcgatgcccaataaatgtgtgttttgctgtttgttaagtgatttcagcaa

SEQ ID NO: 199739 - DNA, 1969 bp, Homo sapiens
  Payload ID: 19408
  Gene Name: WD repeat domain 25
  Uniprot ID: Q64LD2
  ENST ID: ENST00000402312
  CDS Start-End: 73-1707
cgtgactggatggtagtgtgctggccggtctgcctccgggagaaccgagcgcttccggtggtttggctttgaatgacagcaagaactctgtctttaatggcttcattggtagcgtatgatgattcggactcggaggctgagacagagcatgcaggaagttttaatgctaccggccagcagaaagacacttctggtgtggccagaccacctgggcaggattttgcatctggtacactggatgtgcccaaagcaggggcacagcccacaaagcatggctcctgtgaagacccagggggctatcgccttccattggctcagcttgggagaagcgattggggatcttgccccagccagaggctacagtggcccgggaaggagcctcaagtcaccttccccatcaaagagccttcttgttcttctctgtggacgagccatgttccagccagccacatgcccctggcagctgcccgctttaagcaagtaaaactctccaggaactttcccaagtcatctttccatgctcaaagtgagtctgaaaccgtaggtaaaaatggcagctcttttcagaagaaaaaatgtgaggactgtgtggtaccctatactcccagaagactaagacagcggcaggcattaagcacggagacaggcaagggtaaagacgtggagccacaggggccccctgcagggcgtgccccagcccctctctacgtgggcccgggagtgtctgagtttattcagccatatttgaatagccattataaagaaaccacagttccccggaaagtgcttttccacctgagaggccacaggggccctgtcaacaccattcagtggtgtccagtcctttctaagagccacatgcttctctccacttctatggataaaactttcaaggtatggaacgccgtggactccgggcactgcctgcagacctactccctgcacacagaggcagtgcgggccgcccggtgggctccctgtggccggcgcatcctcagtggtggctttgacttcgcgctgcacctaacagaccttgaaacaggaacccagctatttagtggtcgaagtgactttagaatcactaccttgaaattccatccaaaagaccacaacatctttttatgtggaggcttcagctctgaaatgaaagcttgggatataaggactggcaaggtgatgagaagctacaaggcgaccatccagcagaccttggacatcctgttcctccgggaaggctccgagttcctgagcagcacagacgcttccacccgggactcagctgaccgcaccattattgcctgggatttccggacctctgccaaaatctccaaccagattttccacgagaggttcacctgccccagcctcgccttgcacccgagagagcccgtgttcctggcacagaccaatggcaactacctggcccttttctccactgtgtggccctaccggatgagcagacggcggcgctatgaagggcacaaggtggagggctactcagtgggctgcgagtgctccccaggcggtgacttgctggtgacgggcagcgccgatggccgggtcctgatgtacagcttccgcacagccagccgagcatgcacactgcaggggcacacacaggcctgtgtcggcaccacctatcaccccgtgctgccctccgtcctcgccacctgctcctggggaggggacatgaagatctggcactgagctttttgtcactgaaccttcccgatgccagctgggctcttggactcccctcttcctcaagggtagatgagaggaacgagcacagaggttggctgtgggtcctgggtaccaccttctgagcctcagtttcctcatctgtaaagtggggagaaaagtctgtttgcctcaggagtgtgaggactacactagtgaaagcgcctggcgggcagccggcgatgcccaataaatgtgtgttttgctgtttgttaagtgatttcagcaa

SEQ ID NO: 199740 - DNA, 1214 bp, Homo sapiens
  Payload ID: 19408
  Gene Name: WD repeat domain 25
  Uniprot ID: Q64LD2
  ENST ID: ENST00000542471
  CDS Start-End: 102-965
gagggaggaggtgagagtgattagtgggagaagaaaagcaggcccaggaccaagccctggggactggggacatcctcggtgaccctgtggagcattgagccatgccagctctgtgcctggtgctgtgctggtttcaagggctgttgggagaggtatggaacgccgtggactccgggcactgcctgcagacctactccctgcacacagaggcagtgcgggccgcccggtgggctccctgtggccggcgcatcctcagtggtggctttgacttcgcgctgcacctaacagaccttgaaacaggaacccagctatttagtggtcgaagtgactttagaatcactaccttgaaattccatccaaaagaccacaacatctttttatgtggaggcttcagctctgaaatgaaagcttgggatataaggactggcaaggtgatgagaagctacaaggcgaccatccagcagaccttggacatcctgttcctccgggaaggctccgagttcctgagcagcacagacgcttccacccgggactcagctgaccgcaccattattgcctgggatttccggacctctgccaaaatctccaaccagattttccacgagaggttcacctgccccagcctcgccttgcacccgagagagcccgtgttcctggcacagaccaatggcaactacctggcccttttctccactgtgtggccctaccggatgagcagacggcggcgctatgaagggcacaaggtggagggctactcagtgggctgcgagtgctccccaggcggtgacttgctggtgacgggcagcgccgatggccgggtcctgatgtacagcttccgcacagccagccgagcatgcacactgcaggggcacacacaggcctgtgtcggcaccacctatcaccccgtgctgccctccgtcctcgccacctgctcctggggaggggacatgaagatctggcactgagctttttgtcactgaaccttcccgatgccagctgggctcttggactcccctcttcctcaagggtagatgagaggaacgagcacagaggttggctgtgggtcctgggtaccaccttctgagcctcagtttcctcatctgtaaagtggggagaaaagtctgtttgcctcaggagtgtgaggactacactagtgaaagcgcctggcgggcagccggcgatgcccaataaatgtgtgttttgctgtttgttaa

SEQ ID NO: 199741 - DNA, 1952 bp, Homo sapiens
  Payload ID: 19408
  Gene Name: WD repeat domain 25
  Uniprot ID: Q64LD2
  ENST ID: ENST00000554998
  CDS Start-End: 88-1722
tcggaacgtgactggatggtagtgtgctggccggtctgcctccgggagaaccgagcgcttccggtgcgtgtggtggtttggctttgaatgacagcaagaactctgtctttaatggcttcattggtagcgtatgatgattcggactcggaggctgagacagagcatgcaggaagttttaatgctaccggccagcagaaagacacttctggtgtggccagaccacctgggcaggattttgcatctggtacactggatgtgcccaaagcaggggcacagcccacaaagcatggctcctgtgaagacccagggggctatcgccttccattggctcagcttgggagaagcgattggggatcttgccccagccagaggctacagtggcccgggaaggagcctcaagtcaccttccccatcaaagagccttcttgttcttctctgtggacgagccatgttccagccagccacatgcccctggcagctgcccgctttaagcaagtaaaactctccaggaactttcccaagtcatctttccatgctcaaagtgagtctgaaaccgtaggtaaaaatggcagctcttttcagaagaaaaaatgtgaggactgtgtggtaccctatactcccagaagactaagacagcggcaggcattaagcacggagacaggcaagggtaaagacgtggagccacaggggccccctgcagggcgtgccccagcccctctctacgtgggcccgggagtgtctgagtttattcagccatatttgaatagccattataaagaaaccacagttccccggaaagtgcttttccacctgagaggccacaggggccctgtcaacaccattcagtggtgtccagtcctttctaagagccacatgcttctctccacttctatggataaaactttcaaggtatggaacgccgtggactccgggcactgcctgcagacctactccctgcacacagaggcagtgcgggccgcccggtgggctccctgtggccggcgcatcctcagtggtggctttgacttcgcgctgcacctaacagaccttgaaacaggaacccagctatttagtggtcgaagtgactttagaatcactaccttgaaattccatccaaaagaccacaacatctttttatgtggaggcttcagctctgaaatgaaagcttgggatataaggactggcaaggtgatgagaagctacaaggcgaccatccagcagaccttggacatcctgttcctccgggaaggctccgagttcctgagcagcacagacgcttccacccgggactcagctgaccgcaccattattgcctgggatttccggacctctgccaaaatctccaaccagattttccacgagaggttcacctgccccagcctcgccttgcacccgagagagcccgtgttcctggcacagaccaatggcaactacctggcccttttctccactgtgtggccctaccggatgagcagacggcggcgctatgaagggcacaaggtggagggctactcagtgggctgcgagtgctccccaggcggtgacttgctggtgacgggcagcgccgatggccgggtcctgatgtacagcttccgcacagccagccgagcatgcacactgcaggggcacacacaggcctgtgtcggcaccacctatcaccccgtgctgccctccgtcctcgccacctgctcctggggaggggacatgaagatctggcactgagctttttgtcactgaaccttcccgatgccagctgggctcttggactcccctcttcctcaagggtagatgagaggaacgagcacagaggttggctgtgggtcctgggtaccaccttctgagcctcagtttcctcatctgtaaagtggggagaaaagtctgtttgcctcaggagtgtgaggactacactagtgaaagcgcctggcgggcagccggcgatgcccaataaatgt

SEQ ID NO: 199742 - DNA, 2055 bp, Homo sapiens
  Payload ID: 19408
  Gene Name: WD repeat domain 25
  ENST ID: ENST00000554175
  CDS Start-End: 180-1004
gggcagcgcctaaagcgccccgtgccgcttaacgcggtctctcatagccgctcgccttcctttcacttcctgttccttcagaaagcgctgtgccttggaccaaccttacttcttactattgacagctcagctaactcctattcatccttcaaaacccatctctggtggtttggctttgaatgacagcaagaactctgtctttaatggcttcattggtagcgtatgatgattcggactcggaggctgagacagagcatgcaggaagttttaatgctaccggccagcagaaagacacttctggtgtggccagaccacctgggcaggattttgcatctggtacactggatgtgcccaaagcaggggcacagcccacaaagcatggctcctgtgaagacccagggggctatcgccttccattggctcagcttgggagaagcgattggggatcttgccccagccagaggctacagtggcccgggaaggagcctcaagtcaccttccccatcaaagagccttcttgttcttctctgtggacgagccatgttccagccagccacatgcccctggcagctgcccgctttaagcaagtaaaactctccaggaactttcccaagtcatctttccatgctcaaagtgagtctgaaaccgtaggtaaaaatggcagctcttttcagaagaaaaaatgtgaggactgtgtggtaccctatactcccagaagactaagacagcggcaggcattaagcacggagacaggcaagggtaaagacgtggagccacaggggccccctgcagggcgtgccccagcccctctctacgtgggcccgggagtgtctgagtttattcagccatatttgaatagccattataaagaaaccacagttccccggaaagtgcttttccacctgagaggccacaggggccctgtcaacaccattcagtggtgtccagtcctttctaagagccacatgcttctctccacttctatggataaaactttcaagtaatgaagcagtagttctggcagactaaccctcccacagctaacaactataaactgtacaacagcaacaacaacaaaactacctgaaggtattggagagcaaaaaaaagcaggcagagactggacagacgtctaccctccaaagaaggaaatggtactggatgagtttctgacttttatgattttgtctgtttgttttgcctaagcataggctccagtctgtgccagacaggctgctaaaaatttgtatagaaaatctgtagtgttactggcttgaagaaccagaggacagagtttggggtaaccacagcagctggaaagtggctataaactctacccaaatctttgaatgcagactctaagcagctcaactaaggcaaagagaactgaatagaaatttctgctgctgcacaccgcaagggaaacagagtttgaaatttgagtagagccaggttagctgcgtgtttttttttttaaatcaatattcttcagaggagcataaaagaatttagagataacatacattttgtaatgttcagtattccacccaaaattcctagataaagcaagaaacaggaagagggggcctatattcaagagaaaggccatcaaaggagcttattgccaagatgatcccaatgttgaaattagcagacaagtattttaaaacagttattatagatgtgctgaaggacacaaaggaaaatatcctcgcaacaagtaaaacaacggggaatctcagtagagaaatagaagctacaagaaaaacaagtgttaaattctggaactgaaaaatacagtatctgaaatgaataattcaccatttcgattccataacagagggaaatgacagagccagtggacttggagatagatcaacagaaagtattcagccttaaaacagagaaaaatgatggaggagaagaaggacagatactcagagaactgtggacaatatcagaaaatctattatacaagtaattgagctccagaagagaggagggagagaatggggaagaaaaaaatattttcaataaataatatcaggaaatgcc

SEQ ID NO: 199743 - DNA, 1751 bp, Homo sapiens
  Payload ID: 19408
  Gene Name: WD repeat domain 25
  ENST ID: ENST00000557710
  CDS Start-End: 16-885
gtggtttggctttgaatgacagcaagaactctgtctttaatggcttcattggtagcgtatgatgattcggactcggaggctgagacagagcatgcaggaagttttaatgctaccggccagcagaaagacacttctggtgtggccagaccacctgggcaggattttgcatctggtacactggatgtgcccaaagcaggggcacagcccacaaagcatggctcctgtgaagacccagggggctatcgccttccattggctcagcttgggagaagcgattggggatcttgccccagccagaggctacagtggcccgggaaggagcctcaagtcaccttccccatcaaagagccttcttgttcttctctgtggacgagccatgttccagccagccacatgcccctggcagctgcccgctttaagcaagtaaaactctccaggaactttcccaagtcatctttccatgctcaaagtgagtctgaaaccgtaggtaaaaatggcagctcttttcagaagaaaaaatgtgaggactgtgtggtaccctatactcccagaagactaagacagcggcaggcattaagcacggagacaggcaagggtaaagacgtggagccacaggggccccctgcagggcgtgccccagcccctctctacgtgggcccgggagtgtctgagtttattcagccatatttgaatagccattataaagaaaccacagttccccggaaagtgcttttccacctgagaggccacaggggccctgtcaacaccattcagtggtgtccagtcctttctaagagccacatgcttctctccacttctatggataaaactttcaaggaacccagctatttagtggtcgaagtgactttagaatcactaccttgaaattccatccaaaagaccacaacatctttttatgtggaggcttcagctctgaaatgaaagcttgggatataaggactggcaaggtgatgagaagctacaaggcgaccatccagcagaccttggacatcctgttcctccgggaaggctccgagttcctgagcagcacagacgcttccacccgggactcagctgaccgcaccattattgcctgggatttccggacctctgccaaaatctccaaccagattttccacgagaggttcacctgccccagcctcgccttgcacccgagagagcccgtgttcctggcacagaccaatggcaactacctggcccttttctccactgtgtggccctaccggatgagcagacggcggcgctatgaagggcacaaggtggagggctactcagtgggctgcgagtgctccccaggcggtgacttgctggtgacgggcagcgccgatggccgggtcctgatgtacagcttccgcacagccagccgagcatgcacactgcaggggcacacacaggcctgtgtcggcaccacctatcaccccgtgctgccctccgtcctcgccacctgctcctggggaggggacatgaagatctggcactgagctttttgtcactgaaccttcccgatgccagctgggctcttggactcccctcttcctcaagggtagatgagaggaacgagcacagaggttggctgtgggtcctgggtaccaccttctgagcctcagtttcctcatctgtaaagtggggagaaaagtctgtttgcctcaggagtgtgaggactacactagtgaaagcgcctggcgggcagccggcgatgcccaataaatgtgtgttttgctgtttgttaa

SEQ ID NO: 199744 - DNA, 652 bp, Homo sapiens
  Payload ID: 19408
  Gene Name: WD repeat domain 25
  ENST ID: ENST00000555201
  CDS Start-End: 1-365
gcagcacagacgcttccacccgggactcagctgaccgcaccattattgcctgggatttccggacctctgccaaaatctccaaccagattttccacgagaggttcacctgccccagcctcgccttgcacccgagagagcccgtgttcctggcacagaccaatggcaactacctggcccttttctccactgtgtggccctaccggatgagcagacggcggcgctatgaagggcacaaggtacttctgtccttgtcccccaggcgaatgctgagccccagccccaagcctcctggcagtcctggacatgggccctggggtgcatggagcctctgtctgggtggatcctgctttctgtttcctgggtgagcgcatgccatgtggctcactgtctcttcaagtccctgaaccacatctggtcctcaccccaggccccacgtactgggcaggaagcagtagttggctcacacagacaggtctcagaagtggggggcaggaacaggacaaaatggtcatgggtgtcatttctgcatccttccctttcctcactgaggccaagccttgctggggtggaaggggctgggtgcttagtgactgtcactgaggccagacccctcagctgggctggagctggtcccgctggatctgctgaactg

SEQ ID NO: 199745 - DNA, 784 bp, Homo sapiens
  Payload ID: 19409
  Gene Name: WD repeat domain 26
  ENST ID: ENST00000445239
  CDS Start-End: 408-784
gagtggaagtcaggaaaggctcccctgaggaggtttgaaatgagctgagtcttgaaagactgactggcatcagacaggtgaagaaaagacgggagagtgtagtcaaagactctcaaggagaaatgagccagtacatttggcggacagtagacaggtccctgaagaggagcaataagagatgaagccaaaaagaaagactgaaagcaacctgtggaaaactacttcagagaaagactttaaatttctgagaaaatctttatacatattgagtatagatgctatcaaccacatacatgaaaataattgtttggggataatgcacaccatttgccaatgattaagattcagcccagtctttgttgctgcatttctacattcacataaattgccagactgttgatctcctcatgcaagagtcaggatgtcgtttagaacatccttctgctaccaaattccgaaatcatgtcatggaaggagactgggataaggcagaaaatgacctgaatgaactaaagcctttagtgcattctcctcatgctattgtggtaagaggcgcacttgaaatctctcaaacgttgttgggaataattgtgaggatgaagtttttgctgctgcagcagaagtacctagaatacctggaggatggcaaggtcctggaggcacttcaagttctacgctgtgaattgacgccgctgaaatacaatacagagcgcattcatgttcttagtgggtatctgatgtgtagccatgcagaagacctacgtgcaaaagcagaatgggaagg

SEQ ID NO: 199746 - DNA, 6872 bp, Homo sapiens
  Payload ID: 19409
  Gene Name: WD repeat domain 26
  Uniprot ID: Q9H7D7
  ENST ID: ENST00000414423
  CDS Start-End: 195-2180
cggagggagtaggagagcccggggcttcggcaggcagagcaggcctctcccctccgtcctcgtcgtcctcgtcctcctcctcctcctcctcctccgtggtggtagtggtgggacttcccccggctgctgcccctcccgccgccgctgctgtcccccaccgaagtagcggccacagcctggtcagcggcagcatcatgcaggccaatggggcaggaggaggaggaggaggtggcggcggcggcggtggaggaggagggggcggcgggggccagggacagaccccggaactcgcctgcttgtcggcccagaacggggagtcgtccccctcgtcgtcgtcgtccgcgggggacctggcccacgccaatgggctcctgccttccgccccctccgccgccagcaacaatagcaacagcctgaatgtcaataacggggttcccggcggggcggccgccgcatcctcagccaccgtcgcagctgcctccgccaccaccgccgcctcctcttccttggccaccccagaactgggcagcagcctcaagaagaagaagcggctctcccagtcagatgaggatgtcattaggctaataggacagcacttgaatggcttagggctcaaccagactgttgatctcctcatgcaagagtcaggatgtcgtttagaacatccttctgctaccaaattccgaaatcatgtcatggaaggagactgggataaggcagaaaatgacctgaatgaactaaagcctttagtgcattctcctcatgctattgtggtaagaggcgcacttgaaatctctcaaacgttgttgggaataattgtgaggatgaagtttttgctgctgcagcagaagtacctagaatacctggaggatggcaaggtcctggaggcacttcaagttctacgctgtgaattgacgccgctgaaatacaatacagagcgcattcatgttcttagtgggtatctgatgtgtagccatgcagaagacctacgtgcaaaagcagaatgggaaggcaaagggacagcttcccgatctaaactattggataaacttcagacctatttaccaccatcagtgatgcttcccccacggcgtttacagactctcctgcggcaggcggtggaactacaaagggatcggtgcctatatcacaataccaaacttgataataatctagattctgtgtctctgcttatagaccatgtttgtagtaggaggcagttcccatgttatacgcagcagatacttacggagcattgtaatgaagtgtggttctgtaaattctctaatgatggcactaaactagcaacaggatcaaaagatacaacagttatcatatggcaagttgatccggatacacacctgctaaaactgcttaaaacattagaaggacatgcttatggcgtttcttatattgcatggagtccagatgacaactatcttgttgcttgtggcccagatgactgctctgagctttggctttggaatgtacaaacaggagaactaaggacaaaaatgagccagtctcatgaagacagtttgacaagtgtggcttggaatccagatgggaagcgctttgtgactggaggtcagcgtgggcagttctatcagtgtgacttagatggtaatctccttgactcctgggaaggggtaagagtgcaatgcctttggtgcttgagtgatggaaagactgttctggcatcagatacacaccagcgaattcggggctataacttcgaggaccttacagataggaacatagtacaagaagatcatcctattatgtcttttactatttcaaaaaatggccgattagctttgttaaatgtagcaactcagggagttcatttatgggacttgcaagacagagttttagtaagaaagtatcaaggtgttacacaagggttttatacaattcattcatgttttggaggccataatgaagacttcatcgctagtggcagtgaagatcacaaggtttacatctggcacaaacgtagtgaactgccaattgcggagctgacagggcacacacgtacagtaaactgtgtgagctggaacccacagattccatccatgatggccagcgcctcagatgatggcactgttagaatatggggaccagcaccttttatagaccaccagaatattgaagaggaatgcagtagcatggatagttgatggtgaatttggagcagacgacttctgtttaacttaaaattagtcgtattttaatggcttgggatttggtgcaaacaaacatgattgatagctggacagacatgctcgtcatgaaaaaagaaccatttctgaagcccgattggggccaaacatttacaccttgcttcatagtaaccagttgagatgaagcacgtcgttagaacgttgttggacaccatgttgaattattcccccatcggttgtgaagaactgtgctacattcaggcttacccattgaactcagtatatatatttttttccttcctgtcttttgtctggcaggataccattcttgttgctcttctgtgtaatgaagtttaaatgcttgtttggaaaactttatttaacagtttagaaggcttgatagaaagagtgcattagtctgaagagtatacattggataggaaagaatttccttcttttgtttctccaaatctttccgccttatttagcttgagatctttgcagcttggttcatggattctagccttgcccgttgcgcagtatatactgatccagatgataaaccagtgaactatgtcaaaagcactctcaatattacatttgacaaaaagttttgtacttttcacatagcttgttgccccgtaaaagggttaacagcacaattttttaaaaataaattaagaagtatttataggattaaagtgacttcatttgtatacatttggaatctaaaccagcttaaaaacagtttcctcaatgacttagatacacagtataactgatgctcttctggaataccacatgagacatggtcagaaacagtgcttggaaggacattacacaagaaattcagagtaatgctttgaagatttccccccttttgttttattcctgaaggaacatcagtacccgatcttgaagaaattcaagattcaaaaagaattttaaatacaccaacatgagacatcagtagtcagttggttttcagtaaagcttgttccaagttgttctcaacttaggaagtaattttggtgtgatctagcaaaagagtaggaatcagcgatacaaccactttggaagtttatagtataattgaaattattagaagaattcagcaggttacagacatacttaaactgggattaaaacctcatagtcatttttcttaattgcccttaatattttgacatatagggatacataaatttaaagaatattttttctcagttttttcagatattgccatactgaacctcattctaaactggtgctgtggatagtctttccctctcccctcctgttttagtttaaggaaaggtttccttcatggaaaagcacttttaattttgagaatttcacatttaaaataagccaaaagcctgatgttcacattgtgcttttaaactccgtaacagctgaatacaacataacatagtctcccttgaaattccctccctttttcagtagaggataaatagggtgactccagctgttggaatgagaatggggatacccccaaaataagattctggtgaagaaaaagtcttgtactaagttcccctttaggtgtagccaagtctataatataattatgatcatgaatagactccagaatccacaaagagaagagggcttggatgtcaaaaattcttccattgtggggtaggtggtcggggatgggagaaagggaaaagtcagggaaggggagaagaaagaaaaacacatttggccttaaaatagcatgcattctcccagaagcccatagtaaagaaaatgacagatcgtggtcagcagactcttatcaaattggtatgtaaaagatttcttcaagctccattttgcagagaccaccacttagagaatcaaaaaattcctgttttgatacttctaagttaaaatatatgttacagtttatctggtacttcatttttcttaactaaaattactttttactttaagcttgaataaaaatcttcattggtaactgtatgtaattaagtggcaacttctctttacctcagtatagttaaaaaccattcatattttaagtgattcatgtataccctgaagccgttaatacaccccagtctctatggtaacatcactaaatgtgggcatagaaactccacagctgtttacaaatttggttacagtgtgctacggtgcatttgtaacactcagatttgtgcccattcaggggcaatttggcactcagattctactctacttcacctaaccacccctagatctgagttttcagagtgcttctgaagtacagtttaaaaacactttttaaaaagtggagtaaaagtgaggcacattttacaagaacataactcctattaaaacggagtaacaactatgcaaaggtttctatagcagctaggtgagtttgttttccgggtctgtcttaactggcagcttcctgtacatactggtacttatttgctgtaaacgtctgtttcatacatttgccatgcagtgactgtgctcgaaaggtgaaatcaatggtaaagaagcctaggattttatggtatgagaaactgatcgcaggattttctgatccatagctattaattgaaaacttctgatagtgctgtaggctctatagtaggcttaagagtgagtcttatactatgaagccagccacaagatactaacaaatgtataaattgaaaagtaccaatactttttgcacatagatcaaaatagagtggagaatttgggctccaaaaatcaggttagtaggctcatttccatgtgcttaaaaatgtttttgttgttatgcattgattaagggctagagcaaatataaaattaaatgtctttttcctccaaataattggttattaatggtaaaatgttggacttggggattactgagattagtatgtgggtagtaaagaattggagtgggagttagtggggagggatgacaaagcttcagctttggtttttgtatttttttagtcttcataacagctacatttctgttgctcttattggccagataaatgtgttatattaaaccaggtaagtattttaaacagagaacattttatttgcatatatccctacaaattggcccattttattgggtggggggataaaaaagggattccctaactttaaataatcagaatatcctgcaattgaaaggagaaaaaaatccaattttgtcagtattttcttagtctgaaaaaaacagcagtagtaatctggtgaatgttattattaggagtgttctgcctctacagtggcatattccatgacattaatagaaaacccttctttcccacccctccccatcttgacattttcttttttaggatgttggttcctgcaaacaagaactgaccctatcacctctgcctcacagtgggtaaatatatcatacatctcttgaaagggaaaatatccatgtcagtttctttcacagtagaagaatggctgcttttgaatggggaggaaagaagacatttttcttaatatcctttttgtcccatctctaaaatgtataaatattttgatttggttttactttaatttctcattcataatttcgcaactgtccttttgggttgccctccaacacattacttccatttcagaaaccatatctgatttaatataaactgctaacttaagaagaggtgaatttgcatttacacttagacactttctaaaaacagggtgaacttaattgaaatttttcagtgttgttaagctattgttatagtagctgccctatagttacaaaaataaaaactataaaaacccatcccctatctacttaatccagatagcctggatttaacaaaaccaatagtataaaaatgtgtgtgtgtgttctgtgtgtgtgtgagagagagagtacttgattcattaaaaagtcctggaaacagctgttctaggatcttgtcatttttactgaaagtctcgtgcacatgtgaagtgccctctgagtttaaggtttggttaatactggtatatttttataagattgaaattgtgtccccatctttaacttaaacattttcattatcagggtcaatgtgctagaactgaattgtaacatttttaggcacagatggaaaaaaatgttattggctccttgaaaatgtgtgtgtgtggcgaggggaatagatccacaaaagcatgtatgtacttacaaaccaagctgtagagatcaagaaaagaacttaagtgttgatctcaagatttctaaattgtcaagatttacatggcattgtggtggaactagttaacacttagagcttttggtatgtaataactatttgctatggactgattaaatgtttcaaaagattgtgttcttcaattttggtgggttttgatttttgtttttttaactgcctctcagattatatttacttagtttaaatttctttgctttattcattaaagtataaaaacttcaggtctctgatatttattttcacttgtttactaattatttacaaaacaccctttgttgacttttattttataaatgtgtaatgtattaaacgtctttaaatttttgttcaactgaaactacattaactttgatttgctttactgggatttttttttaaagacactttttccatgtcagtgcgcagcacttaaccagtcgtttgtattccctttctttcaatccaataaacagaatgaatacctaaataa

SEQ ID NO: 199747 - DNA, 2867 bp, Homo sapiens
  Payload ID: 19409
  Gene Name: WD repeat domain 26
  ENST ID: ENST00000486652
  CDS Start-End: 1-627
ggaggaggaggtggcggcggcggcggtggaggaggagggggcggcgggggccagggacagaccccggaactcgcctgcttgtcggcccagaacggggagtcgtccccctcgtcgtcgtcgtccgcgggggacctggcccacgccaatgggctcctgccttccgccccctccgccgccagcaacaatagcaacagcctgaatgtcaataacggggttcccggcggggcggccgccgcatcctcagccaccgtcgcagctgcctccgccaccaccgccgcctcctcttccttggccaccccagaactgggcagcagcctcaagaagaagaagcggctctcccagtcagatgaggatgtcattaggctaataggacagcacttgaatggcttagggctcaaccagactgttgatctcctcatgcaagagtcaggatgtcgtttagaacatccttctgctaccaaattccgaaatcatgtcatggaaggagactgggataaggcagaaaatgacctgaatgaactaaagcctttagtgcattctcctcatgctattgtggcacaaacattttctgaaacttccatcaacttttttcccctgactgctgctttctgtcatgtcagaggatgaagtttttgctgctgcagcagaagtacctagaatacctggaggatggcaaggtcctggaggcacttcaagttctacgctgtgaattgacgccgctgaaatacaatacagagcgcattcatgttcttagtgggtatctgatgtgtagccatgcagaagacctacgtgcaaaagcagaatgggaaggcaaagggacagcttcccgatctaaactattggataaacttcagacctatttaccaccatcagtgatgcttcccccacggcgtttacagactctcctgcggcaggcggtggaactacaaagggatcggtgcctatatcacaataccaaacttgataataatctagattctgtgtctctgcttatagaccatgtttgtagtagactggtgaattgacaaaatgtaattctaaattattgattgggaaaagaagcaaggaagaccgtgtttcaagatacacttaaaggaggcagttcccatgttatacgcagcagatacttacggagcattgtaatgaagtgtggttctgtaaattctctaatgatggcactaaactagcaacaggatcaaaagatacaacagttatcatatggcaagttgatccggatacacacctgctaaaactgcttaaaacattagaaggacatgcttatggcgtttcttatattgcatggagtccagatgacaactatcttgttgcttgtggcccagatgactgctctgagctttggctttggaatgtacaagaaaactatccccatgtaccttttattattacaccaagggcagctattatctctcagatcctgtttctaatccatgaacaaaatggaatcaagactagattaaatgacaggagaactaaggacaaaaatgagccagtctcatgaagacagtttgacaagtgtggcttggaatccagatgggaagcgctttgtgactggaggtcagcgtgggcagttctatcagtgtgacttagatggtaatctccttgactcctgggaaggggtaagagtgcaatgcctttggtgcttgagtgatggaaagactgttctggcatcagatacacaccagcgaattcggggctataacttcgaggaccttacagataggaacatagtacaagaagatcatcctattatgtcttttactatttcaaaaaatggccgattagctttgttaaatgtagcaactcagggagttcatttatgggacttgcaagacagagttttagtaagaaagtatcaaggtgttacacaagggttttatacaattcattcatgttttggaggccataatgaagacttcatcgctagtggcagtgaagatcacaaggtttacatctggcacaaacgtagtgaactgccaattgcggagctgacagggcacacacgtacagtaaactgtgtgagctggaacccacagattccatccatgatggccagcgcctcagatgatggcactgttagaatatggggaccagcaccttttatagaccaccagaatattgaagaggaatgcagtagcatggatagttgatggtgaatttggagcagacgacttctgtttaacttaaaattagtcgtattttaatggcttgggatttggtgcaaacaaacatgattgatagctggacagacatgctcgtcatgaaaaaagaaccatttctgaagcccgattggggccaaacatttacaccttgcttcatagtaaccagttgagatgaagcacgtcgttagaacgttgttggacaccatgttgaattattcccccatcggttgtgaagaactgtgctacattcaggcttacccattgaactcagtatatatatttttttccttcctgtcttttgtctggcaggataccattcttgttgctcttctgtgtaatgaagtttaaatgcttgtttggaaaactttatttaacagtttagaaggcttgatagaaagagtgcattagtctgaagagtatacattggataggaaagaatttccttcttttgtttctccaaatctttccgccttatttagcttgagatctttgcagcttggttcatggattctagccttgcccgttgcgcagtatatactgatccagatgataaaccagtgaactatgtcaaaagcactctcaatattacatttgacaaaaagttttgtacttttcacatagcttgttgccccgtaaaagggttaacagcacaattttttaaaaataaattaagaagtatttatagga

SEQ ID NO: 199748 - DNA, 1725 bp, Homo sapiens
  Payload ID: 19409
  Gene Name: WD repeat domain 26
  ENST ID: ENST00000480676
  CDS Start-End: 1-886
cactaaactagcaacaggatcaaaagatacaacagttatcatatggcaagttgatccggatacacacctgctaaaactgcttaaaacattagaaggacatgcttatggcgtttcttatattgcatggagtccagatgacaactatcttgttgcttgtggcccagatgactgctctgagctttggctttggaatgtacaaacaggagaactaaggacaaaaatgagccagtctcatgaagacagtttgacaagtgtggcttggaatccagatgggaagcgctttgtgactggaggtcagcgtgggcagttctatcagtgtgacttagatggtaatctccttgactcctgggaaggggtaagagtgcaatgcctttggtgcttgagtgatggaaagactgttctggcatcagatacacaccagcgaattcggggctataacttcgaggaccttacagataggaacatagtacaagaagatcatcctattatgtcttttactatttcaaaaaatggccgattagctttgttaaatgtagcaactcagggagttcatttatgggacttgcaagacagagttttagtaagaaagtatcaaggtgttacacaagggttttatacaattcattcatgttttggaggccataatgaagacttcatcgctagtggcagtgaagatcacaaggtttacatctggcacaaacgtagtgaactgccaattgcggagctgacagggcacacacgtacagtaaactgtgtgagctggaacccacagattccatccatgatggccagcgcctcagatgatggcactgttagaatatggggaccagcaccttttatagaccaccagaatattgaagaggaatgcagtagcatggatagttgatggatgttggttcctgcaaacaagaactgaccctatcacctctgcctcacagtgggtaaatatatcatacatctcttgaaagggaaaatatccatgtcagtttctttcacagtagaagaatggctgcttttgaatggggaggaaagaagacatttttcttaatatcctttttgtcccatctctaaaatgtataaatattttgatttggttttactttaatttctcattcataatttcgcaactgtccttttgggttgccctccaacacattacttccatttcagaaaccatatctgatttaatataaactgctaacttaagaagaggtgaatttgcatttacacttagacactttctaaaaacagggtgaacttaattgaaatttttcagtgttgttaagctattgttatagtagctgccctatagttacaaaaataaaaactataaaaacccatcccctatctacttaatccagatagcctggatttaacaaaaccaatagtataaaaatgtgtgtgtgtgttctgtgtgtgtgtgagagagagagtacttgattcattaaaaagtcctggaaacagctgttctaggatcttgtcatttttactgaaagtctcgtgcacatgtgaagtgccctctgagtttaaggtttggttaatactggtatatttttataagattgaaattgtgtccccatctttaacttaaacattttcattatcagggtcaatgtgctagaactgaattgtaacatttttaggcacagatggaaaaaaatgttattggctccttgaaaatgtgtgtgtgtggcgaggggaatagatccacaaaagcatgtatgt

SEQ ID NO: 199749 - DNA, 2465 bp, Homo sapiens
  Payload ID: 19410
  Gene Name: WD repeat domain 27
  Uniprot ID: A2RRH5
  ENST ID: ENST00000423258
  CDS Start-End: 44-2236
ctgagcgcatgtggagttcggaggaaaagggctcagattgaagatggaaaatccccaagacattttctcaagtaatggtggctgtctaagtgatatagttatagaaaaatacctggttgaatccaaggagtctgtgtctcatgttcagcttgcttgcagcatgcaggactgtgctttccctttggatggaactgaactttgtatatggaacactaaggatccttctcatcagcttctaatcctacgaggacaccatcagccaattactgctatggcttttggaaataaagtgaacccacttctaatctgctcagcatcactggattatgttataatgtggaacctggatgaatgtagagagaaagtacttcaagcatatcctcttctcagtttattcattgatgcagaaagcaggcagctggtcaccgggtgtgctgacggccagctttggatcttcagtttgatggatggacaccattatcgtcgtgtggcacgggttgacctaaggaagaagacagagactttctccacaagaagggttaagtctgggctgtgcagccagccagaagaaagccagcttccctctacaagtgctctgggaaaaggagagcaggttgaagtaacatttcctgtactgagacttgcaccctgtgatctctcactcatcccaaattctgcatgtggatgtctttcttctgagaacacccgatgtgtgtggatcggaagctcagtgggcttattcgtatttaacctggcaaacctggaagtggaagctgctttgtattacaaggatttccagagcctcagcatcctgctggccggatcgtgtgccctgaggaaccgcactgcggatcaaaaggtgctgtgcttgctggcctccctctttggcgggaagattgccgtgttggagatcaacccggccgcgctagtcagggctcagcagtgccccagcatggggcagagcctctcggtgccagccagctcctgtgtcctaccgacctctccactgtatctgggaattgccaaggagaagagtaccaaggctgctagtgaacagcgacgtgctgcacggaacgtcatgaaggaccaacgcctggttttccatagtaaagttaggtcatctggttatgcgtcagcaccacatgtaactatgttttcaccaaagaccaacatcaagagtgaggggaaaggatcttcaaggagcaggagcagctgcgcacgggaggcataccccgtggagtgcgctgtgcccaccaagcccggcccccaggtcgctgccgcccccacctgcacacgtgtatgctgcatccagtactcaggagatgggcagtggctggcctgtgggttggccaaccatctgttactcgtttttgatgccagcctgactgggacacctgctgtgttttcaggtcacgacggggcagtgaatgccgtgtgctggagccaggaccggaggtggctgctctctgcggcccgggacgggaccctgcgaatgtggtcggctcgtggggcagagctcgcactgcttctgggcaaagacatgttttctaaacctatacagtctgcacagttctattatatagatgcctttatattgttatcttctggccctgaatttcagctactgaggtatcacattgacacttgcaaagatgagattaagagatataaacagaagagcaagtccaagctgatttgcaggctctccacgacgggtgcagtagacatgaccagtttatcggcagtcaacgacttttattcccacatcgtactcgcagctggccggaacaggaccgtggaagtgtttgacctcaacgccggctgcagtgcagcggtgatagcggaagcccactcacggcctgtccatcaaatctgccaaaataaaggttcatcatttacaacccaacagcctcaggcttataaccttttcctgaccacggccattggcgatgggatgagactgtgggacctgagaaccctgaggtgtgagcgccactttgaagggcatccaacccgcggctatccatgtggaatcgctttcagtccttgtggacgattcgcggcttgtggggccgaggacagacacgcttacgtgtatgaaatgggctcaagcacgttttctcaccggctggctgggcacacagacactgtcactggagtggccttcaacccatcagcgccccagcttgccacagctaccttggatggtaaactccagctctttctagctgagtaaccactgacctgtgagctgggtccaggaatgctgtgaggaacaacttaaaagtaagaagtagtggttcatccatcagggggccagaagcagcaactgtttttcatattttgagacttgcctcagatttcccccgtttgcaagctcctcccctctgtgtgtgccatgtcagagttttatgtctttctgctcctcaaaagggatccccttcattgggaaaatggaaatggcg

SEQ ID NO: 199750 - DNA, 683 bp, Homo sapiens
  Payload ID: 19410
  Gene Name: WD repeat domain 27
  ENST ID: ENST00000441385
  CDS Start-End: 1-587
tggaagtggaagctgctttgtattacaaggatttccagagcctcagcatcctgctggccggatcgtgtgccctgaggaaccgcactgcggatcaaaaggtgctgtgcttgctggcctccctctttggcgggaagattgccgtgttggagatcaacccggccgcgctagtcagggctcagcagtgccccagcatggggcagagcctctcggtgccagccagctcctgtgtcctaccgacctctccactgtatctgggaattgccaaggagaagagtaccaaggctgctagtgaacagcgacgtgctgcacggaacgtcatgaaggaccaacgcctggttttccatagtaaagttaggtcatctggttatgcgtcagcaccacatgtaactatgttttcaccaaagaccaacatcaagagtgaggggaaaggatcttcaaggagcaggagcagctgcgcacgggaggcataccccgtggagtgcgctgtgcccaccaagcccggcccccaggtcgctgccgcccccacctgcacacgtgtatgctgcatccagtactcaggtgcgccacgtcctgcgggagctgggtagcatttcattgtaagagtctttgattctgcccactgtaaacatttttctattgtatcataattgtaaatatatttttaaaaaccttggttacttgaa

SEQ ID NO: 199751 - DNA, 3178 bp, Homo sapiens
  Payload ID: 19410
  Gene Name: WD repeat domain 27
  Uniprot ID: A2RRH5
  ENST ID: ENST00000448612
  CDS Start-End: 111-2798
aggggaattcggggcacaagtcgggccggagcatccgggcggccgcttgagatcggcgctttgagaactgagcgcatgtggagttcggaggaaaagggctcagattgaagatggaaaatccccaagacattttctcaagtaatggtggctgtctaagtgatatagttatagaaaaatacctggttgaatccaaggagtctgtgtctcatgttcagcttgcttgcagcatgcaggactgtgctttccctttggatggaactgaactttgtatatggaacactaaggatccttctcatcagcttctaatcctacgaggacaccatcagccaattactgctatggcttttggaaataaagtgaacccacttctaatctgctcagcatcactggattatgttataatgtggaacctggatgaatgtagagagaaagtacttcaagggctggtccctcgagggactgtcatgggctcgcttttgggaaaggtgctgtgtttacagttgagcctggatgatcatgttgttgccgtgtgtgctggaaacaaaatattcatgctggatattgagcagcgattttctgtgacatacatagaacgtcctgatgttaataaccgccacaaagtcccaccaccgaccttcctgcacacattctctcagactcaggctgttcgggccgagctgcagggccacctgggcccggtgactgcggtggagttctgtccctggcgagcaggcaccctcatctcggcgtctgaggacagaggctttaaggtctgggaccattgtacaggatcattaatatacagttcatctgtgttatcagcatatcctcttctcagtttattcattgatgcagaaagcaggcagctggtcaccgggtgtgctgacggccagctttggatcttcagtttgatggatggacaccattatcgtcgtgtggcacgggttgacctaaggaagaagacagagactttctccacaagaagggttaagtctgggctgtgcagccagccagaagaaagccagcttccctctacaagtgctctgggaaaaggagagcaggttgaagtaacatttcctgtactgagacttgcaccctgtgatctctcactcatcccaaattctgcatgtggatgtctttcttctgagaacacccgatgtgtgtggatcggaagctcagtgggcttattcgtatttaacctggcaaacctggaagtggaagctgctttgtattacaaggatttccagagcctcagcatcctgctggccggatcgtgtgccctgaggaaccgcactgcggatcaaaaggtgctgtgcttgctggcctccctctttggcgggaagattgccgtgttggagatcaacccggccgcgctagtcagggctcagcagtgccccagcatggggcagagcctctcggtgccagccagctcctgtgtcctaccgacctctccactgtatctgggaattgccaaggagaagagtaccaaggctgctagtgaacagcgacgtgctgcacggaacgtcatgaaggaccaacgcctggttttccatagtaaagttaggtcatctggttatgcgtcagcaccacatgtaactatgttttcaccaaagaccaacatcaagagtgaggggaaaggatcttcaaggagcaggagcagctgcgcacgggaggcataccccgtggagtgcgctgtgcccaccaagcccggcccccaggtcgctgccgcccccacctgcacacgtgtatgctgcatccagtactcaggagatgggcagtggctggcctgtgggttggccaaccatctgttactcgtttttgatgccagcctgactgggacacctgctgtgttttcaggtcacgacggggcagtgaatgccgtgtgctggagccaggaccggaggtggctgctctctgcggcccgggacgggaccctgcgaatgtggtcggctcgtggggcagagctcgcactgcttctgggcaaagacatgttttctaaacctatacagtctgcacagttctattatatagatgcctttatattgttatcttctggccctgaatttcagctactgaggtatcacattgacacttgcaaagatgagattaagagatataaacagaagagcaagtccaagctgatttgcaggctctccacgacgggtgcagtagacatgaccagtttatcggcagtcaacgacttttattcccacatcgtactcgcagctggccggaacaggaccgtggaagtgtttgacctcaacgccggctgcagtgcagcggtgatagcggaagcccactcacggcctgtccatcaaatctgccaaaataaaggttcatcatttacaacccaacagcctcaggcttataaccttttcctgaccacggccattggcgatgggatgagactgtgggacctgagaaccctgaggtgtgagcgccactttgaagggcatccaacccgcggctatccatgtggaatcgctttcagtccttgtggacgattcgcggcttgtggggccgaggacagacacgcttacgtgtatgaaatgggctcaagcacgttttctcaccggctggctgggcacacagacactgtcactggagtggccttcaacccatcagcgccccagatggagtctcgctctgtcgcccacgctggagtgcagtggcacgatctcggttcactgcaacctccgccttccaggttcaagcaattcttctgcctcagcctcccgagtagctgggattacagcttgccacagctaccttggatggtaaactccagctctttctagctgagtaaccactgacctgtgagctgggtccaggaatgctgtgaggaacaacttaaaagtaagaagtagtggttcatccatcagggggccagaagcagcaactgtttttcatattttgagacttgcctcagatttcccccgtttgcaagctcctcccctctgtgtgtgccatgtcagagttttatgtctttctgctcctcaaaagggatccccttcattgggaaaatggaaatggcgtccagtacttctgcacagaatttggtaaagttaaaacaaaatatctttcaataaaacataatatagtatttgtttgataattagagttggaagaaaaaagagagaatttcttttgggcagtgaaaataaagcagttaacagtc

SEQ ID NO: 199752 - DNA, 951 bp, Homo sapiens
  Payload ID: 19410
  Gene Name: WD repeat domain 27
  ENST ID: ENST00000474018
  CDS Start-End: 688-951
cgaggggcggcgggctagtaaccatagcggctcgcgtgggtcggctggcaagtaaccatagcggcgagcgtggggcggagtgtggctcggtagtcctctgcgtgccctcctgggagctgggtgctgtgagtcctcccctagcgggctggtctcggcgcggagtcggcgccgaacccgagctgctgctctggggcgtgtgcctagggcgcagggctggagcgcgggggctgcgcggttgctcgcggctccgctgaggtctctaggaaagggggcgatttgagggttccgccgtgaccgcttccaacggcggacacgcgcgctctggaccagagccgttgcccgctgtctcgtcacccgaagcctcctcctgacgccgtgctagtgcgagggtctccaggggaattcggggcacaagtcgggccggagcatccgggcggccgcttgagatcggcgctttgagaactgagcgcatgtggagttcggaggaaaagggctcagttgtggaagctgatcgaggaagcctaagcaggctctgtgaagtgggaatagtggtatttgagtcaaggtttgcttaactggaaagcccgtgagaagaatggagcagttgagaatgtggaagctccagagttttcggcaatttctcttcttttttcttgggatgaggagaggtgaataaatagattgaagatggaaaatccccaagacattttctcaagtaatggtggctgtctaagtgatatagttatagaaaaatacctggttgaatccaaggagtctgtgtctcatgttcagcttgcttgcagcatgcaggactgtgctttccctttggatggaactgaactttgtatatggaacactaaggatccttctcatcagcttctaatcctacgaggacaccatcagccaattactgctatggcttttggaaataaagtgaacccacttctaatc

SEQ ID NO: 199753 - DNA, 9974 bp, Homo sapiens
  Payload ID: 19411
  Gene Name: WD repeat domain 3
  Uniprot ID: Q9UNX4
  ENST ID: ENST00000349139
  CDS Start-End: 48-2879
ctcgtggaggctgagattgcttcacctgtggtatcagacatcacaacatggggctcaccaagcagtacctacgctatgttgctagtgcggtctttggcgttatcggcagccaaaaaggtaatattgtctttgtgacacttcgtggtgagaaaggacgttatgtggcagtaccagcttgtgaacacgttttcatctgggacttaaggaaaggagagaagattcttatccttcaggggcttaaacaagaagttacttgcttatgcccctccccagatgggctacacttagctgttgggtatgaggatgggtcgatccgaatcttcagtctcctgagtggggaaggaaatgtgaccttcaatggtcacaaagcagctatcactaccttgaagtatgatcagctaggaggcagactggcatctgggtccaaggacacagatattattgtatgggatgtgatcaatgaaagtggtctgtaccgtctaaaggggcacaaggatgccatcacacaagcattgtttctacgagaaaagaacctgctagttactagtgggaaagataccatggtgaaatggtgggaccttgatactcagcactgctttaaaacaatggttggccaccggactgaggtatgggggttggttctgttgtcagaagaaaagcgactcatcactggggcctcagacagtgaactgagggtatgggacatagcttatctgcaagagattgaagacccggaagaaccagaccccaagaaaatcaaaggatcttctcctggaatacaagatactcttgaggcagaggatggtgcctttgagacggatgaagcccctgaggatcgaatcctttcatgcagaaaagctggttccataatgcgggaaggaagagacagagttgtaaaccttgcagtcgacaagacaggcaggattcttgcttgccatggaactgactctgtgctagaattgttttgtatcctttccaaaaaggaaattcagaagaaaatggataagaagatgaagaaagctagaaagaaagcaaaattacattctagcaaaggagaggaggaagatcctgaggttaatgttgaaatgagtctgcaagatgaaatccagcgggtgactaatataaaaacttctgccaaaatcaagtcctttgacttgattcattcacctcacggagagttaaaggctgtcttcctgctgcagaacaacctggtggaattgtattcactgaatccatccttgcctactcctcagcctgtcaggacaagcagaatcactattgggggtcatcgcagtgatgtgcggactttgtcattcagctcagacaatattgctgttctttcagctgcagctgattccattaaaatatggaacaggtctacactgcagtgtattcgcacaatgacctgtgaatatgcactttgctcattctttgtacctggtgatagacaggtagtcataggaacaaagacagggaagctgcagctttatgacttggcttcagggaatctgctggagacaatagatgcacatgatggagctttgtggtccatgtccctctctccagatcagcgtggctttgtgacaggtggtgcagataaatctgtcaaattctgggattttgagttagtgaaagatgaaaatagtacccaaaagagactttctgtgaagcaaacccgaactttgcaactagatgaagatgttctgtgtgtcagttactctcccaatcaaaagctattggctgtgtctttgctggactgtactgtgaaaattttctacgttgatactttaaagttttttctgtcactgtatggacacaaactgcctgttatatgcatggacatctctcatgatggagcactcatagcaactggctccgctgataggaatgtgaaaatctggggtttggactttggggactgccacaagtctctctttgcacatgatgacagtgtgatgtacctacagtttgtacccaagtctcacctcttcttcactgccggaaaagatcataagattaaacagtgggatgcagacaaatttgaacacatacagactctggagggtcatcaccaggaaatatggtgtttggctgtaagccccagtggagactatgttgtatcatcgtcccatgacaaatctctgagactttgggagagaacaagggagcctcttattcttgaggaagaaagggagatggaaagagaagcagaatatgaggagagtgtggccaaagaagaccaaccagcagttccaggagagactcaaggtgacagttactttactggaaagaaaactattgaaacagtgaaagcagctgagaggattatggaggctattgagttgtaccgagaagaaactgcaaaaatgaaggaacacaaagccatttgtaaagctgcagggaaagaggttccacttcccagcaaccccatcctaatggcttatggcagtatctcaccttcagcttatgtattagagatttttaaagggatcaagtcgagtgagctggaagaatctctacttgtgctgcctttctcttatgtcccagacattcttaaactctttaacgaattcattcagctgggctctgatgttgaacttatatgccggtgcctcttcttcctccttaggattcactttggacagatcactagcaatcaaatgcttgtgccagtgatagaaaaattaagggaaacaactatttcaaaagtcagccaagtccgggatgttatcggcttcaatatggctggtcttgattatctcaagagggaatgcgaggcaaaaagtgaagttatgttttttgctgatgctactagccacttggaagagaagaagaggaagaggaaaaagagggagaagttgattctaacgttgacttagaactgaaatgtggtatctttttttttttcaactttttcctttaaaggactcctaaactaagcacagaagagttggcgtcatcttaaaaataccaaataacagaagatcgcattgcagatgatatcaggatgtggtttccagctttgcctgagggaattccaacatgagattatgggctggctccatttcttggacttaaaatgcattattagtttaaaaatctttctgtgctctcaaagcttgagccttgcagctcaagcttgttgttccctttatattctagcagggaataaataattgttttaattaggtatttgtttcattggagttgaaattaacatttcaaaagtttttcgtatttttttatggcagatgatttgtcatttatttatattaggttttactgcctattgagacaaccaggtgcataattgattgccctttggccataaaaatgcagtgtcatggatcttagagctaaaaaggactgtaaaaattacccagaacagcgtcctcagacttaaccttctgcaagttatgtctgtatataagaagattctaattgctaactgtttatacttttctgaataaaatagttgtttctaattaaaaagtagccaagctaagatgcctggctgggcttctgaggaattaatacactcgtgtgtgtgtgtgtgtgtgtgtgtgtgtgtgtgtgtgtatgtgtatgtgtatgtacacatacatatatatagttgacacttgaaaaatgcaggtggtaggggcactgacccacccctacgccccgcacagtcaaaaatctgcatataacttttgattccccaaagtcttaagtactagtagcctgttattgactgggagcctgactgatgtattatatatattgtatactgtattcttaaagtaagctagagaaaagaaaatgttacttagaaaatcataaggaagagaaaatatatttactgtgtttatcaatactataagtgtatgtcatctgtttataaaatgaattgtctgtctggattggcaggcaaccacagccgcagacctcaatctgtggtacttatcaagcatcagctttttcttgtaatgtcatgacttttctctgctttttgggagcactgtgatatgcagtttactggggcgatgagttgttcatgcacaggtgattagtgtcacagcattttaagtgcatacgcacaacacttgagctcactgcatagcaacaggaggtggctgtgaaattatttcagtaacatactgtgtattacagttcattttatgcagctatgatttaatactgcatctttacattattttacatttctcccaaaactgtgaattgcaccatgtatgatctgtatttgtgtgtgttaatgttgataatagatttgcgtgtattttatggcagtaaatgataaaatagtctagtatctacatatattttgtgcattcatgatataactacttttttcctaatttttttcatctgaaacttttctcattgtttcagatctccaaaaatttttccaatatatttattgaaaatatctgggctgcgtgcagtggctcacgcctgtaatcccaccactgtgggaggccgaggcaggcggatcacaaggtcaggagttccagaccagcctggccaacatggtgaaacctcatctctactaaaaatacaaaaaactagctgggcgtggtggcaggcgcttgtaatcccagctactcaggaggctgagacaggagaatcacttgaacccggcaggcggagattgcagttagccaagacagtgccaccagcattccagcctgggcaacacagtgagactccatctccaaaataataatagtaaaaaaaaatctgtataacagtggagccaagtggttaaaacccatgttcaacggattgtctactgtatatcttcatggtaaggatttggggaatgttctaggaaaagatattgacagatacctctgggtctgggcttttcttttggggaagtttataaatgactaaatcatacttcttgttacaggcctgtttagatgttctgtatcttcttgagacagttttgctttttatcttttttgttgttgttaatcccaaagatttaaaactatggtttctgtctgaatttggtcattgcaaccaagttactgtgttgtggggccaccattttcttctaggctcagatatgcagtccttgtggcttgccgatttgtgtcccaaaccacaagtcttaatgttcttgagcataacacaatcactgaagtgagtaagggatgcagtggtgttatttgttgggcagaataaataagtgaattttggcatagagtttctgaaggcataactatgaaggcaagagaataggcaggcaggataatgcattctaggtgctttccaaggagtcagtgttgtttaggcagctattcctgccaccagggagaggagttaattcttgaaaaaaaatttaattttttatgagaacagaagttgattcaatatccttcttagagttgctcatcagaacataaatgtcactttctagtaacatttttgatggtttccaaaccaaaacaagttccaggagggcattcgagatgtatacatcatcaataattactcttatgttaaaagttgctgttttcccgtagctttgccaccatttataactcaaaagcctgatagtgctagggaatgtaaagatgtttctgtctgctaagtgttatactaatcgaagagaaggagaacttttatgataaagtgacatgtacagaacctagccaagttacaatttttggtcaaaatacttgaaactctttaactctaaaagtttaaggtcaataggtgcattataaagtaaattttaagccaggcaaatttctagtcattaagtcagtattcattgccttagtcagccattggctgtatataatccttaatataaaaaccatctaatgactaatatctcttgcatattgtgaagtaagttacctatagaaattctgtagtaccataaagaaaagccttttgagattgcagtgagctgagattgtgccactgcactccagtctgggcaacagagccagactccattgaaaaaaaaaaaaaaggctcttgaatgatgtattgggagtaaaacatttaggcttatttttaaaaatgtatatatccatccacttagagaaaatatgcttaaaaattttgaaattcactggctggaagctaggtgctttgtatatttggtattaaattgtttctcaatggcaaatgtcataaattatatctcattctaaagatatctagcaaatctccagcagagatctaggacagtgcccaggaaagcaatggtatctgttggtaggtacaggactgtatataggactctattcacttagctgtaaatgatgagcctgctcaatgcagccttttcaggccagattagtcttcagaaagagagggaggttgtgagcagaagcttaatgaagaaaccacattggcttacagttactgtctgcaatccacccccattcctcacaatttaagctcctaagtttgagatggggctaaggttcttaaaggtagtatcaccatatattcaagtcctttctctttatttctgaggtttttgggatccaagcagccctggtatgtttttagaacacagtacacattgtgtaacagtcactgagcccaactcttacatagggcctggcagtgttgcccttgtgtatcccttccccttgagtatggggtcggacctagtgactggcttctagtgaacagaatacagtaaatataatgggatgtgtcttccaagattagggtataaagcactgaattctaccttgcatgagcattacattttataatatatataaagaagcaactagtatagttatttaaacaaatattttctttttttttttttttgagacagagtctcgctctgtctcccaggctggagtgcagtggcacgatcttggctcactgcaagctccgcttcctgggttcacgccattctcctgcctcagcctccagagtagctgggactacaggcacccgccaccacacttggctgattttttctattgtttagtagagacggggtttcaccaagttagccaggatggtctcgatctcctgaccttgtgatccacccacctcggcctcccaaagtgctgggattacaggtgtgagccaccgggcccggcctaaacaaatattttcattcattcaggccaggtggcttataggtttctgactataagaagaggggaagaaacctggggtctaatacctcaaatttgaatgcttgacaatcaaattcccatttattacttactgtacctaatgtggagaaactttacgagacatgaagactccaagtgtggaggaataaattgtagaagttctctggaccattggattttcttttccctggggaaagtcttttggtcgtttatcataattgctgcttgttaaaacaggtaaaatacttgttaagggctgtgcttttcatgactaaattatttgcatatataaacctaaataacattttagaatcatagaatttcttctctggcaacatcagttcaattttaggtaactgtctatccaatgcaaattctgcatgctcaggcttgggggttagaggatggatatgccaatgtctagaatgtcttctgttctccctagtgtacatttctctcctaactgtgactggctttctataaggagccatcagtatggtcaagccccaaaccatatctacatcagatttcatgctttttttttttttttttggtggggagagggacagatcattgttgacactgtaagtaagtagataaaagatctgataagattttttgccctttatctgtgtctgacaggttctctctaatctataagcagggaaatagaaaatttattataaatacaaatgatttcattgctatgatcagcagcagtgactcaggtatttgcatctaataacctgtgtggagagggtaagggcacttgatttagttaccagaggaaaaaactagttctttggctagtttccttctgtcacaatggaaaaaccctgtcattactcaaaggaagagaaaaagggaggggaggaaggtgagaggaagggagagagactttcccagtgaggactttcctttcctattttatattttgctccattgtacttactgccatcattgtttatggtttacttactttatgtattgtctgtcctcccactggaatgtaagctacataaaggcaggcgtttcggcatctttgaaagcataaatgaacaaatgaactaaacttcatttattgacatcagtgctatctgacacaagttcctttaactttctccttcacctcggaatatctgaatcatcagctatcttcagcttctcccttgccaagactaacccttcagctctgttttttattattcttttgccctgttttggatattgcagtttcaatcacttctactcattcatatttttaatatatatcttctgctccactctcttcagcctacaaacatgtaggtctacattaaactgaaaatccttcctatattctgttgcatccttgagtaacatattctcttgctctttcctttaataaattttcttgaaagaatatccataactaatgtttctgctttcttaatacagtcattctttaccttttgcaatttagtttttatcccaaccaaatttaacactttaaatctgaattttctttgacatctcaatagcatccgtcaattgtgtccgtcttttccttgaaattcttcctaaggcttttgaagtatttcaccattttctaattgctgcttttgtctccactggctcttcttcctcctgctccctaaaccgactccagatttctgttccttgcccatacattcagccatcacctctgtgtaaacgatgcttaaaattattatatctccaattctgacttctcagttgagatctaatattacatatacatgattcattacctcagcccaaaactttgaagttgaactcgatgtcctctttcttccatccatcaatggcttctacctcagattttgcagtttccttcccccaccatgtctttcattcatgtccctcttttatgttgactgttcccccactcccagttcttgtcctcacacatggcccattcaggtagacttctaatggtacttttacacatccagttgttcccctttgacatgtcctgcacaataaccctggattcatcttaataaagatatgctgatcatgtcacccacagggtcaggaatctgcagtggttcactgctgcttaaataataaaattcaagccaaggatttaagatctttcataacttgactccaacctactttcccactatattcctaatactcaagcttttggcaagttgaactccctgccaatcatcccaaacacctggagctttcctgttgccatggttttgttcattatttttacttaaagttcccgtcaatcaagttttcacattctataagatccagctcaaaaatcaaataaatagagaactgtaacacaagcagcacacaattcatgccactggagaaagtacaaaatagaaataaaatgtgaagactttatttctgctacaaattatataataccttttaagacagagtccaattatccatttttatatatgataaactattttatacagtaccttggaggtaataggttcttgatatctatctaatatctgtttggctgaagacactgataaggaggaatgcatgcataattcagtgaatacccaacctttataataataaggtatttcctatccttccataaaattataatttttttgtgatagatacttgctgttttattattctgtctgatattccgtagatagccaataacatttacatttattcaatctgaagttactgcacatatactatgtgtcaggtatttttttagatttggctaggtgctttcaaagatgaatgaagatgctctttgtcttaataaatttaactctgattttgaagatagaattaataaagtagagatgcattttgacttcc

SEQ ID NO: 199754 - DNA, 1035 bp, Homo sapiens
  Payload ID: 19411
  Gene Name: WD repeat domain 3
  ENST ID: ENST00000369441
  CDS Start-End: 96-218
ggacccggaaggggcaggtcttgtgggcgggtccaatcggctgggagcctcgtggaggctgagattgcttcacctgtggtatcagacatcacaacatggggctcaccaagcagtacctacgctatgttgctagtgcggtctttggcgttatcggcagccaaaaaggtctagctagccaagcatcaagttcctttgtgttcttcgccactgaattctgaaaaccacaatgaaataggagcttatttcttagatgtctatttgttggaatatttacagattcttatccttcaggggcttaaacaagaagttacttgcttatgcccctccccagatgggctacacttagctgttgggtatgaggatgggtcgatccgaatcttcagtctcctgagtggggaaggaaatgtgaccttcaatggtcacaaagcagctatcactaccttgaagtatgatcagctaggaggcagactggcatctgggtccaaggacacagatattattgtatgggatgtgatcaatgaaagtggtctgtaccgtctaaaggggcacaaggatgccatcacacaagcattgtttctacgagaaaagaacctgctagttactagtgggaaagataccatggtgaaatggtgggaccttgatactcagcactgctttaaaacaatggttggccaccggactgaggtatgggggttggttctgttgtcagaagaaaagcgactcatcactggggcctcagacagtgaactgagggtatgggacatagcttatctgcaagagattgaagacccggaagaaccagaccccaagaaaatcaaaggatcttctcctggaatacaagatactcttgaggcagaggatggtgcctttgagacggatgaagcccctgaggatcgaatcctttcatgcagaaaagctggttccataatgcgggaaggaagagacagagttgtaaaccttgcagtcgacaagacaggcaggattcttgcttgccatggaactgactctgtgctagaattgttttgtatcctttcc

SEQ ID NO: 199755 - DNA, 4862 bp, Homo sapiens
  Payload ID: 19412
  Gene Name: WD repeat domain 31
  Uniprot ID: Q8NA23
  ENST ID: ENST00000341761
  CDS Start-End: 235-1335
acccccaggctccgcgttcccgccggccccagctccagccccgcagcccaccgtgcaaacatgcttagacagagaagagattaacttcagtggcttcccactaattacagagattaagaagtggctgcctgaactattttccaaaggatacacattacaaattattgaatagggcagctaaccaagaagatcctattggtttggggggaacacaacttccagcagccacaagggatgctgctactcaggtgccaactgaaacaagctcctccacagaaggtttcgtttaggttttgtgtcgtgatggggaaacagcaaagcaaactcaaacacagcacttataaatacgggcctgatgaaattatagaagagagaattcaaactaaagcttttcaagagtatagcccagctcacatggataccgtctctgtcgtggctgctttgaactcagacctttgtgtctctggagggaaagataagacagttgtggcctataattggaaaactggaaatgtggtgaaaaggttcaaaggacatgaacatgagatcaccaaggtagcctgtattcccaaatccagccagttcttcagtgcctctcgtgacaggatggtcatgatgtgggacttgcacggttcctcacaaccaaggcagcaattgtgtggccatgccatggtggtcaccggattggctgtgagtccagactcatcacagctgtgcactggctctcgggacaacaccctgcttctgtgggatgtggtgacaggacagagtgtggaaagagcatctgtctccaggaacgtggtcactcacctgtgctgggtccccagagaaccatacatactacagacctctgaagataaaaccctcagattatgggacagtcgggggctgcaggtagctcatatgtttcctgcaaagcagcacattcagacctactgtgaagtcagtgtggatggacacaagtgtatctcctgcagcaatggctttggaggagaaggctgtgaagccacgttgtgggacctaagacagactcgaaacagaatatgtgagtataaggggcatttccagactgtcgcatcctgcgtctttctaccaagagcattggccttgatgcctttaattgctacctcatcacatgattgcaaggtgaagatttggaaccaagatactggagcctgccttttcaccttgtctctggatggatcaggacccttgacttctctggctgttggtgacgccatctccttattgtgtgcaagttttaacagaggaattcacttactcagaatggaccacagccaagggctggaactgcaggaagtggcagcattctgaggccaagagacactcactggacaatatcaaaccatggctcctcctcagcatggctttgtgtctttcccagttatcttgaggggagtgggatgtagggctggtattctttgcttaggttcatttacaagatgtatcagtgttgtaagtccaataatttaagtccagtgattcaaaatcaggtatagagtccagaaacatggactacacataaggttctctatttaagttaaatacaaatgcaactttttagtgagcttttaggactactcttcaaaaaaagtgtattgctcagaatgatgacctgtaaatgtaagagtggcaggcctctgtctgtgaaagtcagaacacagggctcgagcctctggaactgaccctttgcaagtctttacaaaagaaaaaaggcagtggggagagagagtgttttggttacatcagaaataattgagatgggaaagaatagtgcagctccatagaggagacggactgtagacaatgagattaagcttcaatcactgctcctcagcaatgtgaagaatcaaagtcagggcaagaaagcgaaagcttggacttctattcaaagtggcagcagagtgggagggcggtacccttctagcccagtgctgctgagcttgtgtgaaaatcagacctgagatggcttgaagcagccaagaaccacatgggcattgcccagaattacaggagttagcacaccagctctacagataagaaaacattgaaattcaaagattaaggccaaaaatatctcacttgcaattttaatattttcatttggatttatataaatgaaacatatatatgttttggaatggccagagtgaggcaaaggggatccctgaaataacattagaacatacaggaaaaacgaggcaggcagatcactttaggtcaggagttcaagaccagcctgtacgtgcgtgcctgtagtcccagctactcgggaggctgagatgggagaatcacttgaacctgggaggcagagtttgcagtgagctgagattgtgccactgcactccagtctgtgtgacagaatgagaccttgtcttgaaaaaaaaaaaaacaaaaaaccacatacaggaaaaaagagagggatggagtcaactgtgccccagacattaagcccccttcagtgaggaggggcaaggtgctcaggcctgcctgtgtggcccccaggagtcagacctcagcctcatgctcactggtccattttcctccagggaaaatggagttctttctgccttcagagatgcccacacataaggcacatgaggctgttggtgacaccatcaccaacactggagattccctttctgacaagtcccagccaaagaaagattttgcatttgtcttctctgtcctctgcttgtctctgataccagtgactgacagccaccttccttcttccctctcttggtgtgatcatggctaactgcagcctcaatcaccagggctcaatcaatcctccctccttagcctcctgagtagctgggactgcaggcatgcaccaccacacctggctaattttttgtgtgtttgtgtggtctaaaactcctgggctcaagtgatccatctgcctcggcctccttaagtgttgagattacaggtatgagccaccacatccagctgagagtctgttcttaagctagtacaaagagtcagacccgactttgaatctccacttctccatttagctggatgatcttgggcaagttataaaatctgtttcctcttcactttataacgtgggtttcatgatcatacctcgccacagggctgttctgaagactggacatagctattttaaatgccaggaaaggccaggcgcagtggctcaaacctgtaatcccagcactttgggaggccgaggcaggaggatcacctgaggtcaggagtttgagaccagcctgaccaacatggagaaaccccgtctctactaaaaatacaaaaattagccaggcgtggtggtgcatgcctgtaatcccagctacctggggagcctgaggcgggagaatcgcttgaacccaggaggcggaggttgcggtgagccgagattgtgccattgcactccagcctgggcaacaagagcgaaactccatctcaataaataaataaataagtaaatgccaggaaaggtggtgacaaatggtagccataattatttattgtcctctctgtccagactaaatgttcccttttccatattaaacatttaccattctgccggacgcgttggctcatgcctgtaatcccagcactttgtgaggcctaggcgggcagatcacaaggtcaagagatcgagaccatcctggccaatatggtgaaaccccgtctctactaaaaatacaaaaattagctgggtgtggtggtgcccgcctgtagtcccagctactcaggaggctgaggcaggagaatcgcttcaaccggggaggcagaggttgcagtgagctgagattgtgccattgcactccagcctaggcaacagagagagactctatctcaaaataaaataaaataaaataaaataaaataaacgtttaccattccttgatccttttttttttttttttttttgagatggaatcttgctctgtcgcccaggctggagtgcagtggtgcaatctcggctcgctgcaagctccgcctcccgggttgacgccattctcctgcctcagcctcccgaatagctgggactacaggcgcccgccatcacgcccggctaatttttttgtgtttttagtagagacgggatttcaccgtgttagccaggatggtctcaatctcctgacctcgtgatccgcccgcctaagtgctgggattacaggcgtgagccactgcgcccggcctccttcatccattcttagatcttatcctctaaacctttagtcatcgtttcactctcctttgattccttgttatgggtctttcaactctggaaagacaaagagatagtgggagaggaagcccggtcactgagcatctacagagggctaaatatatttattctcatttgttattcccaatattctctgtattgtgatttccatttcacagatgaggaagctgagggctagaaacatgcagtactttgcccaaagtcacacacatattaagaagagctgaggtatgaatctgggtctgcctgactcaaagcccaaacgctttcctttgcatcgtgtcacaaagtcatagaccatgacattgtttgtatcttcaagaccagttattaactttctggctccaaggagatcccctgcccaagtgcctaggggcagtagacagctgtctcagggacagtcgtagcatgtgctggattattagtgcagcagctgacactttttcccagaagggagagaggcagcaagtcagaaagttcacgggaatgagttgggagggggtcccagggaagggggacaggctgccaggagaaggaaagtacacgggagaaaatagtggggctctgatgagttagtagggttctgttaccaataaaattgtttccataaactgta

SEQ ID NO: 199756 - DNA, 4878 bp, Homo sapiens
  Payload ID: 19412
  Gene Name: WD repeat domain 31
  Uniprot ID: Q8NA23
  ENST ID: ENST00000374193
  CDS Start-End: 248-1351
ggaggctgttcccacccccaggctccgcgttcccgccggccccagctccagccccgcagcccaccgtgcaaacatgcttagacagagaagagattaacttcagtggcttcccactaattacagagattaagaagtggctgcctgaactattttccaaaggatacacattacaaattattgaatagggcagctaaccaagaagatcctattggtttggggggaacacaacttccagcagccacaagggatgctgctactcaggtgccaactgaaacaagctcctccacagaaggtttcgtttaggttttgtgtcgtgatggggaaacagcaaagcaaactcaaacacagcacttataaatacggcaggcctgatgaaattatagaagagagaattcaaactaaagcttttcaagagtatagcccagctcacatggataccgtctctgtcgtggctgctttgaactcagacctttgtgtctctggagggaaagataagacagttgtggcctataattggaaaactggaaatgtggtgaaaaggttcaaaggacatgaacatgagatcaccaaggtagcctgtattcccaaatccagccagttcttcagtgcctctcgtgacaggatggtcatgatgtgggacttgcacggttcctcacaaccaaggcagcaattgtgtggccatgccatggtggtcaccggattggctgtgagtccagactcatcacagctgtgcactggctctcgggacaacaccctgcttctgtgggatgtggtgacaggacagagtgtggaaagagcatctgtctccaggaacgtggtcactcacctgtgctgggtccccagagaaccatacatactacagacctctgaagataaaaccctcagattatgggacagtcgggggctgcaggtagctcatatgtttcctgcaaagcagcacattcagacctactgtgaagtcagtgtggatggacacaagtgtatctcctgcagcaatggctttggaggagaaggctgtgaagccacgttgtgggacctaagacagactcgaaacagaatatgtgagtataaggggcatttccagactgtcgcatcctgcgtctttctaccaagagcattggccttgatgcctttaattgctacctcatcacatgattgcaaggtgaagatttggaaccaagatactggagcctgccttttcaccttgtctctggatggatcaggacccttgacttctctggctgttggtgacgccatctccttattgtgtgcaagttttaacagaggaattcacttactcagaatggaccacagccaagggctggaactgcaggaagtggcagcattctgaggccaagagacactcactggacaatatcaaaccatggctcctcctcagcatggctttgtgtctttcccagttatcttgaggggagtgggatgtagggctggtattctttgcttaggttcatttacaagatgtatcagtgttgtaagtccaataatttaagtccagtgattcaaaatcaggtatagagtccagaaacatggactacacataaggttctctatttaagttaaatacaaatgcaactttttagtgagcttttaggactactcttcaaaaaaagtgtattgctcagaatgatgacctgtaaatgtaagagtggcaggcctctgtctgtgaaagtcagaacacagggctcgagcctctggaactgaccctttgcaagtctttacaaaagaaaaaaggcagtggggagagagagtgttttggttacatcagaaataattgagatgggaaagaatagtgcagctccatagaggagacggactgtagacaatgagattaagcttcaatcactgctcctcagcaatgtgaagaatcaaagtcagggcaagaaagcgaaagcttggacttctattcaaagtggcagcagagtgggagggcggtacccttctagcccagtgctgctgagcttgtgtgaaaatcagacctgagatggcttgaagcagccaagaaccacatgggcattgcccagaattacaggagttagcacaccagctctacagataagaaaacattgaaattcaaagattaaggccaaaaatatctcacttgcaattttaatattttcatttggatttatataaatgaaacatatatatgttttggaatggccagagtgaggcaaaggggatccctgaaataacattagaacatacaggaaaaacgaggcaggcagatcactttaggtcaggagttcaagaccagcctgtacgtgcgtgcctgtagtcccagctactcgggaggctgagatgggagaatcacttgaacctgggaggcagagtttgcagtgagctgagattgtgccactgcactccagtctgtgtgacagaatgagaccttgtcttgaaaaaaaaaaaaacaaaaaaccacatacaggaaaaaagagagggatggagtcaactgtgccccagacattaagcccccttcagtgaggaggggcaaggtgctcaggcctgcctgtgtggcccccaggagtcagacctcagcctcatgctcactggtccattttcctccagggaaaatggagttctttctgccttcagagatgcccacacataaggcacatgaggctgttggtgacaccatcaccaacactggagattccctttctgacaagtcccagccaaagaaagattttgcatttgtcttctctgtcctctgcttgtctctgataccagtgactgacagccaccttccttcttccctctcttggtgtgatcatggctaactgcagcctcaatcaccagggctcaatcaatcctccctccttagcctcctgagtagctgggactgcaggcatgcaccaccacacctggctaattttttgtgtgtttgtgtggtctaaaactcctgggctcaagtgatccatctgcctcggcctccttaagtgttgagattacaggtatgagccaccacatccagctgagagtctgttcttaagctagtacaaagagtcagacccgactttgaatctccacttctccatttagctggatgatcttgggcaagttataaaatctgtttcctcttcactttataacgtgggtttcatgatcatacctcgccacagggctgttctgaagactggacatagctattttaaatgccaggaaaggccaggcgcagtggctcaaacctgtaatcccagcactttgggaggccgaggcaggaggatcacctgaggtcaggagtttgagaccagcctgaccaacatggagaaaccccgtctctactaaaaatacaaaaattagccaggcgtggtggtgcatgcctgtaatcccagctacctggggagcctgaggcgggagaatcgcttgaacccaggaggcggaggttgcggtgagccgagattgtgccattgcactccagcctgggcaacaagagcgaaactccatctcaataaataaataaataagtaaatgccaggaaaggtggtgacaaatggtagccataattatttattgtcctctctgtccagactaaatgttcccttttccatattaaacatttaccattctgccggacgcgttggctcatgcctgtaatcccagcactttgtgaggcctaggcgggcagatcacaaggtcaagagatcgagaccatcctggccaatatggtgaaaccccgtctctactaaaaatacaaaaattagctgggtgtggtggtgcccgcctgtagtcccagctactcaggaggctgaggcaggagaatcgcttcaaccggggaggcagaggttgcagtgagctgagattgtgccattgcactccagcctaggcaacagagagagactctatctcaaaataaaataaaataaaataaaataaaataaacgtttaccattccttgatccttttttttttttttttttttgagatggaatcttgctctgtcgcccaggctggagtgcagtggtgcaatctcggctcgctgcaagctccgcctcccgggttgacgccattctcctgcctcagcctcccgaatagctgggactacaggcgcccgccatcacgcccggctaatttttttgtgtttttagtagagacgggatttcaccgtgttagccaggatggtctcaatctcctgacctcgtgatccgcccgcctaagtgctgggattacaggcgtgagccactgcgcccggcctccttcatccattcttagatcttatcctctaaacctttagtcatcgtttcactctcctttgattccttgttatgggtctttcaactctggaaagacaaagagatagtgggagaggaagcccggtcactgagcatctacagagggctaaatatatttattctcatttgttattcccaatattctctgtattgtgatttccatttcacagatgaggaagctgagggctagaaacatgcagtactttgcccaaagtcacacacatattaagaagagctgaggtatgaatctgggtctgcctgactcaaagcccaaacgctttcctttgcatcgtgtcacaaagtcatagaccatgacattgtttgtatcttcaagaccagttattaactttctggctccaaggagatcccctgcccaagtgcctaggggcagtagacagctgtctcagggacagtcgtagcatgtgctggattattagtgcagcagctgacactttttcccagaagggagagaggcagcaagtcagaaagttcacgggaatgagttgggagggggtcccagggaagggggacaggctgccaggagaaggaaagtacacgggagaaaatagtggggctctgatgagttagtagggttctgttaccaataaaattgtttccataaactgta

SEQ ID NO: 199757 - DNA, 3101 bp, Homo sapiens
  Payload ID: 19412
  Gene Name: WD repeat domain 31
  Uniprot ID: Q8NA23
  ENST ID: ENST00000374195
  CDS Start-End: 238-1338
cccacccccaggctccgcgttcccgccggccccagctccagccccgcagcccaccgtgcaaacatgcttagacagagaagagattaacttcagtggcttcccactaattacagagattaagaagtggctgcctgaactattttccaaaggatacacattacaaattattgaatagggcagctaaccaagaagatcctattggtttggggggaacacaacttccagcagccacaagggatgctgctactcaggtgccaactgaaacaagctcctccacagaaggtttcgtttaggttttgtgtcgtgatggggaaacagcaaagcaaactcaaacacagcacttataaatacgggcctgatgaaattatagaagagagaattcaaactaaagcttttcaagagtatagcccagctcacatggataccgtctctgtcgtggctgctttgaactcagacctttgtgtctctggagggaaagataagacagttgtggcctataattggaaaactggaaatgtggtgaaaaggttcaaaggacatgaacatgagatcaccaaggtagcctgtattcccaaatccagccagttcttcagtgcctctcgtgacaggatggtcatgatgtgggacttgcacggttcctcacaaccaaggcagcaattgtgtggccatgccatggtggtcaccggattggctgtgagtccagactcatcacagctgtgcactggctctcgggacaacaccctgcttctgtgggatgtggtgacaggacagagtgtggaaagagcatctgtctccaggaacgtggtcactcacctgtgctgggtccccagagaaccatacatactacagacctctgaagataaaaccctcagattatgggacagtcgggggctgcaggtagctcatatgtttcctgcaaagcagcacattcagacctactgtgaagtcagtgtggatggacacaagtgtatctcctgcagcaatggctttggaggagaaggctgtgaagccacgttgtgggacctaagacagactcgaaacagaatatgtgagtataaggggcatttccagactgtcgcatcctgcgtctttctaccaagagcattggccttgatgcctttaattgctacctcatcacatgattgcaaggtgaagatttggaaccaagatactggagcctgccttttcaccttgtctctggatggatcaggacccttgacttctctggctgttggtgacgccatctccttattgtgtgcaagttttaacagaggaattcacttactcagaatggaccacagccaagggctggaactgcaggaagtggcagcattctgaggccaagagacactcactggacaatatcaaaccatggctcctcctcagcatggctttgtgtctttcccagttatcttgaggggagtgggatgtagggctggtattctttgcttaggttcatttacaagatgtatcagtgttgtaagtccaataatttaagtccagtgattcaaaatcaggtatagagtccagaaacatggactacacataaggttctctatttaagttaaatacaaatgcaactttttagtgagcttttaggactactcttcaaaaaaagtgtattgctcagaatgatgacctgtaaatgtaagagtggcaggcctctgtctgtgaaagtcagaacacagggctcgagcctctggaactgaccctttgcaagtctttacaaaagaaaaaaggcagtggggagagagagtgttttggttacatcagaaataattgagatgggaaagaatagtgcagctccatagaggagacggactgtagacaatgagattaagcttcaatcactgctcctcagcaatgtgaagaatcaaagtcagggcaagaaagcgaaagcttggacttctattcaaagtggcagcagagtgggagggcggtacccttctagcccagtgctgctgagcttgtgtgaaaatcagacctgagatggcttgaagcagccaagaaccacatgggcattgcccagaattacaggagttagcacaccagctctacagataagaaaacattgaaattcaaagattaaggccaaaaatatctcacttgcaattttaatattttcatttggatttatataaatgaaacatatatatgttttggaatggccagagtgaggcaaaggggatccctgaagcgggagaatcgcttgaacccaggaggcggaggttgcggtgagccgagattgtgccattgcactccagcctgggcaacaagagcgaaactccatctcaataaataaataaataagtaaatgccaggaaaggtggtgacaaatggtagccataattatttattgtcctctctgtccagactaaatgttcccttttccatattaaacatttaccattctggcgtgagccactgcgcccggcctccttcatccattcttagatcttatcctctaaacctttagtcatcgtttcactctcctttgattccttgttatgggtctttcaactctggaaagacaaagagatagtgggagaggaagcccggtcactgagcatctacagagggctaaatatatttattctcatttgttattcccaatattctctgtattgtgatttccatttcacagatgaggaagctgagggctagaaacatgcagtactttgcccaaagtcacacacatattaagaagagctgaggtatgaatctgggtctgcctgactcaaagcccaaacgctttcctttgcatcgtgtcacaaagtcatagaccatgacattgtttgtatcttcaagaccagttattaactttctggctccaaggagatcccctgcccaagtgcctaggggcagtagacagctgtctcagggacagtcgtagcatgtgctggattattagtgcagcagctgacactttttcccagaagggagagaggcagcaagtcagaaagttcacgggaatgagttgggagggggtcccagggaagggggacaggctgccaggagaaggaaagtacacgggagaaaatagtggggctctgatgagttagtagggttctgttaccaataaaattgtttccataaactgt

SEQ ID NO: 199758 - DNA, 533 bp, Homo sapiens
  Payload ID: 19412
  Gene Name: WD repeat domain 31
  ENST ID: ENST00000465979
  CDS Start-End: 111-533
aggcgcgggagggctcggaggctgttcccacccccaggctccgcgttcccgccggccccagctccagccccgcagcccaccgggaacacaacttccagcagccacaagggatgctgctactcaggtgccaactgaaacaagctcctccacagaagacagttgtggcctataattggaaaactggaaatgtggtgaaaaggttcaaaggacatgaacatgagatcaccaaggtagcctgtattcccaaatccagccagttcttcagtgcctctcgtgacaggatggtcatgatgtgggacttgcacggttcctcacaaccaaggcagcaattgtgtggccatgccatggtggtcaccggattggctgtgagtccagactcatcacagctgtgcactggctctcgggacaacaccctgcttctgtgggatgtggtgacaggacagagtgtggaaagagcatctgtctccaggaacgtggtcactcacctgtgctgggtccccagagaaccatacatactacagacctctgaagat

SEQ ID NO: 199759 - DNA, 2255 bp, Homo sapiens
  Payload ID: 19412
  Gene Name: WD repeat domain 31
  ENST ID: ENST00000465205
  CDS Start-End: 220-375
gttcccgccggccccagctccagccccgcagcccaccgtgcaaacatgcttagacagagaagagattaacttcagtggcttcccactaattacagagattaagaagtggctgcctgaactattttccaaaggatacacattacaaattattgaatagggcagctaaccaagaagatcctattggtttggggggaacacaacttccagcagccacaagggatgctgctactcaggtgccaactgaaacaagctcctccacagaaggtttcgtttaggttttgtgtcgtgatggggaaacagcaaagcaaactcaaacacagcacttataaatacggacagttgtggcctataattggaaaactggaaatgtggtgaaaaggttcaaaggacatgaacatgagatcaccaaggtagcctgtattcccaaatccagccagttcttcagtgcctctcgtgacaggatggtcatgatgtgggacttgcacggttcctcacaaccaaggcagcaattgtgtggccatgccatggtggtcaccggattggctgtgagtccagactcatcacagctgtgcactggctctcgggacaacaccctgcttctgtgggatgtggtgacaggacagagtgtggaaagagcatctgtctccaggaacgtggtcactcacctgtgctgggtccccagagaaccatacatactacagacctctgaagataaaaccctcagattatgggacagtcgggggctgcaggtagctcatatgtttcctgcaaagcagcacattcagacctactgtgaagtcagtgtggatggacacaagtgtatctcctgcagcaatggctttggaggagaaggctgtgaagccacgttgtgggacctaagacagactcgaaacagaatatgtgagtataaggggcatttccagactgtcgcatcctgcgtctttctaccaagagcattggccttgatgcctttaattgctacctcatcacatgattgcaaggtgaagatttggaaccaagatactggagcctgccttttcaccttgtctctggatggatcaggacccttgacttctctggctgttggtgacgccatctccttattgtgtgcaagttttaacagaggaattcacttactcagaatggaccacagccaagggctggaactgcaggaagtggcagcattctgaggccaagagacactcactggacaatatcaaaccatggctcctcctcagcatggctttgtgtctttcccagttatcttgaggggagtgggatgtagggctggtattctttgcttaggttcatttacaagatgtatcagtgttgtaagtccaataatttaagtccagtgattcaaaatcaggtatagagtccagaaacatggactacacataaggttctctatttaagttaaatacaaatgcaactttttagtgagcttttaggactactcttcaaaaaaagtgtattgctcagaatgatgacctgtaaatgtaagagtggcaggcctctgtctgtgaaagtcagaacacagggctcgagcctctggaactgaccctttgcaagtctttacaaaagaaaaaaggcagtggggagagagagtgttttggttacatcagaaataattgagatgggaaagaatagtgcagctccatagaggagacggactgtagacaatgagattaagcttcaatcactgctcctcagcaatgtgaagaatcaaagtcagggcaagaaagcgaaagcttggacttctattcaaagtggcagcagagtgggagggcggtacccttctagcccagtgctgctgagcttgtgtgaaaatcagacctgagatggcttgaagcagccaagaaccacatgggcattgcccagaattacaggagttagcacaccagctctacagataagaaaacattgaaattcaaagattaaggccaaaaatatctcacttgcaattttaatattttcatttggatttatataaatgaaacatatatatgttttggaatggccagagtgaggcaaaggggatccctgaaataacattagaacatacaggaaaaacgaggcaggcagatcactttaggtcaggagttcaagaccagcctgtacgtgcgtgcctgtagtcccagctactcgggaggctgagatgggagaatcacttgaacctgggaggcagagtttgcagtgagctgagattgtgccactgcactccagtctgtgtgacagaatgagaccttgtcttg

SEQ ID NO: 199760 - DNA, 9471 bp, Homo sapiens
  Payload ID: 19413
  Gene Name: WD repeat domain 33
  Uniprot ID: Q9C0J8
  ENST ID: ENST00000322313
  CDS Start-End: 160-4170
ggggaagatggcggctgctcctttggaggagcgggattgagaggatcggggtggggagaccaaacaagagagacatttctggctctgaaggcgaacgcttcgctggccatttaggagctctgctcaaagccagacgtatcctagaaggaaaacatcaccatggctacagaaattggttctcctcctcgttttttccatatgccaaggttccagcaccaggcacctcgacagctgttttataagcgacctgattttgcacaacagcaagcaatgcaacagcttacttttgatggaaaacgaatgagaaaagctgtgaaccgaaaaaccatagactacaatccatctgtaattaagtatttggagaacagaatatggcaaagagaccagagagatatgcgggcaattcagcctgatgcaggttattacaatgatctggtcccacctataggaatgttgaataatcctatgaatgcagtaacaacaaaatttgttcggacatcaacaaataaagtaaagtgtcctgtatttgttgttaggtggactccagaaggaagacgcttggtcactggagcttctagtggggagtttaccctgtggaatggactcactttcaattttgaaacaatattacaggctcacgacagcccagtgagggccatgacgtggtcacataatgacatgtggatgttgacagcagaccacggaggatatgtgaaatattggcagtcgaacatgaacaacgtcaagatgttccaggcacataaggaggcgattagagaggccagtttctcacccacggataataaatttgctacatgctctgatgacggcactgttagaatctgggactttcttcgttgccatgaggaaagaattctccgagggcatggtgctgatgtgaaatgtgtagactggcatccaaccaaagggttagttgtttcaggaagtaaagatagtcaacagccaatcaagttctgggatcccaagactgggcagagtcttgcaacacttcatgcccataaaaacacagtaatggaagtgaaattaaacctcaatggcaattggctactcacagcatcacgtgatcatctctgtaaactttttgatatcagaaacctaaaagaagagcttcaagtcttccgaggtcataagaaagaagccacagctgtggcctggcatcctgttcatgaaggactttttgccagtggagggtctgatggttctttgttattctggcatgttggggtagagaaggaagtgggtgggatggagatggctcacgaagggatgatctggagtctggcttggcatcctcttgggcatattctctgctcaggctcaaatgaccatactagcaaattctggactcgaaaccgaccaggtgataaaatgcgagatcgatataatctaaaccttttacctggaatgtctgaagatggagtagaatatgatgacctcgaacctaatagcctggcagtaattccaggaatgggaataccagaacaactaaaattagctatggaacaagaacagatggggaaagatgaatcaaatgaaattgaaatgacaattccaggtttagattggggaatggaggaagtgatgcaaaaggatcagaaaaaagtacctcagaagaaagttccttatgcaaaacccattcctgctcagttccagcaggcttggatgcaaaataaagttccaattcctgctccaaatgaggtgctgaatgacagaaaagaagacattaaattggaagagaagaaaaaaacacaagcagaaattgagcaagaaatggctacattacaatatactaacccacaacttctggagcaacttaaaattgaaagacttgcacagaaacaagttgagcaaattcagcctcctccctcatctggcacccctctcctcggaccccagccttttccaggacaaggtccaatgtctcagattcctcaaggttttcaacagccccatccatctcagcagatgccaatgaacatggctcaaatggggcctccaggtccacagggacagtttaggcctcctggaccccagggacaaatgggaccacaaggtcctccactgcatcagggaggtggggggccacaaggattcatgggaccacaggggccccagggcccgccccaggggttgccacggcctcaggacatgcatgggccccaaggaatgcagaggcatcctggacctcatggccctttgggacctcaagggccacctggaccacaaggtagttctggtcctcaaggtcatatgggtcctcagggtccacctggcccacagggtcacataggcccccaaggcccgcctggccctcagggtcacttgggcccacaggggcctccgggtactcaaggtatgcagggaccacctggtcccagaggaatgcaagggcctcctcatcctcatgggatccaaggcggaccagggtctcaagggatccaaggtcctgtgtctcagggacctctgatgggattgaatccaagaggaatgcaggggcctccaggcccccgggagaaccagggtcctgctccccaagggatgattatgggccacccgcctcaagagatgagaggacctcaccctccaggtggactactgggacacggccctcaggaaatgagaggtcctcaggagatccgaggcatgcaggggcctccaccccaaggatcaatgctgggacctccccaggaattgcgagggcctccaggctcacaaagtcagcaggggccgccccagggctctttaggacctccaccccagggtggcatgcaaggaccccccggacctcagggacagcagaacccagcaagagggccacatccatctcaagggccaataccattccagcaacagaaaacgcctctgctaggtgatgggccccgggcccccttcaaccaggaaggacagagcacaggccccccacccctgataccaggcctagggcagcagggagcacaaggtcgcattccccctctgaaccccggacaaggacctggccccaacaaaggtgactcccgcggccctccaaaccatcacatgggcccgatgtcagagaggcggcatgagcagagcggcgggcctgagcatgggcccgagagggggcctttccggggtggccaggactgcaggggtccccctgataggcgtggccctcacccagacttccccgatgacttcagcagaccagatgacttccaccctgacaagcgctttggccaccggttacgtgaatttgaggggcgaggaggacctttaccgcaagaagagaagtggaggcgagggggccctgggcctccgtttccccctgatcacagggaattcagcgagggggatggccggggtgcagcccgaggccctccgggggcatgggaaggccgcaggcccggagatgaacgtttcccccgggatcccgaggacccacgttttcgagggcgcagagaagaaagtttcagaagaggagccccgccgaggcatgagggccgtgctccccccagaggaagggatggttttcctggtcctgaagactttggtccagaggagaattttgatgcttctgaggaagcggcccgaggacgagatctcagaggtcgaggtcggggtaccccacgaggaggaaggaagggtttacttcccactcctgacgagttccctcgctttgaaggagggcggaagccagattcctgggatggaaacagagagcctgggccaggtcatgaacattttcgtgatactccccgccctgatcatccccctcacgacggtcattccccagccagcagagaacgctcctcttctctccaaggcatggacatggcatccctacctccccgaaagcgcccctggcatgatggcccaggcacttctgagcacagagagatggaggccccaggaggcccttctgaagaccgaggaggcaaaggccgagggggcccaggacctgctcagagagtgcccaaatctgggcgttccagctccttagacggagagcaccacgatggataccacagagatgaaccttttgggggccctccaggcagtggcaccccttctcgagggggccggagtggcagtaactggggtagagggagtaacatgaactctggcccgccgaggcgaggagcttcacggggtggtggaaggggtcggtagaagctggaactgagtaccctgaggcctctctggacagtatgtaagaacttcttgtggactcaccaagagaaacaaaaggaagcctgcaccattgtagccctgaactcttttctgggcacctgaatcccaggaaccctcaatgaggtcttcaagatgaagagactgctgccagctaccagcctggctggccctgtcctgtccaccctcattgccccaactcccatgttgttttgtgaagataaaagctgggatctttttcttttttttaagtctcacaagacatggggcatctccacaaatttaagttcctgtccatttggaaatttgtttctatgtgtacagtttgtcagagaaaaacaaagtttttgtatgaatacagaatgtgatttacgcaagaattgacagaaaactagttgtgaagtgcttgccttaaggaaacctttggtttccatcgcatcccatctgccaaggaatgcacggttgttgctgatgttcatgagcatattaaccactaggttatctaaattaatctcagctgtgaactttgtgtttttcaacacattctgtcacaccatttttgtgacagaaaaatacttgaaaattattctaatgtagtttgtagtaggttcaaatttttattcagacatgctctgacagatggaaaattgtactctgaagagaaaatgcaatcttctggatgtccaacgagggagcttccccttggaagcatctcctaagaatcacagtttaggtttgaatcgccttgttatgatgaggagaggaacttgatgttagtcagaaataaagtcacatgccctttagataacttgaaatcacacatggagttgataaggaatggaccaaaataggtcctcaaacaattttgcaacacttaattaagttttcctctcttcctcttccatactatgtggaaataccagtgttacggcagggcgtacttctaactcacagtaagccagatagatcttgtccatggcaaattccttgtttaaaataaacataccatttagcccagtttggattggaagccaaaaattcagtttgttatataccccatgatactttctatactgacctttattttggttttacatggaagcttttattaaaaggactgtcctatggccaccttaacatttcattacattggcagcttcagttttggcatcagtcaaatttatttggcaaatttagtggtgctggaagtttctttttttcttttccttttttgacagagtcttgctctgtcacccagccaggagtgcagtggtgcaatcacggctcacttcagctttgaccctgcctcagcctccctagtagctaggactacaggcatatgccaccatgcccagctaattttttgtgtgtgtgttttttgtagagatggagtttcaccactttgtctatgctggtttcaaactcctgggctcaagcggtccacctgctgtggcctcccaaagtgctgggattgcagatctgagccacagtacctggccgctggtgctggaagtttcaatggttgcttagaaaaggcatactgatatagtttaacaggatatgaaaatttaactggttctctatgaatgtaaaaaacagcaaaagctaattgatttctgtggagtgagaaaatgtcagccatatacactgcttttcagtgttagaatctagagactattttttttttaactttgaaattacagcttatttaatcagcgctccaccataaacatgctattaggaggctcaagattgctttaggttatgggtatttcttcactcacccccaactggtatagcttaaagagagagaaactgtaatcaaatttcatgaagctaaaaccggatccagagaccaaacccatatcaagattagactttttttccctgagattctagtggaaaaattttcattattttgggctttaactttagaaacatagtatctcagtaagcagataaccagatcacatttaaaaattttcattttaccttgaagctctactggacttgacagatcacattttgagagtgaattcatttaaacaataaacctctacattatacttattaaatatatatggcatttaaaaacatcactgtcagcatacatactagatgttgtgatttgaagcttataaaaagtagattttcaatgatgtttgatttgagaaaaaatttttgagacaaggtctcgctgttgcctaggctgtggtgcagtggtgtgatcacagttcactgcagcctcaacctcctgggctcaagtgatcttcccacctcagccccaccccaagtagctgggatcacagttgtgtgccaccatatctggcaaattttttgaagattttctgtggcgatggggtttaactgtgttgcccaggctggtcttgaactcctggcctcaagtgatcctcccgccttggcctcccaaaatgctgggattacaggtgtgagccaccagctgagaaatgttgaatttttaagtttttatttaagaaataaacattgtaaaacatcattataaaacccccaactattgcaagttctagagaaatttaaaactagaacagaaatttaggggactagaaagagcagccaatggcacaagtctttacaattaattaaaaaaataaatcattctgaagatactgcatttgctctctcacaagcagcctcctgaggtaggtaaccttgtttactgatggggaacaaggcagtgttctttaccaaatctcagggcgggtagcctgcaagcctacagtgtggatgttggccacttgtgtcacttcttgggacggggcttagggacctgacttacttaggaacataaattttggggttggaggaagcagcagtgctctactgcggcacgacagacaccctgttaaggcaacactgggatccagctcaggaaaagcattactttcaaattgtgcaagccaatgcacagaaaagtggtcctcaaacttggggaacgtagaatcacttggggagctttaaaaaggtcctgatgtctgggacctacttcccaggttctgactgcattgatctgaggtgtggctcttcaagtaactgatgtgcagtcaagcgcgaggaccactggcacacaatgtttaaattctaaatatattttacttcctagtgtattgctactgacaaaacgtagttttctggactcatcagaatgttaggctcataccttctggcaataaattaaggtagttaaaagtaactgctgaacctaaaatgaaggcagcagcaattagatataaaaaaatcttaagatcagcctgcaaattgtaaactagtttacaaagcaggctatacaatgaggaataattcgagcttgtagaaatccatggtttccaccagatacaggtattccggatctagaattatctttctatttgcaggatttccgaagagaccgttaagcatctacgcgccccttcctggatcccatgcttcttggggcaggaaatttcttttggtccgtcgctttcgtcgtgaaatacacaactaattttcctttcatgttataaggcaccatatttatgattttgttaactgaagaaaaaacccgagataaaccatcttaagtacttttaaaagtccagtggctgaattcggtgtttaatctgatacccttctggattcgctgacactggagagaataatttccaagtcttagtatagccaaaacaaaaaactaccgtcgctaagctacatctaccactggattttaaaatgacaaaacagcctgagaaaaatcacaagagcagctaactcgaagaaaaatcctttttctttactcagccgaacctaagaccacagttacttcgaaagcaacttctaataaccgtctcacatcctgtcaccagttcaatgacaaaatctcagttttcagagcgtgtgccaagtccagcacaaaaagctgacatcgaggagctcccaacgctgctgtcgcctccgctggcagcagccgctcccggattagactcgcaggctgttagggcagggccttcgccacgggcttccgcacagcggcgtgcagtcctcagctcggccggcgcggtctccgacggcgctggctccgcgtacttccccagcggcgagggcgcgaggtcctcacacgggcagcaccttggcgaggccggcgccgcggcccaggcgacccagtgcgaggcgcagcgcggtgccgccgccccagggcagcagcccaaccagcgcggccagcagcgcggccacctgcgcgcccgcgcccagcaccgtgagcagcgtgctgcgaaggcccagcgcggcgaacagcgtggcgcccagcgctgccatgtagagcagcgcgggccgggacggcgcttcttcgcagcgcagcaggcgtccgcacgccgcgccgccccgcagcagcgcgcttcccgccaacgccagcgccgagcccagtgaccagagcagcgcgaacttgcgcgcgcgcagcagcaacaccggtgcgtagagcgcggctaggccgaaacacagtgcagccagcagcaggcacccgccgcccgccgccagccgctgcccgcgcgtcacgctcgggaggcacgtcaggccggccgctgccgactccgcagggctccgcgcccacgtccagcgcaagcccgcgcggcccagccactcctccgccggccggtccccgggctcctccgccttctccgcggcgagcagcggctccgcggccgccgggccgccagctttcccctgcgccaggtactcctgcagctggcggtggaggtccgccatcttggacaaggcggtggcagaaaggaaaagctgcggctcacttccggccctccgctgaagcggttcggtcttcgggcggcaattggtcggcgacggcgaaaggggcagggcctgcggcgctcgcggaagtgccgcggtgcctgctctgcggacttttgtggtgtccccaagtaccgtggtcgcaggtgctgcctgtccgcttgcagtcgccctcccagcgcctgaccctcttccttgttcggagtaggcgcccttgcggtctggctaagtcctgccagcattaatagttggaaggcaggggtgggtgtggttctaaaggggcacaagaagtgacccttttgctgacggaaatgtcttatggcctcactgcgtctaccgtggcggtgatattgtgctagttttgcaacatggaggaatgggtaaagggtacacagaatctctcttgtttcttacaactgaacacaaacagtgatctcaaaataaaaatttaatttttaaaaaagttca

SEQ ID NO: 199761 - DNA, 3574 bp, Homo sapiens
  Payload ID: 19413
  Gene Name: WD repeat domain 33
  Uniprot ID: Q9C0J8
  ENST ID: ENST00000393006
  CDS Start-End: 184-957
agagcgtgcgttcggtggcccataggggaagatggcggctgctcctttggaggagcgggattgagaggatcggggtggggagaccaaacaagagagacatttctggctctgaaggcgaacgcttcgctggccatttaggagctctgctcaaagccagacgtatcctagaaggaaaacatcaccatggctacagaaattggttctcctcctcgttttttccatatgccaaggttccagcaccaggcacctcgacagctgttttataagcgacctgattttgcacaacagcaagcaatgcaacagcttacttttgatggaaaacgaatgagaaaagctgtgaaccgaaaaaccatagactacaatccatctgtaattaagtatttggagaacagaatatggcaaagagaccagagagatatgcgggcaattcagcctgatgcaggttattacaatgatctggtcccacctataggaatgttgaataatcctatgaatgcagtaacaacaaaatttgttcggacatcaacaaataaagtaaagtgtcctgtatttgttgttaggtggactccagaaggaagacgcttggtcactggagcttctagtggggagtttaccctgtggaatggactcactttcaattttgaaacaatattacaggctcacgacagcccagtgagggccatgacgtggtcacataatgacatgtggatgttgacagcagaccacggaggatatgtgaaatattggcagtcgaacatgaacaacgtcaagatgttccaggcacataaggaggcgattagagaggccagtttctcacccacggataataaatttgctacatgctctgatgacggcactgttagaatctgggactttcttcgttgccatgaggaaagaattctccgagatacatgttttcatcactgccgttgttacttcctttctgtcaagaggtgaataacagtaggtggacaaagtttagggagccacatttaccaacttctgtgaatatacccaagaagattctggcaaaacatagattcaaattacagttgatgctgtggatggctatgggttaactactcttctactttgacacggattatttgttgcttttatgtttctaaattctcaattaaaaagaagtgtatccttaatctggccaactgaaagtgaacttgttcattcacctctaccttgctttcaaaaggactgcttaccatggaagtgctccagaagaatcatttgaaacatcttttgttttccttcttggttctgcgttttcttccttaccaggggcttcagtcatggcttctctttattcttggcctgggttgtctgctggcactaatacatctattattaacgtagtgtaggtactggcctttctaatagtcttggtatttagtgccagactcccatcaatcttttgaatgtcttttctttttctttttgcacttttctagcttttcaagtgatgactatatactgcttttcttgactgtatatattgttactgaattgtgaatatctgcagaaatgtttactagagaacctgtgactgttgaataacatgtgcccgaacatacacacacacatatgtacacacacacctcagagtactctttcttacagcggactttgctgctgctttctgcatgtgtgggacactggtatctcccgtctcagacaaatggctgatgttctctatgatattggtgttaatatcaaagaattgaatgaatacaacagaattgaggttgaaaaatatttgattgccacattcctttaagcatctttgatgaatactctgcaaagtagcctttaaaaaaatgtaaattttttaaaaagtccacagaggagaatttgctggttagcacaaaacatactgcaaaattgcttctttctggttattataactgaagaatatagaagattgacacacattttatacaccctcaggcagtgttttggaataatattgtaccttttcaaattgttatcaattaactgtttttctccatttcataattctcaagatttttctaaatacagcctttaaatttgactcaaatggaaattgtgcactttcctgtttatacccttccccacgttattgtaaaagagtttaacagcagcctgatatgtaagtttcagcaaaacttatacctgtatatgtttttatttgactcaaaaattagatattttaccatatagtcataagaatttgctcactttgatgccagaagtacttaagaagttacacggcactaattttatgagttgtatgcctaatttcaatttctaacctatttgacagtttcttttaggtcagcctttgttggtcttccatgtaaatacaagttggtacaaatcaatagaaaccattttacctacataggcaaagtaaatgtgtgacttagagactgccagatttatggtgcatctacctttttatccatttgagcttgcttttttatgtttgtgtattggttgctcctgacactatacatttcaaaattttttataacttgaaaaacacttctgtgctaccactcagttctgatcaaatccttacattttgcaacactcatttctgaattttcagtaaagaaatacacattacaaattaaaggttaaaggcccctttacatgcccttccccagtctcctcttcctcccccggaagtgtccattctgctgaattcaggttcatcattgccagacaaatgtagtaagctagtgtttcacatttccaaaatcagccttctggcagacttggaagtactcttgagaaaagaagactcgtgaccaaattctcccacagatttgtaataatgtacatattgaaaggactgaaggctctcagactgggaaagaaacttacccattttaaaattcagcattgctcaacttacctgactgccggaccccttcacccatgattctatgcactgtattgttggaacatacattgtgaaaacactgccctgcctaggcataccccctttccagaattaactttccatttaattctatagtttttcactgatgtaactttctagactggacaacaaagatgactaatagtaatcactccaagttgatgttgactgttgggttgtggtgaaatcattttgcattaaaggaaggtaaaatactaataaattgcatattccttgaccagagcacagattacttatgcttcttaattttttaaaatcttaaatcctctgtccaactggagtatctggctatgggccatgggtactcatataccctttgtcttaaactgatctgttacattttatgttcttgtggctagaagtagcctgagtttgctgttaatgtttaacacattttcttgagtaacagttctgttaatattgtacaagatggtacttgaattctttgtttgccttttttcttcctgtattagaaaatcttggtgctttttataagttttgtataaaagaattttttttaagatttgttcataaaatggtctgatccaggaaaaataaaatgggaacatggacaccatttctgaccttcaaataaaacttattatgtat

SEQ ID NO: 199762 - DNA, 583 bp, Homo sapiens
  Payload ID: 19413
  Gene Name: WD repeat domain 33
  ENST ID: ENST00000408998
  CDS Start-End: 229-583
attttcgggctcggccgttgcgtgctttgggggcctggacgggcgcctgggcacaggttggaggaactgggagaatcgacctcggggcggctgttcgaggcaggttcgagacttatgggagggggctggaggctggaggccaaccgggaaaagcggccatggttagaactaaggccctgactgggagcggtggcgacgagaagactatcctagaaggaaaacatcaccatggctacagaaattggttctcctcctcgttttttccatatgccaaggttccagcaccaggcacctcgacagctgttttataagcgacctgattttgcacaacagcaagcaatgcaacagcttacttttgatggaaaacgaatgagaaaagctgtgaaccgaaaaaccatagactacaatccatctgtaattaagtatttggagaacagaatatggcaaagagaccagagagatatgcgggcaattcagcctgatgcaggttattacaatgatctggtcccacctataggaatgttgaataatcctatgaatgcagtaacaacaaaatttgttcggacatcaacaaataaagtaa

SEQ ID NO: 199763 - DNA, 3104 bp, Homo sapiens
  Payload ID: 19413
  Gene Name: WD repeat domain 33
  Uniprot ID: Q9C0J8
  ENST ID: ENST00000409658
  CDS Start-End: 184-1164
agagcgtgcgttcggtggcccataggggaagatggcggctgctcctttggaggagcgggattgagaggatcggggtggggagaccaaacaagagagacatttctggctctgaaggcgaacgcttcgctggccatttaggagctctgctcaaagccagacgtatcctagaaggaaaacatcaccatggctacagaaattggttctcctcctcgttttttccatatgccaaggttccagcaccaggcacctcgacagctgttttataagcgacctgattttgcacaacagcaagcaatgcaacagcttacttttgatggaaaacgaatgagaaaagctgtgaaccgaaaaaccatagactacaatccatctgtaattaagtatttggagaacagaatatggcaaagagaccagagagatatgcgggcaattcagcctgatgcaggttattacaatgatctggtcccacctataggaatgttgaataatcctatgaatgcagtaacaacaaaatttgttcggacatcaacaaataaagtaaagtgtcctgtatttgttgttaggtggactccagaaggaagacgcttggtcactggagcttctagtggggagtttaccctgtggaatggactcactttcaattttgaaacaatattacaggctcacgacagcccagtgagggccatgacgtggtcacataatgacatgtggatgttgacagcagaccacggaggatatgtgaaatattggcagtcgaacatgaacaacgtcaagatgttccaggcacataaggaggcgattagagaggccaggtttatacacaatataccattttctgtagtccctattgtcatggttaaattattctctaagtgtattctgggtgcagagatgcatgggctctgtcagtttctgggaaactttctgcaccctataaacacaatatttttctttgttttcacacattcaccattttgctggcacctttctgaagtagtgttgtcccggtatcagcctttgcaatatgttagagatgtactgtctgccgcattttgcactggttttctcttttcatttatgattaataatgtgtatacgttattcctttttattatctactgtgtaagacaagaatatttcattccaaataaagaattcagtctttaattatgcaactgaataaaatctaaagcctacagaaaacaacttcagaattcacacaaagtggaaaaaggcttaagtgaagacctggttggcttggttatgccacgacttccaaaggaaagtataggactaaaaccctcacagataactggatgtggcaaacattaacggagtaatgaatgggttcttcaagctttgcagctgtaagcagatcattgtcaagaagactctaggacttttcttctgattcactgttgataacatcacttatgcaaatgtatacaataagtggagtttaaaatattttcagtgagttgtatatttttacacatcagtgaggtatgtatagtaaaactgggggaaaaagttccaaatacaagcctgaagaattgctgcagcctcagaataaagctaagcagcattctttaaggttgtgccacccatgtgtgggaggaggttgacatctttatggaaacatcatccactgtagtcatttgttcatactttcagaatcttaacagaaattgttggatgaacatgcttctgctttgtagattttgccttagtgtcatgcccatacattgagtttacacagctggtccttcataggattccaaagttcaagggagtttttagagttagttgagaaacttgatgatctttcactgctgggaaaaactgactccttcttgcagcagattctttggctttacacacaagtctgaatgtccttattttaaagttttcctcaaaggtgcaacattcatggaatagcttgccaggaagatgtgaaacttttctacagacctttgaaatggatgagaaacattgtatgtagggatgtttagcaatcagtcttttaatagacagcccacattgtttcagcttatttcatgaagtgtctgaggcagaagctgatgataattttgggagcagtattcgtgtgtgatttaaaagactgcaggaatactgcaaaaatagaatccatttattttcaccacttaaggcagcttcatgtgatttcctcgtatcatagaaaatagagaaggaacatggatagcattagcactaataatacacacttgaagttctcagaatactgatgattgaaaactcaaacaactgctctgttgaagtcttcttttgatgagatgcctatgttagctgacgacattcactttaagggcttcttcactggattcttccctctcctgtttataatgcagcacagtgtttttatttttccctgtctgagaagcacagattatctgttaaatgctgacttctttcccctgctgtgtgtcttcatgtaacagtttctcacccacggataataaatttgctacatgctctgatgacggcactgttagaatctgggactttcttcgttgccatgaggaaagaattctccgaggtacgtgtactaacagtactgattggaatatttaaatagggaagacatttgtggttaaatcatcacaaaaccacaatactggcttacacctccattcaattttttttacatatacacaccgtctcaggctcttcaaaaaaacccagcactttctctgactcacagtcattttgtaggtttttactaccagtgttatctttgaatttttcagctgtaaattaaatacaagagtgcctcccccttacttgcttatctgtatgcatcttttagggctgtattccttttccttccttgtagccagggtacttgttcccaacatattgacactgtggtttgatttagatagccgtcattctcctggcagtccttttacaatatgaattaaccgacaagatagaggtatcaaagctacacttcttagtgttactatttttgaaagcagttggtttttcagtacaccacatttgtactacatggccggcttgttactaagttcgggtggcattgctgcttgtttacttttgttgat

SEQ ID NO: 199764 - DNA, 822 bp, Homo sapiens
  Payload ID: 19413
  Gene Name: WD repeat domain 33
  ENST ID: ENST00000436787
  CDS Start-End: 207-822
agtgcgtgatgaccccagagcgtgcgttcggtggcccataggggaagatggcggctgctcctttggaggagcgggattgagaggatcggggtggggagaccaaacaagagagacatttctggctctgaaggcgaacgcttcgctggccatttaggagctctgctcaaagccagacgaacagaatatggcaaagagaccagagagatatgcgggcaattcagcctgatgcaggttattacaatgatctggtcccacctataggaatgttgaataatcctatgaatgcagtaacaacaaaatttgttcggacatcaacaaataaagtaaagtgtcctgtatttgttgttaggtggactccagaaggaagacgcttggtcactggagcttctagtggggagtttaccctgtggaatggactcactttcaattttgaaacaatattacaggctcacgacagcccagtgagggccatgacgtggtcacataatgacatgtggatgttgacagcagaccacggaggatatgtgaaatattggcagtcgaacatgaacaacgtcaagatgttccaggcacataaggaggcgattagagaggccagtttctcacccacggataataaatttgctacatgctctgatgacggcactgttagaatctgggactttcttcgttgccatgaggaaagaattctccgagggcatggtgctgatgtgaaatgtgtagactggcatccaaccaaagggttagttgtttcaggaagtaaagatagtcaacagccaatcaagttctgggatcccaagactgggcagagtcttgcaacac

SEQ ID NO: 199765 - DNA, 1755 bp, Homo sapiens
  Payload ID: 19414
  Gene Name: WD repeat domain 34
  Uniprot ID: Q96EX3
  ENST ID: ENST00000372715
  CDS Start-End: 62-1672
ggcggcgtaggggcggaggtcgcgcctgagtgcgtccgcacgagagggcggaaccgtctccatggcaacccgcgcgcagccggggccactcagccaggcgggaagcgctggtgttgcggcgctggcgacagtcggggttgcgagcggcccggggccggggcggccagggccgctgcaggacgagaccctgggtgtggcgtccgtgccctcgcagtggagggccgtccagggcatccgctgggagacgaaaagttgccagacggccagcattgccactgccagtgcatccgcccaggccaggaatcatgtggacgcccaggtgcagacggaggcccccgtgcctgtcagcgtgcagcccccgtcccagtatgacatacccaggctcgcagcctttcttcggagagtggaggccatggtcatccgagagctgaacaagaattggcagagccacgcgtttgatggcttcgaggtgaactggaccgagcagcagcagatggtgtcttgtctgtataccctgggctacccgccagcccaagcgcagggtctgcatgtgaccagcatctcctggaactccactggctctgtggtggcctgtgcctacggccggctggaccatggggactggagcacgcttaagtccttcgtgtgtgcctggaacctggaccggcgagacctgcgtccccagcagccgtcggccgtggtggaggtccccagcgctgtcctgtgtctggccttccaccccacgcagccctcccacgtcgcaggagggctgtacagtggtgaggtgttggtgtgggacctgagccgtcttgaggacccgctgctgtggcgcacaggcctgacggatgacacccacacagaccctgtgtcccaggtggtgtggctgcccgagcctgggcacagccaccgcttccaggtgctgagtgtggccaccgacgggaaggtgctactctggcagggcatcggggtaggccagctgcagctcacagagggcttcgccctggtcatgcagcagctgccacggagcaccaagctcaagaagcatccccgcggggagaccgaggtgggcgccacggcagtggccttctccagctttgaccctaggctgttcattctgggcacggaaggcggcttcccgctcaagtgttccctggcagctggagaggcagccctcacgcggatgcccagctccgtgcccctgcgggccccagcacagtttaccttctccccccacggcggtcccatctactctgtgagctgttcccccttccacaggaatctcttcctgagcgctgggactgacgggcatgtccacctgtactccatgctgcaggcccctcccttgacttcgctgcagctctccctcaagtatctgtttgctgtgcgctggtccccagtgcggcccttggtttttgcagctgcctctgggaaaggtgacgtgcagctgtttgatctccagaaaagctcccagaaacccacagttttgatcaagcaaacccaggatgaaagccctgtctactgtctggagttcaacagccagcagactcagctcttggctgcgggcgatgcccagggcacagtgaaggtgtggcagctgagcacagagttcacggaacaagggccccgggaagctgaggacctggactgcctggcagcagaggtggcggcctgaggggtcccgggaggcgggtgcaagccttcgctgtgccgagccttgtgtttctgacgcaagccaaatgaagaaaagcaaagctt

SEQ ID NO: 199766 - DNA, 1039 bp, Homo sapiens
  Payload ID: 19414
  Gene Name: WD repeat domain 34
  ENST ID: ENST00000451652
  CDS Start-End: 1-819
ctcagccaggcgggaagcgctggtgttgcggcgctggcgacagtcggggttgcgagcggcccggggccggggcggccagggccgctgcaggacgagaccctgggtgtggcgtccgtgccctcgcagtggagggccgtccagggcatccgctgggagacgaaaagttgccagacggccagcattgccactgccagtgcatccgcccaggccaggaatcatgtggacgcccaggtgcagacggaggcccccgtgcctgtcagcgtgcagcccccgtcccagtatgacatacccaggctcgcagcctttcttcggagagtggaggccatggtcatccgagagctgaacaagaattggcagagccacgcgtttgatggcttcgaggtgaactggaccgagcagcagcagatggtgtcttgtctgtataccctgggctacccgccagcccaagcgcagggtctgcatgtgaccagcatctcctggaactccactggctctgtggtggcctgtgcctacggccggctggaccatggggactggagcacgcttaagtccttcgtgtgtgcctggaacctggaccggcgagacctgcgtccccagcagccgtcggccgtggtggaggtccccagcgctgtcctgtgtctggccttccaccccacgcagccctcccacgtcgcaggtgagctgcctgctgtgtccgcctcctctcctctcaggactcagcttcccgccctgcagagggcacaagggagctttccatgggccctttggcccggagacaggaaggcgggccctgaccctctcagtctggagcccaggtgaaggtctgcagtgagccctgaggggtggaactcgggggaggagtctggaagggggccagggtcggggccaggacagggggctgtggagaggccagaagaggcaggtgcccttgggaagccgtcagtggtagggggcaggcaacgctggagggagctgccaggtgcagggcaggggtgtccggcaaagctccctggggtacaacaggggagctgggggctag

SEQ ID NO: 199767 - DNA, 745 bp, Homo sapiens
  Payload ID: 19414
  Gene Name: WD repeat domain 34
  ENST ID: ENST00000419989
  CDS Start-End: 1-420
gctggtgttgcggcgctggcgacagtcggggttgcgagcggcccggggccggggcggccagggccgctgcaggacgagaccctgggtgtggcgtccgtgccctcgcagtggagggccgtccagggcatccgctgggagacgaaaagttgccagacggccagcattgccactgccagtgcatccgcccaggccaggaatcatgtggacgcccaggtgcagacggaggcccccgtgcctgtcagcgtgcagcccccgtcccagtatgacatacccaggctcgcagcctttcttcggagagtggaggccatggtcatccgagagctgaacaagaattggcagagccacgcgtttgatggcttcgaggtgaactggaccgagcagcagcagatggctggaccatggggactggagcacgcttaagtccttcgtgtgtgcctggaacctggaccggcgagacctgcgtccccagcagccgtcggccgtggtggaggtccccagcgctgtcctgtgtctggccttccaccccacgcagccctcccacgtcgcaggtgagctgcctgctgtgtccgcctcctctcctctcaggactcagcttcccgccctgcagagggcacaagggagctttccatgggccctttggcccggagacaggaaggcgggccctgaccctctcagtctggagcccaggtgaaggtctgcagtgagccctgaggggtggaactcgggggaggagtctggaaggggg

SEQ ID NO: 199768 - DNA, 6918 bp, Homo sapiens
  Payload ID: 19415
  Gene Name: WD repeat domain 35
  Uniprot ID: Q9P2L0
  ENST ID: ENST00000281405
  CDS Start-End: 108-3620
agggcgacgggagctttccggagctgctggtactcccgattggagacgtagaaccgttacttgtcgagggccttagcggccgccgtgaccctctcggggatcccacgatgttcttctacctgagcaagaaaatttccattcccaataacgtgaagctgcagtgtgtatcctggaacaaggaacaagggttcatagcatgcggtggtgaagatggattactgaaagttttgaaattagagacgcagacagatgatgcaaaattgaggggccttgcagcccccagtaacctttctatgaatcagactcttgaaggtcatagtggttctgttcaagttgtaacatggaatgagcagtatcagaagttgactaccagtgatgaaaacgggcttatcattgtgtggatgttatataaaggctcttggattgaggagatgatcaacaatcgaaataaatcagttgttcgcagtatgagctggaatgctgacggacagaagatctgcattgtatatgaagatggggctgtgatagttggttcagtggatggcaatcgtatttggggaaaagacctgaagggtatacagctatcccatgtaacatggtctgcggacagtaaagtcttactttttggaatggcaaatggggaaatacacatttacgataatcaaggaaattttatgataaaaatgaaactgagttgtttggtgaatgtcactggagctatcagcattgctggaattcattggtaccatggcacagaaggctacgtggagcctgattgcccttgccttgctgtttgctttgataatggaagatgccaaataatgagacatgagaatgaccaaaatcccgttttgattgacactggcatgtacgtagtaggcatccagtggaaccacatgggcagcgtgttagctgtggcaggcttccagaaggcagccatgcaggacaaagatgtgaacattgtgcagttttacactccgtttggtgagcatctgggtactttgaaagttcctggaaaggaaatatctgcactatcttgggaaggaggtggactgaaaattgcactagctgttgattcctttatatattttgcaaacattcgacctaattataagtggggttattgctcaaacactgtagtttatgcatataccagacctgatcgtccagaatattgtgttgtcttctgggatacgaaaaacaatgaaaaatatgttaaatatgtgaagggtctcatttctattactacctgtggagatttctgcattttggctacaaaagctgatgaaaatcatcctcagtttgtactagttctttgtaattctattggtacacccttggatcccaaatacattgatattgtaccattgtttgttgcaatgaccaaaacccatgtgatagcagcctcgaaagaagcattttatacctggcaatatcgtgtggcaaagaagctcacagcattggaaattaatcagatcacacggtctcgaaaagaagggagagaaagaatttatcatgttgatgataccccttctggatcaatggatggtgtgcttgattatagtaaaaccattcaaggcacaagggatccaatttgtgccataactgcatcagataagatattgattgtgggtcgtgaatctggcaccattcagagatacagtctacctaatgttggtttgattcaaaaatattcccttaattgtcgagcctaccagttatccttgaattgcaactctagccgtcttgctatcatagacatctcaggagttctgactttctttgacttggatgctcgagtaacggacagtacgggacagcaagtagttggagagttgttaaaattggaacgaagagatgtctgggatatgaagtgggccaaagataatcctgatttgtttgcaatgatggagaagacaagaatgtatgttttcagaaacttggatcctgaggaacccattcagacctctggatatatttgtaattttgaggatttagaaattaaatctgttcttttggatgagatattaaaggatccagaacatccaaacaaggattacctaattaactttgagattcggtctctgcgagatagccgagcactgattgagaaggttggaattaaagatgcatctcagttcatagaggacaatccacacccccgactttggcgcctactggctgaagcagctcttcagaaactggatctatacactgcagagcaagcatttgtgcgctgcaaagattaccaaggcattaagtttgtgaagcgcttgggcaaactactgagtgagtcaatgaaacaggctgaagttgttggctacttcggcaggtttgaagaggctgaaagaacgtatctcgagatggacagaagggatcttgctattggcctccggctgaaattgggggattggtttagagtactccagctcctgaaaactggatctggtgatgcagatgacagtctcctggaacaagccaacaatgccattggagactactttgctgatcgacaaaagtggttgaatgctgtacaatattatgtacaaggacggaaccaggaacgcttagctgaatgttactatatgttagaggattatgaagggttagagaaccttgccatttcacttccagaaaaccacaagttacttccagaaatagcacaaatgtttgtcagagttggaatgtgtgaacaagcagtgactgcatttttgaaatgtagtcaaccaaaggcagcagtagatacctgcgtacatctcaaccaatggaacaaagctgttgaattggctaaaaatcatagtatgaaagaaattggatctctgttagctaggtatgcatctcatttactggaaaagaataaaactcttgatgccatagaactctatcggaaagccaattacttttttgatgcagctaaactgatgtttaagattgcagatgaagaggcaaagaaaggaagtaaacctttacgtgtcaagaagctctatgtactgtcagccttacttatagagcaataccatgaacagatgaagaatgcccagcgaggaaaagttaaaggaaaaagttcagaggccacttctgccttggctggtttgctggaagaagaagttctgtctacaacagatcgtttcacagataatgcatggagaggggcagaggcttaccacttctttatacttgcacagaggcagctctatgagggatgtgtggacactgcactgaagacagctcttcacctgaaagactatgaagacatcatccctcctgtggagatctactctctgctagcactctgcgcatgcgccagcagagcctttgggacttgttcaaaagctttcattaaacttaaatctttagagaccctcagttcagaacagaaacagcagtatgaagaccttgctttagaaatcttcaccaaacatacttcaaaagataacagaaaacctgaattggacagccttatggaaggtggagaagggaaactgccaacatgcgttgccacaggaagcccaatcactgagtatcaattctggatgtgcagtgtatgcaaacacggtgtccttgctcaggaaataagccactacagcttctgccccttatgccatagtccagtgggataaaggaatgataaactgtatataactgtaaaatatatgtagcatatatacatggctatatgctgtatatgtaataaggtttatttctgtgagttttgtatgaaaatcagcctcattatttatagttgaatttttgcacaaaatatatgttaataaaataatttttatggcaatacaactgtgaaataataaggccgattttcatataaatgtatgaaaatcaaccatgttttctctcaccctctctcttttgtttatcttgtttttggttacatgataccatggaaatattccaaataaatttttttctcacagtgtcaaggtaactgaattcattaaaaaatcttgaagggagtagggagtgggggaagcatgggagtggggcaaagttgaatttagagaatttttataacccatgttacaaggaagttaaacaattgtaataatgaaatgagctttctctatagccatatttaattaaataagtgtcgaatgtcttctttattgtattttcagaagtgaggcgatggcattttaagacattttttacaatctgaattgtttctaatagccctattcttctattttaaaacctgtccttttagtctcatttaagagatggcatttggaatttacactttcatatgattgtgcagaaaacttgcctctatttataatgaagataacttaaacagaaatatccattttgtagttatagcttctgttgaaacattgtcactaagttggaccgtttatttacacaagtattgttgagggagtgattttttcttgatatgcgtctgttttcatttattattaatttgaaagataaacagttgtgatccataatggatcatttcttatgtcttttacatagctaataatgttctctgtttatttctcatgaattcccattttgtggctaaagaccagacctttgcactatttcatcaagattattttattgaggtttggcttacatatagtagaggcaatacatagagatacgcaactttgtttttgcagctacaatacactttctcaatctcatatgtttttgtcttgtagagacagagacaagttcagcatgttgcagattgggaatagtgagctatgagaagagatttagagcctagatgagcttaggatagagagtgggctcattggcctaaataaaaagagaagaccagaagtctttgaggtctctgtctctattcatgcgcctcgtggaaaattaccttggtacaatggtagcctctaaatagactgcctcgcaagctattccagaggtcatggaacagaaagccttataaaccaaataaaaattctcaaaatacattggtttattgaaccaatttgcaatacacagtgaggaacaaggagaaagcaatgatagattaacactgttagtgtaacgtgccagtggagtggaaagaccgcaacacctgaatcctgggttttgtaatgtttttatgtcctgactcacattctgtcacatacgctttcccctaatagtcgggttacaaaaaggaccagagtggccgcttgagccagatgactcaatcagatgaaatgtgcctgaggccaacgatgtacacttgctctatagaagggtgtcaggggcaagtacacttcaccacagcaatagcttgcctattagtctgctgagcagtcatgaattttattgtatttcttgggtaaggacaggccagaatgagtgtcaccagtgggtaattgaatcaacttctcacacatactgaaggctttatatgtctcatgcatacttagtgtatcatgaatatttggtatctttgtggcttttcatatttttagtgcttcatgaatatttggtatctcttgctcctttctatctgtggtcacacatacacgctctattaactttgcctaataagtctcctaggttactaacttacttacctaaatgtaacacaatgaattccagctttctcatttgttctataccagaatgggaaatttccccaaatcagaaaatcacatcctaacaaagaagtctgtctaagacagtacatctcctgttgaacttgcatctttccacaggactttctgtttttagggatgagactattctctgcttcatcaaggaaagagaaatgttcagggttgtagggatggcacacttattagttctgcctgtctgaaaggttcctgcaggacagtttggtcagagctgcaattcttagtccatggtctaatgcttgagtatctcttctttccctttcctgtctcaggaatcagctgagaattcattcgattgtcatgcctctagccccttactgtgatttgttggttgcactttcatttgctttagttctagaatcacctgttgactcctcagacttcacctaactttggaaactctcttttggaggcttctcatttccccctaattctgtgctgcctgagccctagaattttcccaccaacgaattattccaggtagatcctaagttgctggatctagttgatatttaaacaatatctagttgatatttctcattcagttggatccagaaaccagtatctctaaaaacaacctctcataccttgtggacctaattttgtgtgcgtgtgtgtgtgcgcgcatatgtatatagacaggcacatcttttttacttttgtaaaagcttatgcctctttggtatctatatctgtgaaagttttaatgatctgccataatgtcttggggacctttgtcttctgtgtaaatggtactagagaaaacacctatattatgagtcaatctagttggttttattcgacatgaaggaaatttccagataacaacactaacaaactctcccttgactagggggacaaagaaaagcaaaactgaccataaaaaacaattacctggtgagaagttgcataaacagaattaggtagtatattgaagacagcatcattaaacagttatgttgttctccttgcaaaaaacatgtactgacttcccgttgagtaatgccaagttgttttttttattataaaacttgcccttcattacatgtttcaaagtggtgtggtgggccaaaatattgaaatgatggaactgactgataaagctgtacaaataagcagtgtgcctaacaagcaacacagtaatgttgacatgcttaattcacaaatgctaatttcattataaattgttttgctaaaatacactttgaaactatttttctgtattccaagagctgagatcttagattttatgtagtattaagtgaaaaaatacgaaaataataaacattgaagaaaaaaataa

SEQ ID NO: 199769 - DNA, 6960 bp, Homo sapiens
  Payload ID: 19415
  Gene Name: WD repeat domain 35
  Uniprot ID: Q9P2L0
  ENST ID: ENST00000345530
  CDS Start-End: 117-3662
gcggttgccagggcgacgggagctttccggagctgctggtactcccgattggagacgtagaaccgttacttgtcgagggccttagcggccgccgtgaccctctcggggatcccacgatgttcttctacctgagcaagaaaatttccattcccaataacgtgaagctgcagtgtgtatcctggaacaaggaacaagggttcatagcatgcggtggtgaagatggattactgaaagttttgaaattagagacgcagacagatgatgcaaaattgaggggccttgcagcccccagtaacctttctatgaatcagactcttgaaggtcatagtggttctgttcaagttgtaacatggaatgagcagtatcagaagttgactaccagtgatgaaaacgggcttatcattgtgtggatgttatataaaggctcttggattgaggagatgatcaacaatcgaaataaatcagttgttcgcagtatgagctggaatgctgacggacagaagatctgcattgtatatgaagatggggctgtgatagttggttcagtggatggcaatcgtatttggggaaaagacctgaagggtatacagctatcccatgtaacatggtctgcggacagtaaagtcttactttttggaatggcaaatggggaaatacacatttacgataatcaaggaaattttatgataaaaatgaaactgagttgtttggtgaatgtcactggagctatcagcattgctggaattcattggtaccatggcacagaaggctacgtggagcctgattgcccttgccttgctgtttgctttgataatggaagatgccaaataatgagacatgagaatgaccaaaatcccgttttgattgacactggcatgtacgtagtaggcatccagtggaaccacatgggcagcgtgttagctgtggcaggcttccagaaggcagccatgcaggacaaagatgtgaacattgtgcagttttacactccgtttggtgagcatctgggtactttgaaagttcctggaaaggaaatatctgcactatcttgggaaggaggtggactgaaaattgcactagctgttgattcctttatatattttgcaaacattcgacctaattataagtggggttattgctcaaacactgtagtttatgcatataccagacctgatcgtccagaatattgtgttgtcttctgggatacgaaaaacaatgaaaaatatgttaaatatgtgaagggtctcatttctattactacctgtggagatttctgcattttggctacaaaagctgatgaaaatcatcctcaggaggagaacgagatggagacatttggtgcaacgtttgtactagttctttgtaattctattggtacacccttggatcccaaatacattgatattgtaccattgtttgttgcaatgaccaaaacccatgtgatagcagcctcgaaagaagcattttatacctggcaatatcgtgtggcaaagaagctcacagcattggaaattaatcagatcacacggtctcgaaaagaagggagagaaagaatttatcatgttgatgataccccttctggatcaatggatggtgtgcttgattatagtaaaaccattcaaggcacaagggatccaatttgtgccataactgcatcagataagatattgattgtgggtcgtgaatctggcaccattcagagatacagtctacctaatgttggtttgattcaaaaatattcccttaattgtcgagcctaccagttatccttgaattgcaactctagccgtcttgctatcatagacatctcaggagttctgactttctttgacttggatgctcgagtaacggacagtacgggacagcaagtagttggagagttgttaaaattggaacgaagagatgtctgggatatgaagtgggccaaagataatcctgatttgtttgcaatgatggagaagacaagaatgtatgttttcagaaacttggatcctgaggaacccattcagacctctggatatatttgtaattttgaggatttagaaattaaatctgttcttttggatgagatattaaaggatccagaacatccaaacaaggattacctaattaactttgagattcggtctctgcgagatagccgagcactgattgagaaggttggaattaaagatgcatctcagttcatagaggacaatccacacccccgactttggcgcctactggctgaagcagctcttcagaaactggatctatacactgcagagcaagcatttgtgcgctgcaaagattaccaaggcattaagtttgtgaagcgcttgggcaaactactgagtgagtcaatgaaacaggctgaagttgttggctacttcggcaggtttgaagaggctgaaagaacgtatctcgagatggacagaagggatcttgctattggcctccggctgaaattgggggattggtttagagtactccagctcctgaaaactggatctggtgatgcagatgacagtctcctggaacaagccaacaatgccattggagactactttgctgatcgacaaaagtggttgaatgctgtacaatattatgtacaaggacggaaccaggaacgcttagctgaatgttactatatgttagaggattatgaagggttagagaaccttgccatttcacttccagaaaaccacaagttacttccagaaatagcacaaatgtttgtcagagttggaatgtgtgaacaagcagtgactgcatttttgaaatgtagtcaaccaaaggcagcagtagatacctgcgtacatctcaaccaatggaacaaagctgttgaattggctaaaaatcatagtatgaaagaaattggatctctgttagctaggtatgcatctcatttactggaaaagaataaaactcttgatgccatagaactctatcggaaagccaattacttttttgatgcagctaaactgatgtttaagattgcagatgaagaggcaaagaaaggaagtaaacctttacgtgtcaagaagctctatgtactgtcagccttacttatagagcaataccatgaacagatgaagaatgcccagcgaggaaaagttaaaggaaaaagttcagaggccacttctgccttggctggtttgctggaagaagaagttctgtctacaacagatcgtttcacagataatgcatggagaggggcagaggcttaccacttctttatacttgcacagaggcagctctatgagggatgtgtggacactgcactgaagacagctcttcacctgaaagactatgaagacatcatccctcctgtggagatctactctctgctagcactctgcgcatgcgccagcagagcctttgggacttgttcaaaagctttcattaaacttaaatctttagagaccctcagttcagaacagaaacagcagtatgaagaccttgctttagaaatcttcaccaaacatacttcaaaagataacagaaaacctgaattggacagccttatggaaggtggagaagggaaactgccaacatgcgttgccacaggaagcccaatcactgagtatcaattctggatgtgcagtgtatgcaaacacggtgtccttgctcaggaaataagccactacagcttctgccccttatgccatagtccagtgggataaaggaatgataaactgtatataactgtaaaatatatgtagcatatatacatggctatatgctgtatatgtaataaggtttatttctgtgagttttgtatgaaaatcagcctcattatttatagttgaatttttgcacaaaatatatgttaataaaataatttttatggcaatacaactgtgaaataataaggccgattttcatataaatgtatgaaaatcaaccatgttttctctcaccctctctcttttgtttatcttgtttttggttacatgataccatggaaatattccaaataaatttttttctcacagtgtcaaggtaactgaattcattaaaaaatcttgaagggagtagggagtgggggaagcatgggagtggggcaaagttgaatttagagaatttttataacccatgttacaaggaagttaaacaattgtaataatgaaatgagctttctctatagccatatttaattaaataagtgtcgaatgtcttctttattgtattttcagaagtgaggcgatggcattttaagacattttttacaatctgaattgtttctaatagccctattcttctattttaaaacctgtccttttagtctcatttaagagatggcatttggaatttacactttcatatgattgtgcagaaaacttgcctctatttataatgaagataacttaaacagaaatatccattttgtagttatagcttctgttgaaacattgtcactaagttggaccgtttatttacacaagtattgttgagggagtgattttttcttgatatgcgtctgttttcatttattattaatttgaaagataaacagttgtgatccataatggatcatttcttatgtcttttacatagctaataatgttctctgtttatttctcatgaattcccattttgtggctaaagaccagacctttgcactatttcatcaagattattttattgaggtttggcttacatatagtagaggcaatacatagagatacgcaactttgtttttgcagctacaatacactttctcaatctcatatgtttttgtcttgtagagacagagacaagttcagcatgttgcagattgggaatagtgagctatgagaagagatttagagcctagatgagcttaggatagagagtgggctcattggcctaaataaaaagagaagaccagaagtctttgaggtctctgtctctattcatgcgcctcgtggaaaattaccttggtacaatggtagcctctaaatagactgcctcgcaagctattccagaggtcatggaacagaaagccttataaaccaaataaaaattctcaaaatacattggtttattgaaccaatttgcaatacacagtgaggaacaaggagaaagcaatgatagattaacactgttagtgtaacgtgccagtggagtggaaagaccgcaacacctgaatcctgggttttgtaatgtttttatgtcctgactcacattctgtcacatacgctttcccctaatagtcgggttacaaaaaggaccagagtggccgcttgagccagatgactcaatcagatgaaatgtgcctgaggccaacgatgtacacttgctctatagaagggtgtcaggggcaagtacacttcaccacagcaatagcttgcctattagtctgctgagcagtcatgaattttattgtatttcttgggtaaggacaggccagaatgagtgtcaccagtgggtaattgaatcaacttctcacacatactgaaggctttatatgtctcatgcatacttagtgtatcatgaatatttggtatctttgtggcttttcatatttttagtgcttcatgaatatttggtatctcttgctcctttctatctgtggtcacacatacacgctctattaactttgcctaataagtctcctaggttactaacttacttacctaaatgtaacacaatgaattccagctttctcatttgttctataccagaatgggaaatttccccaaatcagaaaatcacatcctaacaaagaagtctgtctaagacagtacatctcctgttgaacttgcatctttccacaggactttctgtttttagggatgagactattctctgcttcatcaaggaaagagaaatgttcagggttgtagggatggcacacttattagttctgcctgtctgaaaggttcctgcaggacagtttggtcagagctgcaattcttagtccatggtctaatgcttgagtatctcttctttccctttcctgtctcaggaatcagctgagaattcattcgattgtcatgcctctagccccttactgtgatttgttggttgcactttcatttgctttagttctagaatcacctgttgactcctcagacttcacctaactttggaaactctcttttggaggcttctcatttccccctaattctgtgctgcctgagccctagaattttcccaccaacgaattattccaggtagatcctaagttgctggatctagttgatatttaaacaatatctagttgatatttctcattcagttggatccagaaaccagtatctctaaaaacaacctctcataccttgtggacctaattttgtgtgcgtgtgtgtgtgcgcgcatatgtatatagacaggcacatcttttttacttttgtaaaagcttatgcctctttggtatctatatctgtgaaagttttaatgatctgccataatgtcttggggacctttgtcttctgtgtaaatggtactagagaaaacacctatattatgagtcaatctagttggttttattcgacatgaaggaaatttccagataacaacactaacaaactctcccttgactagggggacaaagaaaagcaaaactgaccataaaaaacaattacctggtgagaagttgcataaacagaattaggtagtatattgaagacagcatcattaaacagttatgttgttctccttgcaaaaaacatgtactgacttcccgttgagtaatgccaagttgttttttttattataaaacttgcccttcattacatgtttcaaagtggtgtggtgggccaaaatattgaaatgatggaactgactgataaagctgtacaaataagcagtgtgcctaacaagcaacacagtaatgttgacatgcttaattcacaaatgctaatttcattataaattgttttgctaaaatacactttgaaactatttttctgtattccaagagctgagatcttagattttatgtagtattaagtgaaaaaatacgaaaataataaacattgaagaaaaaaataa

SEQ ID NO: 199770 - DNA, 2788 bp, Homo sapiens
  Payload ID: 19415
  Gene Name: WD repeat domain 35
  ENST ID: ENST00000445063
  CDS Start-End: 1-752
agggtatacagctatcccatgtaacatggtctgcggacagtaaagtcttactttttggaatggcaaatggggaaatacacatttacgataatcaaggaaattttatgataaaaatgaaactgagttgtttggtgaatgtcactggagctatcagcattgctggaattcattggtaccatggcacagaaggctacgtggagcctgattgcccttgccttgctgtttgctttgataatggaagatgccaaataatgagacatgagaatgaccaaaatcccgttttgattgacactggcatgtacgtagtaggcatccagtggaaccacatgggcagcgtgttagctgtggcaggcttccagaaggcagccatgcaggacaaagatgtgaacattgtgcagttttacactccgtttggtgagcatctgggtactttgaaagttcctggaaaggaaatatctgcactatcttgggaaggaggtggactgaaaattgcactagctgttgattcctttatatattttgcaaacattcgacctaattataagtggggttattgctcaaacactgtagtttatgcatataccagacctgatcgtccagaatattgtgttgtcttctgggatacgaaaaacaatgaaaaatatgttaaatatgtgaagggtctcatttctattactacctgtggagatttctgcattttggctacaaaagctgatgaaaatcatcctcagtaccattgtttgttgcaatgaccaaaacccatgtgatagcagcctcgaaagaagcattttatacctggcaatatcgtgtggcaaagaagctcacagcattggaaattaatcagatcacacggtctcgaaaagaagggagagaaagaatttatcatgttgatgataccccttctggatcaatggatggtgtgcttgattatagtaaaaccattcaaggcacaagggatccaatttgtgccataactgcatcagataagatattgattgtgggtcgtgaatctggcaccattcagagatacagtctacctaatgttggtttgattcaaaaatattcccttaattgtcgagcctaccagttatccttgaattgcaactctagccgtcttgctatcatagacatctcaggagttctgactttctttgacttggatgctcgagtaacggacagtacgggacagcaagtagttggagagttgttaaaattggaacgaagagatgtctgggatatgaagtgggccaaagataatcctgatttgtttgcaatgatggagaagacaagaatgtatgttttcagaaacttggatcctgaggaacccattcagacctctggatatatttgtaattttgaggatttagaaattaaatctgttcttttggatgagatattaaaggatccagaacatccaaacaaggattacctaattaactttgagattcggtctctgcgagatagccgagcactgattgagaaggttggaattaaagatgcatctcagttcatagaggacaatccacacccccgactttggcgcctactggctgaagcagctcttcagaaactggatctatacactgcagagcaagcatttgtgcgctgcaaagattaccaaggcattaagtttgtgaagcgcttgggcaaactactgagtgagtcaatgaaacaggctgaagttgttggctacttcggcaggtttgaagaggctgaaagaacgtatctcgagatggacagaagggatcttgctattggcctccggctgaaattgggggattggtttagagtactccagctcctgaaaactggatctggtgatgcagatgacagtctcctggaacaagccaacaatgccattggagactactttgctgatcgacaaaagtggttgaatgctgtacaatattatgtacaaggacggaaccaggaacgcttagctgaatgttactatatgttagaggattatgaagggttagagaaccttgccatttcacttccagaaaaccacaagttacttccaattgcagatgaagaggcaaagaaaggaagtaaacctttacgtgtcaagaagctctatgtactgtcagccttacttatagagcaataccatgaacagatgaagaatgcccagcgaggaaaagttaaaggaaaaagttcagaggccacttctgccttggctggtttgctggaagaagaagttctgtctacaacagatcgtttcacagataatgcatggagaggggcagaggcttaccacttctttatacttgcacagaggcagctctatgagggatgtgtggacactgcactgaagacagtggagaagggaaactgccaacatgcgttgccacaggaagcccaatcactgagtatcaattctggatgtgcagtgtatgcaaacacggtgtccttgctcaggaaataagccactacagcttctgccccttatgccatagtccagtgggataaaggaatgataaactgtatataactgtaaaatatatgtagcatatatacatggctatatgctgtatatgtaataaggtttatttctgtgagttttgtatgaaaatcagcctcattatttatagttgaatttttgcacaaaatatatgttaataaaataatttttatggcaatacaactgtgaaataataaggccgattttcatataaatgtatgaaaatcaaccatgttttctctcaccctctctcttttgtttatcttgtttttggttacatgataccatggaaatattccaaataaatttttttctcacagtgtc

SEQ ID NO: 199771 - DNA, 3483 bp, Homo sapiens
  Payload ID: 19415
  Gene Name: WD repeat domain 35
  ENST ID: ENST00000414212
  CDS Start-End: 34-2655
agcggccgccgtgaccctctcggggatcccacgatgttcttctacctgagcaagaaaatttccattcccaataacgtgaagctgcagtgtgtatcctggaacaaggaacaagggttcatagcatgcggtggtgaagatggattactgaaagttttgaaattagagacgcagacagatgatgcaaaattgaggggccttgcagcccccagtaacctttctatgaatcagactcttgaaggtcatagtggttctgttcaagttgtaacatggaatgagcagtatcagaagttgactaccagtgatgaaaacgggcttatcattgtgtggatgttatataaaggctcttggattgaggagatgatcaacaatcgaaataaatcagttgttcgcagtatgagctggaatgctgacggacagaagatctgcattgtatatgaagatggggctgtgatagttggttcagtggatggcaatcgtatttggggaaaagacctgaagggtatacagctatcccatgtaacatggtctgcggacagtaaagtcttactttttggaatggcaaatggggaaatacacatttacgataatcaaggaaattttatgataaaaatgaaactgagttgtttggtgaatgtcactggagctatcagcattgctggaattcattggtaccatggcacagaaggctacgtggagcctgattgcccttgccttgctgtttgctttgataatggaagatgccaaataatgagacatgagaatgaccaaaatcccgttttgattgacactggcatgtacgtagtaggcatccagtggaaccacatgggcagcgtgttagctgtggcaggcttccagaaggcagccatgcaggacaaagatgtgaacattgtgcagttttacactccgtttggtgagcatctgggtactttgaaagttcctggaaaggaaatatctgcactatcttgggaaggaggtggactgaaaattgcactagctgttgattcctttatatattttgcaaacattcgacctaattataagtggggttattgctcaaacactgtagtttatgcatataccagacctgatcgtccagaatattgtgttgtcttctgggatacgaaaaacaatgaaaaatatgttaaatatgtgaagggtctcatttctattactacctgtggagatttctgcattttggctacaaaagctgatgaaaatcatcctcaggaggagaacgagatggagacatttggtgcaacgtttgtactagttctttgtaattctattggtacacccttggatcccaaatacattgatattgtaccattgtttgttgcaatgaccaaaacccatgtgatagcagcctcgaaagaagcattttatacctggcaatatcgtgtggcaaagaagctcacagcattggaaattaatcagatcacacggtctcgaaaagaagggagagaaagaatttatcatgttgatgataccccttctggatcaatggatggtgtgcttgattatagtaaaaccattcaaggcacaagggatccaatttgtgccataactgcatcagataagatattgattgtgggtcgtgaatctggcaccattcagagatacagtctacctaatgttggtttgattcaaaaatattcccttaattgtcgagcctaccagttatccttgaattgcaactctagccgtcttgctatcatagacatctcaggagttctgactttctttgacttggatgctcgagtaacggacagtacgggacagcaagtagttggagagttgttaaaattggaacgaagagatgtctgggatatgaagtgggccaaagataatcctgatttgtttgcaatgatggagaagacaagaatgtatgttttcagaaacttggatcctgaggaacccattcagacctctggatatatttgtaattttgaggatttagaaattaaatctgttcttttggatgagatattaaaggatccagaacatccaaacaaggattacctaattaactttgagattcggtctctgcgagatagccgagcactgattgagaaggttggaattaaagatgcatctcagttcatagaggacaatccacacccccgactttggcgcctactggctgaagcagctcttcagaaactggatctatacactgcagagcaagcatttgtgcgctgcaaagattaccaaggcattaagtttgtgaagcgcttgggcaaactactgagtgagtcaatgaaacaggctgaagttgttggctacttcggcaggtttgaagaggctgaaagaacgtatctcgagatggacagaagggatcttgctattggcctccggctgaaattgggggattggtttagagtactccagctcctgaaaactggatctggtgatgcagatgacagtctcctggaacaagccaacaatgccattggagactactttgctgatcgacaaaagtggttgaatgctgtacaatattatgtacaaggacggaaccaggaacgcttagctgaatgttactatatgttagaggattatgaagggttagagaaccttgccatttcacttccagaaaaccacaagttacttccagtaggaaatagcacaaatgtttgtcagagttggaatgtgtgaacaagcagtgactgcatttttgaaatgtagtcaaccaaaggcagcagtagatacctgcgtacatctcaaccaatggaacaaagctgttgaattggctaaaaatcatagtatgaaagaaattggatctctgttagctagattgcagatgaagaggcaaagaaaggaagtaaacctttacgtgtcaagaagctctatgtactgtcagccttacttatagagcaataccatgaacagatgaagaatgcccagcgaggaaaagttaaaggaaaaagttcagaggccacttctgccttggctggtttgctggaagaagaagttctgtctacaacagatcgtttcacagataatgcatggagaggggcagaggcttaccacttctttatacttgcacagaggcagctctatgagggatgtgtggacactgcactgaagacagctcttcacctgaaagactatgaagacatcatccctcctgtggagatctactctctgctagcactctgcgcatgcgccagcagagcctttgggacttgttcaaaagctttcattaaacttaaatctttagagaccctcagttcagaacagaaacagcagtatgaagaccttgctttagaaatcttcaccaaacatacttcaaaagataacagaaaacctgaattggacagccttatggaaggtggagaagggaaactgccaacatgcgttgccacaggaagcccaatcactgagtatcaattctggatgtgcagtgtatgcaaacacggtgtccttgctcaggaaataagccactacagcttctgccccttatgccatagtccagtgggataa

SEQ ID NO: 199772 - DNA, 1624 bp, Homo sapiens
  Payload ID: 19415
  Gene Name: WD repeat domain 35
  ENST ID: ENST00000453014
  CDS Start-End: 1-1221
aatcagatcacacggtctcgaaaagaagggagagaaagaatttatcatgttgatgataccccttctggatcaatggatggtgtgcttgattatagtaaaaccattcaaggcacaagggatccaatttgtgccataactgcatcagataagatattgattgtgggtcgtgaatctggcaccattcagagatacagtctacctaatgttggtttgattcaaaaatattcccttaattgtcgagcctaccagttatccttgaattgcaactctagccgtcttgctatcatagacatctcaggagttctgactttctttgacttggatgctcgagtaacggacagtacgggacagcaagtagttggagagttgttaaaattggaacgaagagatgtctgggatatgaagtgggccaaagataatcctgatttgtttgcaatgatggagaagacaagaatgtatgttttcagaaacttggatcctgaggaacccattcagacctctggatatatttgtaattttgaggatttagaaattaaatctgttcttttggatgagatattaaaggatccagaacatccaaacaaggattacctaattaactttgagattcggtctctgcgagatagccgagcactgattgagaaggttggaattaaagatgcatctcagttcatagaggacaatccacacccccgactttggcgcctactggctgaagcagctcttcagaaactggatctatacactgcagagcaagcatttgtgcgctgcaaagattaccaaggcattaagtttgtgaagcgcttgggcaaactactgagtgagtcaatgaaacaggctgaagttgttggctacttcggcaggtttgaagaggctgaaagaacgtatctcgagatggacagaagggatcttgctattggcctccggctgaaattgggggattggtttagagtactccagctcctgaaaactggatctggtgatgcagatgacagtctcctggaacaagccaacaatgccattggagactactttgctgatcgacaaaagtggttgaatgctgtacaatattatgtacaaggacggaaccaggaacgcttagctgaatgttactatatgttagaggattatgaagggttagagaaccttgccatttcacttccagaaaaccacaagttacttccagtaggtattgcaaattttagtttttggaattgttaggttactttataaaattttatgttatagtcaggaaatatctcccacaataaagaaaattaaaaatctataatgttacagtttcttagacatggaatgatgcttttaattataaagtaatatataaataatatagaatgcttgaaaatggaggaggaaaagtcagtcacattcttactactttaatatgatcacagtcttgtgtagtctgttaagatttataaagttactttttaaatgttagctgaatacatgaaatatttacagatgaaatgatatgttgctagggatttgcttcaaaataatctgaaattgtttgaaatttgctataacttaagtttaaaaagatagctcaacttttattatgttatattaacaataaagtatttcaagttaaaagagaaat

SEQ ID NO: 199773 - DNA, 7048 bp, Homo sapiens
  Payload ID: 19416
  Gene Name: WD repeat domain 36
  Uniprot ID: Q8NI36
  ENST ID: ENST00000506538
  CDS Start-End: 574-3429
tcaaggaatactgacttaatccaggaatcccaataacatttaatatttatcttccttttctgggaggaatctacacttatccaagttgcccaagtgagcagttccctccccacaagtaattagttctactccccagagggtctgtgagtgaatccctctgtcagttttgaaatgtcccattatagttttcatctgtaaatatgtcaatatgtatccaaaagatgaggatctttaaaaacgtaatcataatgctactatcatatgtaaaaatgaaacataattccttaatatcatcagatatccagtgtttaaatttttccagtctcatgtttttgtacatttttaaataatcacatgtttaaatcgtttccatctccaaggcgtcgacctcccctccattctcctgggcgtcgcgcttccctctttgtttcccgcccttgcggttctgtcggaacctaacgagcttccttccaccgcaaaagagctggagaacaatgctaggcaacgtgctggagaccttggccctcggaacccaagtcacgcctcccatgtgagctctggagggagaactttatgtgttgcactgagggcagtctccggaaacgcgattcgcagcgggcgccggaagcggtgttgtgtctgcagctctggcagaggactgttccactagacacgctgaagggactgggtacgtgttttccttcaggaccagagctgagaggagctgggatcgcggcggcaatggaacgggcctcagaaaggcgcacggccagcgcgctttttgcggggttccgggccttgggacttttcagcaacgacattccacacgtggtgcggttcagcgcgctcaagcgccggttctatgtaacaacctgcgtgggcaagagtttccacacctatgacgttcagaaacttagtctggttgcagtaagtaattctgttccacaggatatctgctgtatggcagctgatggcagattagtctttgctgcttatggaaatgttttctctgcatttgcccgtaataaagagatagtacatacctttaagggtcataaggcagaaatccatttcttgcaaccctttggagaccacattatctctgttgatactgatggcattcttattatttggcacatatattcagaagaagaatacctgcagttgacttttgataaatcagtatttaaaatttctgcaattttgcatccaagtacctacttgaataaaatacttctgggcagtgaacaaggaagcctgcagttgtggaatgtaaaatccaataaacttctatatacatttccaggatggaaagttggagtgacagctcttcagcaggcaccagccgtggatgttgttgctattggtcttatgtcaggtcaagttatcattcacaacattaaatttaatgaaacattaatgaagtttcgtcaagactggggacccattacttcaatttcatttcgcacagatggtcatccagtaatggcagctggaagcccatgtggccatattggactctgggatctagaagacaaaaaattaatcaaccaaatgagaaatgcacactctacagcaattgccggactgacatttctccatagagagccacttcttgtcacaaatggcgctgacaatgctcttaggatatggatatttgatggtcctacaggtgaaggccgacttttgagattcagaatgggtcatagtgctcctcttaccaatatcagatattatggacagaatggacagcagattctaagtgcaagtcaagatggaactcttcagtcattttccacggtacatgaaaaattcaataagagcttgggacatggattaataaataaaaagagagttaaacgtaaaggacttcagaataccatgtcagtgagacttccacccatcacaaagtttgcagcagaggaagctcgtgaaagtgactgggatggtatcattgcttgccatcaaggtaagctatcttgctcaacctggaattatcagaaatctacaataggcgcttactttctcaagccaaaagagttgaagaaagatgacataactgcaacagcagtggatataacttcttgtggaaactttgctgtaattggcctctcatcaggaactgtagatgtatataacatgcagtctggcatacatcgaggaagttttggcaaggatcaagctcacaagggatctgttagaggtgtcgcagtggatggattaaaccagttgacagttacaactggtagtgaaggattactcaaattctggaactttaaaaacaaaattttaatccattctgtgagcctcagttcatctccaaatatcatgttgctacatagggacagtggcattctgggactcgccttggatgacttctccattagtgttctggacatagaaactaggaagattgtcagagagttttctggacaccaaggccaaataaatgacatggcttttagtcctgatggtcgttggttaataagtgctgcgatggattgctctattaggacttgggaccttccttctgggtgccttatagactgctttttgttggactcggctcctctcaatgtttctatgtctcctactggagactttctggcaacttcccatgtggaccaccttggaatttatctatggtccaatatttccctgtattcagttgtttcattacggccacttcctgcagattatgtcccttcaatagtcatgcttcctggtacttgtcaaacccaagatgtagaagtatcagaagaaacagtagaaccaagtgatgaattgatagaatatgattcgccagaacagttgaatgagcaattggtgactctttcacttcttcctgaatcacgatggaaaaaccttcttaaccttgatgttattaagaaaaagaataaaccaaaggaaccacccaaagtacccaaatcagcaccatttttcattccaacaattcctggccttgtacccagatatgctgcacctgaacaaaataatgatccccagcagtctaaagtggtaaatcttggagttttggctcaaaaatcagatttctgcttgaaacttgaagaaggactggtaaataataagtatgacactgctctcaaccttctgaaagaatcaggcccatcaggaattgaaacagagctgcgaagcttgtctcctgattgtggtgggtccatagaagttatgcagagcttcttgaaaatgattgggatgatgctggacagaaagcgtgattttgagttagcccaggcataccttgcattgtttctaaagttacaccttaaaatgcttccttcagagccagtactcctagaagaaataacaaatttgtcatcccaggtggaagaaaactggacccatttgcaatcactcttcaatcaaagcatgtgtattttaaattatctcaaaagtgctttgttgtaaaaataaatttgtgactaaacaaagactttcatattaaatgggttcaattgaactcatttcttattttccaagtgtcaatgtgaaaagaaaataaatgctagcactactgactagtcagtatatctccactttaaatgctaaatactttcttgaaataaaatcgcacctcccggccaggcatgatggataatgcctgtaattccagcactttcagaggccaaagcgggaggattgcttgaagccaggaatttgagcccagcctgggcaacatagcaagcaagatcccatctctacaaaaagttaaaaaaataaattacacctgccttttgttttgaagacttaaagaatctgctcaaatgatttattttctgagtctcttcacattaacttttatatgatttttaaaaaattattacctgcttatattttttgagtatctgtttcatataaagagatgctgcatgttcactgtgaagtattgctgaattaaattgaaaatgtcagataaaactgatacatgatgtagttataaaaatgctgttatgaagaaaaaaggaatgcttttttcctcggtggcctttgataaaaatatgaatgattgactctcagagttggaggataaactaatcatcttctagcacagccctgttgtgttgcaggagaggaatcaggctaaagtctgctggtatttcagtgacagattaaaactttctaacagtggcctagtgctttctccattgtaatgtactgaaaggaagttgttcatggatcagaaatgtgggaggcccttccttgcccaaggcaagtcgctgtagatggttaaactgataccaaggataggtaagggaaattccaaattccattggaagatggccttttactgacactgcagacatgtagataacaatagtttaatgtcctctgaaaaggtaaaaattccataaatccttgcaaacaatttttagcaatattgtttattgctaccacagccaagaatgggtatttcaaagccagggttttttttattttgttttgttttgtttttttttttttttttttggctacacttttttgggggggaccttttaatttgggaagaaaatgctgagtatacttttctttcacaaccattgcaaacccaggtagccctggagttttctttttttctcatcatcattgttttgttttttttatggttcaagacttttgcaatacatgaattaaaaataagcagttctttaaagcatagcgctctaaaaactattcttagtttataccctcaaaagttgggtctttcatgaaacacagtggtttgaatatgaacaccagtagcattctcgttcgttgttagggtaagagagttttgtagaatgatctccaaaagaagcagtcctcaaaaggcatttaccagtgatatcttttaatattcatgtttttatttaatgatgtaagatagaattaataaactactaaggaaataagccaatgtggttattgtactcaatttcgtttttcttttagaaatgtgtattgacttattaaagccactgacagaaatgttaatcatgacttaagttctaatttaaaaaactattttcctctttcctaaatactatattctaaattggaatatggcaaaatcccaatatataattctatacctagtaaagattgtaaataactaaaacaaaatgataagagctgtgaactgaaattgtattgcttacagaaatcatgaaccgaattttcttctctttttaaagtgagcataaagacttaagtgtattgttaccagagatatatttagatagaatacatcattttggcaggtaatcttctagaacctttcatgtactgtttccatcaagggagggaaagaaatagaaaatataattttatctatattttccttaaaatatatcaatctgtgcacactctttcagttttttaattactcatgtaatatatgactacattttgcttgtgtgctttttgaaaaccatcttcagtcccaatatcctctgtagaagtaatagttttaactctcctagatcttcttttagagtgtttttatgagtgtttaatgtaggaatgtgtatatattatctacagccacaggaaatgtatagttacgatttttacatacgtgtatgtatattattgtacaacttgctatttctacttgggagttttttattttggtacattcacatttacctaatctcttgtgcactgtccaacagtactttgcctataatagacacttaaggaagttttccttctttttattcctttataattacaaacaatgctgaaaggaacatcatcctacatgagccctttttgtacatataaggctctctctgtggtatatgcttaggatttgaatttcaggccagagtataaccatttttaatttgaagagatacttccatttgggttccagaatggctgtatcaagttacagttcccctgagcaagatatgagcatctgcttccccatgtaattaatgacacttgctattggatttttgtaatttaattactctgaaaaaattattttggttttaaatcagaaatttctcactagtgaagatggacatatttttgtatgtttattttagaacatataaacatttgttaattttctttttcctctcatttttctattgaatgatttgtccttttatctcatggatttgttaggagttctcttgtattttctgtattttatgtctgttgccaatgttttctcctacttagccatttggctttaattttacatggtgtctgtttaaataaatgttttatatttgtatacaatcaaattgattaattttcatgacttatttcaggatataaagcaaattattttctaagacatttacagtgtatgttttcctatgtttacatgtgctcatttcacgtcatgtattttcctctacgacatgtttctgtgtgagtagttaacatgtagatctttagaattgatttttctgaagagtgaaacagcgctgcttccaatatctgttcaaaattcatttattgaaaagtccactcatatgtctgatttgaaatgctgtttcattatgtgttaaattctttcactgagctcttccatattcctagtaaatgatgcattactttggtatgttctcagatttgggtaaagccttcctcatgttctataaaaattggttaactgctggtgagcacatctcttgaagttttgatatgggttgcacaacatttataggactgatttggagagaccgacaataccgagtgcagtcctcccttggtatctagttccaggacccctgtggataccaaaatccaagcaatgccctgcagatcatgggacctatgcatatgaaaagtcggtccttgtatttgagggttttgcatccctcaaataccatatgttttatttgtgtttggttgaaaaaagtttgcatataagtgaaacttagcatttcaaacctgtgttgttcaaagatcatttgtatttctcttcaagaacaatgaatgtcttcattaaatcatcttttgtgggagagcttttggtttcatagattttcatatatatatatgatataataaacactttttgacattc

SEQ ID NO: 199774 - DNA, 3140 bp, Homo sapiens
  Payload ID: 19416
  Gene Name: WD repeat domain 36
  ENST ID: ENST00000513710
  CDS Start-End: 144-2831
ggaaacgcgattcgcagcgggcgccggaagcggtgttgtgtctgcagctctggcagaggactgttccactagacacgctgaagggactgggtacgtgttttccttcaggaccagagctgagaggagctgggatcgcggcggcaatggaacgggcctcagaaaggcgcacggccagcgcgctttttgcggggttccgggccttgggacttttcagcaacgacattccacacgtggtgcggttcagcgcgctcaagcgccggttctatgtaacaacctgcgtgggcaagagtttccacacctatgacgttcagaaacttagtctggttgcagtaagtaattctgttccacaggatatctgctgtatggcagctgatggcagattagtctttgctgcttatggaaatgttttctctgcatttgcccgtaataaagagatagtacatacctttaagggtcataaggcagaaatccatttcttgcaaccctttggagaccacattatctctgttgatactgatggcattcttattatttggcacatatattcagaagaagaatacctgcagttgacttttgataaatcagtatttaaaatttctgcaattttgcatccaagtacctacttgaataaaatacttctgggcagtgaacaaggaagcctgcagttgtggaatgtaaaatccaataaacttctatatacatttccaggatggaaagttggagtgacagctcttcagcaggcaccagccgtggatgttgttgctattggtcttatgtcaggtcaagttatcattcacaacattaaatttaatgaaacattaatgaagtttcgtcaagactggggacccattacttcaatttcatttcgcacagatggtcatccagtaatggcagctggaagcccatgtggccatattggactctgggatctagaagacaaaaaattaatcaaccaaatgagaaatgcacactctacagcaattgccggactgacatttctccatagagagccacttcttgtcacaaatggcgctgacaatgctcttaggatatggatatttgatggtcctacaggtgaaggccgacttttgagattcagaatgggtcatagtgctcctcttaccaatatcagatattatggacagaatggacagcagattctaagtgcaagtcaagatggaactcttcagtcattttccacggtacatgaaaaattcaataagagcttgggacatggattaataaataaaaagagagttaaacgtaaaggacttcagaataccatgtcagtgagacttccacccatcacaaagtttgcagcagaggaagctcgtgaaagtgactgggatggtatcattgcttgccatcaaggtaagctatcttgctcaacctggaattatcagaaatctacaataggcgcttactttctcaagccaaaagagttgaagaaagatgacataactgcaacagcagtggatataacttcttgtggaaactttgctgtaattggcctctcatcaggaactgtagatgtatataacatgcagtctggcatacatcgaggaagttttggcaaggatcaagctcacaagggatctgttagaggtgtcgcagtggatggattaaaccagttgacagttacaactggtagtgaaggattactcaaattctggaactttaaaaacaaaattttaatccattctgtgagcctcagttcatctccaaatatcatgttgctacatagggacagtggcattctgggactcgccttggatgacttctccattagtgttctggacatagaaactaggaagattgtcagagagttttctggacaccaaggccaaataaatgacatggcttttagtcctgatggtcgttggttaataagtgctgcgatggattgctctattaggacttgggaccttccttctgggtgccttatagactgctttttgttggactcggctcctctcaatgtttctatgtctcctactggagactttctggcaacttcccatgtggaccaccttggaatttatctatggtccaatatttccctgtattcagttgtttcattacggccacttcctgcagattatgtcccttcaatagtcatgcttcctggtacttgtcaaacccaagatgtagaagtatcagaagaaacagtagaaccaagtgatgaattgatagaatatgattcgccagaacagttgaatgagcaattggtgactctttcacttcttcctgaatcacgatggaaaaaccttcttaaccttgatgttattaagaaaaagaataaaccaaaggaaccacccaaagtacccaaatcagcaccatttttcattccaacaattcctggccttgtacccagatatgctgcacctgaacaaaataatgatccccagcagtctaaagtggtaaatcttggagttttggctcaaaaatcagatttctgcttgaaacttgaagaaggactggtaaataataagtatgacactgctctcaaccttctgaaagaatcaggcccatcaggaattgaaacagagctgcgaagcttgtctcctgattgtggtgggtccatagaagttatgcagagcttcttgaaaatgattgggatgatgctggacagaaagcgtgattttgagttagcccaggcataccttgcattgtttctaaagttacaccttaaaatgcttccttcagagccagtactcctagaagaaataacaaatttgtcatcccaggtggaagaaaactggacccatttgcaatcactcttcaatcaaagcatgtgtattttaaattatctcaaaagtgctttgttgtaaaaataaatttgtgactaaacaaagactttcatattaaatgggttcaattgaactcatttcttattttccaagtgtcaatgtgaaaagaaaataaatgctagcactactgactagtcagtatatctccactttaaatgctaaatactttcttgaaataaaatcgcacctcccggccaggcatgatggataatgcctgtaattccagcactttcagaggccaaagcgggaggattgcttgaagccaggaatttgagcccagcctgggcaacatagcaagcaagatcccatctctacaaaaagttaaaaaaa

SEQ ID NO: 199775 - DNA, 6592 bp, Homo sapiens
  Payload ID: 19416
  Gene Name: WD repeat domain 36
  Uniprot ID: Q8NI36
  ENST ID: ENST00000612402
  CDS Start-End: 118-2973
taacgagcttccttccaccgcaaaagagctggagaacaatgctaggcaacgtgctggagaccttggccctcggaacccaagtcacgcctcccatgtgagctctggagggagaactttatgtgttgcactgagggcagtctccggaaacgcgattcgcagcgggcgccggaagcggtgttgtgtctgcagctctggcagaggactgttccactagacacgctgaagggactgggtacgtgttttccttcaggaccagagctgagaggagctgggatcgcggcggcaatggaacgggcctcagaaaggcgcacggccagcgcgctttttgcggggttccgggccttgggacttttcagcaacgacattccacacgtggtgcggttcagcgcgctcaagcgccggttctatgtaacaacctgcgtgggcaagagtttccacacctatgacgttcagaaacttagtctggttgcagtaagtaattctgttccacaggatatctgctgtatggcagctgatggcagattagtctttgctgcttatggaaatgttttctctgcatttgcccgtaataaagagatagtacatacctttaagggtcataaggcagaaatccatttcttgcaaccctttggagaccacattatctctgttgatactgatggcattcttattatttggcacatatattcagaagaagaatacctgcagttgacttttgataaatcagtatttaaaatttctgcaattttgcatccaagtacctacttgaataaaatacttctgggcagtgaacaaggaagcctgcagttgtggaatgtaaaatccaataaacttctatatacatttccaggatggaaagttggagtgacagctcttcagcaggcaccagccgtggatgttgttgctattggtcttatgtcaggtcaagttatcattcacaacattaaatttaatgaaacattaatgaagtttcgtcaagactggggacccattacttcaatttcatttcgcacagatggtcatccagtaatggcagctggaagcccatgtggccatattggactctgggatctagaagacaaaaaattaatcaaccaaatgagaaatgcacactctacagcaattgccggactgacatttctccatagagagccacttcttgtcacaaatggcgctgacaatgctcttaggatatggatatttgatggtcctacaggtgaaggccgacttttgagattcagaatgggtcatagtgctcctcttaccaatatcagatattatggacagaatggacagcagattctaagtgcaagtcaagatggaactcttcagtcattttccacggtacatgaaaaattcaataagagcttgggacatggattaataaataaaaagagagttaaacgtaaaggacttcagaataccatgtcagtgagacttccacccatcacaaagtttgcagcagaggaagctcgtgaaagtgactgggatggtatcattgcttgccatcaaggtaagctatcttgctcaacctggaattatcagaaatctacaataggcgcttactttctcaagccaaaagagttgaagaaagatgacataactgcaacagcagtggatataacttcttgtggaaactttgctgtaattggcctctcatcaggaactgtagatgtatataacatgcagtctggcatacatcgaggaagttttggcaaggatcaagctcacaagggatctgttagaggtgtcgcagtggatggattaaaccagttgacagttacaactggtagtgaaggattactcaaattctggaactttaaaaacaaaattttaatccattctgtgagcctcagttcatctccaaatatcatgttgctacatagggacagtggcattctgggactcgccttggatgacttctccattagtgttctggacatagaaactaggaagattgtcagagagttttctggacaccaaggccaaataaatgacatggcttttagtcctgatggtcgttggttaataagtgctgcgatggattgctctattaggacttgggaccttccttctgggtgccttatagactgctttttgttggactcggctcctctcaatgtttctatgtctcctactggagactttctggcaacttcccatgtggaccaccttggaatttatctatggtccaatatttccctgtattcagttgtttcattacggccacttcctgcagattatgtcccttcaatagtcatgcttcctggtacttgtcaaacccaagatgtagaagtatcagaagaaacagtagaaccaagtgatgaattgatagaatatgattcgccagaacagttgaatgagcaattggtgactctttcacttcttcctgaatcacgatggaaaaaccttcttaaccttgatgttattaagaaaaagaataaaccaaaggaaccacccaaagtacccaaatcagcaccatttttcattccaacaattcctggccttgtacccagatatgctgcacctgaacaaaataatgatccccagcagtctaaagtggtaaatcttggagttttggctcaaaaatcagatttctgcttgaaacttgaagaaggactggtaaataataagtatgacactgctctcaaccttctgaaagaatcaggcccatcaggaattgaaacagagctgcgaagcttgtctcctgattgtggtgggtccatagaagttatgcagagcttcttgaaaatgattgggatgatgctggacagaaagcgtgattttgagttagcccaggcataccttgcattgtttctaaagttacaccttaaaatgcttccttcagagccagtactcctagaagaaataacaaatttgtcatcccaggtggaagaaaactggacccatttgcaatcactcttcaatcaaagcatgtgtattttaaattatctcaaaagtgctttgttgtaaaaataaatttgtgactaaacaaagactttcatattaaatgggttcaattgaactcatttcttattttccaagtgtcaatgtgaaaagaaaataaatgctagcactactgactagtcagtatatctccactttaaatgctaaatactttcttgaaataaaatcgcacctcccggccaggcatgatggataatgcctgtaattccagcactttcagaggccaaagcgggaggattgcttgaagccaggaatttgagcccagcctgggcaacatagcaagcaagatcccatctctacaaaaagttaaaaaaataaattacacctgccttttgttttgaagacttaaagaatctgctcaaatgatttattttctgagtctcttcacattaacttttatatgatttttaaaaaattattacctgcttatattttttgagtatctgtttcatataaagagatgctgcatgttcactgtgaagtattgctgaattaaattgaaaatgtcagataaaactgatacatgatgtagttataaaaatgctgttatgaagaaaaaaggaatgcttttttcctcggtggcctttgataaaaatatgaatgattgactctcagagttggaggataaactaatcatcttctagcacagccctgttgtgttgcaggagaggaatcaggctaaagtctgctggtatttcagtgacagattaaaactttctaacagtggcctagtgctttctccattgtaatgtactgaaaggaagttgttcatggatcagaaatgtgggaggcccttccttgcccaaggcaagtcgctgtagatggttaaactgataccaaggataggtaagggaaattccaaattccattggaagatggccttttactgacactgcagacatgtagataacaatagtttaatgtcctctgaaaaggtaaaaattccataaatccttgcaaacaatttttagcaatattgtttattgctaccacagccaagaatgggtatttcaaagccagggttttttttattttgttttgttttgtttttttttttttttttttggctacacttttttgggggggaccttttaatttgggaagaaaatgctgagtatacttttctttcacaaccattgcaaacccaggtagccctggagttttctttttttctcatcatcattgttttgttttttttatggttcaagacttttgcaatacatgaattaaaaataagcagttctttaaagcatagcgctctaaaaactattcttagtttataccctcaaaagttgggtctttcatgaaacacagtggtttgaatatgaacaccagtagcattctcgttcgttgttagggtaagagagttttgtagaatgatctccaaaagaagcagtcctcaaaaggcatttaccagtgatatcttttaatattcatgtttttatttaatgatgtaagatagaattaataaactactaaggaaataagccaatgtggttattgtactcaatttcgtttttcttttagaaatgtgtattgacttattaaagccactgacagaaatgttaatcatgacttaagttctaatttaaaaaactattttcctctttcctaaatactatattctaaattggaatatggcaaaatcccaatatataattctatacctagtaaagattgtaaataactaaaacaaaatgataagagctgtgaactgaaattgtattgcttacagaaatcatgaaccgaattttcttctctttttaaagtgagcataaagacttaagtgtattgttaccagagatatatttagatagaatacatcattttggcaggtaatcttctagaacctttcatgtactgtttccatcaagggagggaaagaaatagaaaatataattttatctatattttccttaaaatatatcaatctgtgcacactctttcagttttttaattactcatgtaatatatgactacattttgcttgtgtgctttttgaaaaccatcttcagtcccaatatcctctgtagaagtaatagttttaactctcctagatcttcttttagagtgtttttatgagtgtttaatgtaggaatgtgtatatattatctacagccacaggaaatgtatagttacgatttttacatacgtgtatgtatattattgtacaacttgctatttctacttgggagttttttattttggtacattcacatttacctaatctcttgtgcactgtccaacagtactttgcctataatagacacttaaggaagttttccttctttttattcctttataattacaaacaatgctgaaaggaacatcatcctacatgagccctttttgtacatataaggctctctctgtggtatatgcttaggatttgaatttcaggccagagtataaccatttttaatttgaagagatacttccatttgggttccagaatggctgtatcaagttacagttcccctgagcaagatatgagcatctgcttccccatgtaattaatgacacttgctattggatttttgtaatttaattactctgaaaaaattattttggttttaaatcagaaatttctcactagtgaagatggacatatttttgtatgtttattttagaacatataaacatttgttaattttctttttcctctcatttttctattgaatgatttgtccttttatctcatggatttgttaggagttctcttgtattttctgtattttatgtctgttgccaatgttttctcctacttagccatttggctttaattttacatggtgtctgtttaaataaatgttttatatttgtatacaatcaaattgattaattttcatgacttatttcaggatataaagcaaattattttctaagacatttacagtgtatgttttcctatgtttacatgtgctcatttcacgtcatgtattttcctctacgacatgtttctgtgtgagtagttaacatgtagatctttagaattgatttttctgaagagtgaaacagcgctgcttccaatatctgttcaaaattcatttattgaaaagtccactcatatgtctgatttgaaatgctgtttcattatgtgttaaattctttcactgagctcttccatattcctagtaaatgatgcattactttggtatgttctcagatttgggtaaagccttcctcatgttctataaaaattggttaactgctggtgagcacatctcttgaagttttgatatgggttgcacaacatttataggactgatttggagagaccgacaataccgagtgcagtcctcccttggtatctagttccaggacccctgtggataccaaaatccaagcaatgccctgcagatcatgggacctatgcatatgaaaagtcggtccttgtatttgagggttttgcatccctcaaataccatatgttttatttgtgtttggttgaaaaaagtttgcatataagtgaaacttagcatttcaaacctgtgttgttcaaagatcatttgtatttctcttcaagaacaatgaatgtcttcattaaatcatcttttgtgggagagcttttggtttcatagattttcatatatatatatgatataataaacactttttgacattc

SEQ ID NO: 199776 - DNA, 4462 bp, Homo sapiens
  Payload ID: 19417
  Gene Name: WD repeat domain 37
  Uniprot ID: Q9Y2I8
  ENST ID: ENST00000263150
  CDS Start-End: 152-1636
gcggtgtcctgcgcgtcttcgggtcagtacggggggccgcgtcgtagggactcactggcggtgcgcgacctgggctggctccgggggtggcgggcgcagctgctgtgacagcttattgcaggagtgaccaggacactacctcctagaagtaatgcccacagaaagcgcaagttgttcgactgctcgccaaacaaaacagaagcgcaaatcccatagcctttctatacgaagaactaacagctcggagcaggagaggacgggactgccaagagacatgttagaaggacaagattctaaactgccttcctcggttcgcagtacacttctggaactgtttggtcaaatagaaagagaatttgaaaacctttatatcgaaaacttagaattacgtagagaaatcgacactcttaatgaacgtttagctgctgaaggacaagcgattgatggagcagagctgagtaagggccaactcaaaacaaaagccagtcacagcaccagccagctctcccagaaactgaagaccacttacaaggcttccaccagcaagattgtctccagctttaagaccacgacatcgagagctgcctgccagctcgtgaaggagtacatcggccaccgggacggcatctgggatgtcagcgtggccaagacacagccagtggtgctcgggactgcatcagccgatcacacggctttgctgtggagcatagagacagggaagtgcctagtcaagtacgcaggccacgtgggctcagtaaattctatcaaatttcatccctcagagcagttggctctcactgcttctggagatcagactgctcatatctggagatacgcggtgcagctgccgacaccccagcctgttgctgacactagtatatctggggaagatgaagtagagtgctctgacaaggacgagcccgacctcgatggggatgtgtccagcgactgccccaccatccgcgtcccactgacatccctcaagagccaccagggcgtggtcatcgcctccgactggctggttggggggaagcaggctgtgactgcctcctgggaccggacggcaaacctgtacgacgtggagacgtccgagctcgttcactctctgacagggcacgaccaggagttgacgcactgctgcacacaccccacccagcggctcgtggtgacctcctcccgtgacacgactttccgcctctgggatttcagggacccctccatccactcggtgaatgttttccagggacacacggacactgtgacttctgccgtgttcaccgtgggagacaacgtggtttcaggcagcgatgaccgcacggtgaaagtctgggacttgaaaaatatgagatcccccattgcaactattcgcacggactctgccattaacaggatcaatgtatgtgtcggccaaaaaatcatagccctcccccatgacaaccgacaagtgagactgtttgatatgtcaggagtgcgcctggcgcggcttccccggagcagccgacagggccacaggagaatggtatgctgctcggcatggagtgaagaccaccccgtgtgcaatctgttcacctgtgggtttgaccggcaagccattggttggaacatcaacatccctgcattgctacaagaaaaataaggacaccggcagcccttagtttcactgtttgccagcacagacctttgatgggtgcaggcttttctgcgtattaatcagccatttttgtgagagtttgaccctggaaagggtgctttgtatatgttcttttcacatagtgcccagcttgcatgaaatgtacagagaaatgtgtggtcgtattttttacttttgtcttgtatatgtatgtatattgggtcctctgggcagtagaggcaaagctcacctcccatgtagcacatgaaatgcttgtgagttgttgacattggacaggtgaacagtagggcattacatttgtgtgaattaaatgtgaacttctgtattacgttgcggcgtcggcagtcctgcgttccctggagtaactgtacgtatctgcctttgctgggaagactgtggggctgcctgtgttggctggcgaccagcaggattgctccaggattttgtgtttacctcgcgtgaagttcagcacgtgctgtcgtgtagtcagcttctactctaatttctgttacagttctgcaaaggtaacctggagtttagaagttaaaaaaaagcatgggatgttggatttgcaccatttggagtttctttaggaaagaaaagttttctgcttttttatagaaaatcatttcagtctcccgaggtctcatgctagcaaattttgaaataggattctaatcactgatttcaaatattaagcaaaatgtaaagcactttaatttatagctatggttataaacaggttttagatgtttcaaatgacttgtccactgaatgtcacttgaccttgataagaggccgcctgcacacagagcccagttaattctccgcacctcggttgtgtgcttccgaatgggctcactcccgtggtggtgtttgagagccaacaacactacctcagagacgggtctttgggaaactttgggtctcactgttgcctggctggagcactttggtttatagctggaatactgagttcagttcagaaggcaggaaagacagtcacaccgacgtgtcctgaaggtgtaggctctccacttaggcgcacaagctgacggctgcagccagcaggccccggtgacgagacacttccaggtcttgtggtggggacgcctctcagtgccagtcccgccactgctgagtgagcctggtgttcttgccttcttggaaattactgctcacctggtatctgtacgttaatgtttcttgctgagttacagttttgataaagaggctctcatttcctgtgtcttgtatattcagtcctttcaatacgtccacctggaggctcaccacttggagagacacaggaaggtaatatttacagctgtcatgtgacatccccaggtctttgtgttttgccctgttttacggtgaggtaggagggaacccatctggggaccggtaggtgcaggtgcagtaggacgtgggacttttggacccgtcctttggtgcagctcgccagggatgagaggcacctccctacttgggtcttcaggagctggtccaaggagcttcgaatctaagtcatctagaatgaccctgaaatgactgacagccccgggcccaagaaaaacccataaccacctcagatggatctgacgtggctaagggacaaacagcaaatatttcagtcattttgattttacaaataaaaaatgtgttgtgtttttgtccgacattatttcctgactgcactgttctgagaatggagtccacctggtccctctggttgattagaatctcaggtttcagctcctgctgtcctgagcgaacttgcctgatgcagggctgtgctgtgtccagatgttgctggggcctcactttttctcttggctggaggtccaattgccagagcctcccacactgcacatacaaaggtctgagcccagggcagcttctggggccactgcacaggccacctgcttgggttcctcggagtttaatttgaaagtctgggtgtcttaggatgatggttaggaacattgaaaaatggctgcaaatagccaaatcaaacttaagaaccagatctctgccagattaaacatttttgaagcttttaaaagtcaatattcctagtggccactgagttccaggcacactggtgccctttactgccacagctgctcaccttgtctggcaaactggagggacctcagaaactggactcctgcatgtccttgggggcgcagccctgtggtgctcaggcagagctctcaggagccggggcaccttgctgttcgctgctgtgtcgtcttctaatgtgagctcatccactgctgctgcagcgtggtgatcaggagtcacagacaagatcggggatggtgtgtgtgtgtgtgtgtgtgtgtgtgtgcacgtgtgtgtggctaaattaagtcatactgtcaaccacacgtgatctcgtctgaaacagtgtttggaagtgggaacagttttgtcctgtatgctgatgtgtccagaatttcatttaatgatagacggaaaatgtgtggttactgaaaactgtatatgatacagaatttcataagagccatgctgttgggcaaagcaactctttttcaaccactgctcatcagtttctgtagagacaaaaactctgtacatattttggaatctgaagaatcctatgtaaatcatttgttacttaagtctgtgaaaaacatatttctttggaggaaaatgtatgcatttataagtgttccatggaatcagtttttattgtatcgatataattgtctctaagtgttgactgtcttcattgcaatatgaaattcattaaaatgtccatgttccataattactattataaaa

SEQ ID NO: 199777 - DNA, 4582 bp, Homo sapiens
  Payload ID: 19417
  Gene Name: WD repeat domain 37
  Uniprot ID: Q9Y2I8
  ENST ID: ENST00000358220
  CDS Start-End: 145-1629
agaacgatggcctttctgcggtgtctgcgaccgggaccaaggcggagcaaagtcgccgggggtgtggggtgttccacgctatgttgggagtgttcgctttcgagcttattgcaggagtgaccaggacactacctcctagaagtaatgcccacagaaagcgcaagttgttcgactgctcgccaaacaaaacagaagcgcaaatcccatagcctttctatacgaagaactaacagctcggagcaggagaggacgggactgccaagagacatgttagaaggacaagattctaaactgccttcctcggttcgcagtacacttctggaactgtttggtcaaatagaaagagaatttgaaaacctttatatcgaaaacttagaattacgtagagaaatcgacactcttaatgaacgtttagctgctgaaggacaagcgattgatggagcagagctgagtaagggccaactcaaaacaaaagccagtcacagcaccagccagctctcccagaaactgaagaccacttacaaggcttccaccagcaagattgtctccagctttaagaccacgacatcgagagctgcctgccagctcgtgaaggagtacatcggccaccgggacggcatctgggatgtcagcgtggccaagacacagccagtggtgctcgggactgcatcagccgatcacacggctttgctgtggagcatagagacagggaagtgcctagtcaagtacgcaggccacgtgggctcagtaaattctatcaaatttcatccctcagagcagttggctctcactgcttctggagatcagactgctcatatctggagatacgcggtgcagctgccgacaccccagcctgttgctgacactagtatatctggggaagatgaagtagagtgctctgacaaggacgagcccgacctcgatggggatgtgtccagcgactgccccaccatccgcgtcccactgacatccctcaagagccaccagggcgtggtcatcgcctccgactggctggttggggggaagcaggctgtgactgcctcctgggaccggacggcaaacctgtacgacgtggagacgtccgagctcgttcactctctgacagggcacgaccaggagttgacgcactgctgcacacaccccacccagcggctcgtggtgacctcctcccgtgacacgactttccgcctctgggatttcagggacccctccatccactcggtgaatgttttccagggacacacggacactgtgacttctgccgtgttcaccgtgggagacaacgtggtttcaggcagcgatgaccgcacggtgaaagtctgggacttgaaaaatatgagatcccccattgcaactattcgcacggactctgccattaacaggatcaatgtatgtgtcggccaaaaaatcatagccctcccccatgacaaccgacaagtgagactgtttgatatgtcaggagtgcgcctggcgcggcttccccggagcagccgacagggccacaggagaatggtatgctgctcggcatggagtgaagaccaccccgtgtgcaatctgttcacctgtgggtttgaccggcaagccattggttggaacatcaacatccctgcattgctacaagaaaaataaggacaccggcagcccttagtttcactgtttgccagcacagacctttgatgggtgcaggcttttctgcgtattaatcagccatttttgtgagagtttgaccctggaaagggtgctttgtatatgttcttttcacatagtgcccagcttgcatgaaatgtacagagaaatgtgtggtcgtattttttacttttgtcttgtatatgtatgtatattgggtcctctgggcagtagaggcaaagctcacctcccatgtagcacatgaaatgcttgtgagttgttgacattggacaggtgaacagtagggcattacatttgtgtgaattaaatgtgaacttctgtattacgttgcggcgtcggcagtcctgcgttccctggagtaactgtacgtatctgcctttgctgggaagactgtggggctgcctgtgttggctggcgaccagcaggattgctccaggattttgtgtttacctcgcgtgaagttcagcacgtgctgtcgtgtagtcagcttctactctaatttctgttacagttctgcaaaggtaacctggagtttagaagttaaaaaaaagcatgggatgttggatttgcaccatttggagtttctttaggaaagaaaagttttctgcttttttatagaaaatcatttcagtctcccgaggtctcatgctagcaaattttgaaataggattctaatcactgatttcaaatattaagcaaaatgtaaagcactttaatttatagctatggttataaacaggttttagatgtttcaaatgacttgtccactgaatgtcacttgaccttgataagaggccgcctgcacacagagcccagttaattctccgcacctcggttgtgtgcttccgaatgggctcactcccgtggtggtgtttgagagccaacaacactacctcagagacgggtctttgggaaactttgggtctcactgttgcctggctggagcactttggtttatagctggaatactgagttcagttcagaaggcaggaaagacagtcacaccgacgtgtcctgaaggtgtaggctctccacttaggcgcacaagctgacggctgcagccagcaggccccggtgacgagacacttccaggtcttgtggtggggacgcctctcagtgccagtcccgccactgctgagtgagcctggtgttcttgccttcttggaaattactgctcacctggtatctgtacgttaatgtttcttgctgagttacagttttgataaagaggctctcatttcctgtgtcttgtatattcagtcctttcaatacgtccacctggaggctcaccacttggagagacacaggaaggtaatatttacagctgtcatgtgacatccccaggtctttgtgttttgccctgttttacggtgaggtaggagggaacccatctggggaccggtaggtgcaggtgcagtaggacgtgggacttttggacccgtcctttggtgcagctcgccagggatgagaggcacctccctacttgggtcttcaggagctggtccaaggagcttcgaatctaagtcatctagaatgaccctgaaatgactgacagccccgggcccaagaaaaacccataaccacctcagatggatctgacgtggctaagggacaaacagcaaatatttcagtcattttgattttacaaataaaaaatgtgttgtgtttttgtccgacattatttcctgactgcactgttctgagaatggagtccacctggtccctctggttgattagaatctcaggtttcagctcctgctgtcctgagcgaacttgcctgatgcagggctgtgctgtgtccagatgttgctggggcctcactttttctcttggctggaggtccaattgccagagcctcccacactgcacatacaaaggtctgagcccagggcagcttctggggccactgcacaggccacctgcttgggttcctcggagtttaatttgaaagtctgggtgtcttaggatgatggttaggaacattgaaaaatggctgcaaatagccaaatcaaacttaagaaccagatctctgccagattaaacatttttgaagcttttaaaagtcaatattcctagtggccactgagttccaggcacactggtgccctttactgccacagctgctcaccttgtctggcaaactggagggacctcagaaactggactcctgcatgtccttgggggcgcagccctgtggtgctcaggcagagctctcaggagccggggcaccttgctgttcgctgctgtgtcgtcttctaatgtgagctcatccactgctgctgcagcgtggtgatcaggagtcacagacaagatcggggatggtgtgtgtgtgtgtgtgtgtgtgtgtgtgcacgtgtgtgtggctaaattaagtcatactgtcaaccacacgtgatctcgtctgaaacagtgtttggaagtgggaacagttttgtcctgtatgctgatgtgtccagaatttcatttaatgatagacggaaaatgtgtggttactgaaaactgtatatgatacagaatttcataagagccatgctgttgggcaaagcaactctttttcaaccactgctcatcagtttctgtagagacaaaaactctgtacatattttggaatctgaagaatcctatgtaaatcatttgttacttaagtctgtgaaaaacatatttctttggaggaaaatgtatgcatttataagtgttccatggaatcagtttttattgtatcgatataattgtctctaagtgttgactgtcttcattgcaatatgaaattcattaaaatgtccatgttccataattactattataaaagctttgtgttattgggagtcttattatttttatagtttttcatgttttgctttggtgaaacattgtgaatgactatataaacatcacgatgagctagaaattgaacaaatataatactggtcactcg

SEQ ID NO: 199778 - DNA, 1307 bp, Homo sapiens
  Payload ID: 19417
  Gene Name: WD repeat domain 37
  ENST ID: ENST00000381329
  CDS Start-End: 202-951
ctgaccgcgccgtccccgccaggctcccgcgcggccggcaccgcggccctgagcgcaggcggccccgggtctcaggcctcaggcggaccgcgccccgggctcgcagccctcccgccccggctgccgggctacggggcagatggactcggagcgccccgccgcttattgcaggagtgaccaggacactacctcctagaagtaatgcccacagaaagcgcaagttgttcgactgctcgccaaacaaaacagaagcgcaaatcccatagcctttctatacgaagaactaacagctcggagcaggagaggacgggactgccaagagacatgttagaaggacaagattctaaactgccttcctcggttcgcagtacacttctggaactgtttggtcaaatagaaagagaatttgaaaacctttatatcgaaaacttagaattacgtagagaaatcgacactcttaatgaacgtttagctgctgaaggacaagcgattgatggagcagagctgagtaagggccaactcaaaacaaaagccagtcacagcaccagccagctctcccagaaactgaagaccacttacaaggcttccaccagcaagattgtctccagctttaagaccacgacatcgagagctgcctgccagctcgtgaaggagtacatcggccaccgggacggcatctgggatgtcagcgtggccaagacacagccagtggtgctcgggactgcatcagccgatcacacggctttgctgtggagcatagagacagggaagtgcctagtcaagtacgcaggccacgtgggctcagtaaattctatcaaatttcatccctcagagcagttggctctcactgcttctggagatcagactgctcatatctggagatacgcggtgcagctgccgacaccccagcctgttgctgacactagtgtaagcacctttccttacctgtgaatgtgtaggatgctgatgtctgcgaatctgagaatccatttatgatatctgtcatggacggaatgtttgtgtccccccaagttcagtgttgaaggcctcacccccggtatggttgaatttggagattgggcctctaaggtagtagttaaggttcagtgaggttgcgtgaggtcctcataagaggagacagtggagagctcacctgtgttctcaatctctctgtcactctccgtgtcacgtaagagcagagccagagggcggccgtctttaaggatgagcccgcaccagaacctgaattggcttgatcttggacttccagcctccagcactgtgagaaaataaatgtctgtttttta

SEQ ID NO: 199779 - DNA, 714 bp, Homo sapiens
  Payload ID: 19417
  Gene Name: WD repeat domain 37
  ENST ID: ENST00000436154
  CDS Start-End: 88-714
ggtctccaagccgcacggcctcgtcctctgctccacctttggcctgtgtctcccacgctcgctccctagacggagctcatttgttcaatgagcagtgattcggagtgggaccggtcagcatgttctgattctaaactgccttcctcggttcgcagtacacttctggaactgtttggtcaaatagaaagagaatttgaaaacctttatatcgaaaacttagaattacgtagagaaatcgacactcttaatgaacgtttagctgctgaaggacaagcgattgatggagcagagctgagtaagggccaactcaaaacaaaagccagtcacagcaccagccagctctcccagaaactgaagaccacttacaaggcttccaccagcaagattgtctccagctttaagaccacgacatcgagagctgcctgccagctcgtgaaggagtacatcggccaccgggacggcatctgggatgtcagcgtggccaagacacagccagtggtgctcgggactgcatcagccgatcacacggctttgctgtggagcatagagacagggaagtgcctagtcaagtacgcaggccacgtgggctcagtaaattctatcaaatttcatccctcagagcagttggctctcactgcttctggagatcagactgctcatatctggagatacgcggtgcagctgccgacaccccagcctgttgctgacactagt

SEQ ID NO: 199780 - DNA, 1303 bp, Homo sapiens
  Payload ID: 19417
  Gene Name: WD repeat domain 37
  ENST ID: ENST00000620998
  CDS Start-End: 202-993
ctgaccgcgccgtccccgccaggctcccgcgcggccggcaccgcggccctgagcgcaggcggccccgggtctcaggcctcaggcggaccgcgccccgggctcgcagccctcccgccccggctgccgggctacggggcagatggactcggagcgccccgccgcttattgcaggagtgaccaggacactacctcctagaagtaatgcccacagaaagcgcaagttgttcgactgctcgccaaacaaaacagaagcgcaaatcccatagcctttctatacgaagaactaacagctcggagcaggagaggacgggactgccaagagacatgttagaaggacaagattctaaactgccttcctcggttcgcagtacacttctggaactgtttggtcaaatagaaagagaatttgaaaacctttatatcgaaaacttagaattacgtagagaaatcgacactcttaatgaacgtttagctgctgaaggacaagcgattgatggagcagagctgagtaagggccaactcaaaacaaaagccagtcacagcaccagccagctctcccagaaactgaagaccacttacaaggcttccaccagcaagattgtctccagctttaagaccacgacatcgagagctgcctgccagctcgtgaaggagtacatcggccaccgggacggcatctgggatgtcagcgtggccaagacacagccagtggtgctcgggactgcatcagccgatcacacggctttgctgtggagcatagagacagggaagtgcctagtcaagtacgcaggccacgtgggctcagtaaattctatcaaatttcatccctcagagcagttggctctcactgcttctggagatcagactgctcatatctggagatacgcggtgcagctgccgacaccccagcctgttgctgacactagtgtaagcacctttccttacctgatgtgtaggatgctgatgtctgcgaatctgagaatccatttatgatatctgtcatggacggaatgtttgtgtccccccaagttcagtgttgaaggcctcacccccggtatggttgaatttggagattgggcctctaaggtagtagttaaggttcagtgaggttgcgtgaggtcctcataagaggagacagtggagagctcacctgtgttctcaatctctctgtcactctccgtgtcacgtaagagcagagccagagggcggccgtctttaaggatgagcccgcaccagaacctgaattggcttgatcttggacttccagcctccagcactgtgagaaaataaatgtctgtttttt

SEQ ID NO: 199781 - DNA, 1252 bp, Homo sapiens
  Payload ID: 19418
  Gene Name: WD repeat domain 38
  Uniprot ID: Q5JTN6
  ENST ID: ENST00000373574
  CDS Start-End: 57-1001
gggtcccgcggccgcctaggagggagcccgccggggcggggcggggccgggtgcccatgaacagcggggtcccggccacgctggccgtgcggagagtgaaattcttcggccagcacggcggggaggtcaactcttctgccttctcccctgatggccagatgctgctcacaggctcagaagatggctgcgtgtatggctgggagacccggagtgggcagctgctgtggaggctgggtggccacacaggccccgtgaagttctgccgcttctcccctgatggccacctcttcgccagcgcctcctgtgactgcactgtccgcctgtgggatgtggcaagagcgaagtgtctgcgggtcctgaagggtcaccaacggagtgtggagacggtcagcttcagccctgactcgagacagctggcatcaggtggctgggacaagcgggtgatgctctgggatgtgcagtccggccagatgctgcgcctcttagttgggcaccgtgactccatccagagcagcgacttctcacccacggtgaactgcctggccaccggctcctgggactccaccgtacacatctgggacctgcggatggtgaccccagcagtctcccaccaggcgctagagggacacagtgccaacatcagctgcctgtgctattcagcatccggcctcctggcatccggctcctgggacaagaccatccacatctggaagcccacaaccagcagcctgcttatccaactgaagggccatgtcacctgggtgaagagcatagccttctctcccgacgagctgtggctggccagcgccggctattcccgcatggtcaaagtctgggactgcaacacaggaaagtgccttgagaccctgaagggagtcctggatgtggcccacacctgtgccttcaccccagatgggaaaatcttagtgtctggagctgccgatcagactagacgtcaaatatcccgcacgtccaaatcacccagggaccctcaaacctaacaccaaccaccttagatggtgccgacctcacccgctcccctcagtggcgcacaggcatgccgcttctccccacagacgcaaagtgactgtgctggcatccagcagatccccatggccaggactctccaggccccaccagagcagacaactgtggtgggcaggacgcttgctggaacccatcagacacctggtccccaaaaccagacccacccacctccacccaatcagtggaagtgccaggaaacaaagca

SEQ ID NO: 199782 - DNA, 1323 bp, Homo sapiens
  Payload ID: 19418
  Gene Name: WD repeat domain 38
  ENST ID: ENST00000613760
  CDS Start-End: 116-1063
gccccgattaccatggagaccgcctgtacacagtttcctctttcctctgcccagtcctggggtcccgcggccgcctaggagggagcccgccggggcggggcggggccgggtgcccatgaacagcggggtcccggccacgctggccgtgcggagagtgaaattcttcggccagcacggcggggaggtcaactcttctgccttctcccctgatggccagatgctgctcacaggctcagaagatggctgcgtgtatggctgggagacccggagtgggcagctgctgtggaggctgggtggccacacaggccccgtgaagttctgccgcttctcccctgatggccacctcttcgccagcgcctcctgtgactgcactgtccgcctgtgggatgtggcaagagcgaagtgtctgcgggtcctgaagggtcaccaacggagtgtggagacggtcagcttcagccctgactcgagacagctggcatcaggtggctgggacaagcgggtgatgctctgggatgtgcagtccggccagatgctgcgcctcttagttgggcaccgtgactccatccagagcagcgacttctcacccacggtgaactgcctggccaccggctcctgggactccaccgtacacatctgggacctgcggatggtgaccccagcagtctcccaccaggcgctagagggacacagtgccaacatcagctgcctgtgctattcagcatccggcctcctggcatccggctcctgggacaagaccatccacatctggaagcccacaaccagcagcctgcttatccaactgaagggccatgtcacctgggtgaagagcatagccttctctcccgacgagctgtggctggccagcgccggctattcccgcatggtcaaagtctgggactgcaacacaggaaagtgccttgagaccctgaagcagggagtcctggatgtggcccacacctgtgccttcaccccagatgggaaaatcttagtgtctggagctgccgatcagactagacgtcaaatatcccgcacgtccaaatcacccagggaccctcaaacctaacaccaaccaccttagatggtgccgacctcacccgctcccctcagtggcgcacaggcatgccgcttctccccacagacgcaaagtgactgtgctggcatccagcagatccccatggccaggactctccaggccccaccagagcagacaactgtggtgggcaggacgcttgctggaacccatcagacacctggtccccaaaaccagacccacccacctccacccaatcagtggaagtgccaggaaacaaagcagtctcagcc

SEQ ID NO: 199783 - DNA, 1270 bp, Homo sapiens
  Payload ID: 19418
  Gene Name: WD repeat domain 38
  ENST ID: ENST00000618744
  CDS Start-End: 210-1010
gccccgattaccatggagaccgcctgtacacagtttcctctttcctctgcccagtcctggggtcccgcggccgcctaggagggagcccgccggggcggggcggggccgggtgcccatgaacagcggggtcccggccacgctggccgtgcggagagtgaaattcttcggccagcacggcggggaggtcaactcttctgccttctcccctgatggccagatgctgctcacaggctcagaagatggctgcgtgtatggctgggagacccggagtgggcagctgctgtggaggctgggtggccacacagatggtgctgtgtcctgtgtcacgtcacctttccaccttccccgaccccgggctggtgcctgcaggtcaccaacggagtgtggagacggtcagcttcagccctgactcgagacagctggcatcaggtggctgggacaagcgggtgatgctctgggatgtgcagtccggccagatgctgcgcctcttagttgggcaccgtgactccatccagagcagcgacttctcacccacggtgaactgcctggccaccggctcctgggactccaccgtacacatctgggacctgcggatggtgaccccagcagtctcccaccaggcgctagagggacacagtgccaacatcagctgcctgtgctattcagcatccggcctcctggcatccggctcctgggacaagaccatccacatctggaagcccacaaccagcagcctgcttatccaactgaagggccatgtcacctgggtgaagagcatagccttctctcccgacgagctgtggctggccagcgccggctattcccgcatggtcaaagtctgggactgcaacacaggaaagtgccttgagaccctgaagcagggagtcctggatgtggcccacacctgtgccttcaccccagatgggaaaatcttagtgtctggagctgccgatcagactagacgtcaaatatcccgcacgtccaaatcacccagggaccctcaaacctaacaccaaccaccttagatggtgccgacctcacccgctcccctcagtggcgcacaggcatgccgcttctccccacagacgcaaagtgactgtgctggcatccagcagatccccatggccaggactctccaggccccaccagagcagacaactgtggtgggcaggacgcttgctggaacccatcagacacctggtccccaaaaccagacccacccacctccacccaatcagtggaagtgccaggaaacaaagcagtctcagcc

SEQ ID NO: 199784 - DNA, 1471 bp, Homo sapiens
  Payload ID: 19419
  Gene Name: WD repeat domain 4
  Uniprot ID: P57081
  ENST ID: ENST00000330317
  CDS Start-End: 37-1275
ctggcacatgtgtatggcggtgaggcgggcgggtacatggcgggctctgtgggactggcgttgtgcgggcagacgttggtggtgcggggcggcagccgattcctggccacctccatagcaagcagtgatgatgacagcctcttcatctatgactgcagtgctgcagaaaagaagtcacaagaaaataaaggggaggacgcgcccttggaccaggggagcggtgcgattctggcgtccaccttctccaagtctggcagctattttgctttaaccgatgacagtaagcgtctgattcttttccgtacaaaaccatggcaatgtctgagtgtcaggaccgtggcaaggaggtgtacagccctgactttcatagcctcggaggagaaggtcttggtggccgacaagtctggagacgtctactccttttcggtgctggagccacacgggtgtggccgtctagagctggggcacctgtctatgctgttagatgtggctgtgagtcctgatgaccgcttcatcctcactgccgaccgggacgagaagatccgagtcagctgggccgcggcgccccatagcatcgagtccttctgcttggggcacacagagtttgtgagccgtatctccgtggtgccaactcagcccgggctgcttctgtcctcctctggggacggcaccctgaggctctgggagtacaggagcggccgccagctgcactgctgtcacctggccagtctgcaggagctggtggacccccaggccccccagaagtttgccgcgtccaggattgcattctggtgccaggagaactgcgtggcgctcctgtgcgacggcactcctgtggtctacatcttccagctggacgcccgcagacagcagttggtgtacaggcagcagctggcgttccagcaccaagtgtgggacgtggctttcgaggagacccaggggctgtgggtgctccaggactgccaggaagcccccctggtgctctacaggcctgtgggcgaccagtggcagtctgttcctgagagcaccgtgttaaagaaagtctctggtgttcttcgtgggaactgggccatgctggaaggctctgccggcgcagacgccagcttcagcagtctctacaaggccacgttcgacaacgtgacctcctacctgaagaagaaagaggagagactgcagcagcagctagagaagaagcagcggcgccggagtcccccgcctgggcccgacgggcatgccaagaagatgagaccgggggaggcgacgctaagttgctgatcgtggcggtctgtttctgtcgactgtggaccacttatgtgcgatccgtggaccacttgcgtgcgatctgtcggccgacgatgagcttgttcggatgtagctccatcgtaagtcgaggagcatctgtgatttgtcctctgcttatgggatatgtttttccgctactgagtctgtgtagtaaatttttgactaggaa

SEQ ID NO: 199785 - DNA, 2122 bp, Homo sapiens
  Payload ID: 19419
  Gene Name: WD repeat domain 4
  Uniprot ID: P57081
  ENST ID: ENST00000398208
  CDS Start-End: 61-1299
gtgcggacaggaagaggctctgggctggcacatgtgtatggcggtgaggcgggcgggtacatggcgggctctgtgggactggcgttgtgcgggcagacgttggtggtgcggggcggcagccgattcctggccacctccatagcaagcagtgatgatgacagcctcttcatctatgactgcagtgctgcagaaaagaagtcacaagaaaataaaggggaggacgcgcccttggaccaggggagcggtgcgattctggcgtccaccttctccaagtctggcagctattttgctttaaccgatgacagtaagcgtctgattcttttccgtacaaaaccatggcaatgtctgagtgtcaggaccgtggcaaggaggtgtacagccctgactttcatagcctcggaggagaaggtcttggtggccgacaagtctggagacgtctactccttttcggtgctggagccacacgggtgtggccgtctagagctggggcacctgtctatgctgttagatgtggctgtgagtcctgatgaccgcttcatcctcactgccgaccgggacgagaagatccgagtcagctgggccgcggcgccccatagcatcgagtccttctgcttggggcacacagagtttgtgagccgtatctccgtggtgccaactcagcccgggctgcttctgtcctcctctggggacggcaccctgaggctctgggagtacaggagcggccgccagctgcactgctgtcacctggccagtctgcaggagctggtggacccccaggccccccagaagtttgccgcgtccaggattgcattctggtgccaggagaactgcgtggcgctcctgtgcgacggcactcctgtggtctacatcttccagctggacgcccgcagacagcagttggtgtacaggcagcagctggcgttccagcaccaagtgtgggacgtggctttcgaggagacccaggggctgtgggtgctccaggactgccaggaagcccccctggtgctctacaggcctgtgggcgaccagtggcagtctgttcctgagagcaccgtgttaaagaaagtctctggtgttcttcgtgggaactgggccatgctggaaggctctgccggcgcagacgccagcttcagcagtctctacaaggccacgttcgacaacgtgacctcctacctgaagaagaaagaggagagactgcagcagcagctagagaagaagcagcggcgccggagtcccccgcctgggcccgacgggcatgccaagaagatgagaccgggggaggcgacgctaagttgctgatcgtggcggtcagtggtgtctctcacctcaaattaggaaaagctttttaacttgttcccctgcatcctggcatgtcccttcaagaaggaaaaggtgacatcagttgtgaccagctcagaggatggggctgtcccctgggctctagaaagaacattctgtgtcaccagcacaggctcttgctgggtgcctgtgccccctttctggttgaagggaagccagaccagtggagtggaagctcttgaagcactttcttttcatgtcggaggctgcgtgtgagccggtggtggcggcagctgtctgtgtttctcctgttctcataccgcccttcgtgtccgctgcatcttcctctaggagcatctgtgggctgacgtttctggcatggtggatgttttcatgttgttccgccgtctcagcatccaggtgacgtgctgtcccgcagtagctgctcgccacacaggctgttgaaactcagcacgaatgcttgagcctgccccagccccagccgtagcccttgtgctcaggagctgctcctggagagtggctcccttgtgggaagtgagaaacacgtttcggagtcgcagggagctctgtctggcatcggtggcacagatggtgaacttgtttcaggaagtgtgagcacgggcctggctggcacccggtttacagggaggtgattgaggacgtcgttatgatttgatttgaccttggcacacactgcagagccacagggatgttgctgaatttcaatcaccgatcagcaaggatgaaccttctcaacttcctaggaatgtttagcagcaaccgaatataccaggcaaaactc

SEQ ID NO: 199786 - DNA, 3958 bp, Homo sapiens
  Payload ID: 19420
  Gene Name: WD repeat domain 41
  Uniprot ID: Q9HAD4
  ENST ID: ENST00000296679
  CDS Start-End: 377-1756
gtcgggttgctgctccgcgcgcgtccaccaggggccgctcgagctacctaagctccgtgcgctacccggcggcgctcccgcgcgtgctcactcggagcagcgcgcgccccgcaatcgccgcagccgcccccgccgtcggccgccgcaccccaagcgactgcccaaactaagcctccgtggctgggtacgggagcgctttggggacaaaaattctccctcaactgtggtctgcattccttcggcccgtgggctgatctggggcgggaagtattagcgtctcagttgcgctgcagccggggaggaaggaggaggccgagcctggggcggagtttgggctgactggggctggaccgggcaagacgccgccgctgcccggatgttgcgatggctgatcgggggaggccgagaaccgcagggactggccgagaaatctcctttacagacaataggtgaagaacaaacccagaatccctacactgaactgctagtactgaaggctcatcatgatattgtacgatttctggtacagttagatgactacagatttgcatctgctggtgatgatggaattgtagttgtgtggaatgcccagacaggggaaaaacttttagaactgaatggacacactcaaaagataacagctattattacatttccttccttggaatcttgtgaagagaaaaatcaactcatcttgacagcctctgctgatagaacagttattgtgtgggatggtgatactaccagacaagttcagagaatatcatgcttccagtctactgtaaagtgtttaactgttcttcagagactagatgtttggctttctggtgggaatgacctgtgtgtgtggaaccgaaaattagatctcctgtgtaagactagccacctttctgatacaggtattagtgctttggttgaaatacctaagaactgtgttgtggcagcagttggcaaagaactgataattttcaggttggtagcacccacagaaggatcactagaatgggatattcttgaagttaagcgcctccttgatcaccaggataatattctctcattgattaatgtcaatgatttgagttttgtcaccggctcccacgtcggagagctgatcatctgggatgccctggactggaccatgcaggcctatgaacgcaacttctgggacccatctccacaactggacacccaacaagaaataaaactctgtcaaaaatcaaatgacatttctattcatcatttcacatgtgatgaagagaatgtatttgctgcagttggaaggggtttatacgtgtatagccttcaaatgaagcgtgtgattgcctgccagaaaactgcacatgactccaatgtcctgcacgttgccagacttccaaacaggcagttaatctcatgctcagaagatggcagtgtacgcatttgggagttaagagaaaaacagcagcttgcagctgagcctgtaccaacaggtttttttaacatgtggggatttggaagagtcagcaaacaagccagccaacctgttaaaaagcagcaagaaaatgctacttcatgttcactggagcttattggagatttgattggacactcatcatctgtggagatgtttctatactttgaagatcatggactagtgacgtgctccgctgatcatctcattattttgtggaaaaatggagagcgagaatctggattgcgcagtttaagattatttcaaaaattagaggagaatggtgacttataccttgctgtctagtttaaggaattaaaaatacacatgcatgaaccttgaacatcaaatatcgggtactactctgaaaaccattaatatattgatcacttaaattggtaattttttttgtcagtccataaaattctacatgtttaaattttttgtggacctaccaaccaggaacatgttgcttctcaggtcctagtatatcctccaaagaatataccacaagtttttccatttgactttgagctgctgttgaagtggtgagtgctgtgttttgagcttattttgaacctagatccttgtgaaaggtacaaatagaggtaatagttaagttatggcatttattagaagttttattatttggcttcctttagaattattgtgaagtttaaaaatagcctttctcctgcaaattttcctagtctttagtaactgttagtgttctatatagcacaaacttgaatctctcagccaaaaaagggaacatatatactgtttaagtatggcaagttttctttggtaccaatttgtttagataattttaaaaatgttttttagttctagctactaaaacctgtatgaactcaaatggataggcatcttgtgagggtgtgtttttcccagtgtgaattggcttgaagagccatgggctaaatgggtactagaacaacaactgcccctcatgtacgccaaggatgagctctagatcatttgagaggcacagtgtttccggagtcagggactgcagctgagcgcaactgccccatctgaccactgactcaaatacgaactgcttgagacagacttcttttatgtagttctttgcagtgtccattgagacactataaccagccttgtaacaatatgttttctccttttggtgctaaaaaatgaaaatattagaaagtagtctacacattaaagattgaaattcttaaactactgatgaagaaagggcaacgtgacagatgttagcagactgacccttcttacagaaaacctacagatttatttgttcattatacaaatatactacaaatataccctaaagggaatctccataagttcttttactagttttagctttgacagttgcttccacaactacctacaaagactggaagagttaaggtcatctgagtagaccagtggcataatgttacaaatgaggaaactgaggcccagtgcagtaaggccttgcaattaaatctgtagtgcccagtatcaccaagcagctctaaaaacaggaactgaagactgaatgagaaaaggcttatatgactactttaaatccaaacaacattgagtcatgaaaagttctatggagaaatattaaaacttaagctacctcaattacagaagactttctcccattattcacgtgctttttcctttagaaattctgcattggcccatacatttgtaaagttgttttctgaagttgtatgacacaagggagccatagacttaactgttttacttcctagcctgttctaggctagtattttgtgatagtaatctattcaaatggagtggtagaaatcacatgaattttggaagcaaatggtaccgtaagtaccacagcaaattccttctggtcattatacaggcgtacctcagagatactacaggttaggtttcagaccacatcaaaaaagcaactattgcaaatagagtgagtcacatctagtttttggtttcccagtgcctataaaacttgtgtttatactacagtcttaaatttctaaaaaatgtacataccttaagaatactttattgctaaaaaatgctaacaatcatctgagccttcagcgagtcataatctttttgctggtggagggtcttgatactgctggctgttgactaaggtggttactgaaggttggggtggctgtggcagttccttaaaataagatagcgatgaagttttccaaatcaattgacttcctttcacaaatgagatctctgtaacatgtaatactatttaatagcattttacccacagtagaacttctttcaaaatttagagtctgtcatctcaaatcctgatgctcctttatgaactaagtttatagaatattctaaatcctttgttgtcatttcaactatgtttacagcatcttcactgtggaaatgactgtctccagaaaccactttctatacacattcttaagcaacttctcatctattaaagtttgatcatgagattacagcaattca

SEQ ID NO: 199787 - DNA, 2338 bp, Homo sapiens
  Payload ID: 19420
  Gene Name: WD repeat domain 41
  ENST ID: ENST00000414719
  CDS Start-End: 70-654
ggaggccgagcctggggcggagtttgggctgactggggctggaccgggcaagacgccgccgctgcccggatgttgcgatggctgatcgggggaggccgagaaccgcagggactggccgagaaatctcctttacagacaataggtgaagaacaaacccagaatccctacactgaactgctagtactgaaggctcatcatgatattgtacgatttctggtacagttagatgactacagatttgcatctgctggtgatgatggaattgtagttgtgtggaatgcccagacaggggaaaaacttttagaactgaatggacacactcaaaagataacagctattattacatttccttccttggaatcttgtgaagagaaaaatcaactcatcttgacagcctctgctgatagaacagttattgtgtgggatggtgatactaccagacaagttcagagaatatcatgcttccagtctactgtaaagtgtttaactgttcttcagagactagatgtttggctttctggtgggaatgacctgtgtgtgtggaaccgaaaattagatctcctgtgtaagactagccacctttctgatacaggtattagtgctttggttgaaatacctaagaactgtgtttggcagcagttggcaaagaactgataattttcaggttggtagcacccacagaaggatcactagaatgggatattcttgaagttaagcgcctccttgatcaccaggataatattctctcattgattaatgtcaatgatttgagttttgtcaccggctcccacgtcggagagctgatcatctgggatgccctggactggaccatgcaggcctatgaacgcaacttctgggacccatctccacaactggacacccaacaagaaataaaactctgtcaaaaatcaaatgacatttctattcatcatttcacatgtgatgaagagaatgtatttgctgcagttggaaggggtttatacgtgtatagccttcaaatgaagcgtgtgattgcctgccagaaaactgcacatgactccaatgtcctgcacgttgccagacttccaaacaggcagttaatctcatgctcagaagatggcagtgtacgcatttgggagttaagagaaaaacagcagcttgcagctgagcctgtaccaacaggtttttttaacatgtggggatttggaagagtcagcaaacaagccagccaacctgttaaaaagcagcaagaaaatgctacttcatgttcactggagcttattggagatttgattggacactcatcatctgtggagatgtttctatactttgaagatcatggactagtgacgtgctccgctgatcatctcattattttgtggaaaaatggagagcgagaatctggattgcgcagtttaagattatttcaaaaattagaggagaatggtgacttataccttgctgtctagtttaaggaattaaaaatacacatgcatgaaccttgaacatcaaatatcgggtactactctgaaaaccattaatatattgatcacttaaattggtaattttttttgtcagtccataaaattctacatgtttaaattttttgtggacctaccaaccaggaacatgttgcttctcaggtcctagtatatcctccaaagaatataccacaagtttttccatttgactttgagctgctgttgaagtggtgagtgctgtgttttgagcttattttgaacctagatccttgtgaaaggtacaaatagaggtaatagttaagttatggcatttattagaagttttattatttggcttcctttagaattattgtgaagtttaaaaatagcctttctcctgcaaattttcctagtctttagtaactgttagtgttctatatagcacaaacttgaatctctcagccaaaaaagggaacatatatactgtttaagtatggcaagttttctttggtaccaatttgtttagataattttaaaaatgttttttagttctagctactaaaacctgtatgaactcaaatggataggcatcttgtgagggtgtgtttttcccagtgtgaattggcttgaagagccatgggctaaatgggtactagaacaacaactgcccctcatgtacgccaaggatgagctctagatcatttgagaggcacagtgtttccggagtcagggactgcagctgagcgcaactgccccatctgaccactgactcaaatacgaactgcttgagacagacttcttttatgtagttctttgcagtgtccattgagacactataaccagccttgtaacaatatgttttctccttttggtgctaaaaaatgaaaatattagaaagt

SEQ ID NO: 199788 - DNA, 854 bp, Homo sapiens
  Payload ID: 19420
  Gene Name: WD repeat domain 41
  ENST ID: ENST00000503035
  CDS Start-End: 258-341
gcagccgcccccgccgtcggccgccgcaccccaagcgactgcccaaactaagcctccgtggctgggtacgggagcgctttggggacaaaaattctccctcaactgtggtctgcattccttcggcccgtgggctgatctggggcgggaagtattagcgtctcagttgcgctgcagccggggaggaaggaggaggccgagcctggggcggagtttgggctgactggggctggaccgggcaagacgccgccgctgcccggatgttgcgatggctgatcgggggaggccgagaaccgcagggactggccgaggtaaaccccggaaatctcctttacagacaataggtgaagaacaaacccagaatccctacactgaactgctagtactgaaggctcatcatgatattgtacgatttctggtacagttagatgactacagatttgcatctgctggtgatgatggaattgtagttgtgtggaatgcccagacaggggaaaaacttttagaactgaatggacacactcaaaagataacagctattattacatttccttccttggaatcttgtgaagagaaaaatcaactcatcttgacagcctctgctgatagaacagttattgtgtgggatggtgatactaccagacaagttcagagaatatcatgcttccagtctactgtaaagtgtttaactgttcttcagagactagatgtttggctttctggtgggaatgacctgtgtgtgtggaaccgaaaattagatctcctgtgtaagactagccacctttctgatacaggtattagtgctttggttgaaatacctaagaactgtgttgtggcagcagttggcaaagaactga

SEQ ID NO: 199789 - DNA, 805 bp, Homo sapiens
  Payload ID: 19420
  Gene Name: WD repeat domain 41
  ENST ID: ENST00000511036
  CDS Start-End: 268-805
cgcaatcgccgcagccgcccccgccgtcggccgccgcaccccaagcgactgcccaaactaagcctccgtggctgggtacgggagcgctttggggacaaaaattctccctcaactgtggtctgcattccttcggcccgtgggctgatctggggcgggaagtattagcgtctcagttgcgctgcagccggggaggaaggaggaggccgagcctggggcggagtttgggctgactggggctggaccgggcaagacgccgccgctgcccggatgttgcgatggctgatcgggggaggccgagaaccgcagggactggccgagacaataggtgaagaacaaacccagaatccctacactgaactgctagtactgaaggctcatcatgatattgtacgatttctggtacagttagatgactacagatttgcatctgctggtgatgatggaattgtagttgtgtggaatgcccagacaggggaaaaacttttagaactgaatggacacactcaaaagataacagctattattacatttccttccttggaatcttgtgaagagaaaaatcaactcatcttgacagcctctgctgatagaacagttattgtgtgggatggtgatactaccagacaagttcagagaatatcatgcttccagtctactgtaaagtgtttaactgttcttcagagactagatgtttggctttctggtgggaatgacctgtgtgtgtggaaccgaaaattagatctcctgtgtaagactagccacctttctgatacaggtattagtgctttggttgaaatacctaaga

SEQ ID NO: 199790 - DNA, 543 bp, Homo sapiens
  Payload ID: 19420
  Gene Name: WD repeat domain 41
  ENST ID: ENST00000509971
  CDS Start-End: 92-543
agaatgaaaagaatgggcagcctagtggttgctcaggtgagcgcaggtacacagaccaggaagtatctctgctcctaacctctctttatgtatgcatgaagctaattgttcaagtccaggggaaactggtgagaaatctcctttacagacaataggtgaagaacaaacccagaatccctacactgaactgctagtactgaaggctcatcatgatattgtacgatttctggtacagttagatgactacagatttgcatctgctggtgatgatggaattgtagttgtgtggaatgcccagacaggggaaaaacttttagaactgaatggacacactcaaaagataacagctattattacatttccttccttggaatcttgtgaagagaaaaatcaactcatcttgacagcctctgctgatagaacagttattgtgtgggatggtgatactaccagacaagttcagagaatatcatgcttccagtctactgtaaagtgtttaactgttcttcagagactagatgtttggctttctggtgggaatga

SEQ ID NO: 199791 - DNA, 577 bp, Homo sapiens
  Payload ID: 19420
  Gene Name: WD repeat domain 41
  ENST ID: ENST00000513417
  CDS Start-End: 1-186
atgttgcgatggctgatcgggggaggccgagaaccgcagggactggccgagaaatctcctttacagacaataggtgaagaacaaacccagaatccctacactgaactgctagtactgaaggctcatcatgatattgtacgatttctggtacagttagatgactacagacaggggaaaaacttttagaactgaatggacacactcaaaagataacagctattattacatttccttccttggaatcttgtgaagagaaaaatcaactcatcttgacagcctctgctgatagaacagttattgtgtgggatggtgatactaccagacaagttcagagaatatcatgcttccagtctactgtaaagtgtttaactgttcttcagagactagatgtttggctttctggtgggaatgacctgtgtgtgtggaaccgaaaattagatctcctgtgtaagactagccacctttctgatacaggtattagtgctttggttgaaatacctaagaactgtgttgtggcagcagttggcaaagaactgataattttcaggttggtagcacccacagaaggatcactaga

SEQ ID NO: 199792 - DNA, 429 bp, Homo sapiens
  Payload ID: 19420
  Gene Name: WD repeat domain 41
  ENST ID: ENST00000511791
  CDS Start-End: 68-429
aggccgagcctggggcggagtttgggctgactggggctggaccgggcaagacgccgccgctgcccggatgttgcgatggctgatcgggggaggccgagaaccgcagggactggccgagaaatctcctttacagacaatagatttgagttttgtcaccggctcccacgtcggagagctgatcatctgggatgccctggactggaccatgcaggcctatgaacgcaacttctgggacccatctccacaactggacacccaacaagaaataaaactctgtcaaaaatcaaatgacatttctattcatcatttcacatgtgatgaagagaatgtatttgctgcagttggaaggggtttatacgtgtatagccttcaaatgaagcgtgtgattgcctgccagaaaactgcacatgactccaatgtcctgcacgt

SEQ ID NO: 199793 - DNA, 1553 bp, Homo sapiens
  Payload ID: 19420
  Gene Name: WD repeat domain 41
  Uniprot ID: Q9HAD4
  ENST ID: ENST00000507029
  CDS Start-End: 97-1311
agttgcgctgcagccggggaggaaggaggaggccgagcctggggcggagtttgggctgactggggctggaccgggcaagacgccgccgctgcccggatgttgcgatggctgatcgggggaggccgagaaccgcagggactggccgagacaggggaaaaacttttagaactgaatggacacactcaaaagataacagctattattacatttccttccttggaatcttgtgaagagaaaaatcaactcatcttgacagcctctgctgatagaacagttattgtgtgggatggtgatactaccagacaagttcagagaatatcatgcttccagtctactgtaaagtgtttaactgttcttcagagactagatgtttggctttctggtgggaatgacctgtgtgtgtggaaccgaaaattagatctcctgtgtaagactagccacctttctgatacaggtattagtgctttggttgaaatacctaagaactgtgttgtggcagcagttggcaaagaactgataattttcaggttggtagcacccacagaaggatcactagaatgggatattcttgaagttaagcgcctccttgatcaccaggataatattctctcattgattaatgtcaatgatttgagttttgtcaccggctcccacgtcggagagctgatcatctgggatgccctggactggaccatgcaggcctatgaacgcaacttctgggacccatctccacaactggacacccaacaagaaataaaactctgtcaaaaatcaaatgacatttctattcatcatttcacatgtgatgaagagaatgtatttgctgcagttggaaggggtttatacgtgtatagccttcaaatgaagcgtgtgattgcctgccagaaaactgcacatgactccaatgtcctgcacgttgccagacttccaaacaggcagttaatctcatgctcagaagatggcagtgtacgcatttgggagttaagagaaaaacagcagcttgcagctgagcctgtaccaacaggtttttttaacatgtggggatttggaagagtcagcaaacaagccagccaacctgttaaaaagcagcaagaaaatgctacttcatgttcactggagcttattggagatttgattggacactcatcatctgtggagatgtttctatactttgaagatcatggactagtgacgtgctccgctgatcatctcattattttgtggaaaaatggagagcgagaatctggattgcgcagtttaagattatttcaaaaattagaggagaatggtgacttataccttgctgtctagtttaaggaattaaaaatacacatgcatgaaccttgaacatcaaatatcgggtactactctgaaaaccattaatatattgatcacttaaattggtaattttttttgtcagtccataaaattctacatgtttaaattttttgtggacctaccaaccaggaacatgttgcttctcaggtcctagtatatcctccaaagaatataccacaagtttttccatttgactttgagctgctgttgaagtg

SEQ ID NO: 199794 - DNA, 582 bp, Homo sapiens
  Payload ID: 19420
  Gene Name: WD repeat domain 41
  ENST ID: ENST00000506307
  CDS Start-End: 4-459
cggatgttgcgatggctgatcgggggaggccgagaaccgcagggactggccgagaaatctcctttacagacaataggtgaagaacaaacccagaatccctacactgaactgctagtactgaaggctcatcatgatattgtacgatttctggtacagttagatgactacagatttgcatctgctggtgatgatggaattgtagttgtgtggaatgcccagacaggggaaaaacttttagaactgaatggacacactcaaaagataacagctattattacatttccttccttggaatcttgtgaagagaaaaatcaactcatcttgacagcctctgctgatagaacagttattgtgtgggatggtgatactaccagacaagttcagagaatatcatgcttccagtctactgtaaaggttggtagcacccacagaaggatcactagaatgggatattcttgaagttaagcgcctccttgatcaccaggataatattctctcattgattaatgtcaatgatttgagttttgtcaccggctcccacgtcggagagctgatcatctgggatgccctggactggaccat

SEQ ID NO: 199795 - DNA, 1042 bp, Homo sapiens
  Payload ID: 19420
  Gene Name: WD repeat domain 41
  ENST ID: ENST00000505129
  CDS Start-End: 277-750
cgcgcgccccgcaatcgccgcagccgcccccgccgtcggccgccgcaccccaagcgactgcccaaactaagcctccgtggctgggtacgggagcgctttggggacaaaaattctccctcaactgtggtctgcattccttcggcccgtgggctgatctggggcgggaagtattagcgtctcagttgcgctgcagccggggaggaaggaggaggccgagcctggggcggagtttgggctgactggggctggaccgggcaagacgccgccgctgcccggatgttgcgatggctgatcgggggaggccgagaaccgcagggactggccgagaaatctcctttacagacaataggtgaagaacaaacccagaatccctacactgaactgctagtactgaaggctcatcatgatattgtacgatttctggtacagttagatgactacagatttgcatctgctggtgatgatggaattgtagttgtgtggaatgcccagacaggggaaaaacttttagaactgaatggacacactcaaaagataacagctattattacatttccttccttggaatcttgtgaagagaaaaatcaactcatcttgacagcctctgctgatagaacagttattgtgtgggatggtgatactaccagacaagttcagagaatatcatgcttccagtctactgtaaaggtattagtgctttggttgaaatacctaagaactgtgttgtggcagcagttggcaaagaactgataattttcaggttggtagcacccacagaaggatcactagaatgggatattcttgaagttaagcgcctccttgatcaccaggataatattctctcattgattaatgtcaatgatttgagttttgtcaccggctcccacgtcggagagctgatcatctgggatgccctggactggaccatgcaggcctatgaacgcaacttctgggacccatctccacaactggacacccaacaagaaataaaactctgtcaaaaatcaaatgacatttctattcatcatttcacatgtgatga

SEQ ID NO: 199796 - DNA, 516 bp, Homo sapiens
  Payload ID: 19420
  Gene Name: WD repeat domain 41
  ENST ID: ENST00000511630
  CDS Start-End: 1-491
gtattagtgctttggttgaaatacctaagaactgtgttgtggcagcagttggcaaagaactgataattttcaggttggtagcacccacagaaggatcactagaatgggatattcttgaagttaagcgcctccttgatcaccaggataatattctctcattgattaatgtcaatgatttgagttttgtcaccggctcccacgtcggagagctgatcatctgggatgccctggactggaccatgcaggcctatgaacgcaacttctgggacccatctccacaactggacacccaacaagaaataaaactctgtcaaaaatcaaatgacatttctattcatcatttcacatgtgatgaagagaatgtatttgctgcagttggaaggggtttatacgtgtatagccttcaaatgaagcgtgtgattgcctgccagaaaactgcacatgactccaatgtcctgcacgttgccagacttccaaacaggtttttttaacatgtggggatttggaagagtcagc

SEQ ID NO: 199797 - DNA, 560 bp, Homo sapiens
  Payload ID: 19420
  Gene Name: WD repeat domain 41
  ENST ID: ENST00000506474
  CDS Start-End: 1-201
atgttgcgatggctgatcgggggaggccgagaaccgcagggactggccgagaaatctcctttacagacaataggtgaagaacaaacccagaatccctacactgaactgctagtactgaaggctcatcatgatattgtacgatttctggtacagttagatgactacagcctctccagcacctgttgtttcctgactttttaatgatcgccattctaactggtgtgagatgatatctcattgtggttttgatttgcatttctctgatggccagtgatgatttgcatctgctggtgatgatggaattgtagttgtgtggaatgcccagacaggggaaaaacttttagaactgaatggacacactcaaaagataacagctattattacatttccttccttggaatcttgtgaagagaaaaatcaactcatcttgacagcctctgctgatagaacagttattgtgtgggatggtgatactaccagacaagttcagagaatatcatgcttccagtctactgtaaagtgtttaactgttcttcagagactagatgtttggctttctg

SEQ ID NO: 199798 - DNA, 516 bp, Homo sapiens
  Payload ID: 19420
  Gene Name: WD repeat domain 41
  ENST ID: ENST00000504895
  CDS Start-End: 67-516
aaaggggagttgttctctggcgggcaggagtggggcaaggtgctcaggggagctttttgagccaggatgagccaggaaaaggacttttacaagaaatctcctttacagacaataggtgaagaacaaacccagaatccctacactgaactgctagtactgaaggctcatcatgatattgtacgatttctggtacagttagatgactacagatttgcatctgctggtgatgatggaattgtagttgtgtggaatgcccagacaggggaaaaacttttagaactgaatggacacactcaaaagataacagctattattacatttccttccttggaatcttgtgaagagaaaaatcaactcatcttgacagcctctgctgatagaacagttattgtgtgggatggtgatactaccagacaagttcagagaatatcatgcttccagtctactgtaaagtgtttaactgttcttcagagactagatgtttggctttctggtgggaatgacctgtgtgtgtgg

SEQ ID NO: 199799 - DNA, 1507 bp, Homo sapiens
  Payload ID: 19420
  Gene Name: WD repeat domain 41
  ENST ID: ENST00000515253
  CDS Start-End: 1-1185
ggaggccgagaaccgcagggactggccgagaaatctcctttacagacaataggtgaagaacaaacccagaatccctacactgaactgctagtactgaaggctcatcatgatattgtacgatttctggtacagttagatgactacagatttgcatctgctggtgatgatggaattgtagttgtgtggaatgcccagacaggggaaaaacttttagaactgaatggacacactcaaaagataacagctattattacatttccttccttggaatcttgtgaagagaaaaatcaactcatcttgacagcctctgctgatagaacagttattgtgtgggatggtgatactaccagacaagttcagagaatatcatgcttccagtctactgtaaagtgtttaactgttcttcagagactagatgtttggctttctggtgggaatgacctgtgtgtgtggaaccgaaaattagatctcctgtgtaagactagccacctttctgatacagatttgagttttgtcaccggctcccacgtcggagagctgatcatctgggatgccctggactggaccatgcaggcctatgaacgcaacttctgggacccatctccacaactggacacccaacaagaaataaaactctgtcaaaaatcaaatgacatttctattcatcatttcacatgtgatgaagagaatgtatttgctgcagttggaaggggtttatacgtgtatagccttcaaatgaagcgtgtgattgcctgccagaaaactgcacatgactccaatgtcctgcacgttgccagacttccaaacaggcagttaatctcatgctcagaagatggcagtgtacgcatttgggagttaagagaaaaacagcagcttgcagctgagcctgtaccaacaggtttttttaacatgtggggatttggaagagtcagcaaacaagccagccaacctgttaaaaagcagcaagaaaatgctacttcatgttcactggagcttattggagatttgattggacactcatcatctgtggagatgtttctatactttgaagatcatggactagtgacgtgctccgctgatcatctcattattttgtggaaaaatggagagcgagaatctggattgcgcagtttaagattatttcaaaaattagaggagaatggtgacttataccttgctgtctagtttaaggaattaaaaatacacatgcatgaaccttgaacatcaaatatcgggtactactctgaaaaccattaatatattgatcacttaaattggtaattttttttgtcagtccataaaattctacatgtttaaattttttgtggacctaccaaccaggaacatgttgcttctcaggtcctagtatatcctccaaagaatataccacaagtttttccatttgactttgagctgctgttgaagtggtgagtgctgtgttttgagcttattttgaacctagatccttgtgaaaggtacaaatagaggtaatagttaagttatggca

SEQ ID NO: 199800 - DNA, 570 bp, Homo sapiens
  Payload ID: 19420
  Gene Name: WD repeat domain 41
  ENST ID: ENST00000514559
  CDS Start-End: 3-570
ggatgttgcgatggctgatcgggggaggccgagaaccgcagggactggccgagaaatctcctttacagacaataggtgaagaacaaacccagaatccctacactgaactgctagtactgaaggctcatcatgatattgtacgatttctggtacagttagatgactacagatttgcatctgctggtgatgatggaattgtagttgtgtggaatgcccagacaggggaaaaacttttagaactgaatggacacactcaaaagataacagctattattacatttccttccttggaatcttgtgaagagaaaaatcaactcatcttgacagcctctgctgatagaacagttattgtgtgggatggtgatactaccagacaagttcagagaatatcatgcttccagtctactgtaaagagactagatgtttggctttctggtgggaatgacctgtgtgtgtggaaccgaaaattagatctcctgtgtaagactagccacctttctgatacaggtattagtgctttggttgaaatacctaagaactgtgttgtggcagcagttggcaaagaactga

SEQ ID NO: 199801 - DNA, 611 bp, Homo sapiens
  Payload ID: 19420
  Gene Name: WD repeat domain 41
  ENST ID: ENST00000509892
  CDS Start-End: 1-181
gcgatggctgatcgggggaggccgagaaccgcagggactggccgagaaatctcctttacagacaataggtgaagaacaaacccagaatccctacactgaactgctagtactgaaggctcatcatgatattgtacgatttctggtacagttagatgactacagacaggggaaaaacttttagaactgaatggacacactcaaaagataacagctattattacatttccttccttggaatcttgtgaagagaaaaatcaactcatcttgacagcctctgctgatagaacagttattgtgtgggatggtgatactaccagacaagttcagagaatatcatgcttccagtctactgtaaaggtaaaatcttaatgtttaactgttcttcagagactagatgtttggctttctggtgggaatgacctgtgtgtgtggaaccgaaaattagatctcctgtgtaagactagccacctttctgatacaggtattagtgctttggttgaaatacctaagaactgtgttgtggcagcagttggcaaagaactgataattttcaggttggtagcacccacagaaggatcactagaatgggatattcttgaagttaagcgcct

SEQ ID NO: 199802 - DNA, 562 bp, Homo sapiens
  Payload ID: 19420
  Gene Name: WD repeat domain 41
  ENST ID: ENST00000507654
  CDS Start-End: 141-562
cgggggaggccgagaaccgcagggactggccgagaaatctcctttacagacaataggtgaagaacaaacccagaatccctacactgaactgctagtactgaaggctcatcatgatattgtacgatttctggtacagttagatgactacagatttgagttttgtcaccggctcccacgtcggagagctgatcatctgggatgccctggactggaccatgcaggcctatgaacgcaacttctgggacccatctccacaactggacacccaacaagaaataaaactctgtcaaaaatcaaatgacatttctattcatcatttcacatgtgatgaagagaatgtatttgctgcagttggaaggggtttatacgtgtatagccttcaaatgaagcgtgtgattgcctgccagaaaactgcacatgactccaatgtcctgcacgttgccagacttccaaacaggcagttaatctcatgctcagaagatggcagtgtacgcatttgggagttaagagaaaaacagcagcttgcagctgagcctgtaccaacaggtttttttaacatgtg

SEQ ID NO: 199803 - DNA, 949 bp, Homo sapiens
  Payload ID: 19420
  Gene Name: WD repeat domain 41
  ENST ID: ENST00000509701
  CDS Start-End: 1-531
atgttgcgatggctgatcgggggaggccgagaaccgcagggactggccgagaaatctcctttacagacaataggtgaagaacaaacccagaatccctacactgaactgctagtactgaaggctcatcatgatattgtacgatttctggtacagttagatgactacagatttgcatctgctggtgatgatggaattgtagttgtgtggaatgcccagacaggggaaaaacttttagaactgaatggacacactcaaaagataacagctattattacatttccttccttggaatcttgtgaagagaaaaatcaactcatcttgacagcctctgctgatagaacagttattgtgtgggatggtgatactaccagacaagttcagagaatatcatgcttccagtctactgtaaagtgtttaactgttcttcagagactagatgtttggctttctggtgggaatgacctgtgtgtgtggaaccgaaaattagatctcctgtgtaagactagccacctttctgatacaggttggtagcacccacagaaggatcactagaatgggatattcttgaagttaagcgcctccttgatcaccaggataatattctctcattgattaatgtcaatgatttgagttttgtcaccggctcccacgtcggagagctgatcatctgggatgccctggactggaccatgcaggcctatgaacgcaacttctgggacccatctccacaactggacacccaacaagaaataaaactctgtcaaaaatcaaatgacatttctattcatcatttcacatgtgatgaagagaatgtatttgctgcagttggaaggggtttatacgtgtatagccttcaaatgaagcgtgtgattgcctgccagaaaactgcacatgactccaatgtcctgcacgttgccagacttccaaacaggcagttaatctcatgctc

SEQ ID NO: 199804 - DNA, 787 bp, Homo sapiens
  Payload ID: 19421
  Gene Name: WD repeat domain 43
  ENST ID: ENST00000296126
  CDS Start-End: 227-787
ggaaggcctggaggagaagtgatttcatttggaccttctgggatagagtggtggacatgacaacagagtcaactgcatacagtggcatcaagacagtggctgtttatatagttgttcagatgataaacatattgtggaatggaacgtacagacatgcaaagtaaagtgcaaatggaaaggcgacaatagcagtgtcagttccctatgtatcagcccagatggaaagatgttgctttcagctggtcgaacaatcaaactatgggttttggagaccaaagaagtctacaggcatttcacaggacatgcaacgccagtttcgtcactgatgttcactaccatcagacctcctaatgagagccagccctttgatggaattacaggtctttatttcttatctggagcagtacatgaccggttacttaatgtctggcaggtccgatcagaaaacaaagaaaagagtgcagtgatgtcatttacagttaccgatgaacctgtctatattgacttaactttgtcagaaaacaaagaagagcctgtcaagttggctgttgtttgcagagatggtcaagtccatctttttgaacacatattaaatgggtactgcaaaaagcctttgacttcaaactgcacaattcagatagcaacacctgggaaaggcaagaagtcaacaccaaaacccatccctattctagctgctggtttttgctcagacaaaatgtcattgttgcttgtatatggcagttggtttcagcctactattgagcgagtggctttaaactccagagaa

SEQ ID NO: 199805 - DNA, 3533 bp, Homo sapiens
  Payload ID: 19421
  Gene Name: WD repeat domain 43
  Uniprot ID: Q15061
  ENST ID: ENST00000407426
  CDS Start-End: 57-2090
gcgccggtgcgcctgcgcacggacgaacacgtggctgcagcggggccagagcagcaatggcggcgggcggcggcggtagctgcgaccccctggcccctgctggggtcccttgcgccttctccccgcacagccaggcctacttcgctttggcctctaccgacggtcacttacgagtatgggagacggccaacaaccggctgcaccaggagtacgtgccttccgcgcacctcagtggtacctgcacctgtctggcctgggcgccagcgcggctgcaggccaaggaaagtccccagaggaaaaaaaggaaatcagaagctgtaggaatgagtaaccagactgacttattggctcttggcacagcagttggtagcattttattatacagcacagtaaaaggagagttacacagtaaattaataagtggtggacatgacaacagagtcaactgcatacagtggcatcaagacagtggctgtttatatagttgttcagatgataaacatattgtggaatggaacgtacagacatgcaaagtaaagtgcaaatggaaaggcgacaatagcagtgtcagttccctatgtatcagcccagatggaaagatgttgctttcagctggtcgaacaatcaaactatgggttttggagaccaaagaagtctacaggcatttcacaggacatgcaacgccagtttcgtcactgatgttcactaccatcagacctcctaatgagagccagccctttgatggaattacaggtctttatttcttatctggagcagtacatgaccggttacttaatgtctggcaggtccgatcagaaaacaaagaaaagagtgcagtgatgtcatttacagttaccgatgaacctgtctatattgacttaactttgtcagaaaacaaagaagagcctgtcaagttggctgttgtttgcagagatggtcaagtccatctttttgaacacatattaaatgggtactgcaaaaagcctttgacttcaaactgcacaattcagatagcaacacctgggaaaggcaagaagtcaacaccaaaacccatccctattctagctgctggtttttgctcagacaaaatgtcattgttgcttgtatatggcagttggtttcagcctactattgagcgagtggctttaaactccagagaacctcatatgtgtttagtaagagatatttcaaactgctgggcccccaaagtagaaacagctataacaaaggtgaggacaccagtgatgaattctgaagcaaaagttctggtgcctgggattcctggtcatcatgcagctatcaagcccgctcctccacaaaccgagcaagtagagagcaagaggaagtcagggggaaatgaggttagcattgaagaacgtctgggagcaatggatatagacacacacaaaaaaggaaaggaagacctccagacgaatagctttccagttcttcttacccagggcttagaaagtaacgattttgaaatgctaaataaagtacttcaaactaggaatgtaaaccttataaagaagactgtattaaggatgcccctgcatactattattccgttgttacaagagcttacaaagaggttacaaggacatcctaatagtgctgtgctaatggttcagtggctaaaatgtgtgttaacagttcatgcatcatacctgtccacgttgcctgacctggtaccccagctggggacactctaccagttaatggaaagcagagtcaaaacttttcagaaactttcacaccttcatggaaagcttattcttctaattacacaagtaacagcatcagagaagacaaagggagcaacttcccctggacagaaggcaaagttggtgtatgaagaagagtcttctgaagaggagtctgatgatgaaatagcagataaggattctgaagataattgggatgaagatgaggaggagagtgaaagtgaaaaagatgaggacgttgaagaggaagatgaggatgccgaaggaaaagatgaagaaaatggcgaggacagagatacagcaagtgaaaaagaattaaatggagattctgatttagatcctgaaaatgaaagtgaagaagaatgaagacagcaaagcaagccggtcaaactatataaactctggctcaccttgcccagtggtgagggctgcctctgtgccaggatgccaaggaccgctgcacatttccaaattcacagcagtggatcccatgccactttgctgtcctgagcaccccagacttgactgtgtaaataagagtgtttcattcaaatgttaataaactttacacagtatatagacacattttctgcaatgtactgacatcagtgtccaatatatggtatatttttataatataatatcctagtatgattggttatatcaagaattgacaagtgcagataaagacctttcccataggagttcaagaactggactgttgtgaagaagtcagctcttatctcaggttggtatctttcatcaaatccagatgcaaagcagcactagtgaaaatttttttaatttagtacatttaatttggtacattttcataaaatatgaagggataactacaaactggagtaaaaatgatggtaattaaaaaaaatcctcagtatccctagcttgtctattaactgtgataatctgacttgagtcagattgaatatttggagtgcttccccagaataaccacttatttttgaagctatcatgtgaagtatttttttaaaacaaaacaaaaattatggtcattaaaaaactagagaattagccatattaaggatttttcttgactgcaaattacttctaaagaatcatcagtgtatagattagaagtgctcattacctgcaacttttaaaaaaaattcagttatagctgcttttgaagaggtttccatttttatttaaattactaatggatcaaagaacaattgtttattttttctctttggttttagatattaatgataaccttgttggaattttttttccaaagaaaatatttttataattaaataatttaatgtttttcttccttttcattacctactcttggcagtgttagggtatctgtttacctttaaaatgataagtctcactcaagattttttatgtatgtataaatattttggtgtgctacaaaagcctttgcaaattatcagtagtagtttttttttttttttttttttttttaaagaatgagccgatattggcttagtgctcactaggggacatgcacatggaagctcacctctaagaaagggctgggcagatggatttattttttcccacctgtgaatatgtaaaacaaaaccattatctttgagggagtttttaataccaatgacagaacagagatttgtgtgctcatcttaagagccagagccatataagcatcttgggaaagcaagtttgaaccagctgctggtgtaatgtacagttatatttgtctataaatggagctgtttatggcaatttaataccattctctttgtaaagtgaataaatattcatctttacccagtg

SEQ ID NO: 199806 - DNA, 386 bp, Homo sapiens
  Payload ID: 19421
  Gene Name: WD repeat domain 43
  ENST ID: ENST00000434238
  CDS Start-End: 311-386
gcgtgcggcctgccgcgagggcagtgagggagggcgcagctcgacccggccggcctcgtatccgagccctgccggctggcccaatgaggcctgggccccactgttgacgggcagccatgttcgccaagtcccctggtccccctggggcggcttccttctgccgggccttggctcatcagagttctggtttttgacagagccccatcttgggactatctaactttcctctgtctgtgatccggctcatcagttttgcactgggcagttggaaagtccccagaggaaaaaaaggaaatcagaagctgtaggaatgagtaaccagactgacttattggctcttggcacagcagttggtagcattttattatacagcacagtaaaaggag

SEQ ID NO: 199807 - DNA, 541 bp, Homo sapiens
  Payload ID: 19421
  Gene Name: WD repeat domain 43
  ENST ID: ENST00000440983
  CDS Start-End: 101-541
tacagagtagccaaaccgaatcactgcaaagtgatttggaaacatcaggtatcctgaggaaagtccccagaggaaaaaaaggaaatcagaagctgtaggaatgagtaaccagactgacttattggctcttggcacagcagttggtagcattttattatacagcacagtaaaaggagagttacacagtaaattaataagtggtggacatgacaacagagtcaactgcatacagtggcatcaagacagtggctgtttatatagttgttcagatgataaacatattgtggaatggaacgtacagacatgcaaagtaaagtgcaaatggaaaggcgacaatagcagtgtcagttccctatgtatcagcccagatggaaagatgttgctttcagctggtcgaacaatcaaactatgggttttggagaccaaagaagtctacaggcatttcacaggacatgcaacgccagtttcgtcactgatgttcactaccatcagacctcctaatgagagccagccctttgatggaattacaggtctttatttc

SEQ ID NO: 199808 - DNA, 4111 bp, Homo sapiens
  Payload ID: 19422
  Gene Name: WD repeat domain 44
  Uniprot ID: Q5JSH3
  ENST ID: ENST00000254029
  CDS Start-End: 396-3137
attttgcgggcaactagctcttccagctgctgtaaattgctgctgcgggagaaactggagccgctgtagccggcgcgcccttcttcccttactgcgaggagccaccgcctctttcgcgctccttatacacctatcactgggagcggtggcagcaacattccctggaccaaccgccgcctcttcaggcggccgctttgccggtcattcccgaagcccggcaactgagggcggccccctttccttaacagtctcctcgctacagatcgtctgctccctcagcctcgcccgagacccacttccccagtctcgcccgggtggaggtcgacgaggaggagacaagagtcacccttcctccaggcggcgccggccccctcacccgcgggtgtgtcctataaatggcgtcggaaagcgacaccgaggaattctatgatgcccctgaagatgtgcacctagggggcggctaccccgtggggtctccaggaaaagttgggctttcaacattcaaggaaacagagaacactgcatacaaagttggaaatgagtcccctgtacaagaattgaaacaagatgtgtctaaaaagattattgaaagtattattgaggagagtcagaaagtactacagcttgaagatgactctttggattccaaaggaaaagaactctctgatcaagctactgccagtcctattgtggctagaacagatctgagcaatatacccggactgttagccatagatcaagtactaccggaagaatcccaaaaggcagagagtcagaatacatttgaagagactgaattagaattaaaaaaatgctttccttctgatgaaacctgtgagaaaccagtagatgaaaccacgaagttaactcaaacaagttcaactgagcagcttaatgtgcttgaaactgaaacagaagtattgaacaaggaagcagtggaagtcaaaggaggtggtgatgttttagagcctgtgtcctcagactccttatctactaaagattttgccgctgtggaagaagtggcccctgccaaacccccaagacaccttactccagagcctgatatagtggctagtacaaagaagcctgttccagcacgcccacctcctccaactaatttcccacctcctagacccccacctccttctcgacctgctccaccaccaagaaaaaggaaaagcgaattggaatttgagactctgaaaactcctgatatagatgttcccaaagagaatattacgtctgattctctcctaaccgcaagcatggcttcagaaagtacggttaaggattctcagccttctcttgatttggcaagtgctaccagtggagataaaatagttaccgcccaggaaaatggaaaagcacctgatgggcagactgtagcaggtgaagtgatgggccctcagagacctagatccaactctgggagagagcttactgatgaggaaattttagccagtgtaatgattaagaacctggatactggagaagaaatacctttgagtcttgcagaagagaaactaccaacaggcattaatcctctcactctacacatcatgagaaggacaaaagaatatgtaagtaatgacgcggcacagtcagatgatgaagagaagttacagtctcagccaacagatactgatggtggaaggttaaaacagaaaacgactcaactaaagaagtttcttggaaaatcagtaaagagagcaaagcaccttgctgaggaatatggtgaacgtgctataaataaagttaaaagtgttagagatgaagtgtttcatactgatcaagatgatccttcatcaagtgatgatgaaggaatgccatacacaagaccagttaaattcaaagcagcacacggtttcaaaggaccttatgattttgatcagatcaaagtggtgcaagatcttagtggtgaacatatgggagctgtttggaccatgaaattttctcactgtggccgattacttgcctcagctggacaagacaatgtagtgagaatatgggctttaaaaaatgcttttgactatttcaacaatatgcgaatgaaatacaatactgaaggacgtgtgtccccatcaccctctcaggaaagtctaagttcatcaaaatcggatacagatacaggggtatgcagtggaactgatgaagaccctgatgataaaaacgcaccctttcggcaacggccattttgcaaatataaaggacatactgctgatctccttgatctttcatggtctaaaaactactttcttctttcttcttcaatggataaaacagtcagattatggcacatttctcgaagagaatgcctttgctgttttcaacatatagattttgtcactgccatagcttttcatccaagagatgacaggtattttctaagtgggtctttggatggaaagctccgcctttggaacatacctgacaaaaaagtggctttgtggaatgaagtagatggtcagacaaaattgatcacagctgcaaatttctgtcagaatggcaaatatgcagtgattgggacatatgatggcagatgtattttctatgatacagagcatttgaaataccatacacaaatacatgtccgatctactagagggcgcaacaaggttggaagaaaaattactggcattgagcctttacctggagaaaataagatattggtaacctcaaatgactccagaatcagactatatgatttgagagatttgtcactatccatgaagtataagggttacgtcaatagcagcagccagatcaaagcaagtttcagccatgattttacttacctcgttagtggttcagaagataagtatgtttatatctggagtacctaccatgacctaagcaagtttacttcagtcaggagagatcgtaatgacttctgggaaggtattaaagcccacaatgcagttgttacatcagccatctttgcaccaaacccaagtttgatgttatctttggatgtgcaatctgaaaaatcagaagggaacgagaaaagtgaagatgctgaagttttggatgccacaccttctggtattatgaagacagataacacagaagttcttctctctgctgacttcactggagcaatcaaagtgtttgttaataaaagaaaaaatgtatcttaatttgaaatggcatttaaaataaacatatcagtaagtttctatatgtatcaaaactgaaaaaatagtgttccaggctaacatacttttttaatttttattgaaagttgttcaaatataatatattttttgagaggcagtgttaatgatctaggaaaccctgggctgatagagtagaaaggaatatggctagaataacattgccaaacattaggctttatgttttgttatgtttgtgttttcgttgtataattatgaacatgcacaagtttctgcatgaaaagatattaatatattaatcacatgtatgtgccttttggttacatgcattaaatctaacagagttaaattatttcagtggctcttttggcctcttactaggggggatagtcttgtttctagcttaaacaattttttttttgcacaaaatttcatttttaataaaagtggtatcttttgactgagttattgttttgaaaatggtatataggtttccagtaggtcaacaaccatatgtaaatggtttttataaatttctcaatttggggacaagatttttttgtggtctaaattgtgggcttaagattcttttctttatatgtgtacatataatttttttttctttgccacactggagcacaatgtttctatgtaaagaattattttcattctttatccatgagcaccaggctttgctcacttaaaaaaaaattaagccacattaaggagtgagtcttcttttttacaataatgtaaaaattaaactgtttacatttttttaaagcattgtagtttttaaaaattaagctgttttgttttgtgttgttgaatttgaaagcctttgtaaatatcaatataatgtaccaatgaaataacatctggggcaatgaaaccctgatcatgttgttgatggttagcatatgtttctgaaaattaaatatgtattattaaaagttggtctccaacacttgtttaaa

SEQ ID NO: 199809 - DNA, 3877 bp, Homo sapiens
  Payload ID: 19422
  Gene Name: WD repeat domain 44
  Uniprot ID: Q5JSH3
  ENST ID: ENST00000371822
  CDS Start-End: 432-2906
ccctccgaaatctcgcgagggtaggtgcgcgtcggtattttgcgggcaactagctcttccagctgctgtaaattgctgctgcgggagaaactggagccgctgtagccggcgcgcccttcttcccttactgcgaggagccaccgcctctttcgcgctccttatacacctatcactgggagcggtggcagcaacattccctggaccaaccgccgcctcttcaggcggccgctttgccggtcattcccgaagcccggcaactgagggcggccccctttccttaacagtctcctcgctacagatcgtctgctccctcagcctcgcccgagacccacttccccagtctcgcccgggtggaggtcgacgaggaggagacaagagtcacccttcctccaggcggcgccggccccctcacccgcgggtgtgtcctataaatggcgtcggaaagcgacaccgaggaattctatgatgcccctgaagatgtgcacctagggggcggctaccccgtggggtctccaggaaaagttgggctttcaacattcaagattattgaaagtattattgaggagagtcagaaagtactacagcttgaagatgactctttggattccaaaggaaaagaactctctgatcaagctactgccagtcctattgtggctagaacagatctgagcaatatacccggactgttagccatagatcaagtactaccggaagaatcccaaaaggcagagagtcagaatacatttgaagagactgaattagaattaaaaaaatgctttccttctgatgaaacctgtgagaaaccagtagatgaaaccacgaagttaactcaaacaagttcaactgagcagcttaatgtgcttgaaactgaaacagaagtattgaacaaggaagcagtggaagtcaaaggaggtggtgatgttttagagcctgtgtcctcagactccttatctactaaagattttgccgctgtggaagaagtggcccctgccaaacccccaagacaccttactccagagcctgatatagtggctagtacaaagaagcctgttccagcacgcccacctcctccaactaatttcccacctcctagacccccacctccttctcgacctgctccaccaccaagaaaaaggaaaagcgaattggaatttgagactctgaaaactcctgatatagatgttcccaaagagaatattacgtctgattctctcctaaccgcaagcatggcttcagaaagtacggttaaggattctcagccttctcttgatttggcaagtgctaccagtggagataaaatagttaccgcccaggaaaatggaaaagcacctgatgggcagactgtagcaggtgaagtgatgggccctcagagacctagatccaactctgggagagagcttactgatgaggaaattttagccagtgtaatgattaagaacctggatactggagaagaaatacctttgagtcttgcagaagagaaactaccaacaggcattaatcctctcactctacacatcatgagaaggacaaaagaatatgtaagtaatgacgcggcacagtcagatgatgaagagaagttacagtctcagccaacagatactgatggtggaaggttaaaacagaaaacgactcaactaaagaagtttcttggaaaatcagtaaagagagcaaagcaccttgctgaggaatatggtgaacgtgctataaataaagttaaaagtgttagagatgaagtgtttcatactgatcaagatgatccttcatcaagtgatgatgaaggaatgccatacacaagaccagttaaattcaaagcagcacacggtttcaaaggaccttatgattttgatcagatcaaagtggtgcaagatcttagtggtgaacatatgggagctgtttggaccatgaaattttctcactgtggccgattacttgcctcagctggacaagacaatgtagtgagaatatgggctttaaaaaatgcttttgactatttcaacaatatgcgaatgaaatacaatactgaaggacgtgtgtccccatcaccctctcaggaaagtctaagttcatcaaaatcggatacagatacaggggtatgcagtggaactgatgaagaccctgatgataaaaacgcaccctttcggcaacggccattttgcaaatataaaggacatactgctgatctccttgatctttcatggtctaaaaactactttcttctttcttcttcaatggataaaacagtcagattatggcacatttctcgaagagaatgcctttgctgttttcaacatatagattttgtcactgccatagcttttcatccaagacatttgaaataccatacacaaatacatgtccgatctactagagggcgcaacaaggttggaagaaaaattactggcattgagcctttacctggagaaaataagatattggtaacctcaaatgactccagaatcagactatatgatttgagagatttgtcactatccatgaagtataagggttacgtcaatagcagcagccagatcaaagcaagtttcagccatgattttacttacctcgttagtggttcagaagataagtatgtttatatctggagtacctaccatgacctaagcaagtttacttcagtcaggagagatcgtaatgacttctgggaaggtattaaagcccacaatgcagttgttacatcagccatctttgcaccaaacccaagtttgatgttatctttggatgtgcaatctgaaaaatcagaagggaacgagaaaagtgaagatgctgaagttttggatgccacaccttctggtattatgaagacagataacacagaagttcttctctctgctgacttcactggagcaatcaaagtgtttgttaataaaagaaaaaatgtatcttaatttgaaatggcatttaaaataaacatatcagtaagtttctatatgtatcaaaactgaaaaaatagtgttccaggctaacatacttttttaatttttattgaaagttgttcaaatataatatattttttgagaggcagtgttaatgatctaggaaaccctgggctgatagagtagaaaggaatatggctagaataacattgccaaacattaggctttatgttttgttatgtttgtgttttcgttgtataattatgaacatgcacaagtttctgcatgaaaagatattaatatattaatcacatgtatgtgccttttggttacatgcattaaatctaacagagttaaattatttcagtggctcttttggcctcttactaggggggatagtcttgtttctagcttaaacaattttttttttgcacaaaatttcatttttaataaaagtggtatcttttgactgagttattgttttgaaaatggtatataggtttccagtaggtcaacaaccatatgtaaatggtttttataaatttctcaatttggggacaagatttttttgtggtctaaattgtgggcttaagattcttttctttatatgtgtacatataatttttttttctttgccacactggagcacaatgtttctatgtaaagaattattttcattctttatccatgagcaccaggctttgctcacttaaaaaaaaattaagccacattaaggagtgagtcttcttttttacaataatgtaaaaattaaactgtttacatttttttaaagcattgtagtttttaaaaattaagctgttttgttttgtgttgttgaatttgaaagcctttgtaaatatcaatataatgtaccaatgaaataacatctggggcaatgaaaccctgatcatgttgttgatggttagcatatgtttctgaaaattaaatatgtattattaaaagttggtctccaacacttgttt

SEQ ID NO: 199810 - DNA, 4029 bp, Homo sapiens
  Payload ID: 19422
  Gene Name: WD repeat domain 44
  Uniprot ID: Q5JSH3
  ENST ID: ENST00000371825
  CDS Start-End: 362-3079
aattgctgctgcgggagaaactggagccgctgtagccggcgcgcccttcttcccttactgcgaggagccaccgcctctttcgcgctccttatacacctatcactgggagcggtggcagcaacattccctggaccaaccgccgcctcttcaggcggccgctttgccggtcattcccgaagcccggcaactgagggcggccccctttccttaacagtctcctcgctacagatcgtctgctccctcagcctcgcccgagacccacttccccagtctcgcccgggtggaggtcgacgaggaggagacaagagtcacccttcctccaggcggcgccggccccctcacccgcgggtgtgtcctataaatggcgtcggaaagcgacaccgaggaattctatgatgcccctgaagatgtgcacctagggggcggctaccccgtggggtctccaggaaaagttgggctttcaacattcaaggaaacagagaacactgcatacaaagttggaaatgagtcccctgtacaagaattgaaacaagatgtgtctaaaaagattattgaaagtattattgaggagagtcagaaagtactacagcttgaagatgactctttggattccaaaggaaaagaactctctgatcaagctactgccagtcctattgtggctagaacagatctgagcaatatacccggactgttagccatagatcaagtactaccggaagaatcccaaaaggcagagagtcagaatacatttgaagagactgaattagaattaaaaaaatgctttccttctgatgaaacctgtgagaaaccagtagatgaaaccacgaagttaactcaaacaagttcaactgagcagcttaatgtgcttgaaactgaaacagaagtattgaacaaggaagcagtggaagtcaaaggaggtggtgatgttttagagcctgtgtcctcagactccttatctactaaagattttgccgctgtggaagaagtggcccctgccaaacccccaagacaccttactccagagcctgatatagtggctagtacaaagaagcctgttccagcacgcccacctcctccaactaatttcccacctcctagacccccacctccttctcgacctgctccaccaccaagaaaaaggaaaagcgaattggaatttgagactctgaaaactcctgatatagatgttcccaaagagaatattacgtctgattctctcctaaccgcaagcatggcttcagaaagtacggttaaggattctcagccttctcttgatttggcaagtgctaccagtggagataaaatagttaccgcccaggaaaatggaaaagcacctgatgggcagactgtagcaggtgaagtgatgggccctcagagacctagatccaactctgggagagagcttactgatgaggaaattttagccagtgtaatgattaagaacctggatactggagaagaaatacctttgagtcttgcagaagagaaactaccaacaggcattaatcctctcactctacacatcatgagaaggacaaaagaatatgtaagtaatgacgcggcacagtcagatgatgaagagaagttacagtctcagccaacagatactgatggtggaaggttaaaacagaaaacgactcaactaaagaagtttcttggaaaatcagtaaagagagcaaagcaccttgctgaggaatatggtgaacgtgctataaataaagttaaaagtgttagagatgaagtgtttcatactgatcaagatgatccttcatcaagtgatgatgaaggaatgccatacacaagaccagttaaattcaaagcagcacacggtttcaaaggaccttatgattttgatcagatcaaagtggtgcaagatcttagtggtgaacatatgggagctgtttggaccatgaaattttctcactgtggccgattacttgcctcagctggacaagacaatgtagtgagaatatgggctttaaaaaatgcttttgactatttcaacaatatgcgaatgaaatacaatactgaaggacgtgtgtccccatcaccctctcaggaaagtctaagttcatcaaaatcggatacagatacaggggtatgcagtggaactgatgaagaccctgatgataaaaacgcaccctttcggcaacggccattttgcaaatataaaggacatactgctgatctccttgatctttcatggtctaaaaactactttcttctttcttcttcaatggataaaacagtcagattatggcacatttctcgaagagaatgcctttgctgttttcaacatatagattttgtcactgccatagcttttcatccaagagatgacaggtattttctaagtgggtctttggatggaaagctccgcctttggaacatacctgacaaaaaagtggctttgtggaatgaagtagatggtcagacaaaattgatcacagctgcaaatttctgtcagaatggcaaatatgcagtgattgggacatatgatggcagatgtattttctatgatacagagcatttgaaataccatacacaaatacatgtccgatctactagagggcgcaacaaggttggaagaaaaattactggcattgagcctttacctggagaaaataagatattggtaacctcaaatgactccagaatcagactatatgatttgagagatttgtcactatccatgaagtataagggttacgtcaatagcagcagccagatcaaagcaagtttcagtggttcagaagataagtatgtttatatctggagtacctaccatgacctaagcaagtttacttcagtcaggagagatcgtaatgacttctgggaaggtattaaagcccacaatgcagttgttacatcagccatctttgcaccaaacccaagtttgatgttatctttggatgtgcaatctgaaaaatcagaagggaacgagaaaagtgaagatgctgaagttttggatgccacaccttctggtattatgaagacagataacacagaagttcttctctctgctgacttcactggagcaatcaaagtgtttgttaataaaagaaaaaatgtatcttaatttgaaatggcatttaaaataaacatatcagtaagtttctatatgtatcaaaactgaaaaaatagtgttccaggctaacatacttttttaatttttattgaaagttgttcaaatataatatattttttgagaggcagtgttaatgatctaggaaaccctgggctgatagagtagaaaggaatatggctagaataacattgccaaacattaggctttatgttttgttatgtttgtgttttcgttgtataattatgaacatgcacaagtttctgcatgaaaagatattaatatattaatcacatgtatgtgccttttggttacatgcattaaatctaacagagttaaattatttcagtggctcttttggcctcttactaggggggatagtcttgtttctagcttaaacaattttttttttgcacaaaatttcatttttaataaaagtggtatcttttgactgagttattgttttgaaaatggtatataggtttccagtaggtcaacaaccatatgtaaatggtttttataaatttctcaatttggggacaagatttttttgtggtctaaattgtgggcttaagattcttttctttatatgtgtacatataatttttttttctttgccacactggagcacaatgtttctatgtaaagaattattttcattctttatccatgagcaccaggctttgctcacttaaaaaaaaattaagccacattaaggagtgagtcttcttttttacaataatgtaaaaattaaactgtttacatttttttaaagcattgtagtttttaaaaattaagctgttttgttttgtgttgttgaatttgaaagcctttgtaaatatcaatataatgtaccaatgaaataacatctggggcaatgaaaccctgatcatgttgttgatggttagcatatgtttctgaaaattaaatatgtattattaaaa

SEQ ID NO: 199811 - DNA, 2844 bp, Homo sapiens
  Payload ID: 19422
  Gene Name: WD repeat domain 44
  ENST ID: ENST00000371848
  CDS Start-End: 1-2419
aacagatctgagcaatatacccggactgttagccatagatcaagtactaccggaagaatcccaaaaggcagagagtcagaatacatttgaagagactgaattagaattaaaaaaatgctttccttctgatgaaacctgtgagaaaccagtagatgaaaccacgaagttaactcaaacaagttcaactgagcagcttaatgtgcttgaaactgaaacagaagtattgaacaaggaagcagtggaagtcaaaggaggtggtgatgttttagagcctgtgtcctcagactccttatctactaaagattttgccgctgtggaagaagtggcccctgccaaacccccaagacaccttactccagagcctgatatagtggctagtacaaagaagcctgttccagcacgcccacctcctccaactaatttcccacctcctagacccccacctccttctcgacctgctccaccaccaagaaaaaggaaaagcgaattggaatttgagactctgaaaactcctgatatagatgttcccaaagagaatattacgtctgattctctcctaaccgcaagcatggcttcagaaagtacggttaaggattctcagccttctcttgatttggcaagtgctaccagtggagataaaatagttaccgcccaggaaaatggaaaagcacctgatgggcagactgtagcaggtgaagtgatgggccctcagagacctagatccaactctgggagagagcttactgatgaggaaattttagccagtgtaatgattaagaacctggatactggagaagaaatacctttgagtcttgcagaagagaaactaccaacaggcattaatcctctcactctacacatcatgagaaggacaaaagaatatgtaagtaatgacgcggcacagtcagatgatgaagagaagttacagtctcagccaacagatactgatggtggaaggttaaaacagaaaacgactcaactaaagaagtttcttggaaaatcagtaaagagagcaaagcaccttgctgaggaatatggtgaacgtgctataaataaagttaaaagtgttagagatgaagtgtttcatactgatcaagatgatccttcatcaagtgatgatgaaggaatgccatacacaagaccagttaaattcaaagcagcacacggtttcaaaggaccttatgattttgatcagatcaaagtggtgcaagatcttagtggtgaacatatgggagctgtttggaccatgaaattttctcactgtggccgattacttgcctcagctggacaagacaatgtagtgagaatatgggctttaaaaaatgcttttgactatttcaacaatatgcgaatgaaatacaatactgaaggacgtgtgtccccatcaccctctcaggaaagtctaagttcatcaaaatcggatacagatacaggggtatgcagtggaactgatgaagaccctgatgataaaaacgcaccctttcggcaacggccattttgcaaatataaaggacatactgctgatctccttgatctttcatggtctaaaaactactttcttctttcttcttcaatggataaaacagtcagattatggcacatttctcgaagagaatgcctttgctgttttcaacatatagattttgtcactgccatagcttttcatccaagagatgacaggtattttctaagtgggtctttggatggaaagctccgcctttggaacatacctgacaaaaaagtggctttgtggaatgaagtagatggtcagacaaaattgatcacagctgcaaatttctgtcagaatggcaaatatgcagtgattgggacatatgatggcagatgtattttctatgatacagagcatttgaaataccatacacaaatacatgtccgatctactagagggcgcaacaaggttggaagaaaaattactggcattgagcctttacctggagaaaataagatattggtaacctcaaatgactccagaatcagactatatgatttgagagatttgtcactatccatgaagtataagggttacgtcaatagcagcagccagatcaaagcaagtttcagccatgattttacttacctcgttagtggttcagaagataagtatgtttatatctggagtacctaccatgacctaagcaagtttacttcagtcaggagagatcgtaatgacttctgggaaggtattaaagcccacaatgcagttgttacatcagccatctttgcaccaaacccaagtttgatgttatctttggatgtgcaatctgaaaaatcagaagggaacgagaaaagtgaagatgctgaagttttggatgccacaccttctgcaatgagttctcgttatgttgcccaggctggtctcgaacttctagcctcaaaaaggtattatgaagacagataacacagaagttcttctctctgctgacttcactggagcaatcaaagtgtttgttaataaaagaaaaaatgtatcttaatttgaaatggcatttaaaataaacatatcagtaagtttctatatgtatcaaaactgaaaaaatagtgttccaggctaacatacttttttaatttttattgaaagttgttcaaatataatatattttttgagaggcagtgttaatgatctaggaaaccctgggctgatagagtagaaaggaatatggctagaataacattgccaaacattaggctttatgttttgttatgtttgtgttttcgttgtataattatgaacatgcacaagtttctgcatgaaaagatattaatatattaatcacatgtatgtgccttttggttacatgcattaaatctaacagagttaaatta

SEQ ID NO: 199812 - DNA, 1688 bp, Homo sapiens
  Payload ID: 19423
  Gene Name: WD repeat domain 45
  Uniprot ID: Q9Y484
  ENST ID: ENST00000356463
  CDS Start-End: 440-1525
ggctcccacaccactgcctcgtgtggggttgttcgcccgtgaaggggcaggacagggtgcgcgctggtggaggttgaaattgttacattttggccgggcgcggtggctcacgcctgtaatcccagcactttgggaggccgaggcaggtggatcacgaggtcaggagatcgagaccatcctggctaacacagtgaaaccccgtctctactaaaaaaatacaaaaaatcagccgggcgtggtgacgggcgcctgtagtcccagctactcaggaggctgaggcaggaggatggcgtgaacccgggaggcggagcttgcagtgagccgagatcgcgccagtgcactccagcctgggcgacagagcgaaactacgtctcaaaaaaaaaaaaaaagaaagaaaagaaattgttacattttatatatataggaacaatcctgcaccatgactcaacagccacttcgaggagtgaccagcctgcgtttcaaccaagaccaaagctgcttttgctgcgccatggagacaggtgtgcgcatctacaacgtggagcccttgatggagaaggggcatctggaccacgagcaggtgggcagcatgggcttggtggagatgctgcaccgctccaaccttctggccttggtgggcggtggtagtagtcccaagttctcagagatctcagcagtgctgatctgggacgatgcccgggagggcaaggactccaaggagaagctggtgctggagttcaccttcaccaagccagtgctttctgtgcgcatgcgccatgacaagatcgtgatcgtgctgaagaaccgcatctatgtgtactccttccccgacaatccccgaaagctgtttgagtttgatacccgggacaaccccaaggggctctgtgacctctgccccagcctggagaagcaactgctagtgttcccgggacacaagtgtgggagtctgcaacttgtggacctggcgagcacaaagcctggcacctcgtctgctccattcacgatcaatgcacatcagagtgacatagcctgtgtgtctctaaaccagccaggcactgtagtggcctcagcctcccagaagggtacccttattcgcctctttgacacacaatccaaggagaaactggtggagctgcgccgaggcactgaccctgccaccctctactgcattaacttcagccacgactcctccttcctctgcgcttccagtgataagggtactgtccatatctttgctctcaaggatacccgcctcaaccgccgctccgcgctggctcgcgtgggcaaggtggggcctatgattgggcagtacgtggactctcagtggagcctggcgagcttcactgtgcctgctgagtcagcttgcatctgcgccttcggtcgcaatacttccaagaacgtcaactctgtcattgccatctgcgtagatgggaccttccacaaatatgtcttcactcctgatggaaactgcaacagagaggctttcgacgtgtaccttgacatctgtgatgatgatgacttttaaggaccctgggggctgtgctagggacctgcagtggcagaactgcagagctgagccttggcagtggggcgtgcttggaagccaccagccagcaagcattaatggggctggtgcccactttccactcagcagagctatgtctaaataaagagctcacttcccccca

SEQ ID NO: 199813 - DNA, 996 bp, Homo sapiens
  Payload ID: 19423
  Gene Name: WD repeat domain 45
  ENST ID: ENST00000367375
  CDS Start-End: 1-862
ccacgagcaggtgggcagcatgggcttggtggagatgctgcaccgctccaaccttctggccttggtgggcggtggtagtagtcccaagttctcagagatctcagtgctgatctgggacgatgcccgggagggcaaggactccaaggagaagctggtgctggagttcaccttcaccaagccagtgctttctgtgcgcatgcgccatgacaagatcgtgatcgtgctgaagaaccgcatctatgtgtactccttccccgacaatccccgaaagctgtttgagtttgatacccgggacaaccccaaggggctctgtgacctctgccccagcctggagaagcaactgctagtgttcccgggacacaagtgtgggagtctgcaacttgtgccaggcactgtagtggcctcagcctcccagaagggtacccttattcgcctctttgacacacaatccaaggagaaactggtggagctgcgccgaggcactgaccctgccaccctctactgcattaacttcagccacgactcctccttcctctgcgcttccagtgataagggtactgtccatatctttgctctcaaggatacccgcctcaaccgccgctccgcgctggctcgcgtgggcaaggtggggcctatgattgggcagtacgtggactctcagtggagcctggcgagcttcactgtgcctgctgagtcagcttgcatctgcgccttcggtcgcaatacttccaagaacgtcaactctgtcattgccatctgcgtagatgggaccttccacaaatatgtcttcactcctgatggaaactgcaacagagaggctttcgacgtgtaccttgacatctgtgatgatgatgacttttaaggaccctgggggctgtgctagggacctgcagtggcagaactgcagagctgagccttggcagtggggcgtgcttggaagccaccagccagcaagcattaatggggctggtgcccactttccactcagcagagcta

SEQ ID NO: 199814 - DNA, 1432 bp, Homo sapiens
  Payload ID: 19423
  Gene Name: WD repeat domain 45
  ENST ID: ENST00000376358
  CDS Start-End: 155-1033
aaacacccgagccgggctccaaggcccgggaggtcagaaaaccgggccgcgggcggcaccgacagctggggcccgggtcagggacacgcggaggtcaggccggtgaaggcggcaggaagctggagcacgatcccaggaggaacaatcctgcaccatgactcaacagccacttcgaggagtgaccagcctgcgtttcaaccaagaccaaagctgcttttgctgcgccatggagacaggtgtgcgcatctacaacgtggagcccttgatggagaaggggcatctggggctctgtgacctctgccccagcctggagaagcaactgctagtgttcccgggacacaagtgtgggagtctgcaacttgtggacctggcgagcacaaagcctggcacctcgtctgctccattcacgatcaatgcacatcagagtgacatagcctgtgtgtctctaaaccagccaggcactgtagtggcctcagcctcccagaagggtacccttattcgcctctttgacacacaatccaaggagaaactggtggagctgcgccgaggcactgaccctgccaccctctactgcattaacttcagccacgactcctccttcctctgcgcttccagtgataagggtactgtccatatctttgctctcaaggatacccgcctcaaccgccgctccgcgtacgtgcggccacttcatacgctcctgagcgcgctggtagtggcggtggccctcggcgtgctggtgtgggcagctgagacccgcgcagctgtgcgccgctgccgccgcagccaccctgcagcctgcctggccgcagtgcttgccgtcggcctcctggtgctctgggtcgcgggcggcgcttgcaccttcctgttcagcatcgccgggccggtgcttctgatcctggtgcacgcctcgttgcgcctgcgcaaccttaagaacaagattgagaacaagatcgagagcattggtctcaagcggacgccaatgggcctgctactagaggcactgggacaagagcaggaggctggatcctaggcccctgggatctgtacccaggacctggagaataccaccccacccccagcccataattgggacccagagccctttcccagcacttaaaacaggagcctagagccccctgcccaaacaaaacaggacatctgtgaccgccctacccccacgccagccccaaactaagatatccctcacacccagcccccattacctagggacaagagtcttccccagccttgaacccaggaccaagagccacctacatccagccccaaaactggcttcaggccagagcatccatggccaatttcaaattgtgaacccagagacactcccatccacccttctccatgctcatccccaaactggggcctggggcaaggcactctcaaatcttgaaccctggaccaaagcttt

SEQ ID NO: 199815 - DNA, 1444 bp, Homo sapiens
  Payload ID: 19423
  Gene Name: WD repeat domain 45
  Uniprot ID: Q9Y484
  ENST ID: ENST00000322995
  CDS Start-End: 166-1281
gggcctgatgtaaacacccgagccgggctccaaggcccgggaggtcagaaaaccgggccgcgggcggcaccgacagctggggcccgggtcagggacacgcggaggtcaggccggtgaaggcggcaggaagctggagcacgatcccaggaggaacaatcctgcaccatgactcaacagccacttcgaggagtgaccagcctgcgtttcaaccaagaccaaagctgcttttgctgcgccatggagacaggtgtgcgcatctacaacgtggagcccttgatggagaaggggcatctggaccacgagcaggtgggcagcatgggcttggtggagatgctgcaccgctccaaccttctggccttggtgggcggtggtagtagtcccaagttctcagagatctcagtgctgatctgggacgatgcccgggagggcaaggactccaaggagaagctggtgctggagttcaccttcaccaagccagtgctttctgtgcgcatgcgccatgacaagatcgtgatcgtgctgaagaaccgcatctatgtgtactccttccccgacaatccccgaaagctgtttgagtttgatacccgggacaaccccaaggccgcccaccccaccccccatcttcacaccctagggctctgtgacctctgccccagcctggagaagcaactgctagtgttcccgggacacaagtgtgggagtctgcaacttgtggacctggcgagcacaaagcctggcacctcgtctgctccattcacgatcaatgcacatcagagtgacatagcctgtgtgtctctaaaccagccaggcactgtagtggcctcagcctcccagaagggtacccttattcgcctctttgacacacaatccaaggagaaactggtggagctgcgccgaggcactgaccctgccaccctctactgcattaacttcagccacgactcctccttcctctgcgcttccagtgataagggtactgtccatatctttgctctcaaggatacccgcctcaaccgccgctccgcgctggctcgcgtgggcaaggtggggcctatgattgggcagtacgtggactctcagtggagcctggcgagcttcactgtgcctgctgagtcagcttgcatctgcgccttcggtcgcaatacttccaagaacgtcaactctgtcattgccatctgcgtagatgggaccttccacaaatatgtcttcactcctgatggaaactgcaacagagaggctttcgacgtgtaccttgacatctgtgatgatgatgacttttaaggaccctgggggctgtgctagggacctgcagtggcagaactgcagagctgagccttggcagtggggcgtgcttggaagccaccagccagcaagcattaatggggctggtgcccactttccactcagcagagctatgtctaaataaagagctcacttcccccca

SEQ ID NO: 199816 - DNA, 1381 bp, Homo sapiens
  Payload ID: 19423
  Gene Name: WD repeat domain 45
  Uniprot ID: Q9Y484
  ENST ID: ENST00000376368
  CDS Start-End: 197-1282
ttcctgcgacaggctccctcccccggaagtagggcctgatgtaaacacccgagccgggctccaaggcccgggaggtcagaaaaccgggccgcgggcggcaccgacagctggggcccgggtcagggacacgcggaggtcaggccggtgaaggcggcaggaagctggagcacgatcccaggaggaacaatcctgcaccatgactcaacagccacttcgaggagtgaccagcctgcgtttcaaccaagaccaaagctgcttttgctgcgccatggagacaggtgtgcgcatctacaacgtggagcccttgatggagaaggggcatctggaccacgagcaggtgggcagcatgggcttggtggagatgctgcaccgctccaaccttctggccttggtgggcggtggtagtagtcccaagttctcagagatctcagcagtgctgatctgggacgatgcccgggagggcaaggactccaaggagaagctggtgctggagttcaccttcaccaagccagtgctttctgtgcgcatgcgccatgacaagatcgtgatcgtgctgaagaaccgcatctatgtgtactccttccccgacaatccccgaaagctgtttgagtttgatacccgggacaaccccaaggggctctgtgacctctgccccagcctggagaagcaactgctagtgttcccgggacacaagtgtgggagtctgcaacttgtggacctggcgagcacaaagcctggcacctcgtctgctccattcacgatcaatgcacatcagagtgacatagcctgtgtgtctctaaaccagccaggcactgtagtggcctcagcctcccagaagggtacccttattcgcctctttgacacacaatccaaggagaaactggtggagctgcgccgaggcactgaccctgccaccctctactgcattaacttcagccacgactcctccttcctctgcgcttccagtgataagggtactgtccatatctttgctctcaaggatacccgcctcaaccgccgctccgcgctggctcgcgtgggcaaggtggggcctatgattgggcagtacgtggactctcagtggagcctggcgagcttcactgtgcctgctgagtcagcttgcatctgcgccttcggtcgcaatacttccaagaacgtcaactctgtcattgccatctgcgtagatgggaccttccacaaatatgtcttcactcctgatggaaactgcaacagagaggctttcgacgtgtaccttgacatctgtgatgatgatgacttttaaggaccctgggggctgtgctagggacctgcagtggcagaactgcagagctgagccttggcagtggggcgtgcttggaagccaccagccagcaagcattaa

SEQ ID NO: 199817 - DNA, 1639 bp, Homo sapiens
  Payload ID: 19423
  Gene Name: WD repeat domain 45
  Uniprot ID: Q9Y484
  ENST ID: ENST00000376372
  CDS Start-End: 183-1265
tccctcccccggaagtagggcctgatgtaaacacccgagccgggctccaaggcccgggaggtcagaaaaccgggccgcgggcggcaccgacagctggggcccgggtcagggacacgcggaggtcaggccggtgaaggcggcaggaagctggagcacgatcccaggaggaacaatcctgcaccatgactcaacagccacttcgaggagtgaccagcctgcgtttcaaccaagaccaaagctgcttttgctgcgccatggagacaggtgtgcgcatctacaacgtggagcccttgatggagaaggggcatctggaccacgagcaggtgggcagcatgggcttggtggagatgctgcaccgctccaaccttctggccttggtgggcggtggtagtagtcccaagttctcagagatctcagtgctgatctgggacgatgcccgggagggcaaggactccaaggagaagctggtgctggagttcaccttcaccaagccagtgctttctgtgcgcatgcgccatgacaagatcgtgatcgtgctgaagaaccgcatctatgtgtactccttccccgacaatccccgaaagctgtttgagtttgatacccgggacaaccccaaggggctctgtgacctctgccccagcctggagaagcaactgctagtgttcccgggacacaagtgtgggagtctgcaacttgtggacctggcgagcacaaagcctggcacctcgtctgctccattcacgatcaatgcacatcagagtgacatagcctgtgtgtctctaaaccagccaggcactgtagtggcctcagcctcccagaagggtacccttattcgcctctttgacacacaatccaaggagaaactggtggagctgcgccgaggcactgaccctgccaccctctactgcattaacttcagccacgactcctccttcctctgcgcttccagtgataagggtactgtccatatctttgctctcaaggatacccgcctcaaccgccgctccgcgctggctcgcgtgggcaaggtggggcctatgattgggcagtacgtggactctcagtggagcctggcgagcttcactgtgcctgctgagtcagcttgcatctgcgccttcggtcgcaatacttccaagaacgtcaactctgtcattgccatctgcgtagatgggaccttccacaaatatgtcttcactcctgatggaaactgcaacagagaggctttcgacgtgtaccttgacatctgtgatgatgatgacttttaaggaccctgggggctgtgctagggacctgcagtggcagaactgcagagctgagccttggcagtggggcgtgcttggaagccaccagccagcaagcattaatggggctggtgcccactttccactcagcagagctatgtctaaataaagagctcacttccccccagcacttcttgatgactgtgtgccccaagggccaggccagagacccaggaaggcagcgaccccttgggatccctaacctggaggaaattgccagggacccagagggagtgccctaatccaacctggggattttttaaaagcttcctaggaagagatgatctccgatgtgatgaatacgaataaaaggcccttaatggcatttacggcttgac

SEQ ID NO: 199818 - DNA, 1146 bp, Homo sapiens
  Payload ID: 19423
  Gene Name: WD repeat domain 45
  ENST ID: ENST00000396681
  CDS Start-End: 170-1135
agtagggcctgatgtaaacacccgagccgggctccaaggcccgggaggtcagaaaaccgggccgcgggcggcaccgacagctggggcccgggtcagggacacgcggaggtcaggccggtgaaggcggcaggaagctggagcacgatcccaggaggaacaatcctgcaccatgactcaacagccacttcgaggagtgaccagcctgcgtttcaaccaagaccaaagctgcttttgctgcgccatggagacaggtgtgcgcatctacaacgtggagcccttgatggagaaggggcatctggtgctgatctgggacgatgcccgggagggcaaggactccaaggagaagctggtgctggagttcaccttcaccaagccagtgctttctgtgcgcatgcgccatgacaagatcgtgatcgtgctgaagaaccgcatctatgtgtactccttccccgacaatccccgaaagctgtttgagtttgatacccgggacaaccccaaggggctctgtgacctctgccccagcctggagaagcaactgctagtgttcccgggacacaagtgtgggagtctgcaacttgtggacctggcgagcacaaagcctggcacctcgtctgctccattcacgatcaatgcacatcagagtgacatagcctgtgtgtctctaaaccagccaggcactgtagtggcctcagcctcccagaagggtacccttattcgcctctttgacacacaatccaaggagaaactggtggagctgcgccgaggcactgaccctgccaccctctactgccacgactcctccttcctctgcgcttccagtgataagggtactgtccatatctttgctctcaaggatacccgcctcaaccgccgctccgcgctggctcgcgtgggcaaggtggggcctatgattgggcagtacgtggactctcagtggagcctggcgagcttcactgtgcctgctgagtcagcttgcatctgcgccttcggtcgcaatacttccaagaacgtcaactctgtcattgccatctgcgtagatgggaccttccacaaatatgtcttcactcctgatggaaactgcaacagagaggctttcgacgtgtaccttgacatctgtgatgatgatgacttttaaggaccctgggg

SEQ ID NO: 199819 - DNA, 643 bp, Homo sapiens
  Payload ID: 19423
  Gene Name: WD repeat domain 45
  ENST ID: ENST00000419567
  CDS Start-End: 18-643
aggaacaatcctgcaccatgactcaacagccacttcgaggagtgaccagcctgcgtttcaaccaagaccaaagctgcttttgctgcgccatggagacaggtgtgcgcatctacaacgtggagcccttgatggagaaggggcatctggaccacgagcaggtgggcagcatgggcttggtggagatgctgcaccgctccaaccttctggccttggtgggcggtggtagtagtcccaagttctcagagatctcagtgctgatctgggacgatgcccgggagggcaaggactccaaggagaagctggtgctggagttcaccttcaccaagccagtgctttctgtgcgcatgcgccatgacaagatcgtgatcgtgctgaagaaccgcatctatgtgtactccttccccgacaatccccgaaagctgtttgagtttgatacccgggacaaccccaagggtgagagggctcagatacacaggtggctctgtgacctctgccccagcctggagaagcaactgctagtgttcccgggacacaagtgtgggagtctgcaacttgtggacctggcgagcacaaagcctggcacctcgtctgctccattcacgatcaatgcacatcagagtgacatagcctgtgtgtctctaaa

SEQ ID NO: 199820 - DNA, 816 bp, Homo sapiens
  Payload ID: 19423
  Gene Name: WD repeat domain 45
  ENST ID: ENST00000423215
  CDS Start-End: 233-816
tttcgctttgctgggggcaaggcacgctctctctccccacccttccgggttccctcagacagtctcggccttgaggaacccccttcgcctccggtcccccagccaaccttcctccgctccccgcgccctccccggagaaccccactgtcactcgcgatgctccgaagacccgggaactaggcgaggaaggcggtggccgcctttttccagctgggaggaacaatcctgcaccatgactcaacagccacttcgaggagtgaccagcctgcgtttcaaccaagaccaaagctgcttttgctgcgccatggagacaggtgtgcgcatctacaacgtggagcccttgatggagaaggggcatctggaccacgagcaggtgggcagcatgggcttggtggagatgctgcaccgctccaaccttctggccttggtgggcggtggtagtagtcccaagttctcagagatctcagggctgccccttaccctaaaccttggccccgacaacccacccacctgcccagcagtgctgatctgggacgatgcccgggagggcaaggactccaaggagaagctggtgctggagttcaccttcaccaagccagtgctttctgtgcgcatgcgccatgacaagatcgtgatcgtgctgaagaaccgcatctatgtgtactccttccccgacaatccccgaaagctgtttgagtttgatacccgggacaaccccaaggggctctgtgacctctgccccagcctggagaagcaactgctagtgttcccgggacacaagtgtgggagtctgcaacttgtggacctggcgagcac

SEQ ID NO: 199821 - DNA, 1077 bp, Homo sapiens
  Payload ID: 19423
  Gene Name: WD repeat domain 45
  ENST ID: ENST00000473974
  CDS Start-End: 140-910
gctccaaggcccgggaggtcagaaaaccgggccgcgggcggcaccgacagctggggcccgggtcagggacacgcggaggtcaggccggtgaaggcggcaggaagctggagcacgatcccaggaggaacaatcctgcaccatgactcaacagccacttcgaggagtgaccagcctgcgtttcaaccaagaccaaagctgcttttgctgcgccatggagacaggtgtgcgcatctacaacgtggagcccttgatggagaaggggcatctggaccacgagcaggtgggcagcatgggcttggtggagatgctgcaccgctccaaccttctggccttggtgggcggtggtagtagtcccaagttctcagagatctcagtgctgatctgggacgatgcccgggagggcaaggactccaaggagaagctggtgctggagttcaccttcaccaagccagtgctttctgtgcgcatgcgccatgacaagatcgtgatcgtgctgaagaaccgcatctatgtgtactccttccccgacaatccccgaaagctgtttgagtttgatacccgggacaaccccaaggggctctgtgacctctgccccagcctggagaagcaactgctagtgttcccgggacacaagtgtgggagtctgcaacttgtggacctggcgagcacaaagcctggcacctcgtctgctccattcacgatcaatgcacatcagagtgacatagcctgtgtgtctctaaaccagccaggcactgtagtggcctcagcctcccagaagggtacccttattcgcctctttgacacacaatccaaggagaaactggtggagctgcgccgaggcactgaccctgccaccctctactgccatctgcgtagatgggaccttccacaaatatgtcttcactcctgatggaaactgcaacagagaggctttcgacgtgtaccttgacatctgtgatgatgatgacttttaaggaccctgggggctgtgctagggacctgcagtggcagaactgcagagctgagccttggcagtggggcgtgcttggaagccaccagccagcaagcattaatggg

SEQ ID NO: 199822 - DNA, 794 bp, Homo sapiens
  Payload ID: 19423
  Gene Name: WD repeat domain 45
  ENST ID: ENST00000475977
  CDS Start-End: 1-369
ctgcaacttgtggacctggcgagcacaaagcctggcacctcgtctgctccattcacgatcaatgcacatcagagtgacatagcctgtgtgtctctaaaccagccaggcactgtagtggcctcagcctcccagaagggtacccttattcgcctctttgacacacaatccaaggagaaactggtggagctgcgccgaggcactgaccctgccaccctctactgcattaacttcagccacgactcctccttcctctgcgcttccagtgataagggtactgtccatatctttgctctcaaggatacccgcctcaaccgccgctccgcccatctgcgtagatgggaccttccacaaatatgtcttcactcctgatggaaactgcaacagagaggctttcgacgtgtaccttgacatctgtgatgatgatgacttttaaggaccctgggggctgtgctagggacctgcagtggcagaactgcagagctgagccttggcagtggggcgtgcttggaagccaccagccagcaagcattaatggggctggtgcccactttccactcagcagagctatgtctaaataaagagctcacttccccccagcacttcttgatgactgtgtgccccaagggccaggccagagacccaggaaggcagcgaccccttgggatccctaacctggaggaaattgccagggacccagagggagtgccctaatccaacctggggattttttaaaagcttcctaggaagagatgatctccgatgtgatgaatacgaataaaaggcccttaatggca

SEQ ID NO: 199823 - DNA, 699 bp, Homo sapiens
  Payload ID: 19423
  Gene Name: WD repeat domain 45
  ENST ID: ENST00000471338
  CDS Start-End: 175-699
aagtagggcctgatgtaaacacccgagccgggctccaaggcccgggaggtcagaaaaccgggccgcgggcggcaccgacagctggggcccgggtcagggacacgcggaggtcaggccggtgaaggcggcaggaagctggagcacgatcccagggttgaggaacaatcctgcaccatgactcaacagccacttcgaggagtgaccagcctgcgtttcaaccaagaccaaagctgcttttgctgcgccatggagacaggtgtgcgcatctacaacgtggagcccttgatggagaaggggcatctggaccacgagcaggtgggcagcatgggcttggtggagatgctgcaccgctccaaccttctggccttggtgggcggtggtagtagtcccaagttctcagagatctcagtgctgatctgggacgatgcccgggagggcaaggactccaaggagaagctggtgctggagttcaccttcaccaagccagtgctttctgtgcgcatgcgccatgacaagatcgtgatcgtgctgaagaaccgcatctatgtgtactccttccccgacaatccccgaaagctgtttgagtttgatacccgggacaaccccaaggggctctgtgacctctgccccagcctggagaagcaactgctagtgttcccgggacacaagtgtgggagtctgcaacttgtggacctggcg

SEQ ID NO: 199824 - DNA, 872 bp, Homo sapiens
  Payload ID: 19423
  Gene Name: WD repeat domain 45
  ENST ID: ENST00000475880
  CDS Start-End: 148-872
cgagccgggctccaaggcccgggaggtcagaaaaccgggccgcgggcggcaccgacagctggggcccgggtcagggacacgcggaggtcaggccggtgaaggcggcaggaagctggagcacgatcccaggaggaacaatcctgcaccatgactcaacagccacttcgaggagtgaccagcctgcgtttcaaccaagaccaaagctgcttttgctgcgccatggagacaggtgtgcgcatctacaacgtggagcccttgatggagaaggggcatctggcagtgctgatctgggacgatgcccgggagggcaaggactccaaggagaagctggtgctggagttcaccttcaccaagccagtgctttctgtgcgcatgcgccatgacaagatcgtgatcgtgctgaagaaccgcatctatgtgtactccttccccgacaatccccgaaagctgtttgagtttgatacccgggacaaccccaaggggctctgtgacctctgccccagcctggagaagcaactgctagtgttcccgggacacaagtgtgggagtctgcaacttgtggacctggcgagcacaaagcctggcacctcgtctgctccattcacgatcaatgcacatcagagtgacatagcctgtgtgtctctaaaccagccaggcactgtagtggcctcagcctcccagaagggtacccttattcgcctctttgacacacaatccaaggagaaactggtggagctgcgccgaggcactgaccctgccaccctctactgcattaacttcagccacgactcctccttcctctgcgcttccagtgataagggtactgtccatatctttgctctcaaggatacccgcctcaaccgccgctccgc

SEQ ID NO: 199825 - DNA, 569 bp, Homo sapiens
  Payload ID: 19423
  Gene Name: WD repeat domain 45
  ENST ID: ENST00000476728
  CDS Start-End: 155-569
aaacacccgagccgggctccaaggcccgggaggtcagaaaaccgggccgcgggcggcaccgacagctggggcccgggtcagggacacgcggaggtcaggccggtgaaggcggcaggaagctggagcacgatcccaggaggaacaatcctgcaccatgactcaacagccacttcgaggagtgaccagcctgcgtttcaaccaagaccaaagctgcttttgctgcgccatggagacaggtgtgcgcatctacaacgtggagcccttgatggagaaggggcatctggtgctgatctgggacgatgcccgggagggcaaggactccaaggagaagctggtgctggagttcaccttcaccaagccagtgctttctgtgcgcatgcgccatgacaagatcgtgatcgtgctgaagaaccgcatctatgtgtactccttccccgacaatccccgaaagctgtttgagtttgatacccgggacaaccccaaggccgcccaccccaccccccatcttcacaccctagggctctgtgacctctgccccagcctggagaagcaactgctagtgttcccgg

SEQ ID NO: 199826 - DNA, 422 bp, Homo sapiens
  Payload ID: 19423
  Gene Name: WD repeat domain 45
  ENST ID: ENST00000486337
  CDS Start-End: 1-259
caaccgccgctccgcgctggctcgcgtgggcaaggtggggcctatgattgggcagtacgtggactctcagtggagcctggcgagcttcactgtgcctgctgagtcagcttgcatctgcgccttcggtcgcaatacttccaagaacgtcaactctgtcattgatgggaccttccacaaatatgtcttcactcctgatggaaactgcaacagagaggctttcgacgtgtaccttgacatctgtgatgatgatgacttttaaggaccctgggggctgtgctagggacctgcagtggcagaactgcagagctgagccttggcagtggggcgtgcttggaagccaccagccagcaagcattaatggggctggtgcccactttccactcagcagagctatgtctaaataaagagctcacttcccccca

SEQ ID NO: 199827 - DNA, 1301 bp, Homo sapiens
  Payload ID: 19423
  Gene Name: WD repeat domain 45
  ENST ID: ENST00000485908
  CDS Start-End: 179-1156
tcccccggaagtagggcctgatgtaaacacccgagccgggctccaaggcccgggaggtcagaaaaccgggccgcgggcggcaccgacagctggggcccgggtcagggacacgcggaggtcaggccggtgaaggcggcaggaagctggagcacgatcccaggaggaacaatcctgcaccatgactcaacagccacttcgaggagtgaccagcctgcgtttcaaccaagaccaaagctgcttttgctgcgccatggagacaggtgtgcgcatctacaacgtggagcccttgatggagaaggggcatctggtgctgatctgggacgatgcccgggagggcaaggactccaaggagaagctggtgctggagttcaccttcaccaagccagtgctttctgtgcgcatgcgccatgacaagatcgtgatcgtgctgaagaaccgcatctatgtgtactccttccccgacaatccccgaaagctgtttgagtttgatacccgggacaaccccaaggggctctgtgacctctgccccagcctggagaagcaactgctagtgttcccgggacacaagtgtgggagtctgcaacttgtggacctggcgagcacaaagcctggcacctcgtctgctccattcacgatcaatgcacatcagagtgacatagcctgtgtgtctctaaaccagccaggcactgtagtggcctcagcctcccagaagggtacccttattcgcctctttgacacacaatccaaggagaaactggtggagctgcgccgaggcactgaccctgccaccctctactgcattaacttcagccacgactcctccttcctctgcgcttccagtgataagggtactgtccatatctttgctctcaaggatacccgcctcaaccgccgctccgcgctggctcgcgtgggcaaggtggggcctatgattgggcagtacgtggactctcagtggagcctggcgagcttcactgtgcctgctgagtcagcttgcatctgcgccttcggtcgcaatacttccaagaacgtcaactctgtcattgccatctgcgtagatgggaccttccacaaatatgtcttcactcctgatggaaactgcaacagagaggctttcgacgtgtaccttgacatctgtgatgatgatgacttttaaggaccctgggggctgtgctagggacctgcagtggcagaactgcagagctgagccttggcagtggggcgtgcttggaagccaccagccagcaagcattaatggggctggtgcccactttccactcagcagagctatgtctaaataa

SEQ ID NO: 199828 - DNA, 811 bp, Homo sapiens
  Payload ID: 19423
  Gene Name: WD repeat domain 45
  ENST ID: ENST00000465382
  CDS Start-End: 336-811
aaccggggcggctactctcggccgccgcggaggtccgcgtcttgttagcagggaaggtttactcccccattgtgggtgaccaaggggctgagggcttggccggtttcgctttgctgggggcaaggcacgctctctctccccacccttccgggttccctcagacagtctcggccttgaggaacccccttcgcctccggtcccccagccaaccttcctccgctccccgcgccctccccggagaaccccactgtcactcgcgatgctccgaagacccgggaactaggcgaggaaggcggtggccgcctttttccagctgggaggaacaatcctgcaccatgactcaacagccacttcgaggagtgaccagcctgcgtttcaaccaagaccaaagctgcttttgctgcgccatggagacaggtgtgcgcatctacaacgtggagcccttgatggagaaggggcatctggaccacgagcaggtgggcagcatgggcttggtggagatgctgcaccgctccaaccttctggccttggtgggcggtggtagtagtcccaagttctcagagatctcagtgctgatctgggacgatgcccgggagggcaaggactccaaggagaagctggtgctggagttcaccttcaccaagccagtgctttctgtgcgcatgcgccatgacaagatcgtgatcgtgctgaagaaccgcatctatgtgtactccttccccgacaatccccgaaagctgtttgagtttgatacccgggacaaccccaaggccgcccaccccaccccccatcttcacaccctagggctctg

SEQ ID NO: 199829 - DNA, 728 bp, Homo sapiens
  Payload ID: 19423
  Gene Name: WD repeat domain 45
  ENST ID: ENST00000474053
  CDS Start-End: 88-728
ggaggtcagaaaaccgggccgcgggcggcaccgacagctggggcccgggtcagggacacgcggaggtcagaggaacaatcctgcaccatgactcaacagccacttcgaggagtgaccagcctgcgtttcaaccaagaccaaagctgcttttgctgcgccatggagacaggtgtgcgcatctacaacgtggagcccttgatggagaaggggcatctggaccacgagcaggtgggcagcatgggcttggtggagatgctgcaccgctccaaccttctggccttggtgggcggtggtagtagtcccaagttctcagagatctcaggggtggatcctgtgtcaccagggctgccccttaccctaaaccttggccccgacaacccacccacctgcccagcagtgctgatctgggacgatgcccgggagggcaaggactccaaggagaagctggtgctggagttcaccttcaccaagccagtgctttctgtgcgcatgcgccatgacaagatcgtgatcgtgctgaagaaccgcatctatgtgtactccttccccgacaatccccgaaagctgtttgagtttgatacccgggacaaccccaaggggctctgtgacctctgccccagcctggagaagcaactgctagtgttcccgggacacaagtgtgggagtctgcaacttgtggacctggcgagcacaaagcctggcacctcgtctgctccattcacgatcaa

SEQ ID NO: 199830 - DNA, 1745 bp, Homo sapiens
  Payload ID: 19423
  Gene Name: WD repeat domain 45
  ENST ID: ENST00000634944
  CDS Start-End: 302-1384
cccttcgcctccggtcccccagccaaccttcctccgctccccgcgccctccccggagaaccccactgtcactcgcgatgctccgaagacccgggaactaggcgaggaaggcggtggccgcctttttccagctggggtgagtcatttcctgcgacaggctccctcccccggaagtagggcctgatgtaaacacccgagccgggctccaaggcccgggaggtcagaaaaccgggccgcgggcggcaccgacagctggggcccgggtcagggacacgcggaggtcagaggaacaatcctgcaccatgactcaacagccacttcgaggagtgaccagcctgcgtttcaaccaagaccaaagctgcttttgctgcgccatggagacaggtgtgcgcatctacaacgtggagcccttgatggagaaggggcatctggaccacgagcaggtgggcagcatgggcttggtggagatgctgcaccgctccaaccttctggccttggtgggcggtggtagtagtcccaagttctcagagatctcagtgctgatctgggacgatgcccgggagggcaaggactccaaggagaagctggtgctggagttcaccttcaccaagccagtgctttctgtgcgcatgcgccatgacaagatcgtgatcgtgctgaagaaccgcatctatgtgtactccttccccgacaatccccgaaagctgtttgagtttgatacccgggacaaccccaaggggctctgtgacctctgccccagcctggagaagcaactgctagtgttcccgggacacaagtgtgggagtctgcaacttgtggacctggcgagcacaaagcctggcacctcgtctgctccattcacgatcaatgcacatcagagtgacatagcctgtgtgtctctaaaccagccaggcactgtagtggcctcagcctcccagaagggtacccttattcgcctctttgacacacaatccaaggagaaactggtggagctgcgccgaggcactgaccctgccaccctctactgcattaacttcagccacgactcctccttcctctgcgcttccagtgataagggtactgtccatatctttgctctcaaggatacccgcctcaaccgccgctccgcgctggctcgcgtgggcaaggtggggcctatgattgggcagtacgtggactctcagtggagcctggcgagcttcactgtgcctgctgagtcagcttgcatctgcgccttcggtcgcaatacttccaagaacgtcaactctgtcattgccatctgcgtagatgggaccttccacaaatatgtcttcactcctgatggaaactgcaacagagaggctttcgacgtgtaccttgacatctgtgatgatgatgacttttaaggaccctgggggctgtgctagggacctgcagtggcagaactgcagagctgagccttggcagtggggcgtgcttggaagccaccagccagcaagcattaatggggctggtgcccactttccactcagcagagctatgtctaaataaagagctcacttccccccagcacttcttgatgactgtgtgccccaagggccaggccagagacccaggaaggcagcgaccccttgggatccctaacctggaggaaattgccagggacccagagggagtgccctaatccaacctggggattttttaaaagcttcctaggaagagatgatctccgatgtgatgaatacgaataaaaggcccttaatggca

SEQ ID NO: 199831 - DNA, 1192 bp, Homo sapiens
  Payload ID: 19423
  Gene Name: WD repeat domain 45
  ENST ID: ENST00000634559
  CDS Start-End: 160-1029
gatgtaaacacccgagccgggctccaaggcccgggaggtcagaaaaccgggccgcgggcggcaccgacagctggggcccgggtcagggacacgcggaggtcaggccggtgaaggcggcaggaagctggagcacgatcccaggaggaacaatcctgcaccatgactcaacagccacttcgaggagtgaccagcctgcgtttcaaccaagaccaaagctgcttttgctgcgccatggagacaggtgtgcgcatctacaacgtggagcccttgatggagaaggggcatctggaccacgagcaggtgggcagcatgggcttggtggagatgctgcaccgctccaaccttctggccttggtgggcggtggtagtagtcccaagttctcagagatctcagggctctgtgacctctgccccagcctggagaagcaactgctagtgttcccgggacacaagtgtgggagtctgcaacttgtggacctggcgagcacaaagcctggcacctcgtctgctccattcacgatcaatgcacatcagagtgacatagcctgtgtgtctctaaaccagccaggcactgtagtggcctcagcctcccagaagggtacccttattcgcctctttgacacacaatccaaggagaaactggtggagctgcgccgaggcactgaccctgccaccctctactgccacgactcctccttcctctgcgcttccagtgataagggtactgtccatatctttgctctcaaggatacccgcctcaaccgccgctccgcgctggctcgcgtgggcaaggtggggcctatgattgggcagtacgtggactctcagtggagcctggcgagcttcactgtgcctgctgagtcagcttgcatctgcgccttcggtcgcaatacttccaagaacgtcaactctgtcattgccatctgcgtagatgggaccttccacaaatatgtcttcactcctgatggaaactgcaacagagaggctttcgacgtgtaccttgacatctgtgatgatgatgacttttaaggaccctgggggctgtgctagggacctgcagtggcagaactgcagagctgagccttggcagtggggcgtgcttggaagccaccagccagcaagcattaatggggctggtgcccactttccactcagcagagctatgtctaaataaagagctcacttcccccca

SEQ ID NO: 199832 - DNA, 822 bp, Homo sapiens
  Payload ID: 19423
  Gene Name: WD repeat domain 45
  ENST ID: ENST00000634671
  CDS Start-End: 646-822
ttcagtgcctgggctccgggaaagtcgtgcttttacggttccgggtactggctcccacaccactgcctcgtgtggggttgttcgcccgtgaaggggcaggacagggtgcgcgctggtggaggttgaaattgttacattttggccgggcgcggtggctcacgcctgtaatcccagcactttgggaggccgaggcaggtggatcacgaggtcaggagatcgagaccatcctggctaacacagtgaaaccccgtctctactaaaaaaatacaaaaaatcagccgggcgtggtgacgggcgcctgtagtcccagctactcaggaggctgaggcaggaggatggcgtgaacccgggaggcggagcttgcagtgagccgagatcgcgccagtgcactccagcctgggcgacagagcgaaactacgtctcaaaaaaaaaaaaaaagaaagaaaagaaattgttacattttatatatatacagtctcggccttgaggaacccccttcgcctccggtcccccagccaaccttcctccgctccccgcgccctccccggagaaccccactgtcactcgcgatgctccgaagacccgggaactaggcgaggaaggcggtggccgcctttttccagctgggaggaacaatcctgcaccatgactcaacagccacttcgaggagtgaccagcctgcgtttcaaccaagaccaaagctgcttttgctgcgccatggagacagaccacgagcaggtgggcagcatgggcttggtggagatgctgcaccgctccaaccttctggccttggtgggcggtggtagtagtcccaagttctca

SEQ ID NO: 199833 - DNA, 1376 bp, Homo sapiens
  Payload ID: 19423
  Gene Name: WD repeat domain 45
  ENST ID: ENST00000635003
  CDS Start-End: 135-1016
aaggcccgggaggtcagaaaaccgggccgcgggcggcaccgacagctggggcccgggtcagggacacgcggaggtcaggccggtgaaggcggcaggaagctggagcacgatcccaggaggaacaatcctgcaccatgactcaacagccacttcgaggagtgaccagcctgcgtttcaaccaagaccaaagctgcttttgctgcgccatggagacaggtgtgcgcatctacaacgtggagcccttgatggagaaggggcatctggaccacgagcaggtgggcagcatgggcttggtggagatgctgcaccgctccaaccttctggccttggtgggcggtggtagtagtcccaagttctcagagatctcagggctctgtgacctctgccccagcctggagaagcaactgctagtgttcccgggacacaagtgtgggagtctgcaacttgtggacctggcgagcacaaagcctggcacctcgtctgctccattcacgatcaatgcacatcagagtgacatagcctgtgtgtctctaaaccagccaggcactgtagtggcctcagcctcccagaagggtacccttattcgcctctttgacacacaatccaaggagaaactggtggagctgcgccgaggcactgaccctgccaccctctactgcattaacttcagccacgactcctccttcctctgcgcttccagtgataagggtactgtccatatctttgctctcaaggatacccgcctcaaccgccgctccgcgctggctcgcgtgggcaaggtggggcctatgattgggcagtacgtggactctcagtggagcctggcgagcttcactgtgcctgctgagtcagcttgcatctgcgccttcggtcgcaatacttccaagaacgtcaactctgtcattgccatctgcgtagatgggaccttccacaaatatgtcttcactcctgatggaaactgcaacagagaggctttcgacgtgtaccttgacatctgtgatgatgatgacttttaaggaccctgggggctgtgctagggacctgcagtggcagaactgcagagctgagccttggcagtggggcgtgcttggaagccaccagccagcaagcattaatggggctggtgcccactttccactcagcagagctatgtctaaataaagagctcacttccccccagcacttcttgatgactgtgtgccccaagggccaggccagagacccaggaaggcagcgaccccttgggatccctaacctggaggaaattgccagggacccagagggagtgccctaatccaacctggggattttttaaaagcttcctaggaagagatgatctccgatgtgatgaatacgaataaaaggcccttaatggc

SEQ ID NO: 199834 - DNA, 947 bp, Homo sapiens
  Payload ID: 19423
  Gene Name: WD repeat domain 45
  ENST ID: ENST00000635666
  CDS Start-End: 118-947
gtaaacacccgagccgggctccaaggcccgggaggtcagaaaaccgggccgcgggcggcaccgacagctggggcccgggtcagggacacgcggaggtcaggctgcttttgctgcgccatggagacaggtgtgcgcatctacaacgtggagcccttgatggagaaggggcatctggaccacgagcaggtgggcagcatgggcttggtggagatgctgcaccgctccaaccttctggccttggtgggcggtggtagtagtcccaagttctcagagatctcagtgctgatctgggacgatgcccgggagggcaaggactccaaggagaagctggtgctggagttcaccttcaccaagccagtgctttctgtgcgcatgcgccatgacaagatcgtgatcgtgctgaagaaccgcatctatgtgtactccttccccgacaatccccgaaagctgtttgagtttgatacccgggacaaccccaaggggctctgtgacctctgccccagcctggagaagcaactgctagtgttcccgggacacaagtgtgggagtctgcaacttgtggacctggcgagcacaaagcctggcacctcgtctgctccattcacgatcaatgcacatcagagtgacatagcctgtgtgtctctaaaccagccaggcactgtagtggcctcagcctcccagaagggtacccttattcgcctctttgacacacaatccaaggagaaactggtggagctgcgccgaggcactgaccctgccaccctctactgcattaacttcagccacgactcctccttcctctgcgcttccagtgataagggtactgtccatatctttgctctcaaggatacccgcctcaaccgccgctccgctgctgcctgcaggctggctcgcgtgggcaaggtggggcctatgattgggcagtacgtggactctcagtggagcct

SEQ ID NO: 199835 - DNA, 918 bp, Homo sapiens
  Payload ID: 19423
  Gene Name: WD repeat domain 45
  ENST ID: ENST00000634849
  CDS Start-End: 431-918
cgctggtggaggttagtgaggtcacacaccgggccgtggcgcctggtgcgctgggcgcttccacctcaaccttcgtagcaaacccagcggggttctgtgcctgcgcaccgtggttcctgcgttcatttactgtcccgtttctcactccggaaagtgtggctttgagtttgatctgcaggagtaggacgggcacagcgggtgtctggtcttcctcgcaccataaatcgcagagcgagccctctgtggtctctggatacagtataccaaagttagattaactgtactccttctcacaagccggtccaacgtttgcagcagtgaaaaagccctaagtgtcagggcctttggcgaagcctgtgtaagggaataaacactttccccagttttccaggcgcaaactgatggttttggagcattaaggtctggtcggatggggcaggatggctgcgttgacacgtcttatttaatccacatcatagaggaacaatcctgcaccatgactcaacagccacttcgaggagtgaccagcctgcgtttcaaccaagaccaaagctgcttttgctgcgccatggagacaggtgtgcgcatctacaacgtggagcccttgatggagaaggggcatctggaccacgagcaggtgggcagcatgggcttggtggagatgctgcaccgctccaaccttctggccttggtgggcggtggtagtagtcccaagttctcagagatctcagcagtgctgatctgggacgatgcccgggagggcaaggactccaaggagaagctggtgctggagttcaccttcaccaagccagtgctttctgtgcgcatgcgccatgacaagatcgtgatcgtgctgaagaaccgcatctatgtgtactccttccccgacaatccccgaaagctgtttgagtttgatac

SEQ ID NO: 199836 - DNA, 1545 bp, Homo sapiens
  Payload ID: 19423
  Gene Name: WD repeat domain 45
  ENST ID: ENST00000634838
  CDS Start-End: 149-1189
ccgagccgggctccaaggcccgggaggtcagaaaaccgggccgcgggcggcaccgacagctggggcccgggtcagggacacgcggaggtcaggccggtgaaggcggcaggaagctggagcacgatcccaggaggaacaatcctgcaccatgactcaacagccacttcgaggagtgaccagcctgcgtttcaaccaagaccaaagctgcttttgctgcgccatggagacaggtgtgcgcatctacaacgtggagcccttgatggagaaggggcatctggaccacgagcaggtgggcagcatgggcttggtggagatgctgcaccgctccaaccttctggccttggtgggcggtggtagtagtcccaagttctcagagatctcagtgctgatctgggacgatgcccgggagggcaaggactccaaggagaagctggtgctggagttcaccttcaccaagccagtgctttctgtgcgcatgcgccatgacaagatcgtgatcgtgctgaagaaccgcatctatgtgtactccttccccgacaatccccgaaagctgtttgagtttgatacccgggacaaccccaaggggctctgtgacctctgccccagcctggagaagcaactgctagtgttcccgggacacaagtgtgggagtctgcaacttgtggacctggcgagcacaaagcctggcacctcgtctgctccattcacgatcaatgcacatcagagtgacatagcctgtgtgtctctaaaccagccaggcactgtagtggcctcagcctcccagaagggtacccttattcgcctctttgacacacaatccaaggagaaactggtggagctgcgccgaggcactgaccctgccaccctctactgtgataagggtactgtccatatctttgctctcaaggatacccgcctcaaccgccgctccgcgctggctcgcgtgggcaaggtggggcctatgattgggcagtacgtggactctcagtggagcctggcgagcttcactgtgcctgctgagtcagcttgcatctgcgccttcggtcgcaatacttccaagaacgtcaactctgtcattgccatctgcgtagatgggaccttccacaaatatgtcttcactcctgatggaaactgcaacagagaggctttcgacgtgtaccttgacatctgtgatgatgatgacttttaaggaccctgggggctgtgctagggacctgcagtggcagaactgcagagctgagccttggcagtggggcgtgcttggaagccaccagccagcaagcattaatggggctggtgcccactttccactcagcagagctatgtctaaataaagagctcacttccccccagcacttcttgatgactgtgtgccccaagggccaggccagagacccaggaaggcagcgaccccttgggatccctaacctggaggaaattgccagggacccagagggagtgccctaatccaacctggggattttttaaaagcttcctaggaagagatgatctccgatgtgatgaatacgaataaaaggcccttaa

SEQ ID NO: 199837 - DNA, 545 bp, Homo sapiens
  Payload ID: 19423
  Gene Name: WD repeat domain 45
  ENST ID: ENST00000634522
  CDS Start-End: 85-327
ggtcagaaaaccgggccgcgggcggcaccgacagctggggcccgggtcagggacacgcggaggtcagaggaacaatcctgcaccatgactcaacagccacttcgaggagtgaccagcctgcgtttcaaccaagaccaaagctgcttttgctgcgccatggagacaggtgtgcgcatctacaacgtggagcccttgatggagaaggggcatctggaccacgagcaggtgggcagcatgggcttggtggagatgctgcaccgctccaaccttctggccttggtgggcggtggtagtagtcccaagttctcagagatctcaggatcgtgatcgtgctgaagaaccgcatctatgtgtactccttccccgacaatccccgaaagctgtttgagtttgatacccgggacaaccccaaggggctctgtgacctctgccccagcctggagaagcaactgctagtgttcccgggacacaagtgtgggagtctgcaacttgtggacctggcgagcacaaagcctggcacctcgtctgctccattcacgatcaat

SEQ ID NO: 199838 - DNA, 737 bp, Homo sapiens
  Payload ID: 19423
  Gene Name: WD repeat domain 45
  ENST ID: ENST00000635344
  CDS Start-End: 131-268
agtagggcctgatgtaaacacccgagccgggctccaaggcccgggaggtcagaaaaccgggccgcgggcggcaccgacagctggggcccgggtcagggacacgcggaggtcagaggaacaatcctgcaccatgactcaacagccacttcgaggagtgaccagcctgcgtttcaaccaagaccaaagctgcttttgctgcgccatggagacaggtgtgcgcatctacaacgtggagcccttgatggagaaggggcatctgggatcgtgatcgtgctgaagaaccgcatctatgtgtactccttccccgacaatccccgaaagctgtttgagtttgatacccgggacaaccccaaggggctctgtgacctctgccccagcctggagaagcaactgctagtgttcccgggacacaagtgtgggagtctgcaacttgtggacctggcgagcacaaagcctggcacctcgtctgctccattcacgatcaatgcacatcagagtgacatagcctgtgtgtctctaaaccagccaggcactgtagtggcctcagcctcccagaagggtacccttattcgcctctttgacacacaatccaaggagaaactggtggagctgcgccgaggcactgaccctgccaccctctactgcattaacttcagccacgactcctccttcctctgcgcttccagtgataagggtactgtccatatctttgctctcaaggatacccgcctcaaccg

SEQ ID NO: 199839 - DNA, 757 bp, Homo sapiens
  Payload ID: 19423
  Gene Name: WD repeat domain 45
  ENST ID: ENST00000634736
  CDS Start-End: 168-757
tagggcctgatgtaaacacccgagccgggctccaaggcccgggaggtcagaaaaccgggccgcgggcggcaccgacagctggggcccgggtcagggacacgcggaggtcaggccggtgaaggcggcaggaagctggagcacgatcccaggaggaacaatcctgcaccatgactcaacagccacttcgaggagtgaccagcctgcgtttcaaccaagaccaaagctgcttttgctgcgccatggagacaggtgtgcgcatctacaacgtggagcccttgatggagaaggggcatctggggctctgtgacctctgccccagcctggagaagcaactgctagtgttcccgggacacaagtgtgggagtctgcaacttgtggacctggcgagcacaaagcctggcacctcgtctgctccattcacgatcaatgcacatcagagtgacatagcctgtgtgtctctaaaccagccaggcactgtagtggcctcagcctcccagaagggtacccttattcgcctctttgacacacaatccaaggagaaactggtggagctgcgccgaggcactgaccctgccaccctctactgcattaacttcagccacgactcctccttcctctgcgcttccagtgataagggtactgtccatatctttgctctcaaggatacccgcctcaaccgccgctccgcgctggctcgcgtgggcaaggtggggcctatgattgggcagtacgtggactctcagtggagcctggcgag

SEQ ID NO: 199840 - DNA, 2587 bp, Homo sapiens
  Payload ID: 19424
  Gene Name: WD repeat domain 45B
  Uniprot ID: Q5MNZ6
  ENST ID: ENST00000392325
  CDS Start-End: 196-1230
gtggggcgcgggcgcgcgcacggacgtccagcacgcacgcacgcacgtccagcacacacgcacatccagcacgcacgcacgtacgtccggcacttccggccgcggcggcctcagcgccggcccgaagggaccaggccgccgtccccagcgagaggcatgcagcgctgaggagcggcgacccagcacggcggcgccatgaacctcctgccgtgtaaccctcacggcaacgggctgctctacgccggcttcaaccaggaccacggatgctttgcgtgtgggatggaaaatggattccgagtctataacactgatccactaaaagaaaaagagaaacaagaatttctagaaggaggagttggccatgttgaaatgttatttcgctgcaactatttagctttagttggtggtggaaaaaagccgaaataccctcccaacaaagtaatgatctgggatgacctgaagaagaagactgttattgaaatagaattttctacagaagtcaaggcagtcaagctgcggcgagatagaattgtggtggttttggactccatgattaaggtgttcacattcacacacaatccccatcagttgcacgtcttcgaaacctgctataaccccaaaggcctctgtgtcctttgtcccaatagtaacaactccctcctggcctttccgggcacgcacacgggccatgtgcagcttgtggacctggccagcacggagaagccacccgtggacattcctgcacacgagggtgtcctgagctgcattgcactcaacctgcagggaacaagaattgcaactgcatccgagaaagggacgcttataagaatatttgatacttcatcagggcatttaatccaggaactgcgaagaggatctcaagcagccaatatttactgcatcaacttcaatcaggatgcgtccctcatctgcgtatccagcgaccacggcacagtgcatatttttgcagctgaagatccaaaaaggaataaacagtccagtttggcctcagccagtttccttccaaaatacttcagttccaagtggagtttctccaagtttcaggttccctcaggctctccgtgcatttgtgcctttggaacagagccaaacgccgtcattgcaatttgtgcagacggcagctactacaaattcctgttcaaccccaagggggagtgcatccgagatgtctacgcgcagtttctagagatgaccgatgacaagctgtgactccagctgggggcgccacagcacccaccacctgccgccttcagactctcggggctggtgccagtgccccaggggcctcctgggccacgggctggaggggctgcccagggaccttggtctcgaagccatacgtggttgtctgctttcctaaggactcccatttccagtattaaagagagaatcatcatcaaggcaccgtaggtaactcagtggctgtgaccagctcgactggcggccactggctgttcccatgagttcagctgtgacgttagcttcagtggctccgccgcatcctcacactgacgggggctccatacggacctggggactgggctgagagggtggacgagttcaggtttgtttttgcagcagattccgtcgttcttactgagtctgcagcgggggagtgaacaagtgtgcagatgtaagttcttacatgataagcagattgaatacaacaccagcagcttgccttagaaaaggagaaaggaattccttttcccgcccgaacatgaagaaaaatgacctgaccctgtagagagaacacagtgtgaatgtttcccctcgtgtgagcccagcctgtggtcttctccgtacccgcaacgtggtcatctgtgcccgtgacgtcacctgtgcccgtgcgtggcgtccccgtctccgttggggccattagaatgaggcagacaccaggccactctagaagccgagccgtcacacctcaggcgtgtgcggggcggggacggggggtctcctggttacattttggattaaacctgtttcccggttatgtgtagggaacagcagagtgatgcacgaactttgaacattcgttatggggaaaacatcctttaacttcggggtcgtctgccagagcagggtctgggagggtccatgcagttcccgctggtgtggagggaaatgccctggtctggcctccgagcccccaggtccaccgtctcccctcccctcatttgtaagaatagctacacactaacattttgggaaggagaggcacataactttttttaacatttggtaactaggttatgggctctacattgtcagctacttgggatatatatttaattttcttaaattcccgttaaactctattttatggttttgatttcagattgcaaacatgtaaaacctgcatagcagcgagttctcggttttgccggtttctttagttctttactgtcactgtcatgtaatcagctaattctctgtggatgttgctgtaaagtatgcatgttcctttcatgtgtatttaatcatgatgtttaattttgcacacttatttgtaatgtttcttttaaataaaagtgactaattttgttgtagtctggacctgtaa

SEQ ID NO: 199841 - DNA, 896 bp, Homo sapiens
  Payload ID: 19424
  Gene Name: WD repeat domain 45B
  ENST ID: ENST00000573616
  CDS Start-End: 105-629
acttccggccgcggcggcctcagcgccggcccgaagggaccaggccgccgtccccagcgagaggcatgcagcgctgaggagcggcgacccagcacggcggcgccatgaacctcctgccgtgtaaccctcacggcaacgggctgctctacgccggcttcaaccaggaccacggatgctttgcgtgtgggatggaaaatggattccgagtctataacactgatccactaaaagaaaaagagaaacaagtaatgatctgggatgacctgaagaagaagactgttattgaaatagaattttctacagaagtcaaggcagtcaagctgcggcgagatagaattgtggtggttttggactccatgattaaggtgttcacattcacacacaatccccatcagttgcacgtcttcgaaacctgctataaccccaaaggcctctgtgtcctttgtcccaatagtaacaactccctcctggcctttccgggcacgcacacgggccatgtgcagcttgtggacctggccagcacggagaagccacccgtggacattcctgcacacgagggtgtcctgagctgcattgcactcaacctgcagggaacaagaattgcaactgcatccgagaaaggcatttaatccaggaactgcgaagaggatctcaagcagccaatatttactgcatcaacttcaatcaggatgcgtccctcatctgcgtatccagcgaccacggcacagtgcatatttttgcagctgaagatccaaaaaggaataaacagtccagtttggcctcagccagtttccttccaaaatacttcagttccaagtggagtttctccaagtttcaggttccctcaggctctccgtgcatttgtgcctttggaacagagccaaacgccgtcattg

SEQ ID NO: 199842 - DNA, 779 bp, Homo sapiens
  Payload ID: 19424
  Gene Name: WD repeat domain 45B
  ENST ID: ENST00000576517
  CDS Start-End: 1-373
ccaggaactgcgaagaggatctcaagcagccaatatttactgcatcaacttcaatcaggatgcgtccctcatctgcgtatccagcgaccacggcacagtgcatatttttgcagctgaagatccaaaaaggaataaacagtccagtttggcctcagccagtttccttccaaaatacttcagttccaagtggagtttctccaagtttcaggttccctcaggctctccgtgcatttgtgcctttggaacagagccaaacgccgtcattgcaatttgtgcagacggcagctactacaaattcctgttcaaccccaagggggagtgcatccgagatgtctacgcgcagtttctagagatgaccgatgacaagctgtgactccagctgggggcgccacagcacccaccacctgccgccttcagactctcggggctggtgccagtgccccaggggcctcctgggccacgggctggaggggctgcccagggaccttggtctcgaagccatacgtggttgtctgctttcctaaggactcccatttccagtattaaagagagaatcatcatcaaggcaccgtagattgcaaacatgtaaaacctgcatagcagcgagttctcggttttgccggtttctttagttctttactgtcactgtcatgtaatcagctaattctctgtggatgttgctgtaaagtatgcatgttcctttcatgtgtatttaatcatgatgtttaattttgcacacttatttgtaatgtttcttttaaataaaagtgactaatttt

SEQ ID NO: 199843 - DNA, 889 bp, Homo sapiens
  Payload ID: 19424
  Gene Name: WD repeat domain 45B
  ENST ID: ENST00000571817
  CDS Start-End: 109-366
cggcacttccggccgcggcggcctcagcgccggcccgaagggaccaggccgccgtccccagcgagaggcatgcagcgctgaggagcggcgacccagcacggcggcgccatgaacctcctgccgtgtaaccctcacggcaacgggctgctctacgccggcttcaaccaggaccacggatgctttgcgtgtgggatggaaaatggattccgagtctataacactgatccactaaaagaaaaagagaaacaagaatttctagaaggaggagttggccatgttgaaatgttatttcgctgcaactatttagctttagttggtggtggaaaaaagccgaaataccctcccaacaaaggaacagagaaatgaaatgggaagagattatcggtaggaaaaacagtggaagacagggcttgagatcttggcctttgagcggttctgtaatctcacaagtaatgatctgggatgacctgaagaagaagactgttattgaaatagaattttctacagaagtcaaggcagtcaagctgcggcgagatagaattgtggtggttttggactccatgattaaggtgttcacattcacacacaatccccatcagttgcacgtcttcgaaacctgctataaccccaaaggcctctgtgtcctttgtcccaatagtaacaactccctcctggcctttccgggcacgcacacgggccatgtgcagcttgtggacctggccagcacggagaagccacccgtggacattcctgcacacgagggtgtcctgagctgcattgcactcaacctgcagggaacaagaattgcaactgcatccgagaaagggacgcttataagaatatttgatacttcatcagggcatttaatccaggaactgcgaagaggatc

SEQ ID NO: 199844 - DNA, 2322 bp, Homo sapiens
  Payload ID: 19424
  Gene Name: WD repeat domain 45B
  ENST ID: ENST00000572583
  CDS Start-End: 1-605
ctcacggcaacgggctgctctacgccggcttcaaccaggaccacggatgctttgcgtgtgggatggaaaatggattccgagtctataacactgatccactaaaagaaaaagagaaacaagaatttctagaaggaggagttggccatgttgaaatgttatttcgctgcaactatttagctttagttggtggtggaaaaaagccgaaataccctcccaacaaagtaatgatctgggatgacctgaagaagaagactgttattgaaatagaattttctacagaagtcaaggcagtcaagctgcggcgagatagaattgtggtggttttggactccatgattaaggtgttcacattcacacacaatccccatcagttgcacgtcttcgaaacctgctataaccccaaaggcctctgtgtcctttgtcccaatagtaacaactccctcctggcctttccgggcacgcacacgggccatgtgcagcttgtggacctggccagcacggagaagccacccgtggacattcctgcacacgagggtgtcctgagctgcattgcactcaacctgcagggaacaagaattgcaactgcatccgagaaaggcatttaatccaggaactgcgaagaggatctcaagcagccaatatttactgcatcaacttcaatcaggatgcgtccctcatctgcgtatccagcgaccacggcacagtgcatatttttgcagctgaagatccaaaaaggaataaacagtccagtttggcctcagccagtttccttccaaaatacttcagttccaagtggagtttctccaagtttcaggttccctcaggctctccgtgcatttgtgcctttggaacagagccaaacgccgtcattgcaatttgtgcagacggcagctactacaaattcctgttcaaccccaagggggagtgcatccgagatgtctacgcgcagtttctagagatgaccgatgacaagctgtgactccagctgggggcgccacagcacccaccacctgccgccttcagactctcggggctggtgccagtgccccaggggcctcctgggccacgggctggaggggctgcccagggaccttggtctcgaagccatacgtggttgtctgctttcctaaggactcccatttccagtattaaagagagaatcatcatcaaggcaccgtaggtaactcagtggctgtgaccagctcgactggcggccactggctgttcccatgagttcagctgtgacgttagcttcagtggctccgccgcatcctcacactgacgggggctccatacggacctggggactgggctgagagggtggacgagttcaggtttgtttttgcagcagattccgtcgttcttactgagtctgcagcgggggagtgaacaagtgtgcagatgtaagttcttacatgataagcagattgaatacaacaccagcagcttgccttagaaaaggagaaaggaattccttttcccgcccgaacatgaagaaaaatgacctgaccctgtagagagaacacagtgtgaatgtttcccctcgtgtgagcccagcctgtggtcttctccgtacccgcaacgtggtcatctgtgcccgtgacgtcacctgtgcccgtgcgtggcgtccccgtctccgttggggccattagaatgaggcagacaccaggccactctagaagccgagccgtcacacctcaggcgtgtgcggggcggggacggggggtctcctggttacattttggattaaacctgtttcccggttatgtgtagggaacagcagagtgatgcacgaactttgaacattcgttatggggaaaacatcctttaacttcggggtcgtctgccagagcagggtctgggagggtccatgcagttcccgctggtgtggagggaaatgccctggtctggcctccgagcccccaggtccaccgtctcccctcccctcatttgtaagaatagctacacactaacattttgggaaggagaggcacataactttttttaacatttggtaactaggttatgggctctacattgtcagctacttgggatatatatttaattttcttaaattcccgttaaactctattttatggttttgatttcagattgcaaacatgtaaaacctgcatagcagcgagttctcggttttgccggtttctttagttctttactgtcactgtcatgtaatcagctaattctctgtggatgttgctgtaaagtatgcatgttcctttcatgtgtatttaatcatgatgtttaattttgcacacttatttgtaatgtttcttttaaataaaagtgactaattttgttgta

SEQ ID NO: 199845 - DNA, 2358 bp, Homo sapiens
  Payload ID: 19425
  Gene Name: WD repeat domain 46
  Uniprot ID: O15213
  ENST ID: ENST00000374617
  CDS Start-End: 358-2190
gtagttctgacatgtttagggagtggagttctgctaaaaagactagactaggacatttttaggcaagatggggaaactaatccagaaaaagaaaccgcaccgctacttagcccctggctccggacctgcctttcttttttaaatcactcttgcataagctgccgctcgcgataaggtgccaaaaactgttccgcccctctaaggagagcgtgccctcactcaagatggcacctagagagcttcatacctggtacgctgctgattggatgaaggacagagggcttccgggagttttcaagccgactgtgtggcagctgagaggagttttgcacgtggatcgccgttcgggtgggcgagatggagacagcccccaagccgggcaaggatgtcccgcccaagaaagacaaacttcagaccaagagaaagaaaccgcggcgatactgggaggaagagaccgttccgaccacagccggagcctctccagggcctcctcgtaacaagaagaatcgggagctccgtcctcagagaccaaaaaatgcttacatcttaaagaagtctcggatctctaagaagcctcaggtcccgaagaaaccccgagaatggaagaacccggagtcccagcgcggcttgtccgggacccaagatccattcccaggccccgcccccgtccctgtggaagtggtccagaagttctgtcgcattgacaaatcccgaaagctaccacattctaaagccaaaactcgaagccgacttgaggtggctgaagctgaggaagaggaaacaagtatcaaagctgctcgttctgagctgctgcttgctgaagaacctgggtttctggaaggggaggatggggaagacacagcaaagatatgccaggctgacattgtggaggctgtggacattgcaagtgcagccaagcactttgacttgaatctgcggcagtttggaccctacagactaaactactctcgaactggaagacacctggcttttggagggcgccgaggtcatgtggctgcccttgattgggtaacaaagaagcttatgtgcgagatcaacgtcatggaggcggtgcgggacatccggtttctccattctgaggcactgcttgctgttgctcagaaccgctggctccacatctatgacaatcagggcattgagctccactgtatccgccgctgtgaccgagtaacacggcttgagttcctgcccttccacttcctcctggctacagcttcagaaacagggtttctaacctacctggatgtgtcagtggggaagattgtggcagctctgaatgctcgagctgggcggctcgatgttatgagtcagaacccttacaatgccgtcatccatctcggacacagcaatggtactgtgtctttatggagtccagctatgaaggagccactggcaaagattctctgtcatcgtggtggggtccgggctgtggcagtagattctacaggcacgtacatggccacctctggcctagaccaccagctgaagatctttgacttgcgagggacgtaccagcctctgagcactcggaccctgccccatggagcagggcacctggccttctcccagaggggactgctggtggcgggaatgggtgacgttgtcaacatctgggcagggcagggcaaggccagcccaccctcccttgaacagccctacctcacccaccggctctcaggccctgtgcatggccttcagttctgcccctttgaagatgtgctgggggtggggcacactgggggcatcaccagcatgctggtccctggggccggtgagcccaacttcgatggcctggagagtaatccatacagaagccggaagcagcgccaggagtgggaggtgaaggccctgctagagaaggtacctgcagagcttatttgtctggacccacgagccctggccgaggtggatgtcatctccctggagcagggaaagaaggagcagatagagaggctgggctatgacccgcaggctaaggctcccttccagccaaagccaaagcagaagggccgcagctccacggcaagcctggtgaagaggaagaggaaggtcatggatgaggaacacagggacaaggtccggcagagccttcagcagcagcatcataaggaggcgaaggccaagcccacgggggcccggccatctgccctggacagatttgtgcgctgagccagactccagggttgcctgggaacagtctctccccaagatcacctgtagggaaatgagtgttccctggaacaaggaggtgggggcagtgtggccccttccccaactgggggtggacagctgtctcctggggtgggttggtattaaagaggaaagcgattttttgga

SEQ ID NO: 199846 - DNA, 2358 bp, Homo sapiens
  Payload ID: 19425
  Gene Name: WD repeat domain 46
  Uniprot ID: O15213
  ENST ID: ENST00000383208
  CDS Start-End: 358-2190
gtagttctgacatgtttagggagtggagttctgctaaaaagactagactaggacatttttaggcaagatggggaaactaatccagaaaaagaaaccgcaccgctacttagcccctggccccggacctgcctttcttttttaagtcactcttgcataagctgccgctcgcgataaggtgccaaaaactgttccgcccctctaaggagagcgtgccctcactcaagatggcacctagagagcttcatacctggtacgctgctgattggatgaaggacagagggcttccgggagttttcaagccgactgtgtggcagctgagaagagttttgcacgtggatcgccgttcgggtgggcgagatggagacagcccccaagccgggcaaggatgtcccgcccaagaaagacaaacttcagaccaagagaaagaaaccgcggcgatactgggaggaagagaccgttccgaccacagccggagcctctccagggcctcctcgtaacaagaagaatcgggagctccgtcctcagagaccaaaaaatgcttacatcttaaagaagtctcggatctctaagaagcctcaggtcccgaagaaaccccgagaatggaagaacccggagtcccagcgcggcttgtccggggcccaagatccattcccaggccccgcccccgtccctgtggaagtggtccagaagttctgtcgcattgacaaatctcgaaagctaccacattctaaagccaaaactcgaagccgacttgaggtggctgaagctgaggaagaggaaacaagtatcaaagctgctcgttctgagctgctgcttgctgaagaacctgggtttctggaaggggaggatggggaagacacagcaaagatatgccaggctgacattgtggaggctgtggacattgcaagtgcagccaagcactttgacttgaatctgcggcagtttggaccctacagactaaactactctcgaactggaagacacctggcttttggagggcgccgaggtcatgtggctgcccttgattgggtaacaaagaagcttatgtgcgagatcaacgtcatggaggcggtgcgggacatccggtttctccattctgaggcactgcttgctgttgctcagaaccgctggctccacatctatgacaatcagggcattgagctccactgtatccgccgctgtgaccgagtaacacggcttgagttcctgcccttccacttcctcctggctacagcttcagaaacagggtttctaacctacctggatgtgtcagtggggaagattgtggcagctctgaatgctcgagctgggcggctcgatgttatgagtcagaacccttacaatgccgtcatccatctcggacacagcaatggtactgcgtctttatggagtccagctatgaaggagccactggcaaagattctctgtcatcgtggtggggtccgggctgtggcagtagattctacaggcacgtacatggccacctctggcctagaccaccagctgaagatctttgacttgcgagggacgtaccagcctctgagcactcggaccctgccccatggagcagggcacctggccttctcccagaggggactgctggtggcgggaatgggtgacgttgtcaacatctgggcagggcagggcaaggccagcccaccctcccttgaacagccctacctcacccaccggctctcaggccctgtgcatggccttcagttctgcccctttgaagatgtgctgggggtggggcacactgggggcatcaccagcatgctggtccctggggccggtgagcccaacttcgatggcctggagagtaatccatacagaagccggaagcagcgccaggagtgggaggtgaaggccctgctagagaaggtacctgcagagcttatttgtctggacccacgagccctggccgaggtggatgtcatctccctggagcagggaaagaaggagcagatagagaggctgggctatgacccgcaggctaaggctcccttccagccaaagccaaagcagaagggccgcagctccacggcaagcctggtgaagaggaagaggaaggtcatggatgaggaacacagggacaaggtccggcagagccttcagcagcagcatcataaggaggcgaaggccaagcccacgggggcccggccatctgccctggacagatttgtgcgctgagccagactccagggttgcctgggaacagtctctccccaagatcacctgtagggaaatgagtgttccctggaacaaggaggtgggggcagtgtggccccttccccaactgggggtggacagctgtctcctggggtgggttggtattaaagaggaaagcgattttttgga

SEQ ID NO: 199847 - DNA, 2358 bp, Homo sapiens
  Payload ID: 19425
  Gene Name: WD repeat domain 46
  Uniprot ID: O15213
  ENST ID: ENST00000432933
  CDS Start-End: 358-2190
gtagttctgacatgtttagggagtggagttctgctaaaaagactagactaggacatttttaggcaagatggggaaactaatccagaaaaagaaaccgcaccgctacttagcccctggccccggacctgcctttcttttttaagtcactcttgcataagctgccgctcgcgataaggtgccaaaaactgttccgcccctctaaggagagcgtgccctcactcaagatggcacctagagagcttcatacctggtacgctgctgattggatgaaggacagagggcttccgggagttttcaagccgactgtgtggcagctgagaagagttttgcacgtggatcgccgttcgggtgggcgagatggagacagcccccaagccgggcaaggatgtcccgcccaagaaagacaaacttcagaccaagagaaagaaaccgcggcgatactgggaggaagagaccgttccgaccacagccggagcctctccagggcctcctcgtaacaagaagaatcgggagctccgtcctcagagaccaaaaaatgcttacatcttaaagaagtctcggatctctaagaagcctcaggtcccgaagaaaccccgagaatggaagaacccggagtcccagcgcggcttgtccggggcccaagatccattcccaggccccgcccccgtccctgtggaagtggtccagaagttctgtcgcattgacaaatcccgaaagctaccacattctaaagccaaaactcgaagccgacttgaggtggctgaagctgaggaagaggaaacaagtatcaaagctgctcgttctgagctgctgcttgctgaagaacctgggtttctggaaggggaggatggggaagacacagcaaagatatgccaggctgacattgtggaggctgtggacattgcaagtgcagccaagcactttgacttgaatctgcggcagtttggaccctacagactaaactactctcgaactggaagacacctggcttttggagggcgccgaggtcatgtggctgcccttgattgggtaacaaagaagcttatgtgcgagatcaacgtcatggaggcggtgcgggacatccggtttctccattctgaggcactgcttgctgttgctcagaaccgctggctccacatctatgacaatcagggcattgagctccactgtatccgccgctgtgaccgagtaacacggcttgagttcctgcccttccacttcctcctggctacagcttcagaaacagggtttctaacctacctggatgtgtcagtggggaagattgtggcagctctgaatgctcgagctgggcggctcgatgttatgagtcagaacccttacaatgccgtcatccatctcggacacagcaatggtactgtgtctttatggagtccagctatgaaggagccactggcaaagattctctgtcatcgtggtggggtccgggctgtggcagtagattctacaggcacgtacatggccacctctggcctagaccaccagctgaagatctttgacttgcgagggacgtaccagcctctgagcactcggaccctgccccatggagcagggcacctggccttctcccagaggggactgctggtggcgggaatgggtgacgttgtcaacatctgggcagggcagggcaaggccagcccaccctcccttgaacagccctacctcacccaccggctctcaggccctgtgcatggccttcagttctgcccctttgaagatgtgctgggggtggggcacactgggggcatcaccagcatgctggtccctggggccggtgagcccaacttcgatggcctggagagtaatccatacagaagccggaagcagcgccaggagtgggaggtgaaggccctgctagagaaggtacctgcagagcttatttgtctggacccacgagccctggccgaggtggatgtcatctccctggagcagggaaagaaggagcagatagagaggctgggctatgacccgcaggctaaggctcccttccagccaaagccaaagcagaagggccgcagctccacggcaagcctggtgaagaggaagaggaaggtcatggatgaggaacacagggacaaggtccggcagagccttcagcagcagcatcataaggaggcgaaggccaagcccacgggggcccggccatctgccctggacagatttgtgcgctgagccagactccagggttgcctgggaacagtctctccccaagatcacctgtagggaaatgagtgttccctggaacaaggaggtgggggcagtgtggccccttccccaactgggggtggacagctgtctcctggggtgggttggtattaaagaggaaagcgattttttgga

SEQ ID NO: 199848 - DNA, 2358 bp, Homo sapiens
  Payload ID: 19425
  Gene Name: WD repeat domain 46
  Uniprot ID: O15213
  ENST ID: ENST00000432609
  CDS Start-End: 358-2190
gtagttctgacatgtttagggagtggagttctgctaaaaagactagactaggacatttttaggcaagatggggaaactaatccagaaaaagaaaccgcaccgctacttagcccctggctccggacctgcctttcttttttaagtcactcttgcataagctgccgctcgcgataaggtgccaaaaactgttccgcccctctaaggagagcgtgccctcactcaagatggcacctagagagcttcatacctggtacgctgctgattggatgaaggacagagggcttccgggagttttcaagccgactgtgtggcagctgagaggagttttgcacgtggatcgccgttcgggtgggcgagatggagacagcccccaagccgggcaaggatgtcccgcccaagaaagacaaacttcagaccaagagaaagaaaccgcggcgatactgggaggaagagaccgttccgaccacagccggagcctctccagggcctcctcgtaacaagaagaatcgggagctccgtcctcagagaccaaaaaatgcttacatcttaaagaagtctcggatctctaagaagcctcaggtcccgaagaaaccccgagaatggaagaacccggagtcccagcgcggcttgtccggggcccaagatccattcccaggccccgcccccgtccctgtggaagtggtccagaagttctgtcgcattgacaaatcccgaaagctaccacattctaaagccaaaactcgaagccgacttgaggtggctgaagctgaggaagaggaaacaagtatcaaagctgctcgttctgagctgctgcttgctgaagaacctgggtttctggaaggggaggatggggaagacacagcaaagatatgccaggctgacattgtggaggctgtggacattgcaagtgcagccaagcactttgacttgaatctgcggcagtttggaccctacagactaaactactctcgaactggaagacacctggcttttggagggcgccgaggtcatgtggctgcccttgattgggtaacaaagaagcttatgtgcgagatcaacgtcatggaggcggtgcgggacatccggtttctccattctgaggcactgcttgctgttgctcagaaccgctggctccacatctatgacaatcagggcattgagctccactgtatccgccgctgtgaccgagtaacacggcttgagttcctgcccttccacttcctcctggctacagcttcagaaacagggtttctaacctacctggatgtgtcagtggggaagattgtggcagctctgaatgctcgagctgggcggctcgatgttatgagtcagaacccttacaatgccgtcatccatctcggacacagcaatggtactgtgtctttatggagtccagctatgaaggagccactggcaaagattctctgtcatcgtggtggggtccgggctgtggcagtagattctacaggcacgtacatggccacctctggcctagaccaccagctgaagatctttgacttgcgagggacgtaccagcctctgagcactcggaccctgccccatggagcagggcacctggccttctcccagaggggactgctggtggcgggaatgggtgacgttgtcaacatctgggcagggcagggcaaggccagcccaccctcccttgaacagccctacctcacccaccggctctcaggccctgtgcatggccttcagttctgcccctttgaagatgtgctgggggtggggcacactgggggcatcaccagcatgctggtccctggggccggtgagcccaacttcgatggcctggagagtaatccatacagaagccggaagcagcgccaggagtgggaggtgaaggccctgctagagaaggtacctgcagagcttatttgtctggacccacgagccctggccgaggtggatgtcatctccctggagcagggaaagaaggagcagatagagaggctgggctatgacccgcaggctaaggctcccttccagccaaagccaaagcagaagggccgcagctccacggcaagcctggtgaagaggaagaggaaggtcatggatgaggaacacagggacaaggtccggcagagccttcagcagcagcatcataaggaggcgaaggccaagcccacgggggcccggccatctgccctggacagatttgtgcgctgagccagactccagggttgcctgggaacagtctctccccaagatcacctgtagggaaatgagtgttccctggaacaaggaggtgggggcagtgtggccccttccccaactgggggtggacagctgtctcctggggtgggttggtattaaagaggaaagcgattttttgga

SEQ ID NO: 199849 - DNA, 968 bp, Homo sapiens
  Payload ID: 19425
  Gene Name: WD repeat domain 46
  ENST ID: ENST00000444176
  CDS Start-End: 1-968
aagtctcggatctctaagaagcctcaggtcccgaagaaaccccgagaatggaagaacccggagtcccagcgcggcttgtccgggacccaagatccattcccaggccccgcccccgtccctgtggaagtggtccagaagttctgtcgcattgacaaatcccgaaagctaccacattctaaagccaaaactcgaagccgacttgaggtggctgaagctgaggaagaggaaacaagtatcaaagctgctcgttctgagctgctgcttgctgaagaacctgggtttctggaaggggaggatggggaagacacagcaaagatatgccaggctgacattgtggaggctgtggacattgcaagtgcagccaagtttggaccctacagactaaactactctcgaactggaagacacctggcttttggagggcgccgaggtcatgtggctgcccttgattgggtaacaaagaagcttatgtgcgagatcaacgtcatggaggcggtgcgggacatccggtttctccattctgaggcactgcttgctgttgctcagaaccgctggctccacatctatgacaatcagggcattgagctccactgtatccgccgctgtgaccgagtaacacggcttgagttcctgcccttccacttcctcctggctacagcttcagaaacagggtttctaacctacctggatgtgtcagtggggaagattgtggcagctctgaatgctcgagctgggcggctcgatgttatgagtcagaacccttacaatgccgtcatccatctcggacacagcaatggtactgtgtctttatggagtccagctatgaaggagccactggcaaagattctctgtcatcgtggtggggtccgggctgtggcagtagattctacaggcacgtacatggccacctctggcctagaccaccagctgaagatctttgacttgcgagggacgtaccagcctctgag

SEQ ID NO: 199850 - DNA, 2358 bp, Homo sapiens; identical to SEQ ID NO: 199847
  Payload ID: 19425
  Gene Name: WD repeat domain 46
  Uniprot ID: O15213
  ENST ID: ENST00000457382
  CDS Start-End: 358-2190

SEQ ID NO: 199851 - DNA, 968 bp, Homo sapiens
  Payload ID: 19425
  Gene Name: WD repeat domain 46
  ENST ID: ENST00000416777
  CDS Start-End: 1-968
aagtctcggatctctaagaagcctcaggtcccgaagaaaccccgagaatggaagaacccggagtcccagcgcggcttgtccggggcccaagatccattcccaggccccgcccccgtccctgtggaagtggtccagaagttctgtcgcattgacaaatctcgaaagctaccacattctaaagccaaaactcgaagccgacttgaggtggctgaagctgaggaagaggaaacaagtatcaaagctgctcgttctgagctgctgcttgctgaagaacctgggtttctggaaggggaggatggggaagacacagcaaagatatgccaggctgacattgtggaggctgtggacattgcaagtgcagccaagtttggaccctacagactaaactactctcgaactggaagacacctggcttttggagggcgccgaggtcatgtggctgcccttgattgggtaacaaagaagcttatgtgcgagatcaacgtcatggaggcggtgcgggacatccggtttctccattctgaggcactgcttgctgttgctcagaaccgctggctccacatctatgacaatcagggcattgagctccactgtatccgccgctgtgaccgagtaacacggcttgagttcctgcccttccacttcctcctggctacagcttcagaaacagggtttctaacctacctggatgtgtcagtggggaagattgtggcagctctgaatgctcgagctgggcggctcgatgttatgagtcagaacccttacaatgccgtcatccatctcggacacagcaatggtactgcgtctttatggagtccagctatgaaggagccactggcaaagattctctgtcatcgtggtggggtccgggctgtggcagtagattctacaggcacgtacatggccacctctggcctagaccaccagctgaagatctttgacttgcgagggacgtaccagcctctgag

SEQ ID NO: 199852 - DNA, 968 bp, Homo sapiens
  Payload ID: 19425
  Gene Name: WD repeat domain 46
  ENST ID: ENST00000443102
  CDS Start-End: 1-968
aagtctcggatctctaagaagcctcaggtcccgaagaaaccccgagaatggaagaacccggagtcccagcgcggcttgtccggggcccaagatccattcccaggccccgcccccgtccctgtggaagtggtccagaagttctgtcgcattgacaaatcccgaaagctaccacattctaaagccaaaactcgaagccgacttgaggtggctgaagctgaggaagaggaaacaagtatcaaagctgctcgttctgagctgctgcttgctgaagaacctgggtttctggaaggggaggatggggaagacacagcaaagatatgccaggctgacattgtggaggctgtggacattgcaagtgcagccaagtttggaccctacagactaaactactctcgaactggaagacacctggcttttggagggcgccgaggtcatgtggctgcccttgattgggtaacaaagaagcttatgtgcgagatcaacgtcatggaggcggtgcgggacatccggtttctccattctgaggcactgcttgctgttgctcagaaccgctggctccacatctatgacaatcagggcattgagctccactgtatccgccgctgtgaccgagtaacacggcttgagttcctgcccttccacttcctcctggctacagcttcagaaacagggtttctaacctacctggatgtgtcagtggggaagattgtggcagctctgaatgctcgagctgggcggctcgatgttatgagtcagaacccttacaatgccgtcatccatctcggacacagcaatggtactgtgtctttatggagtccagctatgaaggagccactggcaaagattctctgtcatcgtggtggggtccgggctgtggcagtagattctacaggcacgtacatggccacctctggcctagaccaccagctgaagatctttgacttgcgagggacgtaccagcctctgag

SEQ ID NO: 199853 - DNA, 968 bp, Homo sapiens; identical to SEQ ID NO: 199852
  Payload ID: 19425
  Gene Name: WD repeat domain 46
  ENST ID: ENST00000456332
  CDS Start-End: 1-968

SEQ ID NO: 199854 - DNA, 968 bp, Homo sapiens; identical to SEQ ID NO: 199852
  Payload ID: 19425
  Gene Name: WD repeat domain 46
  ENST ID: ENST00000450918
  CDS Start-End: 1-968

SEQ ID NO: 199855 - DNA, 4144 bp, Homo sapiens
  Payload ID: 19426
  Gene Name: WD repeat domain 47
  ENST ID: ENST00000357672
  CDS Start-End: 251-2932
gcagtctgcaagaggctgagctgaggagtcgctgggccgggaggggcggacgtgagaaggacggattgacgaactgatggattgacgcgcgggcggtaggagggaggaccgacgccaaacccagaccgccgccgtcgtgctcctgccgcagcccggagccggccgcttcggggccctggccgccggcctcccagccgcgttctcctccgccgctcctccgggcttgccctggagccctcaggctatcaatatgacggctgaagaaacagtgaatgtaaaagaggttgaaatcattaagctaattttggacttcctgaattcaaagaagcttcacattagtatgctggccctggagaaggaaagtggagtcataaatggcctgttttcagatgatatgcttttcctgaggtttcgttatattatcctgaagcagaagtttttagaagctttatgtgttaacaacgcgatgtcagcagaagatgagccccagcatctggaatttaccatgcaagaagctgtgcaatgtttacatgctctagaagaatactgtccttctaaagatgactatagtaagctctgtttgcttttgactttgcctcgtctgaccaatcatgccgagtttaaggactggaatcccagcaccgcacgagttcactgttttgaagaggcttgtgtcatggttgcagaattcatccctgctgataggaagctaagtgaagctggttttaaggctagtaacaatcgtttatttcagcttgtaatgaaaggcctgctttatgaatgctgtgtagaattttgtcagagtaaagcaactggagaagaaattacagaaagcgaagtgcttcttggcatcgacctcttatgtggtaatggttgtgatgatttggatctgagtttactgtcatggcttcagaatcttccatcttctgtcttctcttgtgcttttgaacagaaaatgcttaatattcatgttgacaaacttctgaaacctacaaaagctgcatatgctgatcttttgactcctcttatcagcaaactctctccctatccatcatccccaatgagaagacctcaatcagctgatgcctatatgacccgctctctgaatcctgctttagatggcctcacctgtggactaaccagtcatgataagagaatttcagaccttggaaacaaaacttctccaatgtcacactcctttgctaacttccattatccaggggtacaaaacctcagtagaagtctcatgcttgagaatacagaatgtcacagtatttacgaagaatcccctgagcgtgatacacctgttgatgcacagaggcctatcggcagtgaaatcttgggccagagttcagtttcagaaaaagagcctgcaaatggagcacagaatccaggaccagctaaacaagaaaaaaatgagcttcgagattcaacagaacaatttcaagaatattataggcaaagattacgctatcaacagcatttagaacagaaggagcaacagcggcagatataccaacagatgttgcttgaaggaggcgtgaatcaggaggatggtcctgatcagcagcagaatcttactgaacagttccttaataggtccattcaaaagcttggtgaattaaatattggaatggatggccttggtaatgaggtatcagcactcaaccagcaatgtaatgggagcaaaggcaatggatctaatggttcttctgtgactagttttactacaccaccccaagactctagtcagagattaacacatgatgcttcaaatattcatacaagcactcctcgtaatcctggatcaacaaatcacataccttttctggaggaatcaccttgtggaagccaaatctcttcagaacattcggtcattaagccacctcttggagattctccagggagtctttcaaggtcgaaaggggaagaggatgacaaatcaaaaaagcagtttgtttgtattaatatcctagaagacacacaagctgttagagcagtggcttttcatccagctggaggtttatatgctgttggttcaaattcaaaaactctgagagtatgtgcctatccagatgtaattgatccaagtgcacatgagactcctaagcagccggtggtacgttttaaaaggaataaacatcataaaggatccatttactgtgtggcctggagtccttgtgggcagttattagcaacaggatcaaatgacaaatacgtcaaagtgctgcccttcaatgcagagacttgtaacgcaacagtttcaggaccagatctggaatttagtatgcatgatggaacaattagagacttggcatttatggaaggcccagaaagcggaggagctattttaataagtgctggagcaggggattgtaacatttatacaaccgattgtcaaagaggacagggcctccatgctttgagtggacatactgggcatattttagcactttatacctggagtggctggatgattgcatctggttcccaagataagactgttagattttgggatcttcgagtaccaagttgtgttcgtgttgttggcacaacatttcatggaactggcagtgcagtggcatctgtagctgtagatcccagtggtcgtctcttagccacaggtcaagaagattctagctgcatgttgtatgacataagaggaggaagaatggtacaaagttatcatcctcattccagtgatgttcgctctgttcgattctcccctggagctcactacttgctaacaggctcttatgatatgaaaataaaggtgacagacctacaaggggacctcaccaagcagcttcctatcatggtggtgggggagcacaaggacaaagtgattcagtgcagatggcacacccaggatctttccttcctgtcatcctctgcagatagaactgtcaccctctggacttacaatgggtagagcacaccgcatgtcagtctatgcagcaaaagcacagagacttaagactactgagttgtgaaaattacaaatctgaagaacatagtgtccaggaaagtggtttagcacgaagaggccccttattaccatgtatcccactgataggaggtgttgggtggtgttattccgcagtgctttcagtcttccatgtgagctcgtgctgctgtgacctgctatatgtagtctcgttgccaaagtctgcagaagagctcttcagttgttggtgtgcactccaagtcaggatggacaatgtgtttacggtttagtattcaatgcattccttggtctttgcctaaataacagttttatatgcacattgaaatggaattatacttcaactatattattaaatgtaatgcaaccaagttcctcccagattaaacttcccaggtgttcagaattacttttgctcttctcacgatcccatattgtattatcacttgtcttctagaggtcagaattccataatatatgtcactcaaaagttacatggttgctttcacttaaggatcattgtggagtttaaagatgaatgaaaaactgcttcttagtttactacatggtataggcccttttttcttaaacccagggatatgattattttgtcatataattttgtttcaggctaaaaggtaaatgtgtttgcttcagaaacttgttaacttcagttttttgaatgcaacaggatacctcccttccaaactgaactgtagaagcagagcagcagcagttatgtgatgcaacacttgatggtacagtaaatttactggcatttttctccttaaaaattaaaatccttgacatagaccatagcatggcttgaaatgctatgtctgcatgataatttaaaatggaagatttaaactttgcactccaaaagcttatttggatttttttcttgcactgttttgtgtaatgcagaataatgattttatttctacagctttgtagattctaacatttatgtatctttattttcatattgtacagtaattttactttaaattatttaaataggctattttatttatttcaaatgcagttgtattagttctcattattgaactgtctgtgcactgtatgtagcaagcatttttcatctgttgtatacaagtggaaagggtattagaagtgtaactgtgctattatttcaataaagacctcttgacattt

SEQ ID NO: 199856 - DNA, 4115 bp, Homo sapiens
  Payload ID: 19426
  Gene Name: WD repeat domain 47
  Uniprot ID: O94967
  ENST ID: ENST00000361054
  CDS Start-End: 224-2899
gtcgctgggccgggaggggcggacgtgagaaggacggattgacgaactgatggattgacgcgcgggcggtaggagggaggaccgacgccaaacccagaccgccgccgtcgtgctcctgccgcagcccggagccggccgcttcggggccctggccgccggcctcccagccgcgttctcctccgccgctcctccgggcttgccctggagccctcaggctatcaatatgacggctgaagaaacagtgaatgtaaaagaggttgaaatcattaagctaattttggacttcctgaattcaaagaagcttcacattagtatgctggccctggagaaggaaagtggagtcataaatggcctgttttcagatgatatgcttttcctgaggtttcgttatattatcctgaagcagaagtttttagaagctttatgtgttaacaacgcgatgtcagcagaagatgagccccagcatctggaatttaccatgcaagaagctgtgcaatgtttacatgctctagaagaatactgtccttctaaagatgactatagtaagctctgtttgcttttgactttgcctcgtctgaccaatcatgccgagtttaaggactggaatcccagcaccgcacgagttcactgttttgaagaggcttgtgtcatggttgcagaattcatccctgctgataggaagctaagtgaagctggttttaaggctagtaacaatcgtttatttcagcttgtaatgaaaggcctgctttatgaatgctgtgtagaattttgtcagagtaaagcaactggagaagaaattacagaaagcgaagtgcttcttggcatcgacctcttatgtggtaatggttgtgatgatttggatctgagtttactgtcatggcttcagaatcttccatcttctgtcttctcttgtgcttttgaacagaaaatgcttaatattcatgttgacaaacttctgaaacctacaaaagctgcatatgctgatcttttgactcctcttatcagcaaactctctccctatccatcatccccaatgagaagacctcaatcagctgatgcctatatgacccgctctctgaatcctgctttagatggcctcacctgtggactaaccagtcatgataagagaatttcagaccttggaaacaaaacttctccaatgtcacactcctttgctaacttccattatccaggggtacaaaacctcagtagaagtctcatgcttgagaatacagaatgtcacagtatttacgaagaatcccctgagcgtgatacacctgttgatgcacagaggcctatcggcagtgaaatcttgggccagagttcagtttcagaaaaagagcctgcaaatggagcacagaatccaggaccagctaaacaagaaaaaaatgagcttcgagattcaacagaacaatttcaagaatattataggcaaagattacgctatcaacagcatttagaacagaaggagcaacagcggcagatataccaacagatgttgcttgaaggaggcgtgaatcaggaggatggtcctgatcagcagcagaatcttactgaacagttccttaataggtccattcaaaagcttggtgaattaaatattggaatggatggccttggtaatgaggtatcagcactcaaccagcaatgtaatgggagcaaaggcaatggatctaatggttcttctgtgactagttttactacaccaccccaagactctagtcagagattaacacatgatgcttcaaatattcatacaagcactcctcgtaatcctggatcaacaaatcacataccttttctggaggaatcaccttgtggaagccaaatctcttcagaacattcggtcattaagccacctcttggagattctccagggagtctttcaaggtcgaaaggggaagaggatgacaaatcaaaaaagcagtttgtttgtattaatatcctagaagacacacaagctgttagagcagtggcttttcatccagctggaggtttatatgctgttggttcaaattcaaaaactctgagagtatgtgcctatccagatgtaattgatccaagtgcacatgagactcctaagcagccggtggtacgttttaaaaggaataaacatcataaaggatccatttactgtgtggcctggagtccttgtgggcagttattagcaacaggatcaaatgacaaatacgtcaaagtgctgcccttcaatgcagagacttgtaacgcaacaggaccagatctggaatttagtatgcatgatggaacaattagagacttggcatttatggaaggcccagaaagcggaggagctattttaataagtgctggagcaggggattgtaacatttatacaaccgattgtcaaagaggacagggcctccatgctttgagtggacatactgggcatattttagcactttatacctggagtggctggatgattgcatctggttcccaagataagactgttagattttgggatcttcgagtaccaagttgtgttcgtgttgttggcacaacatttcatggaactggcagtgcagtggcatctgtagctgtagatcccagtggtcgtctcttagccacaggtcaagaagattctagctgcatgttgtatgacataagaggaggaagaatggtacaaagttatcatcctcattccagtgatgttcgctctgttcgattctcccctggagctcactacttgctaacaggctcttatgatatgaaaataaaggtgacagacctacaaggggacctcaccaagcagcttcctatcatggtggtgggggagcacaaggacaaagtgattcagtgcagatggcacacccaggatctttccttcctgtcatcctctgcagatagaactgtcaccctctggacttacaatgggtagagcacaccgcatgtcagtctatgcagcaaaagcacagagacttaagactactgagttgtgaaaattacaaatctgaagaacatagtgtccaggaaagtggtttagcacgaagaggccccttattaccatgtatcccactgataggaggtgttgggtggtgttattccgcagtgctttcagtcttccatgtgagctcgtgctgctgtgacctgctatatgtagtctcgttgccaaagtctgcagaagagctcttcagttgttggtgtgcactccaagtcaggatggacaatgtgtttacggtttagtattcaatgcattccttggtctttgcctaaataacagttttatatgcacattgaaatggaattatacttcaactatattattaaatgtaatgcaaccaagttcctcccagattaaacttcccaggtgttcagaattacttttgctcttctcacgatcccatattgtattatcacttgtcttctagaggtcagaattccataatatatgtcactcaaaagttacatggttgctttcacttaaggatcattgtggagtttaaagatgaatgaaaaactgcttcttagtttactacatggtataggcccttttttcttaaacccagggatatgattattttgtcatataattttgtttcaggctaaaaggtaaatgtgtttgcttcagaaacttgttaacttcagttttttgaatgcaacaggatacctcccttccaaactgaactgtagaagcagagcagcagcagttatgtgatgcaacacttgatggtacagtaaatttactggcatttttctccttaaaaattaaaatccttgacatagaccatagcatggcttgaaatgctatgtctgcatgataatttaaaatggaagatttaaactttgcactccaaaagcttatttggatttttttcttgcactgttttgtgtaatgcagaataatgattttatttctacagctttgtagattctaacatttatgtatctttattttcatattgtacagtaattttactttaaattatttaaataggctattttatttatttcaaatgcagttgtattagttctcattattgaactgtctgtgcactgtatgtagcaagcatttttcatctgttgtatacaagtggaaagggtattagaagtgtaactgtgctattatttcaataaagacctcttgacatttaaaa

SEQ ID NO: 199857 - DNA, 4199 bp, Homo sapiens
  Payload ID: 19426
  Gene Name: WD repeat domain 47
  Uniprot ID: O94967
  ENST ID: ENST00000369962
  CDS Start-End: 224-2983
gtcgctgggccgggaggggcggacgtgagaaggacggattgacgaactgatggattgacgcgcgggcggtaggagggaggaccgacgccaaacccagaccgccgccgtcgtgctcctgccgcagcccggagccggccgcttcggggccctggccgccggcctcccagccgcgttctcctccgccgctcctccgggcttgccctggagccctcaggctatcaatatgacggctgaagaaacagtgaatgtaaaagaggttgaaatcattaagctaattttggacttcctgaattcaaagaagcttcacattagtatgctggccctggagaaggaaagtggagtcataaatggcctgttttcagatgatatgcttttcctgaggcagctaatacttgatggtcaatgggatgaagttcttcagttcattcagcctctagaatgtatggaaaaatttgacaaaaaaaggtttcgttatattatcctgaagcagaagtttttagaagctttatgtgttaacaacgcgatgtcagcagaagatgagccccagcatctggaatttaccatgcaagaagctgtgcaatgtttacatgctctagaagaatactgtccttctaaagatgactatagtaagctctgtttgcttttgactttgcctcgtctgaccaatcatgccgagtttaaggactggaatcccagcaccgcacgagttcactgttttgaagaggcttgtgtcatggttgcagaattcatccctgctgataggaagctaagtgaagctggttttaaggctagtaacaatcgtttatttcagcttgtaatgaaaggcctgctttatgaatgctgtgtagaattttgtcagagtaaagcaactggagaagaaattacagaaagcgaagtgcttcttggcatcgacctcttatgtggtaatggttgtgatgatttggatctgagtttactgtcatggcttcagaatcttccatcttctgtcttctcttgtgcttttgaacagaaaatgcttaatattcatgttgacaaacttctgaaacctacaaaagctgcatatgctgatcttttgactcctcttatcagcaaactctctccctatccatcatccccaatgagaagacctcaatcagctgatgcctatatgacccgctctctgaatcctgctttagatggcctcacctgtggactaaccagtcatgataagagaatttcagaccttggaaacaaaacttctccaatgtcacactcctttgctaacttccattatccaggggtacaaaacctcagtagaagtctcatgcttgagaatacagaatgtcacagtatttacgaagaatcccctgagcgtgatacacctgttgatgcacagaggcctatcggcagtgaaatcttgggccagagttcagtttcagaaaaagagcctgcaaatggagcacagaatccaggaccagctaaacaagaaaaaaatgagcttcgagattcaacagaacaatttcaagaatattataggcaaagattacgctatcaacagcatttagaacagaaggagcaacagcggcagatataccaacagatgttgcttgaaggaggcgtgaatcaggaggatggtcctgatcagcagcagaatcttactgaacagttccttaataggtccattcaaaagcttggtgaattaaatattggaatggatggccttggtaatgaggtatcagcactcaaccagcaatgtaatgggagcaaaggcaatggatctaatggttcttctgtgactagttttactacaccaccccaagactctagtcagagattaacacatgatgcttcaaatattcatacaagcactcctcgtaatcctggatcaacaaatcacataccttttctggaggaatcaccttgtggaagccaaatctcttcagaacattcggtcattaagccacctcttggagattctccagggagtctttcaaggtcgaaaggggaagaggatgacaaatcaaaaaagcagtttgtttgtattaatatcctagaagacacacaagctgttagagcagtggcttttcatccagctggaggtttatatgctgttggttcaaattcaaaaactctgagagtatgtgcctatccagatgtaattgatccaagtgcacatgagactcctaagcagccggtggtacgttttaaaaggaataaacatcataaaggatccatttactgtgtggcctggagtccttgtgggcagttattagcaacaggatcaaatgacaaatacgtcaaagtgctgcccttcaatgcagagacttgtaacgcaacaggaccagatctggaatttagtatgcatgatggaacaattagagacttggcatttatggaaggcccagaaagcggaggagctattttaataagtgctggagcaggggattgtaacatttatacaaccgattgtcaaagaggacagggcctccatgctttgagtggacatactgggcatattttagcactttatacctggagtggctggatgattgcatctggttcccaagataagactgttagattttgggatcttcgagtaccaagttgtgttcgtgttgttggcacaacatttcatggaactggcagtgcagtggcatctgtagctgtagatcccagtggtcgtctcttagccacaggtcaagaagattctagctgcatgttgtatgacataagaggaggaagaatggtacaaagttatcatcctcattccagtgatgttcgctctgttcgattctcccctggagctcactacttgctaacaggctcttatgatatgaaaataaaggtgacagacctacaaggggacctcaccaagcagcttcctatcatggtggtgggggagcacaaggacaaagtgattcagtgcagatggcacacccaggatctttccttcctgtcatcctctgcagatagaactgtcaccctctggacttacaatgggtagagcacaccgcatgtcagtctatgcagcaaaagcacagagacttaagactactgagttgtgaaaattacaaatctgaagaacatagtgtccaggaaagtggtttagcacgaagaggccccttattaccatgtatcccactgataggaggtgttgggtggtgttattccgcagtgctttcagtcttccatgtgagctcgtgctgctgtgacctgctatatgtagtctcgttgccaaagtctgcagaagagctcttcagttgttggtgtgcactccaagtcaggatggacaatgtgtttacggtttagtattcaatgcattccttggtctttgcctaaataacagttttatatgcacattgaaatggaattatacttcaactatattattaaatgtaatgcaaccaagttcctcccagattaaacttcccaggtgttcagaattacttttgctcttctcacgatcccatattgtattatcacttgtcttctagaggtcagaattccataatatatgtcactcaaaagttacatggttgctttcacttaaggatcattgtggagtttaaagatgaatgaaaaactgcttcttagtttactacatggtataggcccttttttcttaaacccagggatatgattattttgtcatataattttgtttcaggctaaaaggtaaatgtgtttgcttcagaaacttgttaacttcagttttttgaatgcaacaggatacctcccttccaaactgaactgtagaagcagagcagcagcagttatgtgatgcaacacttgatggtacagtaaatttactggcatttttctccttaaaaattaaaatccttgacatagaccatagcatggcttgaaatgctatgtctgcatgataatttaaaatggaagatttaaactttgcactccaaaagcttatttggatttttttcttgcactgttttgtgtaatgcagaataatgattttatttctacagctttgtagattctaacatttatgtatctttattttcatattgtacagtaattttactttaaattatttaaataggctattttatttatttcaaatgcagttgtattagttctcattattgaactgtctgtgcactgtatgtagcaagcatttttcatctgttgtatacaagtggaaagggtattagaagtgtaactgtgctattatttcaataaagacctcttgacatttaaaa

SEQ ID NO: 199858 - DNA, 4240 bp, Homo sapiens
  Payload ID: 19426
  Gene Name: WD repeat domain 47
  Uniprot ID: O94967
  ENST ID: ENST00000369965
  CDS Start-End: 262-3024
acttgacaaccgcagtctgcaagaggctgagctgaggagtcgctgggccgggaggggcggacgtgagaaggacggattgacgaactgatggattgacgcgcgggcggtaggagggaggaccgacgccaaacccagaccgccgccgtcgtgctcctgccgcagcccggagccggccgcttcggggccctggccgccggcctcccagccgcgttctcctccgccgctcctccgggcttgccctggagccctcaggctatcaatatgacggctgaagaaacagtgaatgtaaaagaggttgaaatcattaagctaattttggacttcctgaattcaaagaagcttcacattagtatgctggccctggagaaggaaagtggagtcataaatggcctgttttcagatgatatgcttttcctgaggcagctaatacttgatggtcaatgggatgaagttcttcagttcattcagcctctagaatgtatggaaaaatttgacaaaaaaaggtttcgttatattatcctgaagcagaagtttttagaagctttatgtgttaacaacgcgatgtcagcagaagatgagccccagcatctggaatttaccatgcaagaagctgtgcaatgtttacatgctctagaagaatactgtccttctaaagatgactatagtaagctctgtttgcttttgactttgcctcgtctgaccaatcatgccgagtttaaggactggaatcccagcaccgcacgagttcactgttttgaagaggcttgtgtcatggttgcagaattcatccctgctgataggaagctaagtgaagctggttttaaggctagtaacaatcgtttatttcagcttgtaatgaaaggcctgctttatgaatgctgtgtagaattttgtcagagtaaagcaactggagaagaaattacagaaagcgaagtgcttcttggcatcgacctcttatgtggtaatggttgtgatgatttggatctgagtttactgtcatggcttcagaatcttccatcttctgtcttctcttgtgcttttgaacagaaaatgcttaatattcatgttgacaaacttctgaaacctacaaaagctgcatatgctgatcttttgactcctcttatcagcaaactctctccctatccatcatccccaatgagaagacctcaatcagctgatgcctatatgacccgctctctgaatcctgctttagatggcctcacctgtggactaaccagtcatgataagagaatttcagaccttggaaacaaaacttctccaatgtcacactcctttgctaacttccattatccaggggtacaaaacctcagtagaagtctcatgcttgagaatacagaatgtcacagtatttacgaagaatcccctgagcgaagtgatacacctgttgatgcacagaggcctatcggcagtgaaatcttgggccagagttcagtttcagaaaaagagcctgcaaatggagcacagaatccaggaccagctaaacaagaaaaaaatgagcttcgagattcaacagaacaatttcaagaatattataggcaaagattacgctatcaacagcatttagaacagaaggagcaacagcggcagatataccaacagatgttgcttgaaggaggcgtgaatcaggaggatggtcctgatcagcagcagaatcttactgaacagttccttaataggtccattcaaaagcttggtgaattaaatattggaatggatggccttggtaatgaggtatcagcactcaaccagcaatgtaatgggagcaaaggcaatggatctaatggttcttctgtgactagttttactacaccaccccaagactctagtcagagattaacacatgatgcttcaaatattcatacaagcactcctcgtaatcctggatcaacaaatcacataccttttctggaggaatcaccttgtggaagccaaatctcttcagaacattcggtcattaagccacctcttggagattctccagggagtctttcaaggtcgaaaggggaagaggatgacaaatcaaaaaagcagtttgtttgtattaatatcctagaagacacacaagctgttagagcagtggcttttcatccagctggaggtttatatgctgttggttcaaattcaaaaactctgagagtatgtgcctatccagatgtaattgatccaagtgcacatgagactcctaagcagccggtggtacgttttaaaaggaataaacatcataaaggatccatttactgtgtggcctggagtccttgtgggcagttattagcaacaggatcaaatgacaaatacgtcaaagtgctgcccttcaatgcagagacttgtaacgcaacaggaccagatctggaatttagtatgcatgatggaacaattagagacttggcatttatggaaggcccagaaagcggaggagctattttaataagtgctggagcaggggattgtaacatttatacaaccgattgtcaaagaggacagggcctccatgctttgagtggacatactgggcatattttagcactttatacctggagtggctggatgattgcatctggttcccaagataagactgttagattttgggatcttcgagtaccaagttgtgttcgtgttgttggcacaacatttcatggaactggcagtgcagtggcatctgtagctgtagatcccagtggtcgtctcttagccacaggtcaagaagattctagctgcatgttgtatgacataagaggaggaagaatggtacaaagttatcatcctcattccagtgatgttcgctctgttcgattctcccctggagctcactacttgctaacaggctcttatgatatgaaaataaaggtgacagacctacaaggggacctcaccaagcagcttcctatcatggtggtgggggagcacaaggacaaagtgattcagtgcagatggcacacccaggatctttccttcctgtcatcctctgcagatagaactgtcaccctctggacttacaatgggtagagcacaccgcatgtcagtctatgcagcaaaagcacagagacttaagactactgagttgtgaaaattacaaatctgaagaacatagtgtccaggaaagtggtttagcacgaagaggccccttattaccatgtatcccactgataggaggtgttgggtggtgttattccgcagtgctttcagtcttccatgtgagctcgtgctgctgtgacctgctatatgtagtctcgttgccaaagtctgcagaagagctcttcagttgttggtgtgcactccaagtcaggatggacaatgtgtttacggtttagtattcaatgcattccttggtctttgcctaaataacagttttatatgcacattgaaatggaattatacttcaactatattattaaatgtaatgcaaccaagttcctcccagattaaacttcccaggtgttcagaattacttttgctcttctcacgatcccatattgtattatcacttgtcttctagaggtcagaattccataatatatgtcactcaaaagttacatggttgctttcacttaaggatcattgtggagtttaaagatgaatgaaaaactgcttcttagtttactacatggtataggcccttttttcttaaacccagggatatgattattttgtcatataattttgtttcaggctaaaaggtaaatgtgtttgcttcagaaacttgttaacttcagttttttgaatgcaacaggatacctcccttccaaactgaactgtagaagcagagcagcagcagttatgtgatgcaacacttgatggtacagtaaatttactggcatttttctccttaaaaattaaaatccttgacatagaccatagcatggcttgaaatgctatgtctgcatgataatttaaaatggaagatttaaactttgcactccaaaagcttatttggatttttttcttgcactgttttgtgtaatgcagaataatgattttatttctacagctttgtagattctaacatttatgtatctttattttcatattgtacagtaattttactttaaattatttaaataggctattttatttatttcaaatgcagttgtattagttctcattattgaactgtctgtgcactgtatgtagcaagcatttttcatctgttgtatacaagtggaaagggtattagaagtgtaactgtgctattatttcaataaagacctcttgacatttaaaa

SEQ ID NO: 199859 - DNA, 4134 bp, Homo sapiens
  Payload ID: 19426
  Gene Name: WD repeat domain 47
  Uniprot ID: O94967
  ENST ID: ENST00000400794
  CDS Start-End: 135-2918
aaacccagaccgccgccgtcgtgctcctgccgcagcccggagccggccgcttcggggccctggccgccggcctcccagccgcgttctcctccgccgctcctccgggcttgccctggagccctcaggctatcaatatgacggctgaagaaacagtgaatgtaaaagaggttgaaatcattaagctaattttggacttcctgaattcaaagaagcttcacattagtatgctggccctggagaaggaaagtggagtcataaatggcctgttttcagatgatatgcttttcctgaggcagctaatacttgatggtcaatgggatgaagttcttcagttcattcagcctctagaatgtatggaaaaatttgacaaaaaaaggtttcgttatattatcctgaagcagaagtttttagaagctttatgtgttaacaacgcgatgtcagcagaagatgagccccagcatgtaagatttttattcctgaagctggaatttaccatgcaagaagctgtgcaatgtttacatgctctagaagaatactgtccttctaaagatgactatagtaagctctgtttgcttttgactttgcctcgtctgaccaatcatgccgagtttaaggactggaatcccagcaccgcacgagttcactgttttgaagaggcttgtgtcatggttgcagaattcatccctgctgataggaagctaagtgaagctggttttaaggctagtaacaatcgtttatttcagcttgtaatgaaaggcctgctttatgaatgctgtgtagaattttgtcagagtaaagcaactggagaagaaattacagaaagcgaagtgcttcttggcatcgacctcttatgtggtaatggttgtgatgatttggatctgagtttactgtcatggcttcagaatcttccatcttctgtcttctcttgtgcttttgaacagaaaatgcttaatattcatgttgacaaacttctgaaacctacaaaagctgcatatgctgatcttttgactcctcttatcagcaaactctctccctatccatcatccccaatgagaagacctcaatcagctgatgcctatatgacccgctctctgaatcctgctttagatggcctcacctgtggactaaccagtcatgataagagaatttcagaccttggaaacaaaacttctccaatgtcacactcctttgctaacttccattatccaggggtacaaaacctcagtagaagtctcatgcttgagaatacagaatgtcacagtatttacgaagaatcccctgagcgaagtgatacacctgttgatgcacagaggcctatcggcagtgaaatcttgggccagagttcagtttcagaaaaagagcctgcaaatggagcacagaatccaggaccagctaaacaagaaaaaaatgagcttcgagattcaacagaacaatttcaagaatattataggcaaagattacgctatcaacagcatttagaacagaaggagcaacagcggcagatataccaacagatgttgcttgaaggaggcgtgaatcaggaggatggtcctgatcagcagcagaatcttactgaacagttccttaataggtccattcaaaagcttggtgaattaaatattggaatggatggccttggtaatgaggtatcagcactcaaccagcaatgtaatgggagcaaaggcaatggatctaatggttcttctgtgactagttttactacaccaccccaagactctagtcagagattaacacatgatgcttcaaatattcatacaagcactcctcgtaatcctggatcaacaaatcacataccttttctggaggaatcaccttgtggaagccaaatctcttcagaacattcggtcattaagccacctcttggagattctccagggagtctttcaaggtcgaaaggggaagaggatgacaaatcaaaaaagcagtttgtttgtattaatatcctagaagacacacaagctgttagagcagtggcttttcatccagctggaggtttatatgctgttggttcaaattcaaaaactctgagagtatgtgcctatccagatgtaattgatccaagtgcacatgagactcctaagcagccggtggtacgttttaaaaggaataaacatcataaaggatccatttactgtgtggcctggagtccttgtgggcagttattagcaacaggatcaaatgacaaatacgtcaaagtgctgcccttcaatgcagagacttgtaacgcaacaggaccagatctggaatttagtatgcatgatggaacaattagagacttggcatttatggaaggcccagaaagcggaggagctattttaataagtgctggagcaggggattgtaacatttatacaaccgattgtcaaagaggacagggcctccatgctttgagtggacatactgggcatattttagcactttatacctggagtggctggatgattgcatctggttcccaagataagactgttagattttgggatcttcgagtaccaagttgtgttcgtgttgttggcacaacatttcatggaactggcagtgcagtggcatctgtagctgtagatcccagtggtcgtctcttagccacaggtcaagaagattctagctgcatgttgtatgacataagaggaggaagaatggtacaaagttatcatcctcattccagtgatgttcgctctgttcgattctcccctggagctcactacttgctaacaggctcttatgatatgaaaataaaggtgacagacctacaaggggacctcaccaagcagcttcctatcatggtggtgggggagcacaaggacaaagtgattcagtgcagatggcacacccaggatctttccttcctgtcatcctctgcagatagaactgtcaccctctggacttacaatgggtagagcacaccgcatgtcagtctatgcagcaaaagcacagagacttaagactactgagttgtgaaaattacaaatctgaagaacatagtgtccaggaaagtggtttagcacgaagaggccccttattaccatgtatcccactgataggaggtgttgggtggtgttattccgcagtgctttcagtcttccatgtgagctcgtgctgctgtgacctgctatatgtagtctcgttgccaaagtctgcagaagagctcttcagttgttggtgtgcactccaagtcaggatggacaatgtgtttacggtttagtattcaatgcattccttggtctttgcctaaataacagttttatatgcacattgaaatggaattatacttcaactatattattaaatgtaatgcaaccaagttcctcccagattaaacttcccaggtgttcagaattacttttgctcttctcacgatcccatattgtattatcacttgtcttctagaggtcagaattccataatatatgtcactcaaaagttacatggttgctttcacttaaggatcattgtggagtttaaagatgaatgaaaaactgcttcttagtttactacatggtataggcccttttttcttaaacccagggatatgattattttgtcatataattttgtttcaggctaaaaggtaaatgtgtttgcttcagaaacttgttaacttcagttttttgaatgcaacaggatacctcccttccaaactgaactgtagaagcagagcagcagcagttatgtgatgcaacacttgatggtacagtaaatttactggcatttttctccttaaaaattaaaatccttgacatagaccatagcatggcttgaaatgctatgtctgcatgataatttaaaatggaagatttaaactttgcactccaaaagcttatttggatttttttcttgcactgttttgtgtaatgcagaataatgattttatttctacagctttgtagattctaacatttatgtatctttattttcatattgtacagtaattttactttaaattatttaaataggctattttatttatttcaaatgcagttgtattagttctcattattgaactgtctgtgcactgtatgtagcaagcatttttcatctgttgtatacaagtggaaagggtattagaagtgtaactgtgctattatttcaataaagacctcttgacatttaaaa

SEQ ID NO: 199860 - DNA, 580 bp, Homo sapiens
  Payload ID: 19426
  Gene Name: WD repeat domain 47
  ENST ID: ENST00000528747
  CDS Start-End: 263-580
aaacccagaccgccgccgtcgtgctcctgccgcagcccggagccggccgcttcggggccctggccgccggcctcccagccgcgttctcctccgccgctcctccgggcttgccctggagccctcagagacatggtcttcctctgttgttcagaggtgtgcagtggtgtgatcatagctcactgtatgtaacttctaacttctgggctcaagcgatcctcctgcttcagcctcccaaagtgctgggactacaggcgctatcaatatgacggctgaagaaacagtgaatgtaaaagaggttgaaatcattaagctaattttggacttcctgaattcaaagaagcttcacattagtatgctggccctggagaaggaaagtggagtcataaatggcctgttttcagatgatatgcttttcctgaggcagctaatacttgatggtcaatgggatgaagttcttcagttcattcagcctctagaatgtatggaaaaatttgacaaaaaaaggtttcgttatattatcctgaagcagaagtttttagaagctttatgtgttaacaacgcgatgtcagcagaagatgag

SEQ ID NO: 199861 - DNA, 556 bp, Homo sapiens
  Payload ID: 19426
  Gene Name: WD repeat domain 47
  ENST ID: ENST00000530772
  CDS Start-End: 38-556
ctggcactgagcagcaagtgagcgcgaggctatcaatatgacggctgaagaaacagtgaatgtaaaagaggttgaaatcattaagctaattttggacttcctgaattcaaagaagcttcacattagtatgctggccctggagaaggaaagtggagtcataaatggcctgttttcagatgatatgcttttcctgaggcagctaatacttgatggtcaatgggatgaagttcttcagttcattcagcctctagaatgtatggaaaaatttgacaaaaaaaggtttcgttatattatcctgaagcagaagtttttagaagctttatgtgttaacaacgcgatgtcagcagaagatgagccccagcatctggaatttaccatgcaagaagctgtgcaatgtttacatgctctagaagaatactgtccttctaaagatgactatagtaagctctgtttgcttttgactttgcctcgtctgaccaatcatgccgagtttaaggactggaatcccagcaccgcacgagttcactgttttgaagaggcttgtgtcatggttgca

SEQ ID NO: 199862 - DNA, 469 bp, Homo sapiens
  Payload ID: 19426
  Gene Name: WD repeat domain 47
  ENST ID: ENST00000531337
  CDS Start-End: 300-469
gcagtctgcaagaggctgagctgaggagtcgctgggccgggaggggcggacgtgagaaggacggattgacgaactgatggattgacgcgcgggcggtaggagggaggaccgacgccaaacccagaccgccgccgtcgtgctcctgccgcagcccggagccggccgcttcggggccctggccgccggcctcccagccgcgttctcctccgccgctcctccgggcttgccctggagccctcaggtttcgttatattatcctgaagcagaagtttttagaagctttatgtgttaacaacgcgatgtcagcagaagatgagccccagcatctggaatttaccatgcaagaagctgtgcaatgtttacatgctctagaagaatactgtccttctaaagatgactatagtaagctctgtttgcttttgactttgcctcgtctgaccaatcatgccgagtttaaggactggaatcc

SEQ ID NO: 199863 - DNA, 586 bp, Homo sapiens
  Payload ID: 19426
  Gene Name: WD repeat domain 47
  ENST ID: ENST00000529074
  CDS Start-End: 306-586
accgcagtctgcaagaggctgagctgaggagtcgctgggccgggaggggcggacgtgagaaggacggattgacgaactgatggattgacgcgcgggcggtaggagggaggaccgacgccaaacccagaccgccgccgtcgtgctcctgccgcagcccggagccggccgcttcggggccctggccgccggcctcccagccgcgttctcctccgccgctcctccgggcttgccctggagccctcaggcagctaatacttgatggtcaatgggatgaagttcttcagttcattcagcctctagaatgtatggaaaaatttgacaaaaaaaggtttcgttatattatcctgaagcagaagtttttagaagctttatgtgttaacaacgcgatgtcagcagaagatgagccccagcatctggaatttaccatgcaagaagctgtgcaatgtttacatgctctagaagaatactgtccttctaaagatgactatagtaagctctgtttgcttttgactttgcctcgtctgaccaatcatgccgagtttaaggactggaatcccagcaccgcacgagttcactgttttgaaga

SEQ ID NO: 199864 - DNA, 3707 bp, Homo sapiens
  Payload ID: 19427
  Gene Name: WD repeat domain 48
  Uniprot ID: Q8TAF3
  ENST ID: ENST00000302313
  CDS Start-End: 29-2062
aagtgacgtcggagtgtcaacatgcaagatggcggcccatcaccggcagaacacagcagggcggaggaaagtgcaggtttcctatgttattcgagatgaagtggagaagtacaaccgaaatggagtcaatgctctgcagctggatccagcactaaatagacttttcacagccggtcgagactctatcataagaatatggagtgtcaatcagcacaagcaagatccatatatagcatctatggaacaccatactgattgggtaaacgacattgtactctgttgtaatgggaaaacattaatatctgcttcttctgacacgacagtaaaagtatggaatgcacacaagggattttgcatgtcaacattaaggacacataaggattacgtaaaggccttagcatatgccaaggataaagaactagtagcatcagctgggttggacagacaaatattcctttgggatgtgaatactctaacagcattgactgcctcaaataacactgtcacaacttcttctttaagtggaaacaaagattccatttatagcctggccatgaatcaactgggaacaatcattgtatcagggtccactgaaaaggtgttacgggtatgggatccaagaacatgtgcaaaactaatgaagcttaaagggcacacggataatgtgaaggcattgctattaaacagagatggcacgcaatgcctgtcaggcagttctgatgggacaattcgcctttggtcccttggccagcagagatgtatagcaacataccgagtccatgatgaaggtgtttgggcgctgcaagtcaatgatgccttcacacatgtgtattctggtggaagggacaggaagatttattgtacagacctaagaaaccctgacattcgggtgctaatttgtgaagaaaaagcaccagttctcaagatggagcttgatagatcagctgatcctcctcctgcaatttgggttgcaacaactaagtctacagtaaataaatggactttgaaaggaattcataattttagagcctctggagattatgacaatgactgtacaaatcctataacacctctttgtacacaacctgaccaggttattaaagggggtgctagtattattcagtgccacattcttaatgataagagacatatattaaccaaagataccaataataatgtggcatattgggatgtattgaaggcatgtaaagttgaagatctgggcaaagtggattttgaagatgaaattaagaaaagatttaaaatggtgtatgtgccaaattggttctcagtagacttaaaaacagggatgttaactattactttggatgaaagtgattgttttgctgcctgggtttctgcaaaagatgctggtttcagcagccctgatgggtcagatccaaaattgaatttaggaggacttttactccaagcactcctggaatattggcctagaacacatgtgaatccaatggatgaagaggaaaatgaagtaaaccatgtaaatggggagcaggagaaccgagtgcagaagggaaatggatattttcaagtgcccccacatacacccgtgatctttggtgaagctggaggtcgcacactgttcaggctgctctgccgagattccgggggtgagactgagtctatgcttcttaatgaaacagtgccacaatgggtaattgacatcactgtggataaaaatatgcccaaattcaacaaaattcctttctacctccaacctcatgcatcttcaggagcaaaaaccttaaaaaaagatagactctctgctagtgacatgctccaagtccgaaaagttatggaacatgtttatgaaaaaattatcaacttggataatgagtctcaaaccactagctcttctaataatgaaaaaccaggagaacaggaaaaagaagaagatattgctgtgttggcagaggagaaaattgaacttttgtgccaggaccaggttttggatccaaatatggaccttcgaacagtgaaacacttcatatggaagagcggtggagacctcaccctccattaccgtcagaagtccacgtgaaggctgggctaatgctcctggatattcatttacgaccttcctctatggccccaagagtagtcctaggaagcccactgatccccaacgggagcaagacttctaacggctgattggtatggaccgagattatctttcaattgaagtgactaatcgagatgtaatatagaaaccagtctccatgtgtagattaagctgtccccagggaagcagagtgcaagagcagaagagccccaagcagactatgtctttcaagatgtacagaagactgacaacaggccagtgcagactttgcttcctccttttgtttcaaaggaccttatctacccattaacacttgttagagacacctcagtcgggccacaactgtctctgtttcaactttaagcccacacactctgtagcttttctaaaacagtacattccattcatgcagtagatatgaaggctttttccaagtttgtcatataaagtaatcaaattgttttcaccgtttaagacagttatttttaatgggaatttgctgttgcacaatttgagaaccagcccatttcataataaaagattaatgttgggcttgttgttaatattgcatctcagatgtgttcttgtaggaagatctgttgaaattccaggtgctggatcatagcacttggactgttgggccggagtttgtgcagcccatgcctagcgatgctgcacctcccatgatgtcctggctttgtggcaaccccagggaggtgcagcagtttcactccttcctccactgtgtccagttttatttacacaaagcgagctgagaccacaggttcttgctctggatgagcagcatgacaccatcaaaatttaagaccatgatgaaatttcagtttcattcaaatgttacctaaaatttatggtgtcagaataaagggagatcatagtgagttaatttgatattcatatcctggaagtatacatatttgtttttccaaagttttatatgcaggtttttgttgtacctgtatccagatcttcttttcactgttctaacaatctaacactttcatagaatcatttggatcttgtatagagtgtaacttattggggataaacacttcaacttttggcagaaaatactttggattctccccaaggtcatttgtattcagagtaaatcagtggtccacccccataaaactgtaagacaagcctcctgtatgaagccagaagcacaagtgccttcagagggcagttgattccagtccagttgcctccctagcttgtgtgtggcctgcctccaccatagcagggactagggagggaggcagggaacgttttttcttttctacatcttcacaggttcggctgggggcagctgataggcctaaggccataccttactatttaagatactctgatcgcacaactgcagagacagggttccctcactgctagtcagcttcttttggaaactggacaggccattgccacctgcactttgaagaagtgagcaaagacgtggccacatttctaataagttgaaatggtctttctcccttcctcagagagcaaccagcttctttttttttaaaagtcctttctatctgttggatacaacagtgtgcttttggtgcacattttttagcaatagttgtgaattaatggc

SEQ ID NO: 199865 - DNA, 2300 bp, Homo sapiens
  Payload ID: 19427
  Gene Name: WD repeat domain 48
  ENST ID: ENST00000413099
  CDS Start-End: 11-202
aacatgcaagatggcggcccatcaccggcagaacacagcagggcggaggaaagtgcaggtttcctatgttattcgagatgaagtggagaagtacaaccgaaatggagtcaatgctctgcagctggatccagcactaaatagacttttcacagccggtcgagactctatcataagaatatggagtgtcaatcagcacaagtaatatctgcttcttctgacacgacagtaaaagtatggaatgcacacaagggattttgcatgtcaacattaaggacacataaggattacgtaaaggccttagcatatgccaaggataaagaactagtagcatcagctgggttggacagacaaatattcctttgggatgtgaatactctaacagcattgactgcctcaaataacactgtcacaacttcttctttaagtggaaacaaagattccatttatagcctggccatgaatcaactgggaacaatcattgtatcagggtccactgaaaaggtgttacgggtatgggatccaagaacatgtgcaaaactaatgaagcttaaagggcacacggataatgtgaaggcattgctattaaacagagatggcacgcaatgcctgtcaggcagttctgatgggacaattcgcctttggtcccttggccagcagagatgtatagcaacataccgagtccatgatgaaggtgtttgggcgctgcaagtcaatgatgccttcacacatgtgtattctggtggaagggacaggaagatttattgtacagacctaagaaaccctgacattcgggtgctaatttgtgaagaaaaagcaccagttctcaagatggagcttgatagatcagctgatcctcctcctgcaatttgggttgcaacaactaagtctacagtaaataaatggactttgaaaggaattcataattttagagcctctggagattatgacaatgactgtacaaatcctataacacctctttgtacacaacctgaccaggttattaaagggggtgctagtattattcagtgccacattcttaatgataagagacatatattaaccaaagataccaataataatgtggcatattgggatgtattgaaggcatgtaaagttgaagatctgggcaaagtggattttgaagatgaaattaagaaaagatttaaaatggtgtatgtgccaaattggttctcagtagacttaaaaacagggatgttaactattactttggatgaaagtgattgttttgctgcctgggtttctgcaaaagatgctggtttcagcagccctgatgggtcagatccaaaattgaatttaggaggacttttactccaagcactcctggaatattggcctagaacacatgtgaatccaatggatgaagaggaaaatgaagtaaaccatgtaaatggggagcaggagaaccgagtgcagaagggaaatggatattttcaagtgcccccacatacacccgtgatctttggtgaagctggaggtcgcacactgttcaggctgctctgccgagattccgggggtgagactgagtctatgcttcttaatgaaacagtgccacaatgggtaattgacatcactgtggataaaaatatgcccaaattcaacaaaattcctttctacctccaacctcatgcatcttcaggagcaaaaaccttaaaaaaagatagactctctgctagtgacatgctccaagtccgaaaagttatggaacatgtttatgaaaaaattatcaacttggataatgagtctcaaaccactagctcttctaataatgaaaaaccaggagaacaggaaaaagaagaagatattgctgtgttggcagaggagaaaattgaacttttgtgccaggaccaggttttggatccaaatatggaccttcgaacagtgaaacacttcatatggaagagcggtggagacctcaccctccattaccgtcagaagtccacgtgaaggctgggctaatgctcctggatattcatttacgaccttcctctatggccccaagagtagtcctaggaagcccactgatccccaacgggagcaagacttctaacggctgattggtatggaccgagattatctttcaattgaagtgactaatcgagatgtaatatagaaaccagtctccatgtgtagattaagctgtccccagggaagcagagtgcaagagcagaagagccccaagcagactatgtctttcaagatgtacagaagactgacaacaggccagtgcagactttgcttcctccttttgtttcaaaggaccttatctacccattaacact

SEQ ID NO: 199866 - DNA, 563 bp, Homo sapiens
  Payload ID: 19427
  Gene Name: WD repeat domain 48
  ENST ID: ENST00000423296
  CDS Start-End: 14-418
gtcaacatgcaagatggcggcccatcaccggcagaacacagcagggcggaggaaagtgcaggtttcctatgttattcgagatgaagtggagaagtacaaccgaaatggagtcaatgctctgcagctggatccagcactaaatagacttttcacagccggtcgagactctatcataagaatatggagtgtcaatcagcacaagcaagatccatatatagcatctatggaacaccatactgattgggtaaacgacattgtactctgttgtaatgggaaaacattaatatctgcttcttctgacacgacagtaaaagtatggaatgcacacaagggattttgcatgtcaacattaaggacacataagtatgtctgttctattacaggattacgtaaaggccttagcatatgccaaggataaagaactagtagcatcagctgggttggacagacaaatattcctttgggatgtgaatactctaacagcattgactgcctcaaataacactgtcacaacttcttctttaagtggaaacaaagattccatttatagcctggccatgaat

SEQ ID NO: 199867 - DNA, 645 bp, Homo sapiens
  Payload ID: 19427
  Gene Name: WD repeat domain 48
  ENST ID: ENST00000433841
  CDS Start-End: 8-232
atgcaagatggcggcccatcaccggcagaacacagcagggcggaggaaagtgcaggtttcctatgttattcgagatgaagtggagaagtacaaccgaaatggagtcaatgctctgcagctggatccagcactaaatagacttttcacagccggtcgagactctatcataagaatatggagtgtcaatcagcacaaggatttttcttttaatttcagcaagatccatatatagcatctatggaacaccatactgattgggtaaacgacattgtactctgttgtaatgggaaaacattaatatctgcttcttctgacacgacagtaaaagtatggaatgcacacaagggattttgcatgtcaacattaaggacacataaggattacgtaaaggccttagcatatgccaaggataaagaactagtagcatcagctgggttggacagacaaatattcctttgggatgtgaatactctaacagcattgactgcctcaaataacactgtcacaacttcttctttaagtggaaacaaagattccatttatagcctggccatgaatcaactgggaacaatcattgtatcagggtccactgaaaaggtgttacgggtatgggatccaagaacatgtgcaaaactaatgaagctt

SEQ ID NO: 199868 - DNA, 3772 bp, Homo sapiens
  Payload ID: 19427
  Gene Name: WD repeat domain 48
  ENST ID: ENST00000420940
  CDS Start-End: 7-369
tgcaagatggcggcccatcaccggcagaacacagcagggcggaggaaagtgcaggtttcctatgttattcgagatgaagtggagaagtacaaccgaaatggagtcaatgctctgcagctggatccagcactaaatagacttttcacagccggtcgagactctatcataagaatatggagtgtcaatcagcacaagcaagatccatatatagcatctatggaacaccatactgattgggtaaacgacattgtactctgttgtaatgggaaaacattaatatctgcttcttctgacacgacagtaaaagtatggaatgcacacaagggattttgcatgtcaacattaaggacacataagcttcttctttaagtggaaacaaagattccatttatagcctggccatgaatcaactgggaacaatcattgtatcagggtccactgaaaaggtgttacgggtatgggatccaagaacatgtgcaaaactaatgaagcttaaagggcacacggataatgtgaaggcattgctattaaacagagatggcacgcaatgcctgtcaggcagttctgatgggacaattcgcctttggtcccttggccagcagagatgtatagcaacataccgagtccatgatgaaggtgtttgggcgctgcaagtcaatgatgccttcacacatgtgtattctggtggaagggacaggaagatttattgtacagacctaagaaaccctgacattcgggtgctaatttgtgaagaaaaagcaccagttctcaagatggagcttgatagatcagctgatcctcctcctgcaatttgggttgcaacaactaagtctacagtaaataaatggactttgaaaggaattcataattttagagcctctggagattatgacaatgactgtacaaatcctataacacctctttgtacacaacctgaccaggttattaaagggggtgctagtattattcagtgccacattcttaatgataagagacatatattaaccaaagataccaataataatgtggcatattgggatgtattgaaggcatgtaaagttgaagatctgggcaaagtggattttgaagatgaaattaagaaaagatttaaaatggtgtatgtgccaaattggttctcagtagacttaaaaacagggatgttaactattactttggatgaaagtgattgttttgctgcctgggtttctgcaaaagatgctggtttcagcagccctgatgggtcagatccaaaattgaatttaggaggacttttactccaagcactcctggaatattggcctagaacacatgtgaatccaatggatgaagaggaaaatgaagtaaaccatgtaaatggggagcaggagaaccgagtgcagaagggaaatggatattttcaagtgcccccacatacacccgtgatctttggtgaagctggaggtcgcacactgttcaggctgctctgccgagattccgggggtgagactgagtctatgcttcttaatgaaacagtgccacaatgggtaattgacatcactgtggataaaaatatgcccaaattcaacaaaattcctttctacctccaacctcatgcatcttcaggagcaaaaaccttaaaaaaagatagactctctgctagtgacatgctccaagtccgaaaagttatggaacatgtttatgaaaaaattatcaacttggataatgagtctcaaaccactagctcttctaataatgaaaaaccaggagaacaggaaaaagaagaagatattgctgtgttggcagaggagaaaattgaacttttgtgccaggaccaggttttggatccaaatatggaccttcgaacagtgaaacacttcatatggaagagcggtggagacctcaccctccattaccgtcagaagtccacgtgaaggctgggctaatgctcctggatattcatttacgaccttcctctatggccccaagagtagtcctaggaagcccactgatccccaacgggagcaagacttctaacggctgattggtatggaccgagattatctttcaattgaagtgactaatcgagatgtaatatagaaaccagtctccatgtgtagattaagctgtccccagggaagcagagtgcaagagcagaagagccccaagcagactatgtctttcaagatgtacagaagactgacaacaggccagtgcagactttgcttcctccttttgtttcaaaggaccttatctacccattaacacttgttagagacacctcagtcgggccacaactgtctctgtttcaactttaagcccacacactctgtagcttttctaaaacagtacattccattcatgcagtagatatgaaggctttttccaagtttgtcatataaagtaatcaaattgttttcaccgtttaagacagttatttttaatgggaatttgctgttgcacaatttgagaaccagcccatttcataataaaagattaatgttgggcttgttgttaatattgcatctcagatgtgttcttgtaggaagatctgttgaaattccaggtgctggatcatagcacttggactgttgggccggagtttgtgcagcagtttcactccttcctccactgtgtccagttttatttacacaaagcgagctgagaccacaggttcttgctctggatgagcagcatgacaccatcaaaatttaagaccatgatgaaatttcagtttcattcaaatgttacctaaaatttatggtgtcagaataaagggagatcatagtgagttaatttgatattcatatcctggaagtatacatatttgtttttccaaagttttatatgcaggtttttgttgtacctgtatccagatcttcttttcactgttctaacaatctaacactttcatagaatcatttggatcttgtatagagtgtaacttattggggataaacacttcaacttttggcagaaaatactttggattctccccaaggtcatttgtattcagagtaaatcagtggtccacccccataaaactgtaagacaagcctcctgtatgaagccagaagcacaagtgccttcagagggcagttgattccagtccagttgcctccctagcttgtgtgtggcctgcctccaccatagcagggactagggagggaggcagggaacgttttttcttttctacatcttcacaggttcggctgggggcagctgataggcctaaggccataccttactatttaagatactctgatcgcacaactgcagagacagggttccctcactgctagtcagcttcttttggaaactggacaggccattgccacctgcactttgaagaagtgagcaaagacgtggccacatttctaataagttgaaatggtctttctcccttcctcagagagcaaccagcttctttttttttaaaagtcctttctatctgttggatacaacagtgtgcttttggtgcacattttttagcaatagttgtgaattaatggcaaagaaaaaaaaaattatttaccagccctcagttgtgtttgcccgaggggcctttgagcaaagaaatgggttttgctgggtcattttgccctgtgtgctaagccttgggtggctgcattcccctcctgtcatagatctgacccccagcatgattgtatttctttcccctccagtcaaaccgtaatacagtttccagaaaattcgacagtctgcaatgccaaaagggtaaaaatctgtatttcacagttgtatagaataaaggctttagttaaaatatttcaaa

SEQ ID NO: 199869 - DNA, 949 bp, Homo sapiens
  Payload ID: 19427
  Gene Name: WD repeat domain 48
  ENST ID: ENST00000441361
  CDS Start-End: 464-949
attctgagcccgggattgcttgtcgccgctcttctgtaggagtggacttgcggggtcgggataggctcgttccccgcccacttgcctcccccttgccctgtctttcttcgaagcgctctgccctcgctgcgtcggagccgaggcctccaggggtttcccaggggggtgggcgttggaggagtgagcggcttgtgcgggggcgtggcgaggcggcggagcgccaacggccctgcggggtttctgctgaggattccgcacttgggagcccccagccctctcttatgtgggagctgtcccctgggtttcctatgttattcgagatgaagtggagaagtacaaccgaaatggagtcaatgctctgcagctggatccagcactaaatagacttttcacagccggtcgagactctatcataagaatatggagtgtcaatcagcacaagcaagatccatatatagcatctatggaacaccatactgattgggtaaacgacattgtactctgttgtaatgggaaaacattaatatctgcttcttctgacacgacagtaaaagtatggaatgcacacaagggattttgcatgtcaacattaaggacacataaggattacgtaaaggccttagcatatgccaaggataaagaactagtagcatcagctgggttggacagacaaatattcctttgggatgtgaatactctaacagcattgactgcctcaaataacactgtcacaacttcttctttaagtggaaacaaagattccatttatagcctggccatgaatcaactgggaacaatcattgtatcagggtccactgaaaaggtgttacgggtatgggatccaagaacatgtgcaaaactaatgaagcttaaagggcacacggataatgtgaaggcattgctattaaacagagatggcacgcaatgcctgtcaggcagttctgatggg

SEQ ID NO: 199870 - DNA, 2594 bp, Homo sapiens
  Payload ID: 19428
  Gene Name: WD repeat domain 49
  Uniprot ID: Q8IV35
  ENST ID: ENST00000308378
  CDS Start-End: 307-2400
aggcacctgttgaaggaaaaagaagatccatccttatagaaatagttgaaggcaactgagaaaaggtgaagccattatgagttgccagaaagctgtacttgagttaaacatagggtcacagcttgggccaaagagtcctgagagaacagaaggtgtaactgcatttgaagactatggcacaggcctgcttgaaaaccaactcagcgtgggtgactttgtaaaaatacagaaggcctttgagttacttacaatgcatctttagacgctatcatttccagtacaaccagcaatacaaatagtgtggtgatggcttggagagagaaatcaaaaaagcgtcttaatatgacatccttcaacattgcccagggcattcatgcttttgattatcactctcggctcaatttaattgcaactgctggcattaacaataaagtttgcctttggaatccctatgttgtctctaaaccagtgggtgtcctttggggccactcagccagtgtaatagccgtccaattctttgtggaaagaaaacaacttttcagcttctccaaggataaagttttgagactctgggatattcaacaccagctgtccatccagaggatagcttgttctttccccaaaagtcaggacttcagatgtctcttccactttgatgaagcccatggacgacttttcatctcgtttaataaccagctagcattgttggcaatgaaaagtgaagccagcaagagggtgaaaagccatgagaaagcagtcacttgtgttctttacaattctatcttgaagcaggtaatcagctctgatacagggtctactgtttccttctggatgatagacactgggcagaaaatcaaacagtttactggttgccacggcaacgcagaaatcagcactatggcccttgatgcaaatgagactcggcttttgactggcagcacagatgggactgtaaagatatgggacttcaatggatattgtcaccatacactaaatgttgggcaagatggagctgtggatatttcacaaatcctcattcttaagaagaaaatactggttacaggctgggagagggctattactgtgtttcgaccccaaaacttcaatcaatttttcatccagcctgaagaatggaaaggaggtatacagcaccatgatgacatcttgtgtgctgcgtttttacctccacaaactcttgttacggggagttatgatggagaaattgttctatggaacaatagcacagagaatgctcaccatgttcttcaccctgattaccagaggttgctaaagtcaaaattagatacaaaacctcaaaaacttctcagtgctgggagaagccaaccctcccaccccatggcagaccattctaccacgggagtccgcaactttgagattgacactgagggcaaaaatgctgttatgagactttgctttcttaaagcaagaaaaaacactgcagtgacaggaggagctaacctggtatcatgtggaggatctggttatgtcagattttgggatatatataagaagcaacttctggctgaatttttggctcatagtggagttggatcgattattatgtctactgataagatgaatcgataccttaccacaggagatcttgatggatggttgaaaatctggaatatagaggagtactgtcttaactccagtaagaacaaaatcaccaaggccccaactctgataagatcattccaacctcatgaggaccgaataagttccttagagatgtgtgagccaggtggtcagttactgattatctcctcctctgcagactgcagtatttgtgtgactggtgtctgcaatgctcctgtttggatctttggtcaggcaaagcactggcatattgaaaactgccttttccttcctaaaagagatactaatttagtggaaagtgagattcaaaaggaaatttctttattttctaaggaggaatcttgtttagacccaacagaacattctctacttaataagaaaaacaaagatgactcaacatacaatgtcagaccatcagaagatataaatttagatataaaatataaggaaagaagtacctgcatgaaagaaacacaaaaaccttattatggtgaagttataaaaaaatcattcagtacatttaggtcattaaacattggagccctggaagagctgcctgaagtgaataaacctgctttccttctagaccctgagaaatactttaggaaagaaccagaggaagagcgtccccaaattctggaggccccgtcactttttaaaactttgaaagctgtatttgatgagaaaaacctgtttcccaaggaaattctgcatcatgaacgaaaagccaagcaattatgccaagaaaaaagttgtgaagtgaagaaaaataagaagtaattacaacagaaaaaccttcactgttacataaggtacagatataaaatgcagaaaaagcatcaagaattctgccttttattttattttatatttaaacttcaggaagttttctcttcatgggataatttagtactgcttttatctatcatctgtcaatttctctgtattcttaataaaataaatattgaactaaa

SEQ ID NO: 199871 - DNA, 1108 bp, Homo sapiens
  Payload ID: 19428
  Gene Name: WD repeat domain 49
  ENST ID: ENST00000460448
  CDS Start-End: 167-352
cttcattggtagggaaactctgcagctttgtcatctaactcttccagacaagaaagtggaattgaaaactacaacatgttaatggaagcaaggcacctgttgaaggaaaaagaagatccatccttatagaaatagttgaaggcaactgagaaaaggtgaagccattatgagttgccagaaagctgtacttgagttaaacatagggtcacagcttgggccaaagagtcctgagagaacagaaggtgtaactgcatttgaagactatggcacaggcctgcttgaaaaccaactcagcgtgggtgactttgtaaaaatacagaaggcctttgagttacttacaatgcatctttagacgctatcatttccagtacaaccagcaatacaaatagtgtggtgatggcttggagagagaaatcaaaaaagcgtcttaatatgacatccttcaacattgcccagggcattcatgcttttgattatcactctcggctcaatttaattgcaactgctggcattaacaataaagtttgcctttggaatccctatgttgtctctaaaccagtgggtgtcctttggggccactcagccagtgtaatagccgtccaattctttgtggaaagaaaacaacttttcagcttctccaaggataaagttttgagactctgggatattcaacaccagctgtccatccagaggatagcttgttctttccccaaaagtcaggacttcagatgtctcttccactttgatgaagcccatggacgacttttcatctcgtttaataaccagctagcattgttggcaatgaaaagtgaagccagcaagagggtgaaaagccatgagaaagcagtcacttgtgttctttacaattctatcttgaagcagggctattactgtgtttcgaccccaaaacttcaatcaatttttcatccagcctgaagaatggaaaggaggtatacagcaccatgatgacatcttgtgtgctgcgtttttacctccacaaactcttgttacggggagttatgatggagaaattgttctatggaacaatagcacagagaatgctcaccatgttcttcaccctgattaccagaggttgctaaagtcaaaa

SEQ ID NO: 199872 - DNA, 416 bp, Homo sapiens
  Payload ID: 19428
  Gene Name: WD repeat domain 49
  ENST ID: ENST00000493061
  CDS Start-End: 1-416
agattgacactgagggcaaaaatgctgttatgagactttgctttcttaaagcaagaaaaaacactgcagtgacaggaggagctaacctggtatcatgtggaggatctggttatgtcagattttgggatatatataagaagcaacttctggctgaatttttggctcatagtggagttggatcgattattatgtctactgataagatgaatcgataccttaccacaggagatcttgatggatggttgaaaatctggaatatagaggcaaagcactggcatattgaaaactgccttttccttcctaaaagagatactaatttagtggaaagtgagattcaaaaggaaatttctttattttctaaggaggaatcttgtttagacccaacagaacattctctacttaataagaaaaacaaa

SEQ ID NO: 199873 - DNA, 575 bp, Homo sapiens
  Payload ID: 19428
  Gene Name: WD repeat domain 49
  ENST ID: ENST00000466760
  CDS Start-End: 220-575
agatgaaacaaacaactccacattgctgggaaggtggcattcagagtcaagtacttcattggtagggaaactctgcagctttgtcatctaactcttccagacaagaaagtggaattgaaaactacaacatgttaatggaagcaaggcacctgttgaaggaaaaagaagatccatccttatagaaatagttgaaggcaactgagaaaaggtgaagccattatgagttgccagaaagctgtacttgagttaaacatagggtcacagcttgggccaaagagtcctgagagaacagaaggtgtaactgcatttgaagactatggcacaggcctgcttgaaaaccaactcagcgtgggtgactttgtaaaaatacagaaggcctttgaggtaatcagctctgatacagggtctactgtttccttctggatgatagacactgggcagaaaatcaaacagtttactggttgccacggcaacgcagaaatcagcactatggcccttgatgcaaatgagactcggcttttgactggcagcacagatgggactgtaaagatatgggacttcaatggatattgtca

SEQ ID NO: 199874 - DNA, 2215 bp, Homo sapiens
  Payload ID: 19428
  Gene Name: WD repeat domain 49
  ENST ID: ENST00000472600
  CDS Start-End: 1-2024
ggcctgctagtgcatgtgaagatggagaagccactatgaccattaactgggcagagctgctctctggatgtcacaaatgttgccatatattagagcataaacttcatcaaggagattgggtcaggcaagttacttacaatgcatctttagacgctatcatttccagtacaaccagcaatacaaatagtgtggtgatggcttggagagagaaatcaaaaaagcgtcttaatatgacatccttcaacattgcccagggcattcatgcttttgattatcactctcggctcaatttaattgcaactgctggcattaacaataaagtttgcctttggaatccctatgttgtctctaaaccagtgggtgtcctttggggccactcagccagtgtaatagccgtccaattctttgtggaaagaaaacaacttttcagcttctccaaggataaagttttgagactctgggatattcaacaccagctgtccatccagaggatagcttgttctttccccaaaagtcaggacttcagatgtctcttccactttgatgaagcccatggacgacttttcatctcgtttaataaccagctagcattgttggcaatgaaaagtgaagccagcaagagggtgaaaagccatgagaaagcagtcacttgtgttctttacaattctatcttgaagcaggtaatcagctctgatacagggtctactgtttccttctggatgatagacactgggcagaaaatcaaacagtttactggttgccacggcaacgcagaaatcagcactatggcccttgatgcaaatgagactcggcttttgactggcagcacagatgggactgtaaagatatgggacttcaatggatattgtcaccatacactaaatgttgggcaagatggagctgtggatatttcacaaatcctcattcttaagaagaaaatactggttacaggctgggagaggtatgattatgcctcatggaaaactataggaagggctattactgtgtttcgaccccaaaacttcaatcaatttttcatccagcctgaagaatggaaaggaggtatacagcaccatgatgacatcttgtgtgctgcgtttttacctccacaaactcttgttacggggagttatgatggagaaattgttctatggaacaatagcacagagaatgctcaccatgttcttcaccctgattaccagaggttgctaaagtcaaaattagatacaaaacctcaaaaacttctcagtgctgggagaagccaaccctcccaccccatggcagaccattctaccacgggagtccgcaactttgagattgacactgagggcaaaaatgctgttatgagactttgctttcttaaagcaagaaaaaacactgcagtgacaggaggagctaacctggtatcatgtggaggatctggttatgtcagattttgggatatatataagaagcaacttctggctgaatttttggctcatagtggagttggatcgattattatgtctactgataagatgaatcgataccttaccacaggagatcttgatggatggttgaaaatctggaatatagaggaggaatcttgtttagacccaacagaacattctctacttaataagaaaaacaaagatgactcaacatacaatgtcagaccatcagaagatataaatttagatataaaatataaggaaagaagtacctgcatgaaagaaacacaaaaaccttattatggtgaagttataaaaaaatcattcagtacatttaggtcattaaacattggagccctggaagagctgcctgaagtgaataaacctgctttccttctagaccctgagaaatactttaggaaagaaccagaggaagagcgtccccaaattctggaggccccgtcactttttaaaactttgaaagctgtatttgatgagaaaaacctgtttcccaaggaaattctgcatcatgaacgaaaagccaagcaattatgccaagaaaaaagttgtgaagtgaagaaaaataagaagtaattacaacagaaaaaccttcactgttacataaggtacagatataaaatgcagaaaaagcatcaagaattctgccttttattttattttatatttaaacttcaggaagttttctcttcatgggataatttagtactgcttttatctatcatctgtcaatttctctgtattcttaataaaataaatattgaact

SEQ ID NO: 199875 - DNA, 2108 bp, Homo sapiens
  Payload ID: 19428
  Gene Name: WD repeat domain 49
  ENST ID: ENST00000479765
  CDS Start-End: 225-1781
agaacagatgaaacaaacaactccacattgctgggaaggtggcattcagagtcaagtacttcattggtagggaaactctgcagctttgtcatctaactcttccagacaagaaagtggaattgaaaactacaacatgttaatggaagcaaggcacctgttgaaggaaaaagaagatccatccttatagaaatagttgaaggcaactgagaaaaggtgaagccattatgagttgccagaaagctgtacttgagttaaacatagggtcacagcttgggccaaagagtcctgagagaacagaaggtgtaactgcatttgaagactatggcacaggcctgcttgaaaaccaactcagcgtgggtgactttgtaaaaatacagaaggcctttgagtccccacagccaaggaaaatcatttgtatgtccagagaagacttcacgcagaagatgacagagattgttggttggggcacgaaggaagaatatggggagctctttgacaaagtggatgtggcccaagatggcttcattaattgggacaagctgacttcatttatactgctagagctttatgagcaagatgaacgagcaaaggcaactgtggtgccccagtggaaggaccttgaattcctcccagtaaaacacaaggacaccattcaaaaagtaattttcttaaaaaattcaagtcattatctgacaattagtaaagaaggtttattggcaatctggggagagcatttaaagctgcaagaaacattccccatcacttcagatgccaccaagctcaaacacctgtgggtgacaagtctggtttctctggaaaatgtaaacaagatagcagtggcttttacaagtaaagaggtttgtttctatgatctgctgtccaaagaagaatttgcttgccaatacaaactccaaggcctgaaaggaacaccaatttgcatggattattggtatgatcctcttgatgccaatgaatcaattctttcttttggggatataactggaaaggttcaagcaattgctttcaccgcagccttgatttccctgtttgaacggcctgctagtgcatgtgaagatggagaagccactatgaccattaactgggcagagctgctctctggatgtcacaaatgttgccatatattagagcataaacttcatcaaggagattgggtcaggcaagttacttacaatgcatctttagacgctatcatttccagtacaaccagcaatacaaatagtgtggtgatggcttggagagagaaatcaaaaaagcgtcttaatatgacatccttcaacattgcccagggcattcatgcttttgattatcactctcggctcaatttaattgcaactgctggcattaacaataaagtttgcctttggaatccctatgttgtctctaaaccagtgggtgtcctttggggccactcagccagtgtaatagccgtccaattctttgtggaaagaaaacaacttttcagcttctccaaggataaagttttgagactctgggatattcaacaccagctgtccatccagaggatagcttgttctttccccaaaagtcaggacttcagatgtctcttccactttgatgaagcccatggacgacttttcatctcgtttaataaccagctagcattgttggcaatgaaaagtgaagccagcaagagggtgaaaagccatgagaaagcagtcacttgtgttctttacaattctatcttgaagcagccttctcaatgtgaagacgacacgaatgaagacccttatgataattgacttccactcaataaatactttgaaagctgtatttgatgagaaaaacctgtttcccaaggaaattctgcatcatgaacgaaaagccaagcaattatgccaagaaaaaagttgtgaagtgaagaaaaataagaagtaattacaacagaaaaaccttcactgttacataaggtacagatataaaatgcagaaaaagcatcaagaattctgccttttattttattttatatttaaacttcaggaagttttctcttcatgggataatttagtactgcttttatctatcatctgtcaatttctctgtattcttaataaaataaatattgaact

SEQ ID NO: 199876 - DNA, 521 bp, Homo sapiens
  Payload ID: 19428
  Gene Name: WD repeat domain 49
  ENST ID: ENST00000488012
  CDS Start-End: 182-521
attcagagtcaagtacttcattggtagggaaactctgcagctttgtcatctaactcttccagacaagaaagtggaattgaaaactacaacatgttaatggaagcaaggcacctgttgaaggaaaaagaagatccatccttatagaaatagttgaaggcaactgagaaaaggtgaagccattatgagttgccagaaagctgtacttgagttaaacatagggtcacagcttgggccaaagagtcctgagagaacagaaggtgtaactgcatttgaagactatggcacaggcctgcttgaaaaccaactcagcgtgggtgactttgtaaaaatacagaaggcctttgagatagcagtggcttttacaagtaaagaggtttgtttctatgatctgctgtccaaagaagaatttgcttgccaatacaaactccaaggcctgaaaggaacaccaatttgcatggattattggtatgatcctcttgatgccaatgaatcaattctttcttttggggatataactggaa

SEQ ID NO: 199877 - DNA, 3151 bp, Homo sapiens
  Payload ID: 19429
  Gene Name: WD repeat domain 5
  Uniprot ID: P61964
  ENST ID: ENST00000358625
  CDS Start-End: 172-1176
gccgcctggcgcccgcccgagctgccgccttgtcgagctgagtccgcgctcccgcccaggcggcggccgacgcgacgccccgagcgcccggccccgccgccgcggcccggcagactgcctctgtcaccgggtccctccacccttgtctcctgtgcggccagcgtcagagccatggcgacggaggagaagaagcccgagaccgaggccgccagagcacagccaaccccttcgtcatccgccactcagagcaagcctacacctgtgaagccaaactatgctctaaagttcacccttgctggccacaccaaagcagtgtcctccgtgaaattcagcccgaatggagagtggctggcaagttcatctgctgataaacttattaaaatttggggcgcgtatgatgggaaatttgagaaaaccatatctggtcacaagctgggaatatccgatgtagcctggtcgtcagattctaaccttcttgtttctgcctcagatgacaaaaccttgaagatatgggacgtgagctcgggcaagtgtctgaaaaccctgaagggacacagtaattatgtcttttgctgcaacttcaatccccagtccaaccttattgtctcaggatcctttgacgaaagcgtgaggatatgggatgtgaaaacagggaagtgcctcaagactttgccagctcactcggatccagtctcggccgttcattttaatcgtgatggatccttgatagtttcaagtagctatgatggtctctgtcgcatctgggacaccgcctcaggccagtgcctgaagacgctcatcgatgacgacaacccccccgtgtcttttgtgaagttctccccgaacggcaaatacatcctggccgccacgctggacaacactctgaagctctgggactacagcaaggggaagtgcctgaagacgtacactggccacaagaatgagaaatactgcatatttgccaatttctctgttactggtgggaagtggattgtgtctggctcagaggataaccttgtttacatctggaaccttcagacgaaagagattgtacagaaactacaaggccacacagatgtcgtgatctcaacagcttgtcacccaacagaaaacatcatcgcctctgctgcgctagaaaatgacaaaacaattaaactgtggaagagtgactgctaagtccctttgctcctgcccgcgagagactgtcgggaagttgacccggattggcaagaaacagggtgtcttggaggtggtcccccagatctgcgcctgggggtcaggacagggcctgatttgagcctcctctctgaagatgatttggccgagcggaaggtgtggaccaccggaaagttcttaaaagttgctggtgacatttcttgccaattctaacactgtctagggaagagttcctagtctattgtgttcaaacagagtcaacaaaagtttttaattttttattacagaagggtgaagttcaatttaacatgcgttgtgttttttcagtaaacgttctgtatctttttgatattccatgacccagtgcacgctgtggcctgtcaccgccaccgtggccccgccagctggcctcccctttggcccacgccggccgcccccattctctgctgcgtagatgccctggcccagggccctgactcctccattcccgccagtagctgttcctagtgtattttcgtctttctggaaaacagcattgagtggttgttttctgtgtaaagagccgtttgtgtcttgggagtttgtggcccacatgccgatagcacggtcatcgcacatgactctcccgtttgtctcagtgtccctgcaacaagcagcaccgcagactgtaataaaaggtggggttttgtgaatggttgtggcaagtgcgtccttgtgaagctcgtctccatgtggctttcttggagaaaggctcccctggggcaagagggtggaaggtttctttggacaggaggtgctgaggctggctgcacctgctctctgaagacgccttcctctctaggttcattgttcagtgttgctgggggcggggaacgggggtggggaggttcttagttgcgaaggagccaagctcctgatggacttgcgttgggatgtgggggacacctgtggcatggtaaggctccctgagtcccttactccaggtcagatgccagtgggactcatgcgccctatgagggctgcagggccagtgctgcccctcggactcctcgaggggttgggtgctaagcgcgagcctcgccgtccctgctggagccctcgcctgcctgcccctctgcctgtgctcctggcagtgtggcttcccggtgctcacctgcacagcagttaacagcagaggccgagcgggagcctctggggagcgaggctgaaacctgaacctgcccatggagacagttgtggtgagggttgccacacacagtgagggcggagcagggtggctgagggcacaggtgcctgggtctgtcccacggggcagggctttggggctgtgatgctctgggaagccagcttgggtcctgggtctacagagggccctggccccggagcccagccagctctgcctctctcagggcctggagtcctgggggagctcagccagctctgcctttctcagggcctggagtcctggatgaatcctgcaggtttttggttgcaccggcccagggaggaagcggggggtttgtcaggtgggctctcctggaggtcctcgagtggcaggggtgaggaggggattatctgaggcatctggagatgtatatcctgtggtttcccctgcccctctgtttccgatgaggtgtacggatgagtgacctgcactaagaagtgagttgccacagtgaaaatgggttggtttttgtcttcgacgctcagggtctgggcgcctcgcatttgcagtctgttgtgacagacacggggagctccgcgtgccagcctgtggctgccctgctgtgggggtcctggggccggcgaggccccttcagtcttgttctggggggacggcccactccggggagggggtgtgctgtgctgagcgctgtatccctgaatatagtttattttttctacatttgaattctgttgtagatttatgtaaaaatacattctttttgaaaataaaaattttcatgtcttctaa

SEQ ID NO: 199878 - DNA, 705 bp, Homo sapiens
  Payload ID: 19429
  Gene Name: WD repeat domain 5
  ENST ID: ENST00000608937
  CDS Start-End: 537-705
gtgagtttgcgcactgcggagcgggcgcgggtgactccagagcggccctgccagtccgcggggctggcggggagcaggttcgtgcaccgcgggctctgtgcatgcagaggcgggaagagcccccagcccggcagccggccccgcgggaaggcgcagcccgggcttccgaaccctgtgaacgcgcaggttcctggtcttccagatgggcaggaatcgtcctgcccgcccggggtgggaggccacatgggggcactgcgcccgggcgcggccccaggtgctttccaaatgcccactgccgctctcatccgtaccagcgatgatcaagaaggggcctggtcgcccggggaggtgccccggcccgaatcgactccggagacaacgccgggcgacgccacctgcgcaggtcccggagggccgctggtgtctgtgtacagggcgtgctgtctgtggaaacgcgagggcacactagcactttcctactgcctctgtcaccgggtccctccacccttgtctcctgtgcggccagcgtcagagccatggcgacggaggagaagaagcccgagaccgaggccgccagagcacagccaaccccttcgtcatccgccactcagagcaagcctacacctgtgaagccaaactatgctctaaagttcacccttgctggccacaccaaagcagtgtcctccgtgaaattcagcccgaatg

SEQ ID NO: 199879 - DNA, 577 bp, Homo sapiens
  Payload ID: 19429
  Gene Name: WD repeat domain 5
  ENST ID: ENST00000608739
  CDS Start-End: 288-577
actgcggagcgggcgcgggtgactccagagcggccctgccagtccgcggggctggcggggagcagcgatgatcaagaaggggcctggtcgcccggggaggtgccccggcccgaatcgactccggagacaacgccgggcgacgccacctgcgcaggtcccggagggccgctggtgtctgtgtacagggcgtgctgtctgtggaaacgcgagggcacactagcactttcctactgcctctgtcaccgggtccctccacccttgtctcctgtgcggccagcgtcagagccatggcgacggaggagaagaagcccgagaccgaggccgccagagcacagccaaccccttcgtcatccgccactcagagcaagcctacacctgtgaagccaaactatgctctaaagttcacccttgctggccacaccaaagcagtgtcctccgtgaaattcagcccgaatggagagtggctggcaagttcatctgctgataaacttattaaaatttggggcgcgtatgatgggaaatttgagaaaaccatatctggtcacaagctgggaatatccgatgtagcctggtcgtc

SEQ ID NO: 199880 - DNA, 1679 bp, Homo sapiens
  Payload ID: 19430
  Gene Name: WD repeat domain 53
  Uniprot ID: Q7Z5U6
  ENST ID: ENST00000332629
  CDS Start-End: 569-1645
gttcctctcggccccggatgtgactgtttggctgcgccgcctcacgcctgacgctcgacgggattgggcgccggcgggtgaggttatcactaggcgccgaggaggggagcgggaagcgcagtgccagcgccacagcccttcaatcattttggttgctatccagcttctccacatcaagtccaacttcagaaaccccaagcctgtagagaaaagttgacctgtgctgactctggtgatggtgactgtctctcactaatttctttgaagtcttcaaggataagcagagttgatccatctgagaaagggatcatgaactagacagaatgaacagccttagaggcacagactcttgaacgggacggtggtggtatgactagtgcagagtgtttagagatcactcagtttttaaagactggcctttatcgtgtctcagtgcagccgaggcagagcctttgaaggatgcgatgttgtcattcttactaatctagtccagccgctgaggtgactttcaacggcagaccgtctcctgagcgccccaggtagaatttcaaaagtctccgggaccattatggcagtcaagtggacgggtgggcattcttctcctgtcctctgcctgaatgcaagtaaagaagggctgctggcttctggagcagagggcggagatctcacggcttggggtgaagatggaactccattaggacacacgcggttccaaggggctgatgatgttaccagtgtcttattttctccctcctgtcccaccaagctctatgcctcacatggagaaaccattagtgtactggatgtcaggtccctcaaagattccttggaccattttcatgtgaatgaagaagaaatcaattgtctttcattgaatcaaacggaaaacctgctggcttctgctgacgactctggggcaatcaaaatcctagacttggaaaacaagaaagttatcagatccttgaagagacattccaatatctgctcctcagtggcttttcggcctcagaggcctcagagcctggtgtcatgtggactggatatgcaggtgatgctgtggagtcttcaaaaagcccgaccactctggattacaaatttacaggaggatgaaacagaagaaatggaaggcccacagtcacctggtcagctcttaaaccctgccctagcccattctatctctgtggcttcgtgtggtaatatttttagttgtggtgcagaagatggtaaggttcgaatctttcgggtgatgggagttaagtgtgaacaggaactgggatttaagggccacacttcaggggtatcccaggtctgctttctcccagaatcctatttgctgcttactggagggaatgatgggaagatcacgttgtgggatgcaaacagtgaagttgagaaaaaacagaagagtcccacaaaacgtacccacaggaagaaacctaaaagaggaacttgcaccaagcagggtggaaatactaacgcttcagtaacagatgaggaagaacatggcaacattttaccaaagctaaatattgaacatggagaaaaagtgaactggctcttgggtacaaaaataaagggacaccaaaatatattagtagctgatcaaactagttgtatatctgtataccccttaaatgaattttaaatccaataaaaacatttgaagaattgtggcaaaa

SEQ ID NO: 199881 - DNA, 980 bp, Homo sapiens
  Payload ID: 19430
  Gene Name: WD repeat domain 53
  ENST ID: ENST00000425888
  CDS Start-End: 519-980
gcaggtatgaggctggcgccggtggcttcgatgctgctttccggtgacttcgatgctgttttccagtgctttttcctttttctgtgccagcgccacagcccttcaatcattttggttgctatccagcttctccacatcaagtccaacttcagaaaccccaagcctgtagagaaaagttgacctgtgctgactctggtgatggtgactgtctctcactaatttctttgaagtcttcaaggataagcagagttgatccatctgagaaagggatcatgaactagacagaatgaacagccttagaggcacagactcttgaacgggacggtggtggtatgactagtgcagagtgtttagagatcactcagtttttaaagactggcctttatcgtgtctcagtgcagccgaggcagagcctttgaaggatgcgatgttgtcattcttactaatctagtccagccgctgaggtgactttcaacggcagaccgtctcctgagcgccccagagtctccgggaccattatggcagtcaagtggacgggtgggcattcttctcctgtcctctgcctgaatgcaagtaaagaagggctgctggcttctggagcagagggcggagatctcacggcttggggtgaagatggaactccattaggacacacgcggttccaaggggctgatgatgttaccagtgtcttattttctccctcctgtcccaccaagctctatgcctcacatggagaaaccattagtgtactggatgtcaggtccctcaaagattccttggaccattttcatgtgaatgaagaagaaatcaattgtctttcattgaatcaaacggaaaacctgctggcttctgctgacgactctggggcaatcaaaatcctagacttggaaaacaagaaagttatcagatccttgaagagacattccaatatctgctcctcagtggcttttcggcctcagaggcctcagagcctggtgtca

SEQ ID NO: 199882 - DNA, 683 bp, Homo sapiens
  Payload ID: 19430
  Gene Name: WD repeat domain 53
  ENST ID: ENST00000429115
  CDS Start-End: 67-660
cgggattgggcgccggcgggtgaggttatcactaggcgccgaggaggggagcgggaagcgcaggtgatgctgtggagtcttcaaaaagcccgaccactctggattacaaatttacaggaggatgaaacagaagaaatggaaggcccacagtcacctggtcagctcttaaaccctgccctagcccattctatctctgtggcttcgtgtggtaatatttttagttgtggtgcagaagatggtaaggttcgaatctttcgggtgatgggagttaagtgtgaacaggaactgggatttaagggccacacttcaggggtatcccaggtctgctttctcccagaatcctatttgctgcttactggagggaatgatgggaagatcacgttgtgggatgcaaacagtgaagttgagaaaaaacagaagagtcccacaaaacgtacccacaggaagaaacctaaaagaggaacttgcaccaagcagggtggaaatactaacgcttcagtaacagatgaggaagaacatggcaacattttaccaaagctaaatattgaacatggagaaaaagtgaactggctcttgggtacaaaaataaagggacaccaaaatatattagtagctgatcaaactagttgtatatctgtataccccttaaatgaattttaaatccaataaaaacatttgaagaa

SEQ ID NO: 199883 - DNA, 616 bp, Homo sapiens
  Payload ID: 19430
  Gene Name: WD repeat domain 53
  ENST ID: ENST00000456677
  CDS Start-End: 137-616
cagtgccagcgccacagcccttcaatcattttggttgctatccagcttctccacatcaagtccaacttcagaaaccccaagcctgtagagaaaagttgacctgtgctgactctggtgatgagtctccgggaccattatggcagtcaagtggacgggtgggcattcttctcctgtcctctgcctgaatgcaagtaaagaagggctgctggcttctggagcagagggcggagatctcacggcttggggtgaagatggaactccattaggacacacgcggttccaaggggctgatgatgttaccagtgtcttattttctccctcctgtcccaccaagctctatgcctcacatggagaaaccattagtgtactggatgtcaggtccctcaaagattccttggaccattttcatgtgaatgaagaagaaatcaattgtctttcattgaatcaaacggaaaacctgctggcttctgctgacgactctggggcaatcaaaatcctagacttggaaaacaagaaagttatcagatccttgaagagacattccaatatctgctcctcagtggcttttcggcctcagaggcctcagagcctggtgtcatgtggactggatatgcag

SEQ ID NO: 199884 - DNA, 887 bp, Homo sapiens
  Payload ID: 19430
  Gene Name: WD repeat domain 53
  ENST ID: ENST00000433160
  CDS Start-End: 271-870
gcacgaagcaagggcgcacgcccagctcgttcgcggttcctctcggccccggatgtgactgtttggctgcgccgcctcacgcctgacgctcgacgggattgggcgccggcgggtgaggttatcactaggcgccgaggaggggagcgggaagcgcagtgccagcgccacagcccttcaatcattttggttgctatccagcttctccacatcaagtccaacttcagaaaccccaagcctgtagagaaaagttgacctgtgctgactctggtgatggtgatgctgtggagtcttcaaaaagcccgaccactctggattacaaatttacaggaggatgaaacagaagaaatggaaggcccacagtcacctggtcagctcttaaaccctgccctagcccattctatctctgtggcttcgtgtggtaatatttttagttgtggtgcagaagatggtaaggttcgaatctttcgggtgatgggagttaagtgtgaacaggaactgggatttaagggccacacttcaggggtatcccaggtctgctttctcccagaatcctatttgctgcttactggagggaatgatgggaagatcacgttgtgggatgcaaacagtgaagttgagaaaaaacagaagagtcccacaaaacgtacccacaggaagaaacctaaaagaggaacttgcaccaagcagggtggaaatactaacgcttcagtaacagatgaggaagaacatggcaacattttaccaaagctaaatattgaacatggagaaaaagtgaactggctcttgggtacaaaaataaagggacaccaaaatatattagtagctgatcaaactagttgtatatctgtataccccttaaatgaattttaaatccaataaaaacattt

SEQ ID NO: 199885 - DNA, 1147 bp, Homo sapiens
  Payload ID: 19431
  Gene Name: WD repeat domain 54
  Uniprot ID: Q9H977
  ENST ID: ENST00000348227
  CDS Start-End: 89-1093
gtgcgtacgtgcgtcgtctctatggtggcggcggatttggagggaccctacgaaccaggagtcaggcgagccgatctggggctgcaggatgttccgctgggagcgctccattcccctgcgaggctcggccgccgccctgtgcaacaacctcagtgtgctgcagctgccggctcgcaacctcacgtattttggcgtggttcatggaccaagcgcccagcttctcagcgctgctcctgagggtgtgcccttggcccagcgccagctccacgctaaggagggtgctggagtgagtcccccacttatcactcaggtccactggtgtgtcctccccttccgagtgctgctggtactcacctcacatcgaggaatacagatgtacgagtccaatggctacaccatggtctactggcatgcactggactctggagatgcctccccagtacaggctgtgtttgcccggggaattgctgccagtggccacttcatctgtgtgggaacgtggtcaggccgggtgctggtgtttgacatcccagcaaagggtcccaacattgtactgagcgaggagctggctgggcaccagatgccaatcacagacattgccaccgagcctgcccagggacaggattgtgtggctgacatggtgacggcagatgactcaggcttgctgtgtgtctggcggtcagggccagaattcacattattgacccgcattccaggatttggagttccgtgcccctctgtgcagctgtggcaggggatcatagcagcaggctatgggaacggacaagtgcatctatatgaggccactacaggaaatctacatgtccagatcaatgcccatgcccgggccatctgcgccctggacctggcttctgaggtgggcaagctactctctgcaggtgaggacacctttgtgcatatctggaagctgagcagaaacccagagagtggctacattgaggtggaacactgtcatggtgagtgtgtcgccgacacccagctgtgtggtgctcgattttgtgattcctcaggcaactcctttgctgtgactggctatgaccttgcggagatccggagattcagcagtgtgtgagaagagcagccttcctttgtccctgtggtattcataaagtacccgctccaccca

SEQ ID NO: 199886 - DNA, 854 bp, Homo sapiens
  Payload ID: 19431
  Gene Name: WD repeat domain 54
  ENST ID: ENST00000409791
  CDS Start-End: 23-757
cgtgcgtacgtgcgtcgtctctatggtggcggcggatttggagggaccctacgaaccaggagtcaggcgagccgatctggggctgcaggtccactggtgtgtcctccccttccgagtgctgctggtactcacctcacatcgaggaatacagatgtacgagtccaatggctacaccatggtctactggcatgcactggactctggagatgcctccccagtacaggctgtgtttgcccggggaattgctgccagtggccacttcatctgtgtgggaacgtggtcaggccgggtgctggtgtttgacatcccagcaaagggtcccaacattgtactgagcgaggagctggctgggcaccagatgccaatcacagacattgccaccgagcctgcccagggacaggattgtgtggctgacatggtgacggcagatgactcaggcttgctgtgtgtctggcggtcagggccagaattcacattattgacccgcattccaggatttggagttccgtgcccctctgtgcagctgtggcaggggatcatagcagcaggctatgggaacggacaagtgcatctatatgaggccactacaggaaatctacatgtccagatcaatgcccatgcccgggccatctgcgccctggacctggcttctgaggtgggcaagctactctctgcaggtgaggacacctttgtgcatatctggaagctgagcagaaacccagagagtggctacattgaggcaactcctttgctgtgactggctatgaccttgcggagatccggagattcagcagtgtgtgagaagagcagccttcctttgtccctgtggtattcataaagtacccgctccaccc

SEQ ID NO: 199887 - DNA, 576 bp, Homo sapiens
  Payload ID: 19431
  Gene Name: WD repeat domain 54
  ENST ID: ENST00000426787
  CDS Start-End: 89-576
gtgcgtacgtgcgtcgtctctatggtggcggcggatttggagggaccctacgaaccaggagtcaggcgagccgatctggggctgcaggatgttccgctgggagcgctccattcccctgcgaggctcggccgccgccctgtgcaacaacctcagtgtgctgcagctgccggctcgcaacctcacgtattttggcgtggttcatggaccaagcgcccagcttctcagcgctgctcctgagggtgtgcccttggcccagcgccagctccacgctaaggagggtgctggagtgagtcccccacttatcactcaggtccactggtgtgtcctccccttccgagtgctgctggtactcacctcacatcgaggaatacagatgtacgagtccaatggctacaccatggtctactggcatgcactggactctggagatgcctccccaggaacgtggtcaggccgggtgctggtgtttgacatcccagcaaagggtcccaacattgtactgagcgaggagctggctgggcaccagatgccaatcacagacattgccaccgagcctgcccagggacaggtgagtgg

SEQ ID NO: 199888 - DNA, 4080 bp, Homo sapiens
  Payload ID: 19432
  Gene Name: WD repeat domain 55
  Uniprot ID: Q9H6Y2
  ENST ID: ENST00000358337
  CDS Start-End: 238-1389
aaacggggtcacagcaggacaaggaagtagccgatctcccagatgcggtctcttcgctccgctccacccgcaccagcagcggcccacccacctctcctgtaagaggaagaacgtcccggagacacttccggccccgccccccgaggcggaagcggagtgccaggctactcctcccgcagtgtgggtggttccgaggctgactaccctgcggcggcgcggctcgcagtccttctcagcatggaccgcacttgtgaggagaggcccgctgaggatgggagcgacgaggaggacccagactccatggaagccccaacccggatccgggacactccggaagacatcgtgctggaagctccggctagtgggctggcgttccatccggcccgtgacctactggctgcaggggacgtggacggggacgtgttcgtcttttcctactcttgccaagagggagaaaccaaggagctctggtcatcaggtcaccatctcaaggcctgccgagctgtggccttctctgaagatgggcagaagctcattactgtctccaaggacaaagccatccatgttctagatgtggagcagggccaactggaaagacgtgtttccaaggctcatggtgcccccatcaatagtcttctgctggtggatgagaatgttctggccactggggatgacacaggtggtatctgtctctgggaccagcggaaggagggccccttaatggatatgaggcaacatgaagagtacatcgcagacatggctctggatccagccaaaaagctgctgctgacagccagcggggatggctgccttggcatcttcaacattaagaggcgtcggtttgagctgctctcagaacctcagtctggggacctgacctctgtcactctcatgaaatgggggaagaaggtagcctgtggctccagtgaaggtaccatctacctcttcaattggaatggctttggggccacaagtgaccgctttgccctgagagctgaatctatcgactgcatggttccagtcaccgagagtctgctgtgtactggctccactgatggagtcatcagggctgtgaacatcctaccgaaccgagtggtgggcagtgtgggccagcacactggggagcctgtggaggagctggccctctcccactgtggccgcttcctggccagtagtggccatgaccagcgcctcaagttttgggacatggcccagctgcgagctgtggtggtggatgactaccgtcggcgcaaaaaaaagggaggaccactgcgggctctgagcagcaagacttggagcaccgatgacttcttcgcaggactgagggaagagggagaagactccatggctcaggaagaaaaggaggagactggggatgacagtgactgaaggaatgaattgaatcttgagacgggtcctcaccaggcaagagtcttgcttattgggctgcatccccagagaggatatgaattattttttgaaaagacagggttttgccatcgtccaggctggagtgcgctggcttgatcttggctcactgcagcctcaatgtccccaggctcagattgtccttccaccttagcctctggagcagctgggactacaggtgtgcactaccacaccaggccaatttttgttttttttttttggtagaaacgggtctgttttgcccaggctggtcttcaactcctggactcaaatgatccacctgcctctgcttcccaaagtgctgggattacaggcacgagccaccacacctggccaaaaaaatttatattttttgagacaaggtctcactctgtcacccaggctggagtacagtgggttgatcatggctcactgcatccttgacttcctgggctcaagtgatccacctcagcctgcctggtagctgagacttaacaggcatctgccaccatgcttgactaatttttgtgatttttttttggtagagaccaggggtttcactatgttgaccaagctggtcttggaactcctgggctcaagtgatcctcctgccttggcctcccaaaatgctgggattacaggcatgagccactgtgcctggctggatatgaaattttttttttttttttttttgagacagggtttcgctcttgttgccagggctggagtgcaatggcgtgatcttggctcactgcaacctccgcctcccgggttcaagcaattctcctgcctcagcctcccaagtagctgggattacaggtgtctgccaccatgccaggctaatttttgtattttcagtagagacggggtttctccatgctggccaggctggtctcgaactcctgacctcaggtgatccacccgcctcagcctcccaaagtgctgggattacaggcaaaagccaacacacccggcctggatatgaatttataataccctacagtgcaacacaagaagatgcactcaaagcactgatgtgaggaagtacttgccccgtagcagctattcactctaccagtgtaaacaaactctaagctagggcaagacagcacagacacaagtatatactaaccaggggtttaatataaatacaaccagcatagaaagacccaaaactatacagaaaccaaaaccagaatgccatgtggtggaggcaaagggcagaatttctgacccctttggctcagctgcccttccccacaaataaaaaccaacaaagaggacaaatcaggacaataaagaagattcatgctaagctgtggcagaggggggaaggtatgatcgggtgggggtgggacaaggaacggccatggaagatcactgggtcaggttggaccctgggctgggagcgggagggcaaggcccctcaccacaacttaacccaaacctaagctgcccccaggtgccataggtccctgtcccagcagggaggctgatgggcctgggcccatgcccctccccacctttgggggtcagaaagtggccacccaggcctgctgggatggggcctgacacaggctctgcatgcccattcagggtgcctgtggagaaagaatggagtcactgtttaaccatggtacctgcctcagccccagcagaccacaggaggttggccccagactcactgagtgcctgcagcagccgtacagacacagcatccttggccacctcatgcccatcccggccatctagggtcagcacaacccagatgaggccgctgaagggcaccggatgcccaggaatcaccacctggtaccagaagcggtgccagccagcaggtcctatgcccaaacacttggtgaggaacacagggctgcccagcttcattcgttggcacagcaactgcagggtagcccgagccccttggaaccctaacttgtcccttgccaaagccaactggctgccctctggctgtggggaccgcaagaagggacccacaagctgctggcgaagtcgctgcttcaggtctggcttgagccactccacagccacctgctctccacagaggtgtgactgccctgtaggaaaaatgcaaagacaagggcaggtctaaaccctgggcccaagcctccaggtggtgagccctttggagctacacagtcctgttatttgtagccttcccatttcctggtagtgtgaccatgggtaagaaaagacaatgaagccttcagcctccattatttgcaaagggagtataacacactgctaccttacaagtttccttggagaagtactggttaattgcaggctttgtctgcctcataaccatcataatggctaatctttactgggaaaacttgctgtaagtcagtcagtgtgctaagtaccgtacacccattatgttacttaattctcataacagtctgaggaaacagattctatagtagtaaaaagctcagttggattcccttgagcaaatcaatttctctaacagtttcctcatagcttgagggtcctgtgcctattttgcggtgtgggggtgggggaaggttgagaattaagtcaggaggtaatgctcgggaagtgtcacaaatttaggtaagcggtggtggtagcaccattggaagttttaaaaatctgagatcaaatagtaaaaggttgcaaattctggca

SEQ ID NO: 199889 - DNA, 2477 bp, Homo sapiens
  Payload ID: 19432
  Gene Name: WD repeat domain 55
  ENST ID: ENST00000506393
  CDS Start-End: 46-459
gaggctgactaccctgcggcggcgcggctcgcagtccttctcagcatggaccgcacttgtgaggagaggcccgctgaggatgggagcgacgaggaggacccagactccatggaagccccaacccggatccgggacactccggaagacatcgtgctggaagctccggctagtgggctggcgttccatccggcccgtgacctactggctgcaggggacgtggacggggacgtgttcgtcttttcctactcttgccaagagggagaaaccaaggagctctggtcatcaggtcaccatctcaaggcctgccgagctgtggccttctctgaagatgggcagagtgagtactggggaagacaaccagcaatgtggtggaagggagcagtgagcagcaccatgacctgggcaccttttccccagagctcattactgtctccaaggacaaagccatccatgttctagatgtggagcagggccaactggaaagacgtgtttccaaggctcatggtgcccccatcaatagtcttctgctggtggatgagaatgttctggccactggggatgacacaggtggtatctgtctctgggaccagcggaaggagggccccttaatggatatgaggcaacatgaagagtacatcgcagacatggctctggatccagccaaaaagctgctgctgacagccagcggggatggctgccttggcatcttcaacattaagaggcgtcggtttgagctgctctcagaacctcagtctggggacctgacctctgtcactctcatgaaagtacagctggttatggtgggatggaggggtgtgtgctgggggcttagtctgaggcagcttccacattgttttctctatttccctgcagtgggggaagaaggtagcctgtggctccagtgaaggtaccatctacctcttcaattggaatggctttggggccacaagtgaccgctttgccctgagagctgaatctatcgactgcatggttccagtcaccgagagtctgctgtgtactggctccactgatggagtcatcagggctgtgaacatcctaccgaaccgagtggtgggcagtgtgggccagcacactggggagcctgtggaggagctggccctctcccactgtggccgcttcctggccagtagtggccatgaccagcgcctcaagttttgggacatggcccagctgcgagctgtggtggtggatgactaccgtcggcgcaaaaaaaagggaggaccactgcgggctctgagcagcaagacttggagcaccgatgacttcttcgcaggactgagggaagagggagaagactccatggctcaggaagaaaaggaggagactggggatgacagtgactgaaggaatgaattgaatcttgagacgggtcctcaccagggtgcctgtggagaaagaatggagtcactgtttaaccatggtacctgcctcagccccagcagaccacaggaggttggccccagactcactgagtgcctgcagcagccgtacagacacagcatccttggccacctcatgcccatcccggccatctagggtcagcacaacccagatgaggccgctgaagggcaccggatgcccaggaatcaccacctggtaccagaagcggtgccagccagcaggtcctatgcccaaacacttggtgaggaacacagggctgcccagcttcattcgttggcacagcaactgcagggtagcccgagccccttggaaccctaacttgtcccttgccaaagccaactggctgccctctggctgtggggaccgcaagaagggacccacaagctgctggcgaagtcgctgcttcaggtctggcttgagccactccacagccacctgctctccacagaggtgtgactgccctgtaggaaaaatgcaaagacaagggcaggtctaaaccctgggcccaagcctccaggtggtgagccctttggagctacacagtcctgttatttgtagccttcccatttcctggtagtgtgaccatgggtaagaaaagacaatgaagccttcagcctccattatttgcaaagggagtataacacactgctaccttacaagtttccttggagaagtactggttaattgcaggctttgtctgcctcataaccatcataatggctaatctttactgggaaaacttgctgtaagtcagtcagtgtgctaagtaccgtacacccattatgttacttaattctcataacagtctgaggaaacagattctatagtagtaaaaagctcagttggattcccttgagcaaatcaatttctctaacagtttcctcatagcttgagggtcctgtgcctattttgcggtgtgggggtgggggaaggttgagaattaagtcaggaggtaatgctcgggaagtgtcacaaatttaggtaagcggtggtggtagcaccattggaagttttaaaaatctgagatcaaatagtaaaaggttgcaaattctggc

SEQ ID NO: 199890 - DNA, 2953 bp, Homo sapiens
  Payload ID: 19432
  Gene Name: WD repeat domain 55
  ENST ID: ENST00000504897
  CDS Start-End: 293-961
cttttcctactcttgccaagagggagaaaccaaggagctctggtcatcaggtcaccatctcaaggcctgccgagctgtggccttctctgaagatgggcagaagctcattactgtctccaaggacaaagccatccatgttctagatgtggagcagggccaactggaaagacgtgtttccaaggctcatggtgcccccatcaatagtcttctgctggtggatgagaatgttctggccactggggatgacacaggtggtatctgtctctgggaccagcggaaggagggccccttaatggatatgaggcaacatgaagagtacatcgcagacatggctctggatccagccaaaaagctgctgctgacagccagcggggatggctgccttggcatcttcaacattaagaggcgtcggtttgagctgctctcagaacctcagtctggggacctgacctctgtcactctcatgaaatgggggaagaaggtagcctgtggctccagtgaaggtaccatctacctcttcaattggaatggctttggggccacaagtgaccgctttgccctgagagctgaatctatcgactgcatggttccagtcaccgagagtctgctgtgtactggctccactgatggagtcatcagggctgtgaacatcctaccgaaccgagtggtgggcagtgtgggccagcacactggggagcctgtggaggagctggccctctcccactgtggccgcttcctggccagtagtggccatgaccagcgcctcaagttttgggacatggcccagctgcgagctgtggtggtggatgactaccgtcggcgcaaaaaaaagggaggaccactgcgggctctgagcagcaagacttggagcaccgatgacttcttcgcaggactgagggaagagggagaagactccatggctcaggaagaaaaggaggagactggggatgacagtgactgaaggaatgaattgaatcttgagacgggtcctcaccagccccagcagaccacaggaggttggccccagactcactgagtgcctgcagcagccgtacagacacagcatccttggccacctcatgcccatcccggccatctagggtcagcacaacccagatgaggccgctgaagggcaccggatgcccaggaatcaccacctggtaccagaagcggtgccagccagcaggtcctatgcccaaacacttgctatgctcagtataaagtgccgggcagaacgcgtttggccccaaccagcacccccgccccagcctaccttccaccagggcctttttggccatggcagcggcccggtgcgagctgaatttgagcagagcgatctgcccgggcgccggtccggggctgggcagcagccgcgcctcctgcaagccgggacccagcggctgcagcgcgagcagcagcgcgctgcgggtcagattcggcggcaggccgtcaacgctcagctcacacttctcggtgctgcggcacacgagcagcgggcaggacggccgcagcggatggttgtgcagcgtggcgatggcggcctgcgcgccgcgcctcgagctgtagcgggcataggcgaagccgcggttcaggccgctgaaggtcatcatcaggcggaactcgtagaggcggcccacgcgctggaacagcgggataagctggtgctcgtacacgtcctgaggcagccgcccgatgaacacctctgacccagctggcggcgggctgcccacccagcctgtgggaagagggtatgcaaggccaccgtcaggcgacgctttcgaattctgagcccacggacccagcgcgcgggggtgggaggcgatgtgaacaaaggtctgtgaaatgggtttacacccgtaccctgggtggttggcataattaggtgactgcgctaacaagggggctggcacagagtaggtacaccttgagattggccccctccctcgacggggcgggtggacgtggagccacagttcctcctttgctggggggtataaatccgggtagttcgcagtttctgacagtgaaggctcggagcagcccctcccccaaagggggctggtgtagccggacaggcggaggggctgggactaccgtacctgggggtggcccgccatacttcctctgcccgttcacctgcaccaggcggatgcctgtctccctgacccacgcctccagcgccgccttgttctctggattcaccctctcacaccacagctgagagggaaaggaaggttggaatggcggatcgccaagcgcgcccccacctctcctgtggtactggggtccctaaagccgacccccgctccggcggggctcgccggcccccaagtcgccagccgcttacctcacaatcccgcttggactgcatggctctccagctggccccctcgtaccctctttataacttcctccccaccggcctctggaagcttccctacccctccaccccgcaagctctcattggctctgagcgcgaccccgcctcccaggggggtggaggtatccactgcacgtgcgccgcccgggcttcgctcagaccttcaggtgaaagctgcaaagtcgcgggtgcgtatgtacgggggctgcctcccgaggaggagctcccaagccgcagggtggacgctggagacaagaacctcagggtcacaagtttactgtttttctcccttttccatccctacattggtctgctggggaaggcggggctaggcatcactgacacacgcagactccgtggttgaggcattttattggacctttggcaattggtggtggggaggcatctgctccaactggtgcggggccctgcagatgggaccatctcaggctgggtccttgtagcccaggagcacagactggactaagcctcctgggccttgtatgaaaaaggtgttgtacctggccgtttttgccagtaataatcaataaaataaccataataaaaatcaaa

SEQ ID NO: 199891 - DNA, 5898 bp, Homo sapiens
  Payload ID: 19433
  Gene Name: WD repeat domain 59
  Uniprot ID: Q6PJI9
  ENST ID: ENST00000262144
  CDS Start-End: 132-3056
ctcaggagcaaccagggcacggggcgtgtcggggctgattctctggctgtgtggggcgcacggtcccgggatactggggacggcggggtgggagggcgccgtcctggggccgcggcggccgggcgggggagatggcggcgcgatggagcagcgaaaacgtggttgtagagttccgtgactcccaggcaactgcgatgtctgtggactgtcttgggcagcatgcagtgctttctggccgcagattcttatacatcgtcaatctagatgcccctttcgaaggtcaccgaaagatctctcgccagagcaaatgggacattggagctgtgcagtggaatcctcatgacagctttgcacactattttgcggcttcgagtaaccaacgagtagacctttacaagtggaaagacggcagtggggaagttggcacaaccttacaaggccacactcgtgtcatcagcgacttggactgggcggtgtttgagcctgacctcctggttaccagctctgtggacacctacatctacatttgggatatcaaagacacaaggaaacctactgttgcactgtctgctgttgcgggtgcctcccaggtcaaatggaataaaaaaaatgctaactgccttgccaccagccatgacggcgatgtgcggatatgggataagaggaaacccagtacagcagtggaatatctagccgcccacctctccaaaatccatggcctggactggcacccagacagcgagcacattcttgctacctccagtcaagacaattctgtgaagttctgggattaccgccagcctcggaaatacctcaatattcttccttgccaggtgcctgtctggaaggccagatacacacctttcagcaatggattggtgactgtgatggttccccagctgcggagggaaaacagccttctcctgtggaatgtctttgacttgaacaccccagtccacaccttcgtggggcatgatgatgtggtcctggagttccagtggaggaagcagaaggaagggtccaaggactatcaactggtgacgtggtcccgggatcagaccttgagaatgtggcgggtggattcccagatgcagaggctttgtgcaaatgacatattagatggtgttgatgagttcattgagagtatttcccttctgccggaacctgagaagaccctgcacactgaagatacagatcaccagcacactgcaagccatggggaggaagaagccctaaaagaagatccccctagaaatctcctggaagagaggaaatcagatcaactggggctgcctcagaccttgcagcaggaattctccctgatcaatgtgcaaatccggaatgtcaatgtggagatggatgcggcagacaggagctgcacagtgtctgtgcactgcagcaaccatcgtgtcaagatgctggtgaagttccctgcacagtacccaaacaacgccgccccttccttccagtttattaaccccacaaccatcacatccaccatgaaagctaagctgctgaagatcctgaaggacacagccctgcagaaagtgaagcgtggccagagctgcctggagccctgcctgcgccagctcgtctcctgccttgagtcctttgtgaaccaggaagacagcgcttccagcaacccgtttgcactccccaactctgtcactccccccttaccgacgtttgcgcgggtgaccacggcttacgggtcgtaccaggacgccaacattccctttcctaggacttctggggccaggttctgcggagcaggttacctggtatatttcacaaggcccatgacaatgcatcgggcggtgtctcccacagagcctactccgagatctctctcagccttgtctgcttatcacactggcttgatcgcgcccatgaagatccgcacagaggcccctgggaaccttcgtttatacagtgggagccccactcgcagcgagaaagagcaggtctccatcagctccttctactacaaggagcggaaatcaagacgatggaaaagtaagcgtgagggatcagactctggcaatcgacagatcaaggctgctgggaaagtcatcatccaggatattgcttgcctcctgcctgttcacaaatcgctgggagagctgtacatattgaatgtgaatgatattcaggaaacatgtcagaagaatgccgcctctgccttgctcgttggaagaaaggatcttgtccaggtttggtcgctggctacggtagctacagatctttgccttggtccgaaatctgacccagatttggaaacaccctgggctcgacatccatttgggcggcagctgctggagtccctgttggctcactattgccggctccgggatgttcagacactggcgatgctctgtagcgtgtttgaagcccagtctcggcctcaggggctaccaaacccctttgggccttttcctaaccgttcttctaatcttgtggtgtcccatagtcgatatcctagctttacctcttctggttcctgctccagtatgtcagacccagggctcaacactggcggctggaacatagcgggaagagaggcagagcacttgtcctccccttggggagaatcctcaccagaagagctccgctttgggagtctgacctacagtgatccccgtgagcgagaacgcgaccagcatgataaaaataaaaggctcctggaccccgccaatacccagcaatttgatgactttaagaaatgctatggggaaatcctctaccgttggggtctgagagagaagcgagctgaagtgttgaagtttgtctcctgtcctcctgaccctcacaaagggatcgagttcggcgtgtactgcagccactgccggagtgaggtccgtggcacgcagtgtgccatctgcaaaggcttcacgttccagtgtgccatctgtcacgtggctgtgcggggatcgtccaatttctgcctgacctgtgggcacggtggccacaccagccacatgatggagtggtttcggacccaggaggtgtgtcccaccgggtgtgggtgccactgcctgcttgaaagcactttctgaacctacagaagttgggtattgtctgaaatcccagaggacccataagtgccggtgacaagctgtctgtcaggggagaggctccagaacctgggttcgtccccagtgagaccggaggatgatcccccaaggactgcgcagcatcagctcttggtgggcctctgccttctcttctgtttggccacctggtgtggatgtcactgtgtgaagataaggacagaagtgcagagctgcgctttgtgtgttgtctatgtcggctgagctaccaaggtggaagttttcatggagaaaagcacctggctccagggccagtgttacagtgttaccctgtaaggtgttagccttaaaccaccgagcagcgttctcttgatgccagtgcagagaccagagtcagatgcccgaggacagtgggtaggaatttcatcaacaaatggacctatggcatcatggctttagaagctggtacatttactgagctgatggacagtggccttctaaaatatgacacttaaattgtaaatatgcactgtacttaaggattcttaagatgtatttttttgttatttctcctccagctgctatcccttggctaataaaattctagtaatttgaaaaaaaaaaaaaagagagaaagttaaacaacattatggtgaatcattttttaccctaattctaattgaaggtagctattttgaataggaccaaagtcagtgctccgatttttaaaggaaatgctgatttacttttgtcatctgacaagagaaaatggaatttgacatttaaggttcttcctagccccaagagtcttatttcttctagcaaaaggaggacaagattgccgtgcagcatggatagaaaagtctccctggccaggccccatggctcatgcctgtaatcccacactttagaaggcaaaagtgaggggatcacctgagctcaggagttcgagaccagcctgggcaacataaggagatcccatctctgcaaaaaatttaaaaaataggccgggcacggtggctcatgcctgtaatcccagcactttgggaggctgaggtgggaggattacctgaggtcaggagttcgagactagcctggccaacatggtgaaaccccatctctactaaaaatagaaaaattagccgggcatggtggcgggcgcctgtaatcccaggtactggggaggctgagacaggagaatcgcttgaacttgggaagcagaggttgcagcgagctgagattatgccattgcactccagcctgggtgacaagagtgagactctgtctcaaaaaaagaaaaaaaaaattaaaaaaatagccgggtgtggtggcacatgcctgtggtcccagctacttgaggggccgaggtgggaggatcacttgagtccaggaggttgaggctgcagtgagccttgattgcaccgctgcactccagcctgggcaacagagtgagaccctgtcaataaaccaaagtcttccttgcctctgttcagatgggctgggttccagtgagtgccctcactcttcctttaggctccctcgcaaactgcctgtgtttgcctgtgttctgagtagttataacatctgtgtccaccaattcttcagaatgattttcttttttaaagttaaattttttttttttttttttagagagagagacagggtctcactctgtcacccagactggagagtggtgatgcaatcatagctcactgtagcctctatcacctgagctcaagtgatcctcccacctcagcctcccgagtagctgggactacaggtgtgcaccaccatgcctggctaatttcagaatgattttcaacttcacattttgtatgtgccagtgaaaagaaatcttttttattatttctactgaaatatctatttctgtttcttagaattttacagttccaagtagattagcttagggactaggacatgtctcataatgggagagcattgcatattcatgtgtttcaaactccaggtcaggacccattagtggattgtgacattgatctagtgcggaaaaccagcatttaaaaaaatgaaatggtgtaagagaaaaatgatcacaatgtaccatacatagctaaggaaaatgttttgtgtaacttgtttacgtgtgtgcagcacatgtgtgcacaggtgtataccggatcatagcgtaaattcatttcttactgaaagttgtagtcaaaacattttcacaacactgttttggatgaagcttatacctcgtcccctgtgttactgggcacaaaacttcaggatgtaagaaagaactgagatcctgtgcagtggaaccagaggtttagtgctgggctctggtctgaggtaaggtgccagtgtctcagtagcgtgagcagggcgggggagccgctgggaggatgacaggagaaggcccagccgggaatttgcatacacaaattctgttgtaatggtgatcacagaataggttggctgatttacacagagagaaaggatctgttgtgttcctcagtgaaatcacaccatttgcagagagcaatcttttcctgttccccactgctcaagttagtgtaaaaacctgtccctatctgtccccatcaagaatgagatgtttttcttgttttattgttggaggaacattgactttcaaaattgaaaaaccttaatggtgtgaagaaatttcgagtttaaaatattacataatgtcatccttcaatacggaaattccttttgaatttccaagttaccagaacaaaagtctaatattttaaaatattcatgtttggaaacaggttggttgtctggttgcgggccatggccgatattctctcagccgcagaatagatgattacaagca

SEQ ID NO: 199892 - DNA, 901 bp, Homo sapiens
  Payload ID: 19433
  Gene Name: WD repeat domain 59
  ENST ID: ENST00000569229
  CDS Start-End: 1-901
caaccatcacatccaccatgaaagctaagctgctgaagatcctgaaggacacagccctgcagaaagtgaagcgtggccagagctgcctggagccctgcctgcgccagctcgtctcctgccttgagtcctttgtgaaccaggaagacagcgcttccagcaacccgtttgcactccccaactctgtcactccccccttaccgacgtttgcgcgggtgaccacggcttacgggtcgtaccaggacgccaacattccctttcctaggacttctggggccaggttctgcggagcaggttacctggtatatttcacaaggcccatgacaatgcatcgggcggtgtctcccacagagcctactccgagatctctctcagccttgtctgcttatcacactggcttgatcgcgcccatgaagatccgcacagaggcccctgggaaccttcgtttatacagtgggagccccactcgcagcgagaaagagcaggtctccatcagctccttctactacaaggagcggatgtctcctcgctctgcccggcggcgttggtccatacaagcaattaacgacttcccgaaatcaagacgatggaaaagtaagcgtgagggatcagactctggcaatcgacagatcaaggctgctgggaaagtcatcatccaggatattgcttgcctcctgcctgttcacaaatcgctgggagagctgtacatattgaatgtgaatgatattcaggaaacatgtcagaagaatgccgcctctgccttgctcgttggaagaaaggatcttgtccaggtttggtcgctggctacggtagctacagatctttgccttggtccgaaatctgacccagatttggaaacaccctgggctcgacatccatttgggcggcagctgctggagtccct

SEQ ID NO: 199893 - DNA, 652 bp, Homo sapiens
  Payload ID: 19433
  Gene Name: WD repeat domain 59
  ENST ID: ENST00000563797
  CDS Start-End: 1-652
gtttatacagtgggagccccactcgcagcgagaaagagcaggtctccatcagctccttctactacaaggagcggaaatcaagacgatggaaaagtaagcgtgagggatcagactctggcaatcgacagatcaaggctgctgggaaagtcatcatccaggatattgcttgcctcctgcctgttcacaaatcgctgggagagctgtacatattgaatgtgaatgatattcaggaaacatgtcagaagaatgccgcctctgccttgctcgttggaagaaaggatcttgtccagcctagctttacctcttctggttcctgctccagtatgtcagacccagggctcaacactggcggctggaacatagcgggaagagaggcagagcacttgtcctccccttggggagaatcctcaccagaagagctccgctttgggagtctgacctacagtgatccccgtgagcgagaacgcgaccagcatgataaaaataaaaggctcctggaccccgccaatacccagcaatttgatgactttaagaaatgctatggggaaatcctctaccgttggggtctgagagagaagcgagctgaagtgttgaagtttgtctcctgtcctcctgaccctcacaaagggatcgagttcggcgtgtactgcag

SEQ ID NO: 199894 - DNA, 583 bp, Homo sapiens
  Payload ID: 19433
  Gene Name: WD repeat domain 59
  ENST ID: ENST00000563111
  CDS Start-End: 115-583
tttaattgccatttaaatagccactgtggctaatggctatgatattggaaagtacagttcagagtactgagaagtgtggagattagttttcactctcaaggaaaggcaactgcgatgtctgtggactgtcttgggcagcatgcagtgctttctggccgcagattcttatacatcgtcaatctagatgcccctttcgaaggtcaccgaaagatctctcgccagagcaaatgggacattggagctgtgcagtggaatcctcatgacagctttgcacactattttgcggcttcgagtaaccaacgagtagacctttacaagtggaaagacggcagtggggaagttggcacaaccttacaaggccacactcgtgtcatcagcgacttggactgggcggtgtttgagcctgacctcctggttaccagctctgtggacacctacatctacatttgggatatcaaagacacaaggaaacctactgttgcactgtctgctgttgcgggtgcctcccaggtcaaatggaataaaaaaaatgctaactgccttgccaccagccatgacggcgatgtgcggatatgggataaga

SEQ ID NO: 199895 - DNA, 488 bp, Homo sapiens
  Payload ID: 19433
  Gene Name: WD repeat domain 59
  ENST ID: ENST00000564859
  CDS Start-End: 15-122
gccgggcgggggagatggcggcgcgatggagcagcgaaaacgtggttgtagagttccgtgactcccaggcaactgcgatgtctgtggactgtcttgggcagcatgcagtgctttctggataaggtcttgccaggttgcccaggctggtcttaactccgggcctcaagcgatgcttctgcctcggcctgcagcactaagagttccagtgtgagctgctgcttccaaccatgaaggcttttttcctttctgttgcattagtccctatccttcaggtttcctccggtgactgagatcgttggctgctaatgctaaagagcgactggcatctctctttaagtgggtagacggtggaggagatcagccgcagattcttatacatcgtcaatctagatgcccctttcgaaggtcaccgaaagatctctcgccagagcaaatgggacattggagctgtgcagtggaatcctcatgacagctttgcacactatttt

SEQ ID NO: 199896 - DNA, 569 bp, Homo sapiens
  Payload ID: 19433
  Gene Name: WD repeat domain 59
  ENST ID: ENST00000566924
  CDS Start-End: 1-144
actccccccttaccgacgtttgcgcgggtgaccacggcttacgggtcgtaccaggacgccaacattccctttcctaggacttctggggccaggttctgcggagcagatctctctcagccttgtctgcttatcacactggcttgatcgcgcccatgaagatccgcacagaggcccctgggaaccttcgtttatacagtgggagccccactcgcagcgagaaagagcaggtctccatcagctccttctactacaaggagcggaaatcaagacgatggaaaagtaagcgtgagggatcagactctggcaatcgacagatcaaggctgctgggaaagtcatcatccaggatattgcttgcctcctgcctgttcacaaatcgctgggagagctgtacatattgaatgtgaatgatattcaggaaacatgtcagaagaatgccgcctctgccttgctcgttggaagaaaggatcttgtccaggtttggtcgctggctacggtagctacagatctttgccttggtccgaaatctgacccagatttggaaacaccctgggctcgacatccatttggg

SEQ ID NO: 199897 - DNA, 1752 bp, Homo sapiens
  Payload ID: 19433
  Gene Name: WD repeat domain 59
  ENST ID: ENST00000536050
  CDS Start-End: 234-1610
ctcttaggccccgtcgggggagggaagacgaccatcgggggcaatcggggcgagcatggacggagtttcggggctccctacgcgggtaggggagtggggtccgccttgtgacactgaggcagagactgcgcatcgtgagtgctgaggggaggcttcccacaatcagggtacggagcgagggcgtgacggcttcccgaggccctagccgcgtgtggcgacttaaggcaactgcgatgtctgtggactgtcttgggcagcatgcagtgctttctggccgcagattcttatacatcgtcaatctagatgcccctttcgaaggtcaccgaaagatctctcgccagagcaaatgggacattggagctgtgcagtggaatcctcatgacagctttgcacactattttgcggcttcgagtaaccaacgagtagacctttacaagtggaaagacggcagtggggaagttggcacaaccttacaaggccacactcgtgtcatcagcgacttggactgggcggtgtttgagcctgacctcctggttaccagctctgtggacacctacatctacatttgggatatcaaagacacaaggaaacctactgttgcactgtctgctgttgcgggtgcctcccaggtcaaatggaataaaaaaaatgctaactgccttgccaccagccatgacggcgatgtgcggatatgggataagaggaaacccagtacagcagtggaatatctagccgcccacctctccaaaatccatggcctggactggcacccagacagcgagcacattcttgctacctccagtcaagacaattctgtgaagttctgggattaccgccagcctcggaaatacctcaatattcttccttgccaggtgcctgtctggaaggccagatacacacctttcagcaatggattggtgactgtgatggttccccagctgcggagggaaaacagccttctcctgtggaatgtctttgacttgaacaccccagtccacaccttcgtggggcatgatgatgtggtcctggagttccagtggaggaagcagaaggaagggtccaaggactatcaactggtgacgtggtcccgggatcagaccttgagaatgtggcgggtggattcccagatgcagaggctttgtgcaaatgacatattagatggtgttgatgagttcattgagagtatttcccttctgccggaacctgagaagaccctgcacactgaagatacagatcaccagcacactgcaagccatggggaggaagaagccctaaaagaagatccccctagaaatctcctggaagagaggaaatcagatcaactggggctgcctcagaccttgcagcaggaattctccctgatcaatgtgcaaatccggaatgtcaatgtggagatggatgcggcagacaggagctgcacagtgtctgtgcactgcagcaaccatcgtgtcaagatgctggtgaagttccctgcacagtacccaaacaacgccgccccttccttccagtttattaaccccacaaccatcacatccaccatgaaagctaagctgctgaaggtgggggtctgggttcccaaattctccttgctgttctgcatcattgtctagatggattagtaaagaagaatgaaaactccagtagatgagattcggaagtcatctgtttcgtacacacactagtattagcaacgtaacctctgaacttgccatttactttgtgcagaaaacatcagagcagtggttcttaacc

SEQ ID NO: 199898 - DNA, 1953 bp, Homo sapiens
  Payload ID: 19433
  Gene Name: WD repeat domain 59
  Uniprot ID: Q6PJI9
  ENST ID: ENST00000616369
  CDS Start-End: 67-1782
ccgggatactggggacggcggggtgggagggcgccgtcctggggccgcggcggccgggcgggggagatggcggcgcgatggagcagcgaaaacgtggttgtagagttccgtgactcccaggcaactgcgatgtctgtggactgtcttgggcagcatgcagtgctttctggccgcagattcttatacatcgtcaatctagatgcccctttcgaaggtcaccgaaagatctctcgccagagcaaatgggacattggagctgtgcagtggaatcctcatgacagctttgcacactattttgcggcttcgagtaaccaacgagtagacctttacaagtggaaagacggcagtggggaagttggcacaaccttacaaggccacactcgtgtcatcagcgacttggactgggcggtgtttgagcctgacctcctggttaccagctctgtggacacctacatctacatttgggatatcaaagacacaaggaaacctactgttgcactgtctgctgttgcgggtgcctcccaggtcaaatggaataaaaaaaatgctaactgccttgccaccagccatgacggcgatgtgcggatatgggataagaggaaacccagtacagcagtggaatatctagccgcccacctctccaaaatccatggcctggactggcacccagacagcgagcacattcttgctacctccagtcaagacaattctgtgaagttctgggattaccgccagcctcggaaatacctcaatattcttccttgccaggtgcctgtctggaaggccagatacacacctttcagcaatggattggtgactgtgatggttccccagctgcggagggaaaacagccttctcctgtggaatgtctttgacttgaacaccccagtccacaccttcgtggggcatgatgatgtggtcctggagttccagtggaggaagcagaaggaagggtccaaggactatcaactggtgacgtggtcccgggatcagaccttgagaatgtggcgggtggattcccagatgcagaggctttgtgcaaatgacatattagatggtgttgatgagttcattgagagtatttcccttctgccggaacctgagaagaccctgcacactgaagatacagatcaccagcacactgcaagccatggggaggaagaagccctaaaagaagatccccctagaaatctcctggaagagaggaaatcagatcaactggggctgcctcagaccttgcagcaggaattctccctgatcaatgtgcaaatccggaatgtcaatgtggagatggatgcggcagacaggagctgcacagtgtctgtgcactgcagcaaccatcgtgtcaagatgctggtgaagttccctgcacagtacccaaacaacgccgccccttccttccagtttattaaccccacaaccatcacatccaccatgaaagctaagctgctgaagatcctgaaggacacagccctgcagaaagtgaagcgtggccagagctgcctggagccctgcctgcgccagctcgtctcctgccttgagtcctttgtgaaccaggaagacagcgcttccagcaacccgtttgcactccccaactctgtcactccccccttaccgacgtttgcgcgggtgaccacggcttacgggtcgtaccaggacgccaacattccctttcctaggacttctggggccaggttctgcggagcaggttacctggtatatttcacaaggcccatgacaatgcatcgggcggtgtctcccacagagcctactccgaggtgagtcagggagatgcagaagccgctctacgttcccggggccagaagtggccagagacctgggaaggaccactgagtttgcttttggacagtgcatttcagttcttcagtaaactcccattataagatttatttgagaaagattgaagtcaattaaattgcaaaaaagctgtga

SEQ ID NO: 199899 - DNA, 3720 bp, Homo sapiens
  Payload ID: 19434
  Gene Name: WD repeat domain 5B
  Uniprot ID: Q86VZ2
  ENST ID: ENST00000330689
  CDS Start-End: 524-1516
gctggtacgagcaaaagtagccgacaggccagagtttccagtttcggtggcttcgtaggcttttagcttctgaaatccgctaaaagcggcggttcattcatcttcaagtacctagcctgactggtagggctgctcagcattccgaaacatttcgacctggggaggggggcggcggtgaaagaatactttctgtagagagtgcccctcgcgtcgcccctgctttgaaggctttatgtattaacggaatgccgaacatttgtgtcctacttgctgacagcgcacaggatccttctaacagtatttctcaagtacttaacaaaaagatgaaaacttgaagtccaagccgtgctgctgattccgtctcacagtttaaagactgtccagaaactttaagctttcaaaactgtacattttaaaatcctgtgcgtttatcttcattttgctgggcagaaagccaaagtactggactgcctggttcagggctgaacgcctagtacacctgctaacttggagcttcagagccatggcaaccaaggagtcaagagacgccaaagcacagttggccctctcctcatcggccaatcagagcaaggaagtgcctgaaaacccaaactatgctctcaaatgtactcttgtgggacacacggaagcagtgtcatcagttaagtttagtcctaatggagaatggctagcaagttcttctgctgataggctaatcataatttggggagcatatgatggaaaatatgagaaaacactctatggtcataatttggaaatatcggatgttgcctggtcatcagattccagtcgtcttgtttctgcctcagatgataaaactctaaaattatgggatgtgagatctggaaaatgtttgaaaacactgaaggggcacagtaattatgtcttttgttgtaacttcaatccgccatccaaccttataatctcgggatcttttgatgagactgtaaaaatatgggaggtgaaaacaggaaagtgtctcaagactttgtctgctcattctgacccagtttctgctgttcattttaattgtagtgggtccttgatagtgtcaggtagctatgatggcctctgtagaatctgggatgctgcatcaggtcagtgtttaaaaacgctcgttgatgacgataaccctcctgtctcttttgtaaaattttctccaaatggtaaatacattctcactgcaactttggacaacactcttaaactatgggattatagcagaggcaggtgcctgaaaacatacactggtcataagaatgagaaatattgcatatttgccaatttttcagttactggtggaaagtggattgtgtctggttccgaggataacctggtttacatttggaaccttcagactaaagagattgtgcagaaattacaaggccatacagatgttgtgatctcagcagcttgtcatcctacagaaaacctcatcgcatcagcagcattagaaaatgacaaaacaattaaactgtggatgagtaaccactaatccctttgaaaatcaagtagtagagccaagttggccaaaaaacttggatatttaaaaagacggtttcttttaattttggcagtttggtattttaaaaattgtctattgttaaattttgagattcatacactacatttacaaaatgagatagttgaaaaagcacatctagaattcagcttctgactaccaatcttttttgagcaactttttgtaatttttatggatttatgtcacttttattacagggatatattgcatagtggtgaaatctgggcttagtataccctcacccaaatagtatacattgtacctagtaaatactttcccatctctcaccccactcccacctttgaaggctctagtgtctatgattctgctctccacgtccaggtgtacacattgtttatctcccacttacgagaacatgtggtttttgactttctgtatcattacttcacttaatggcctccaggtccatccatgttgttgcaaaagataagatttcattatttttttttggctgagtagtattctgtggtgtgtatgtgtgtgtgtgtatgcatatatgtgtatgtgtatgtatataagtatatacaccacattatccagtcatctggatatgtatataagtatatacaccacattttctttatccagtcatctcttgatggacccttaggttggttccataactttgctattacgaatagtgctgcgataaacagcactattatgaatagtgctgcgataaacagtgcaggtgattttaaaatataatttcctttgggtagatacctactagtgggattgctggatcgaatggtagtttttagttggaaaatctccatactgttttccagaggttgtaaaatgtacattcctccccacagtgtataagctgtgcctttactctgcatctttgccatgattctttttgagacagagtctctggtgcccaggctggagtgcagtggcacaatcttggctcactgcaacctctgcctcccgggttcaagcagttctcatgtctcaacatcccaggtagctaggattacaggcgtgccaccatgcctggctaatgtttctatttttagtagagacagggtttcaccatgttcgaggctggtcttgaactcctggcctcaagtgatccacctgcctcggcctcccaaagtgctgggattacaggcatgagccactgtacccagccattttttgactttttaataatagccattctaactggtttaagagagtatctcattgtggttatattttgtattcctctgatgattagtgatgttgagcatttttttgtgtgtgtttgttggccacttgtatgtcttctttgaaaactgacttctaatcttgaggcctattaataatttcatttgtctgtcactggacaatttctcattcctctcagtgactatcctagaggatcagtgtatttgagaaatatttagaagtaaagttgacaggacaggatgattgattaaaagaggggagcaagggaatttgaaataattccagggtttctggtttgggagatcagatgaacaagtgcataagcctgggatgctggtggaggactggagagacatggcagatgctacctgcacacttttggtaatattctgtgtgatgggatatgaaatggtccatagaaaaaaaccggaaaaatacgccaaggttaggttcattctaagagtctaaaaatttcaaaaaccaaaacaacattataaatggtgtttctcaaggacctttcactacctttttagattgtgcttgtgattttcaggcaagctaaatgtctgatgaagactgctcttcttttgttctgtgtctgacctactaattcctgcccatgcttcaaactcagttcagaaatcactgaaggaaccatccactgccggcctgcctgcaaccacagctgacagctgagttagttaggttttcctgtccctattatttaccagtttgtactgaaatgctttcatgggctgtgcttccagattatgagttctgtggaatcaggaagtatgtctctgtattcttgtattctttggcttttttgtgtagtaaagggactcaagtaatgtttgacagtgaaggatacaacttcattccttgcctgctttgataaattttagtaataaattcccaaaactatcatgttgattaaaaataaaaagtaaccgtaa

SEQ ID NO: 199900 - DNA, 4401 bp, Homo sapiens
  Payload ID: 19435
  Gene Name: WD repeat domain 6
  ENST ID: ENST00000395474
  CDS Start-End: 281-3736
tttattgtgtactgactccatctgccccgtcaaataaaaaaccacaaggttcgagccgccgggcccgacaaactccgggtcggcgaaacagagtccgcgataggtgcagcgggctggcagctgggagcgccccgcaagcgtcacgtgagggggcgaggggcgggatgcccctccgcgggccccgccaatgatgagctggattgcgtgggacgaagggtcgtcattggacaaccgccgcgggcgccctggtctctgctacctgtagctgagggcgctgttgatgggcagcgcggcgcgctgggaaggctcgttctcgcgagagttcagctcccttcttagccgtggctgcctcagcacctcgaggatcgacatggacgctctcgaggactacgtttggccgcgggcaacctcggagcttatactcctcccagtgacgggtctggagtgcgtgggggaccggctgttggcgggtgagggtcccgatgtcctggtgtacagcttggactttggtgggcatctgcggatgataaagcgagtgcagaacctgcttggccactatcttatccatggcttccgggtacggccagagcctaatggagaccttgacttggaggccatggtggctgtgtttggaagcaagggactccgagttgtgaaaattagctggggacagggccacttctgggagctttggcgctctggcctgtggaacatgtctgactggatttgggatgcacgctggcttgagggaaatatagccttggccctgggccacaactcagtggtgctatatgaccctgtagtagggtgcatcctgcaagaggtgccctgcacagacaggtgcaccctctcttcagcctgcctgattggagacgcctggaaggagctgaccatagtggcaggtgctgtttccaaccagctcttggtctggtacccagcaactgccttagcagacaacaaacctgtagcacctgaccgacgaatcagtgggcatgtgggcatcatcttcagcatgtcatacctggaaagcaagggattgctggctacagcttcagaagaccgaagcgttcgtatctggaaggtgggcgacctgcgagtgcctgggggtcgggtgcagaatattgggcactgctttgggcacagcgcccgtgtgtggcaggtcaagcttctagagaattaccttatcagtgcaggagaggattgtgtctgcttggtgtggagccatgaaggtgagatcctccaggcctttcggggacaccagggacgtgggatccgggccatagctgcccatgagaggcaggcctgggtgatcactgggggtgatgactcaggcattcggctgtggcacttggtagggcgtgggtaccggggattgggggtctcggctctctgcttcaagtcccgtagtaggccaggtacactcaaggctgtgactctggctggctcttggcgactgctggcagtgactgatacaggggccctgtatctctatgacgtcgaggtcaagtgctgggagcagctgctagaggataaacatttccagtcctactgcctgctggaggcagctcctggtcccgagggcttcggattgtgtgctatggccaatggggaaggtcgtgtcaaggttgtccccatcaacactccaactgctgctgtggaccagaccctgtttcctgggaaggtgcacagcttgagctgggccctgcgtggttatgaggagctcctgttgctggcatcgggccctggcggggtagtagcttgcctagagatctcagccgcaccctctggcaaggccatctttgtcaaggaacgttgtcggtacctgctgcccccaagcaagcagagatggcacacatgcagtgccttcctacccccaggtgacttcctggtgtgtggtgaccgccggggctctgtgctgctattcccctccagaccaggtctgctcaaggaccctggggtgggaggcaaggctcgggctggtgctggggcacctgtagtgggtagtggtagtagtgggggtgggaatgctttcactgggttgggcccagtgtctaccctgccctctctgcacgggaagcagggtgtgacctcagtcacatgccatggtggctatgtgtataccacagggcgtgatggagcctactaccagctgtttgtacgagacggccagctccagccagtcctaaggcagaagtcctgtcgaggcatgaactggctagctgggctccgtatagtgcccgatgggagcatggttatcctgggtttccatgccaatgagtttgtggtgtggaaccctcggtcacacgagaagctgcacatcgtcaactgtggtggagggcaccgttcgtgggcattctctgatactgaggcggccatggcctttgcttacctcaaggatggggatgtcatgctgtacagggctctgggtggctgcacccggccacacgtgattctccgggagggtctgcatggccgtgagatcacttgtgtaaagcgtgtgggcaccattaccctggggcctgaatatggagtgcccagcttcatgcagcctgatgacctggagcctggcagtgaggggcccgacttgactgacattgtgatcacatgtagtgaggacactactgtctgtgtcctagcactccctacaaccacaggctcagcccacgcactcacagctgtttgtaaccatatctcctcggtacgtgctgtggctgtgtggggcattggcaccccaggtggccctcaggatcctcagccaggcctgactgcccatgtggtgtctgcgggggggcgggctgagatgcactgcttcagcatcatggttactccggaccccagcaccccaagccgcctcgcctgccatgtcatgcacctttcgtcccaccggctagatgagtattgggaccggcaacgcaatcggcatcggatggttaaggtagacccagagaccaggtacatgtcccttgctgtgtgtgaacttgaccagcccggccttggcccccttgtggctgcagcctgtagtgatggggccgtaaggctctttcttttgcaggattctgggcggattctgcagctccttgctgaaaccttccaccataagcgatgtgtcctcaaggtccactcctttacacacgaggcacccaaccagaggcggaggctcctcctgtgcagcgcagctactgatggcagcctggctttctgggatctcaccaccatgctagaccatgactccactgtcctggagcctccagtggatcctgggcttccctaccggcttggcaccccctccctgactctccaggcccacagctgtggtatcaacagcctgcacaccttgcccacccgtgagggccaccatctcgtggccagtggcagtgaagatggatccctccatgtcttcgtgcttgctgtggagatgctacagctagaagaggctgtgggagaggctgggctggtaccccagctgcgtgtgctagaggaatactctgtcccctgtgcacatgctgcccatgtgacaggcctcaagatcctaagcccaagcatcatggtctcagcctccattgatcaacggctgaccttctggcgtctggggcatggtgaacccaccttcatgaatagcactgtgttccatgtgcctgatgtggctgacatggactgctggcctgtgagccctgagtttggccaccgttgtgcccttgggggtcaggggcttgaggtttacaactggtatgactgaggtatcctgcggtggctggcgtgctgggcatggggcctgctcacagacagcatggagcagggatgggctgtctgtgcccatgctcagcatgccttgaggggaggaggtggtggccgtgggttcctgatgtcggtgcaggagctgaaggtgagtggagtgctgccaagaatatgcccgactccccatgacaagacagaactttgtaacaaacagtaccaatttattttggccgtgggtttttgctttttttccagttgatgactttgtgaacattcccaggtattggagcctctgtggccttaaatgtggctcagtggagggagacccagcatagccaggccagtatggagcacctcacgcacagctctcagaagctgcaggcggacgaacatctgaccaaagaggtgtggtcgaggctcctgaaagagaaagggcctgctggtctcatcctctgcttcctttgcctttaccctatacctctctgcacgtcccaccccattttgctgtgtgctcacccccaggatgtgtacccggttgtagtaggagctgaaatccatgctgagctgtaccaggaacttgcatatctagagacagagactgagtcactggcccatctctttgctcttgtgccccaggccagaataaagaatagagtgtagagtgtc

SEQ ID NO: 199901 - DNA, 852 bp, Homo sapiens
  Payload ID: 19435
  Gene Name: WD repeat domain 6
  ENST ID: ENST00000438660
  CDS Start-End: 40-852
cttcttagccgtggctgcctcagcacctcgaggatcgacatggacgctctcgaggactacgtttggccgcgggcaacctcggagcttatactcctcccagtgacgggtctggagtgcgtgggggaccggctgttggcggagtctggctttggctttccaaagtgcccagattacaggcgtgagccaccgcacccggccgagaccaaggattttctaagattcaagctgcaggattgtgagggtcccgatgtcctggtgtacagcttggactttggtgggcatctgcggatgataaagcgagtgcagaacctgcttggccactatcttatccatggcttccgggtacggccagagcctaatggagaccttgacttggaggccatggtggctgtgtttggaagcaagggactccgagttgtgaaaattagctggggacagggccacttctgggagctttggcgctctggcctgtggaacatgtctgactggatttgggatgcacgctggcttgagggaaatatagccttggccctgggccacaactcagtggtgctatatgaccctgtagtagggtgcatcctgcaagaggtgccctgcacagacaggtgcaccctctcttcagcctgcctgattggagacgcctggaaggagctgaccatagtggcaggtgctgtttccaaccagctcttggtctggtacccagcaactgccttagcagacaacaaacctgtagcacctgaccgacgaatcagtgggcatgtgggcatcatcttcagcatgtcatacctggaaagcaagggattgctggctacagcttcagaagaccgaagcgttcgtatctggaaggtgggc

SEQ ID NO: 199902 - DNA, 538 bp, Homo sapiens
  Payload ID: 19435
  Gene Name: WD repeat domain 6
  ENST ID: ENST00000419837
  CDS Start-End: 242-538
aggggtgccctgaggagaaggacgggcagcaggttgaggccgatcggagagtctggctttggctttccaaagtgcccagattacaggcgtgagccaccgcacccggccgagaccaaggattttctaagattcaagctgcaggattgtgtgtcctgatgcattcataggctacatgccgagaagtttccctgatccccatctcttccctgtgggtcatcagagttaggtacctagctctgacatggctctttgcctctatctaggtgagggtcccgatgtcctggtgtacagcttggactttggtgggcatctgcggatgataaagcgagtgcagaacctgcttggccactatcttatccatggcttccgggtacggccagagcctaatggagaccttgacttggaggccatggtggctgtgtttggaagcaagggactccgagttgtgaaaattagctggggacagggccacttctgggagctttggcgctctggcctgtggaacatgtctgactggatttgggatgcacgctggctt

SEQ ID NO: 199903 - DNA, 3656 bp, Homo sapiens
  Payload ID: 19435
  Gene Name: WD repeat domain 6
  ENST ID: ENST00000420783
  CDS Start-End: 30-215
gtggctgcctcagcacctcgaggatcgacatggacgctctcgaggactacgtttggccgcgggcaacctcggagcttatactcctcccagtgacgggtctggagtgcgtgggggaccggctgttggcgggctggagtgcagtggcacggtctcggctccctgcaacctccgcctcccaggttcaagtgattctcctgcctcagcctccggagtagctgggattacaggtgagggtcccgatgtcctggtgtacagcttggactttggtgggcatctgcggatgataaagcgagtgcagaacctgcttggccactatcttatccatggcttccgggtacggccagagcctaatggagaccttgacttggaggccatggtggctgtgtttggaagcaagggactccgagttgtgaaaattagctggggacagggccacttctgggagctttggcgctctggcctgtggaacatgtctgactggatttgggatgcacgctggcttgagggaaatatagccttggccctgggccacaactcagtggtgctatatgaccctgtagtagggtgcatcctgcaagaggtgccctgcacagacaggtgcaccctctcttcagcctgcctgattggagacgcctggaaggagctgaccatagtggcaggtgctgtttccaaccagctcttggtctggtacccagcaactgccttagcagacaacaaacctgtagcacctgaccgacgaatcagtgggcatgtgggcatcatcttcagcatgtcatacctggaaagcaagggattgctggctacagcttcagaagaccgaagcgttcgtatctggaaggtgggcgacctgcgagtgcctgggggtcgggtgcagaatattgggcactgctttgggcacagcgcccgtgtgtggcaggtcaagcttctagagaattaccttatcagtgcaggagaggattgtgtctgcttggtgtggagccatgaaggtgagatcctccaggcctttcggggacaccagggacgtgggatccgggccatagctgcccatgagaggcaggcctgggtgatcactgggggtgatgactcaggcattcggctgtggcacttggtagggcgtgggtaccggggattgggggtctcggctctctgcttcaagtcccgtagtaggccaggtacactcaaggctgtgactctggctggctcttggcgactgctggcagtgactgatacaggggccctgtatctctatgacgtcgaggtcaagtgctgggagcagctgctagaggataaacatttccagtcctactgcctgctggaggcagctcctggtcccgagggcttcggattgtgtgctatggccaatggggaaggtcgtgtcaaggttgtccccatcaacactccaactgctgctgtggaccagaccctgtttcctgggaaggtgcacagcttgagctgggccctgcgtggttatgaggagctcctgttgctggcatcgggccctggcggggtagtagcttgcctagagatctcagccgcaccctctggcaaggccatctttgtcaaggaacgttgtcggtacctgctgcccccaagcaagcagagatggcacacatgcagtgccttcctacccccaggtgacttcctggtgtgtggtgaccgccggggctctgtgctgctattcccctccagaccaggtctgctcaaggaccctggggtgggaggcaaggctcgggctggtgctggggcacctgtagtgggtagtggtagtagtgggggtgggaatgctttcactgggttgggcccagtgtctaccctgccctctctgcacgggaagcagggtgtgacctcagtcacatgccatggtggctatgtgtataccacagggcgtgatggagcctactaccagctgtttgtacgagacggccagctccagccagtcctaaggcagaagtcctgtcgaggcatgaactggctagctgggctccgtatagtgcccgatgggagcatggttatcctgggtttccatgccaatgagtttgtggtgtggaaccctcggtcacacgagaagctgcacatcgtcaactgtggtggagggcaccgttcgtgggcattctctgatactgaggcggccatggcctttgcttacctcaaggatggggatgtcatgctgtacagggctctgggtggctgcacccggccacacgtgattctccgggagggtctgcatggccgtgagatcacttgtgtaaagcgtgtgggcaccattaccctggggcctgaatatggagtgcccagcttcatgcagcctgatgacctggagcctggcagtgaggggcccgacttgactgacattgtgatcacatgtagtgaggacactactgtctgtgtcctagcactccctacaaccacaggctcagcccacgcactcacagctgtttgtaaccatatctcctcggtacgtgctgtggctgtgtggggcattggcaccccaggtggccctcaggatcctcagccaggcctgactgcccatgtggtgtctgcgggggggcgggctgagatgcactgcttcagcatcatggttactccggaccccagcaccccaagccgcctcgcctgccatgtcatgcacctttcgtcccaccggctagatgagtattgggaccggcaacgcaatcggcatcggatggttaaggtagacccagagaccaggtaatatatgctcctgggcagggtgtggtatgggtcatgcagatgctcccaggcttgcaggctccacctgacagctgcatgttgtctctgcaggtacatgtcccttgctgtgtgtgaacttgaccagcccggccttggcccccttgtggctgcagcctgtagtgatggggccgtaaggctctttcttttgcaggattctgggcggattctgcagctccttgctgaaaccttccaccataagcgatgtgtcctcaaggtccactcctttacacacgaggcacccaaccagaggcggaggctcctcctgtgcagcgcagctactgatggcagcctggctttctgggatctcaccaccatgctagaccatgactccactgtcctggagcctccagtggatcctgggcttccctaccggcttggcaccccctccctgactctccaggcccacagctgtggtatcaacagcctgcacaccttgcccacccgtgagggccaccatctcgtggccagtggcagtgaagatggatccctccatgtcttcgtgcttgctgtggagatgctacagctagaagaggctgtgggagaggctgggctggtaccccagctgcgtgtgctagaggaatactctgtcccctgtgcacatgctgcccatgtgacaggcctcaagatcctaagcccaagcatcatggtctcagcctccattgatcaacggctgaccttctggcgtctggggcatggtgaacccaccttcatgaatagcactgtgttccatgtgcctgatgtggctgacatggactgctggcctgtgagccctgagtttggccaccgttgtgcccttgggggtcaggggcttgaggtttacaactggtatgactgaggtatcctgcggtggctggcgtgctgggcatggggcctgctcacagacagcatggagcagggatgggctg

SEQ ID NO: 199904 - DNA, 1883 bp, Homo sapiens
  Payload ID: 19435
  Gene Name: WD repeat domain 6
  ENST ID: ENST00000415265
  CDS Start-End: 37-1746
cttagccgtggctgcctcagcacctcgaggatcgacatggacgctctcgaggactacgtttggccgcgggcaacctcggagcttatactcctcccagtgacgggtctggagtgcgtgggggaccggctgttggcggggcgtgatggagcctactaccagctgtttgtacgagacggccagctccagccagtcctaaggcagaagtcctgtcgaggcatgaactggctagctgggctccgtatagtgcccgatgggagcatggttatcctgggtttccatgccaatgagtttgtggtgtggaaccctcggtcacacgagaagctgcacatcgtcaactgtggtggagggcaccgttcgtgggcattctctgatactgaggcggccatggcctttgcttacctcaaggatggggatgtcatgctgtacagggctctgggtggctgcacccggccacacgtgattctccgggagggtctgcatggccgtgagatcacttgtgtaaagcgtgtgggcaccattaccctggggcctgaatatggagtgcccagcttcatgcagcctgatgacctggagcctggcagtgaggggcccgacttgactgacattgtgatcacatgtagtgaggacactactgtctgtgtcctagcactccctacaaccacaggctcagcccacgcactcacagctgtttgtaaccatatctcctcggtacgtgctgtggctgtgtggggcattggcaccccaggtggccctcaggatcctcagccaggcctgactgcccatgtggtgtctgcgggggggcgggctgagatgcactgcttcagcatcatggttactccggaccccagcaccccaagccgcctcgcctgccatgtcatgcacctttcgtcccaccggctagatgagtattgggaccggcaacgcaatcggcatcggatggttaaggtagacccagagaccaggtacatgtcccttgctgtgtgtgaacttgaccagcccggccttggcccccttgtggctgcagcctgtagtgatggggccgtaaggctctttcttttgcaggattctgggcggattctgcagctccttgctgaaaccttccaccataagcgatgtgtcctcaaggtccactcctttacacacgaggcacccaaccagaggcggaggctcctcctgtgcagcgcagctactgatggcagcctggctttctgggatctcaccaccatgctagaccatgactccactgtcctggagcctccagtggatcctgggcttccctaccggcttggcaccccctccctgactctccaggcccacagctgtggtatcaacagcctgcacaccttgcccacccgtgagggccaccatctcgtggccagtggcagtgaagatggatccctccatgtcttcgtgcttgctgtggagatgctacagctagaagaggctgtgggagaggctgggctggtaccccagctgcgtgtgctagaggaatactctgtcccctgtgcacatgctgcccatgtgacaggcctcaagatcctaagcccaagcatcatggtctcagcctccattgatcaacggctgaccttctggcgtctggggcatggtgaacccaccttcatgaatagcactgtgttccatgtgcctgatgtggctgacatggactgctggcctgtgagccctgagtttggccaccgttgtgcccttgggggtcaggggcttgaggtttacaactggtatgactgaggtatcctgcggtggctggcgtgctgggcatggggcctgctcacagacagcatggagcagggatgggctgtctgtgcccatgctcagcatgccttgaggggaggaggtggtggccgtgggttcctgatgtcggtgca

SEQ ID NO: 199905 - DNA, 3377 bp, Homo sapiens
  Payload ID: 19435
  Gene Name: WD repeat domain 6
  ENST ID: ENST00000448293
  CDS Start-End: 106-3318
aaaaggggtgccctgaggagaaggacgggcagcaggttgaggccgatcggaggtgagggtcccgatgtcctggtgtacagcttggactttggtgggcatctgcggatgataaagcgagtgcagaacctgcttggccactatcttatccatggcttccgggtacggccagagcctaatggagaccttgacttggaggccatggtggctgtgtttggaagcaagggactccgagttgtgaaaattagctggggacagggccacttctgggagctttggcgctctggcctgtggaacatgtctgactggatttgggatgcacgctggcttgagggaaatatagccttggccctgggccacaactcagtggtgctatatgaccctgtagtagggtgcatcctgcaagaggtgccctgcacagacaggtgcaccctctcttcagcctgcctgattggagacgcctggaaggagctgaccatagtggcaggtgctgtttccaaccagctcttggtctggtacccagcaactgccttagcagacaacaaacctgtagcacctgaccgacgaatcagtgggcatgtgggcatcatcttcagcatgtcatacctggaaagcaagggattgctggctacagcttcagaagaccgaagcgttcgtatctggaaggtgggcgacctgcgagtgcctgggggtcgggtgcagaatattgggcactgctttgggcacagcgcccgtgtgtggcaggtcaagcttctagagaattaccttatcagtgcaggagaggattgtgtctgcttggtgtggagccatgaaggtgagatcctccaggcctttcggggacaccagggacgtgggatccgggccatagctgcccatgagaggcaggcctgggtgatcactgggggtgatgactcaggcattcggctgtggcacttggtagggcgtgggtaccggggattgggggtctcggctctctgcttcaagtcccgtagtaggccaggtacactcaaggctgtgactctggctggctcttggcgactgctggcagtgactgatacaggggccctgtatctctatgacgtcgaggtcaagtgctgggagcagctgctagaggataaacatttccagtcctactgcctgctggaggcagctcctggtcccgagggcttcggattgtgtgctatggccaatggggaaggtcgtgtcaaggttgtccccatcaacactccaactgctgctgtggaccagaccctgtttcctgggaaggtgcacagcttgagctgggccctgcgtggttatgaggagctcctgttgctggcatcgggccctggcggggtagtagcttgcctagagatctcagccgcaccctctggcaaggccatctttgtcaaggaacgttgtcggtacctgctgcccccaagcaagcagagatggcacacatgcagtgccttcctacccccaggtgacttcctggtgtgtggtgaccgccggggctctgtgctgctattcccctccagaccaggtctgctcaaggaccctggggtgggaggcaaggctcgggctggtgctggggcacctgtagtgggtagtggtagtagtgggggtgggaatgctttcactgggttgggcccagtgtctaccctgccctctctgcacgggaagcagggtgtgacctcagtcacatgccatggtggctatgtgtataccacagggcgtgatggagcctactaccagctgtttgtacgagacggccagctccagccagtcctaaggcagaagtcctgtcgaggcatgaactggctagctgggctccgtatagtgcccgatgggagcatggttatcctgggtttccatgccaatgagtttgtggtgtggaaccctcggtcacacgagaagctgcacatcgtcaactgtggtggagggcaccgttcgtgggcattctctgatactgaggcggccatggcctttgcttacctcaaggatggggatgtcatgctgtacagggctctgggtggctgcacccggccacacgtgattctccgggagggtctgcatggccgtgagatcacttgtgtaaagcgtgtgggcaccattaccctggggcctgaatatggagtgcccagcttcatgcagcctgatgacctggagcctggcagtgaggggcccgacttgactgacattgtgatcacatgtagtgaggacactactgtctgtgtcctagcactccctacaaccacaggctcagcccacgcactcacagctgtttgtaaccatatctcctcggtacgtgctgtggctgtgtggggcattggcaccccaggtggccctcaggatcctcagccaggcctgactgcccatgtggtgtctgcgggggggcgggctgagatgcactgcttcagcatcatggttactccggaccccagcaccccaagccgcctcgcctgccatgtcatgcacctttcgtcccaccggctagatgagtattgggaccggcaacgcaatcggcatcggatggttaaggtagacccagagaccaggtacatgtcccttgctgtgtgtgaacttgaccagcccggccttggcccccttgtggctgcagcctgtagtgatggggccgtaaggctctttcttttgcaggattctgggcggattctgcagctccttgctgaaaccttccaccataagcgatgtgtcctcaaggtccactcctttacacacgaggcacccaaccagaggcggaggctcctcctgtgcagcgcagctactgatggcagcctggctttctgggatctcaccaccatgctagaccatgactccactgtcctggagcctccagtggatcctgggcttccctaccggcttggcaccccctccctgactctccaggcccacagctgtggtatcaacagcctgcacaccttgcccacccgtgagggccaccatctcgtggccagtggcagtgaagatggatccctccatgtcttcgtgcttgctgtggagatgctacagctagaagaggctgtgggagaggctgggctggtaccccagctgcgtgtgctagaggaatactctgtcccctgtgcacatgctgcccatgtgacaggcctcaagatcctaagcccaagcatcatggtctcagcctccattgatcaacggctgaccttctggcgtctggggcatggtgaacccaccttcatgaatagcactgtgttccatgtgcctgatgtggctgacatggactgctggcctgtgagccctgagtttggccaccgttgtgcccttgggggtcaggggcttgaggtttacaactggtatgactgaggtatcctgcggtggctggcgtgctgggcatggggcctgctcacagacagcatggagca

SEQ ID NO: 199906 - DNA, 3916 bp, Homo sapiens
  Payload ID: 19435
  Gene Name: WD repeat domain 6
  ENST ID: ENST00000452875
  CDS Start-End: 36-242
ttagccgtggctgcctcagcacctcgaggatcgacatggacgctctcgaggactacgtttggccgcgggcaacctcggagcttatactcctcccagtgacgggtctggagtgcgtgggggaccggctgttggcggagtctggctttggctttccaaagtgcccagattacaggcgtgagccaccgcacccggccgagaccaaggattttctaagattcaagctgcaggattgtgtgtcctgatgcattcataggctacatgccgagaagtttccctgatccccatctcttccctgtgggtcatcagagttaggtacctagctctgacatggctctttgcctctatctaggtgagggtcccgatgtcctggtgtacagcttggactttggtgggcatctgcggatgataaagcgagtgcagaacctgcttggccactatcttatccatggcttccgggtacggccagagcctaatggagaccttgacttggaggccatggtggctgtgtttggaagcaagggactccgagttgtgaaaattagctggggacagggccacttctgggagctttggcgctctggcctgtggaacatgtctgactggatttgggatgcacgctggcttgagggaaatatagccttggccctgggccacaactcagtggtgctatatgaccctgtagtagggtgcatcctgcaagaggtgccctgcacagacaggtgcaccctctcttcagcctgcctgattggagacgcctggaaggagctgaccatagtggcaggtgctgtttccaaccagctcttggtctggtacccagcaactgccttagcagacaacaaacctgtagcacctgaccgacgaatcagtgggcatgtgggcatcatcttcagcatgtcatacctggaaagcaagggattgctggctacagcttcagaagaccgaagcgttcgtatctggaaggtgggcgacctgcgagtgcctgggggtcgggtgcagaatattgggcactgctttgggcacagcgcccgtgtgtggcaggtcaagcttctagagaattaccttatcagtgcaggagaggattgtgtctgcttggtgtggagccatgaaggtgagatcctccaggcctttcggggacaccagggacgtgggatccgggccatagctgcccatgagaggcaggcctgggtgatcactgggggtgatgactcaggcattcggctgtggcacttggtagggcgtgggtaccggggattgggggtctcggctctctgcttcaagtcccgtagtaggccaggtacactcaaggctgtgactctggctggctcttggcgactgctggcagtgactgatacaggggccctgtatctctatgacgtcgaggtcaagtgctgggagcagctgctagaggataaacatttccagtcctactgcctgctggaggcagctcctggtcccgagggcttcggattgtgtgctatggccaatggggaaggtcgtgtcaaggttgtccccatcaacactccaactgctgctgtggaccagaccctgtttcctgggaaggtgcacagcttgagctgggccctgcgtggttatgaggagctcctgttgctggcatcgggccctggcggggtagtagcttgcctagagatctcagccgcaccctctggcaaggccatctttgtcaaggaacgttgtcggtacctgctgcccccaagcaagcagagatggcacacatgcagtgccttcctacccccaggtgacttcctggtgtgtggtgaccgccggggctctgtgctgctattcccctccagaccaggtctgctcaaggaccctggggtgggaggcaaggctcgggctggtgctggggcacctgtagtgggtagtggtagtagtgggggtgggaatgctttcactgggttgggcccagtgtctaccctgccctctctgcacgggaagcagggtgtgacctcagtcacatgccatggtggctatgtgtataccacagggcgtgatggagcctactaccagctgtttgtacgagacggccagctccagccagtcctaaggcagaagtcctgtcgaggcatgaactggctagctgggctccgtatagtgcccgatgggagcatggttatcctgggtttccatgccaatgagtttgtggtgtggaaccctcggtcacacgagaagctgcacatcgtcaactgtggtggagggcaccgttcgtgggcattctctgatactgaggcggccatggcctttgcttacctcaaggatggggatgtcatgctgtacagggctctgggtggctgcacccggccacacgtgattctccgggagggtctgcatggccgtgagatcacttgtgtaaagcgtgtgggcaccattaccctggggcctgaatatggagtgcccagcttcatgcagcctgatgacctggagcctggcagtgaggggcccgacttgactgacattgtgatcacatgtagtgaggacactactgtctgtgtcctagcactccctacaaccacaggctcagcccacgcactcacagctgtttgtaaccatatctcctcggtacgtgctgtggctgtgtggggcattggcaccccaggtggccctcaggatcctcagccaggcctgactgcccatgtggtgtctgcgggggggcgggctgagatgcactgcttcagcatcatggttactccggaccccagcaccccaagccgcctcgcctgccatgtcatgcacctttcgtcccaccggctagatgagtattgggaccggcaacgcaatcggcatcggatggttaaggtagacccagagaccaggtacatgtcccttgctgtgtgtgaacttgaccagcccggccttggcccccttgtggctgcagcctgtagtgatggggccgtaaggctctttcttttgcaggattctgggcggattctgcagctccttgctgaaaccttccaccataagcgatgtgtcctcaaggtccactcctttacacacgaggcacccaaccagaggcggaggctcctcctgtgcagcgcagctactgatggcagcctggctttctgggatctcaccaccatgctagaccatgactccactgtcctggagcctccagtggatcctgggcttccctaccggcttggcaccccctccctgactctccaggcccacagctgtggtatcaacagcctgcacaccttgcccacccgtgagggccaccatctcgtggccagtggcagtgaagatggatccctccatgtcttcgtgcttgctgtggagatgctacagctagaagaggctgtgggagaggctgggctggtaccccagctgcgtgtgctagaggaatactctgtcccctgtgcacatgctgcccatgtgacaggcctcaagatcctaagcccaagcatcatggtctcagcctccattgatcaacggctgaccttctggcgtctggggcatggtgaacccaccttcatgaatagcactgtgttccatgtgcctgatgtggctgacatggactgctggcctgtgagccctgagtttggccaccgttgtgcccttgggggtcaggggcttgaggtttacaactggtatgactgaggtatcctgcggtggctggcgtgctgggcatggggcctgctcacagacagcatggagcagggatgggctgtctgtgcccatgctcagcatgccttgaggggaggaggtggtggccgtgggttcctgatgtcggtgcaggagctgaaggtgagtggagtgctgccaagaatatgcccgactccccatgacaagacagaactttgtaacaaacagtaccaatttattttggccgtgggtttttgctttttttccagttgatgactttgtgaacattcccaggtattggagcctctgtggcctt

SEQ ID NO: 199907 - DNA, 564 bp, Homo sapiens
  Payload ID: 19435
  Gene Name: WD repeat domain 6
  ENST ID: ENST00000489427
  CDS Start-End: 190-564
aaggtgggggtgaagatcctctgaggagggtggcgtcgcggaaaacggcggataagacctttccgagtagggggcggtgcccggggaagcaggggctgagaccccctcctgagatggttgaggtccaggaaatcaggtgagggtcccgatgtcctggtgtacagcttggactttggtgggcatctgcggatgataaagcgagtgcagaacctgcttggccactatcttatccatggcttccgggtacggccagagcctaatggagaccttgacttggaggccatggtggctgtgtttggaagcaagggactccgagttgtgaaaattagctggggacagggccacttctgggagctttggcgctctggcctgtggaacatgtctgactggatttgggatgcacgctggcttgagggaaatatagccttggccctgggccacaactcagtggtgctatatgaccctgtagtagggtgcatcctgcaagaggtgccctgcacagacaggtgcaccctctcttcagcctgcctgattggagacgcctggaaggagctgaccatagtg

SEQ ID NO: 199908 - DNA, 4070 bp, Homo sapiens
  Payload ID: 19435
  Gene Name: WD repeat domain 6
  Uniprot ID: Q9NNW5
  ENST ID: ENST00000608424
  CDS Start-End: 40-3405
cttcttagccgtggctgcctcagcacctcgaggatcgacatggacgctctcgaggactacgtttggccgcgggcaacctcggagcttatactcctcccagtgacgggtctggagtgcgtgggggaccggctgttggcgggtgagggtcccgatgtcctggtgtacagcttggactttggtgggcatctgcggatgataaagcgagtgcagaacctgcttggccactatcttatccatggcttccgggtacggccagagcctaatggagaccttgacttggaggccatggtggctgtgtttggaagcaagggactccgagttgtgaaaattagctggggacagggccacttctgggagctttggcgctctggcctgtggaacatgtctgactggatttgggatgcacgctggcttgagggaaatatagccttggccctgggccacaactcagtggtgctatatgaccctgtagtagggtgcatcctgcaagaggtgccctgcacagacaggtgcaccctctcttcagcctgcctgattggagacgcctggaaggagctgaccatagtggcaggtgctgtttccaaccagctcttggtctggtacccagcaactgccttagcagacaacaaacctgtagcacctgaccgacgaatcagtgggcatgtgggcatcatcttcagcatgtcatacctggaaagcaagggattgctggctacagcttcagaagaccgaagcgttcgtatctggaaggtgggcgacctgcgagtgcctgggggtcgggtgcagaatattgggcactgctttgggcacagcgcccgtgtgtggcaggtcaagcttctagagaattaccttatcagtgcaggagaggattgtgtctgcttggtgtggagccatgaaggtgagatcctccaggcctttcggggacaccagggacgtgggatccgggccatagctgcccatgagaggcaggcctgggtgatcactgggggtgatgactcaggcattcggctgtggcacttggtagggcgtgggtaccggggattgggggtctcggctctctgcttcaagtcccgtagtaggccaggtacactcaaggctgtgactctggctggctcttggcgactgctggcagtgactgatacaggggccctgtatctctatgacgtcgaggtcaagtgctgggagcagctgctagaggataaacatttccagtcctactgcctgctggaggcagctcctggtcccgagggcttcggattgtgtgctatggccaatggggaaggtcgtgtcaaggttgtccccatcaacactccaactgctgctgtggaccagaccctgtttcctgggaaggtgcacagcttgagctgggccctgcgtggttatgaggagctcctgttgctggcatcgggccctggcggggtagtagcttgcctagagatctcagccgcaccctctggcaaggccatctttgtcaaggaacgttgtcggtacctgctgcccccaagcaagcagagatggcacacatgcagtgccttcctacccccaggtgacttcctggtgtgtggtgaccgccggggctctgtgctgctattcccctccagaccaggtctgctcaaggaccctggggtgggaggcaaggctcgggctggtgctggggcacctgtagtgggtagtggtagtagtgggggtgggaatgctttcactgggttgggcccagtgtctaccctgccctctctgcacgggaagcagggtgtgacctcagtcacatgccatggtggctatgtgtataccacagggcgtgatggagcctactaccagctgtttgtacgagacggccagctccagccagtcctaaggcagaagtcctgtcgaggcatgaactggctagctgggctccgtatagtgcccgatgggagcatggttatcctgggtttccatgccaatgagtttgtggtgtggaaccctcggtcacacgagaagctgcacatcgtcaactgtggtggagggcaccgttcgtgggcattctctgatactgaggcggccatggcctttgcttacctcaaggatggggatgtcatgctgtacagggctctgggtggctgcacccggccacacgtgattctccgggagggtctgcatggccgtgagatcacttgtgtaaagcgtgtgggcaccattaccctggggcctgaatatggagtgcccagcttcatgcagcctgatgacctggagcctggcagtgaggggcccgacttgactgacattgtgatcacatgtagtgaggacactactgtctgtgtcctagcactccctacaaccacaggctcagcccacgcactcacagctgtttgtaaccatatctcctcggtacgtgctgtggctgtgtggggcattggcaccccaggtggccctcaggatcctcagccaggcctgactgcccatgtggtgtctgcgggggggcgggctgagatgcactgcttcagcatcatggttactccggaccccagcaccccaagccgcctcgcctgccatgtcatgcacctttcgtcccaccggctagatgagtattgggaccggcaacgcaatcggcatcggatggttaaggtagacccagagaccaggtacatgtcccttgctgtgtgtgaacttgaccagcccggccttggcccccttgtggctgcagcctgtagtgatggggccgtaaggctctttcttttgcaggattctgggcggattctgcagctccttgctgaaaccttccaccataagcgatgtgtcctcaaggtccactcctttacacacgaggcacccaaccagaggcggaggctcctcctgtgcagcgcagctactgatggcagcctggctttctgggatctcaccaccatgctagaccatgactccactgtcctggagcctccagtggatcctgggcttccctaccggcttggcaccccctccctgactctccaggcccacagctgtggtatcaacagcctgcacaccttgcccacccgtgagggccaccatctcgtggccagtggcagtgaagatggatccctccatgtcttcgtgcttgctgtggagatgctacagctagaagaggctgtgggagaggctgggctggtaccccagctgcgtgtgctagaggaatactctgtcccctgtgcacatgctgcccatgtgacaggcctcaagatcctaagcccaagcatcatggtctcagcctccattgatcaacggctgaccttctggcgtctggggcatggtgaacccaccttcatgaatagcactgtgttccatgtgcctgatgtggctgacatggactgctggcctgtgagccctgagtttggccaccgttgtgcccttgggggtcaggggcttgaggtttacaactggtatgactgaggtatcctgcggtggctggcgtgctgggcatggggcctgctcacagacagcatggagcagggatgggctgtctgtgcccatgctcagcatgccttgaggggaggaggtggtggccgtgggttcctgatgtcggtgcaggagctgaaggtgagtggagtgctgccaagaatatgcccgactccccatgacaagacagaactttgtaacaaacagtaccaatttattttggccgtgggtttttgctttttttccagttgatgactttgtgaacattcccaggtattggagcctctgtggccttaaatgtggctcagtggagggagacccagcatagccaggccagtatggagcacctcacgcacagctctcagaagctgcaggcggacgaacatctgaccaaagaggtgtggtcgaggctcctgaaagagaaagggcctgctggtctcatcctctgcttcctttgcctttaccctatacctctctgcacgtcccaccccattttgctgtgtgctcacccccaggatgtgtacccggttgtagtaggagctgaaatccatgctgagctgtaccaggaacttgcatatctagagacagagactgagtcactggcccatctctttgctcttgtgccccaggccagaataaagaatagagtgtagagtgtc

SEQ ID NO: 199909 - DNA, 563 bp, Homo sapiens
  Payload ID: 19435
  Gene Name: WD repeat domain 6
  ENST ID: ENST00000429900
  CDS Start-End: 470-563
ggcgcgctgggaaggctcgttctcgcgagagttcagctcccttcttagccgtggctgcctcagcacctcgaggatcgacatggacgctctcgaggactacgtttggccgcgggcaacctcggagcttatactcctcccagtgacgggtctggagtgcgtgggggaccggctgttggcgggctggagtgcagtggcacggtctcggctccctgcaacctccgcctcccaggttcaagtgattctcctgcctcagcctccggagtagctgggattacagagtctggctttggctttccaaagtgcccagattacaggcgtgagccaccgcacccggccgagaccaaggattttctaagattcaagctgcaggattgtgtgtcctgatgcattcataggctacatgccgagaagtttccctgatccccatctcttccctgtgggtcatcagagttaggtacctagctctgacatggctctttgcctctatctaggtgagggtcccgatgtcctggtgtacagcttggactttggtgggcatctgcggatgataaagcgagtgcaga

SEQ ID NO: 199910 - DNA, 491 bp, Homo sapiens
  Payload ID: 19435
  Gene Name: WD repeat domain 6
  ENST ID: ENST00000491365
  CDS Start-End: 387-491
gggggtgaagatcctctgaggagggtggcgtcgcggaaaacggcggataagacctttccgagtagggggcggtgcccggggaagcaggggctgagaccccctcctgagatggttgaggtccaggaaatcaggtgtggaggtccctccaaggagaaccgggtcgcaaaggacaggcgaggcctgggacctgaggtgtcagagtccaggctggtctcgaacagtcattacatgaagccactaatgacccatgttggtgctgctgagttgtataagggtcctgaggcagggccttggcggtcaggccttgagtgagttgccaccagtcctaagagggtgagggtcccgatgtcctggtgtacagcttggactttggtgggcatctgcggatgataaagcgagtgcagaacctgcttggccactatcttatccatggcttccgggtacggccagagcctaatggagaccttgacttggaggccatggtggctgtg

SEQ ID NO: 199911 - DNA, 1949 bp, Homo sapiens
  Payload ID: 19435
  Gene Name: WD repeat domain 6
  ENST ID: ENST00000615452
  CDS Start-End: 423-1292
ggtgagggtcccgatgtcctggtgtacagcttggactttggtgggcatctgcggatgataaagcgagtgcagaacctgcttggccactatcttatccatggcttccgggtacggccagagcctaatggagaccttgacttggaggccatggtggctgtgtttggaagcaagggactccgagttgtgaaaattagctggggacagggccacttctgggagctttggcgctctggcctgtggaacatatctcctcggtacgtgctgtggctgtgtggggcattggcaccccaggtggccctcaggatcctcagccaggcctgactgcccatgtggtgtctgcgggggggcgggctgagatgcactgcttcagcatcatggttactccggaccccagcaccccaagccgcctcgcctgccatgtcatgcacctttcgtcccaccggctagatgagtattgggaccggcaacgcaatcggcatcggatggttaaggtagacccagagaccaggtacatgtcccttgctgtgtgtgaacttgaccagcccggccttggcccccttgtggctgcagcctgtagtgatggggccgtaaggctctttcttttgcaggattctgggcggattctgcagctccttgctgaaaccttccaccataagcgatgtgtcctcaaggtccactcctttacacacgaggcacccaaccagaggcggaggctcctcctgtgcagcgcagctactgatggcagcctggctttctgggatctcaccaccatgctagaccatgactccactgtcctggagcctccagtggatcctgggcttccctaccggcttggcaccccctccctgactctccaggcccacagctgtggtatcaacagcctgcacaccttgcccacccgtgagggccaccatctcgtggccagtggcagtgaagatggatccctccatgtcttcgtgcttgctgtggagatgctacagctagaagaggctgtgggagaggctgggctggtaccccagctgcgtgtgctagaggaatactctgtcccctgtgcacatgctgcccatgtgacaggcctcaagatcctaagcccaagcatcatggtctcagcctccattgatcaacggctgaccttctggcgtctggggcatggtgaacccaccttcatgaatagcactgtgttccatgtgcctgatgtggctgacatggactgctggcctgtgagccctgagtttggccaccgttgtgcccttgggggtcaggggcttgaggtttacaactggtatgactgaggtatcctgcggtggctggcgtgctgggcatggggcctgctcacagacagcatggagcagggatgggctgtctgtgcccatgctcagcatgccttgaggggaggaggtggtggccgtgggttcctgatgtcggtgcaggagctgaaggtgagtggagtgctgccaagaatatgcccgactccccatgacaagacagaactttgtaacaaacagtaccaatttattttggccgtgggtttttgctttttttccagttgatgactttgtgaacattcccaggtattggagcctctgtggccttaaatgtggctcagtggagggagacccagcatagccaggccagtatggagcacctcacgcacagctctcagaagctgcaggcggacgaacatctgaccaaagaggtgtggtcgaggctcctgaaagagaaagggcctgctggtctcatcctctgcttcctttgcctttaccctatacctctctgcacgtcccaccccattttgctgtgtgctcacccccaggatgtgtacccggttgtagtaggagctgaaatccatgctgagctgtaccaggaacttgcatatctagagacagagactgagtcactggcccatctctttgctcttgtgccccaggccagaataaagaatagagtgt

SEQ ID NO: 199912 - DNA, 4259 bp, Homo sapiens
  Payload ID: 19435
  Gene Name: WD repeat domain 6
  ENST ID: ENST00000610967
  CDS Start-End: 139-3594
acgtgagggggcgaggggcgggatgcccctccgcgggccccgccaatgatgagctggattgcgtgggacgaagggtcgtcattggacaaccgccgcgggcgccctggtctctgctacctgtagctgagggcgctgttgatgggcagcgcggcgcgctgggaaggctcgttctcgcgagagttcagctcccttcttagccgtggctgcctcagcacctcgaggatcgacatggacgctctcgaggactacgtttggccgcgggcaacctcggagcttatactcctcccagtgacgggtctggagtgcgtgggggaccggctgttggcgggtgagggtcccgatgtcctggtgtacagcttggactttggtgggcatctgcggatgataaagcgagtgcagaacctgcttggccactatcttatccatggcttccgggtacggccagagcctaatggagaccttgacttggaggccatggtggctgtgtttggaagcaagggactccgagttgtgaaaattagctggggacagggccacttctgggagctttggcgctctggcctgtggaacatgtctgactggatttgggatgcacgctggcttgagggaaatatagccttggccctgggccacaactcagtggtgctatatgaccctgtagtagggtgcatcctgcaagaggtgccctgcacagacaggtgcaccctctcttcagcctgcctgattggagacgcctggaaggagctgaccatagtggcaggtgctgtttccaaccagctcttggtctggtacccagcaactgccttagcagacaacaaacctgtagcacctgaccgacgaatcagtgggcatgtgggcatcatcttcagcatgtcatacctggaaagcaagggattgctggctacagcttcagaagaccgaagcgttcgtatctggaaggtgggcgacctgcgagtgcctgggggtcgggtgcagaatattgggcactgctttgggcacagcgcccgtgtgtggcaggtcaagcttctagagaattaccttatcagtgcaggagaggattgtgtctgcttggtgtggagccatgaaggtgagatcctccaggcctttcggggacaccagggacgtgggatccgggccatagctgcccatgagaggcaggcctgggtgatcactgggggtgatgactcaggcattcggctgtggcacttggtagggcgtgggtaccggggattgggggtctcggctctctgcttcaagtcccgtagtaggccaggtacactcaaggctgtgactctggctggctcttggcgactgctggcagtgactgatacaggggccctgtatctctatgacgtcgaggtcaagtgctgggagcagctgctagaggataaacatttccagtcctactgcctgctggaggcagctcctggtcccgagggcttcggattgtgtgctatggccaatggggaaggtcgtgtcaaggttgtccccatcaacactccaactgctgctgtggaccagaccctgtttcctgggaaggtgcacagcttgagctgggccctgcgtggttatgaggagctcctgttgctggcatcgggccctggcggggtagtagcttgcctagagatctcagccgcaccctctggcaaggccatctttgtcaaggaacgttgtcggtacctgctgcccccaagcaagcagagatggcacacatgcagtgccttcctacccccaggtgacttcctggtgtgtggtgaccgccggggctctgtgctgctattcccctccagaccaggtctgctcaaggaccctggggtgggaggcaaggctcgggctggtgctggggcacctgtagtgggtagtggtagtagtgggggtgggaatgctttcactgggttgggcccagtgtctaccctgccctctctgcacgggaagcagggtgtgacctcagtcacatgccatggtggctatgtgtataccacagggcgtgatggagcctactaccagctgtttgtacgagacggccagctccagccagtcctaaggcagaagtcctgtcgaggcatgaactggctagctgggctccgtatagtgcccgatgggagcatggttatcctgggtttccatgccaatgagtttgtggtgtggaaccctcggtcacacgagaagctgcacatcgtcaactgtggtggagggcaccgttcgtgggcattctctgatactgaggcggccatggcctttgcttacctcaaggatggggatgtcatgctgtacagggctctgggtggctgcacccggccacacgtgattctccgggagggtctgcatggccgtgagatcacttgtgtaaagcgtgtgggcaccattaccctggggcctgaatatggagtgcccagcttcatgcagcctgatgacctggagcctggcagtgaggggcccgacttgactgacattgtgatcacatgtagtgaggacactactgtctgtgtcctagcactccctacaaccacaggctcagcccacgcactcacagctgtttgtaaccatatctcctcggtacgtgctgtggctgtgtggggcattggcaccccaggtggccctcaggatcctcagccaggcctgactgcccatgtggtgtctgcgggggggcgggctgagatgcactgcttcagcatcatggttactccggaccccagcaccccaagccgcctcgcctgccatgtcatgcacctttcgtcccaccggctagatgagtattgggaccggcaacgcaatcggcatcggatggttaaggtagacccagagaccaggtacatgtcccttgctgtgtgtgaacttgaccagcccggccttggcccccttgtggctgcagcctgtagtgatggggccgtaaggctctttcttttgcaggattctgggcggattctgcagctccttgctgaaaccttccaccataagcgatgtgtcctcaaggtccactcctttacacacgaggcacccaaccagaggcggaggctcctcctgtgcagcgcagctactgatggcagcctggctttctgggatctcaccaccatgctagaccatgactccactgtcctggagcctccagtggatcctgggcttccctaccggcttggcaccccctccctgactctccaggcccacagctgtggtatcaacagcctgcacaccttgcccacccgtgagggccaccatctcgtggccagtggcagtgaagatggatccctccatgtcttcgtgcttgctgtggagatgctacagctagaagaggctgtgggagaggctgggctggtaccccagctgcgtgtgctagaggaatactctgtcccctgtgcacatgctgcccatgtgacaggcctcaagatcctaagcccaagcatcatggtctcagcctccattgatcaacggctgaccttctggcgtctggggcatggtgaacccaccttcatgaatagcactgtgttccatgtgcctgatgtggctgacatggactgctggcctgtgagccctgagtttggccaccgttgtgcccttgggggtcaggggcttgaggtttacaactggtatgactgaggtatcctgcggtggctggcgtgctgggcatggggcctgctcacagacagcatggagcagggatgggctgtctgtgcccatgctcagcatgccttgaggggaggaggtggtggccgtgggttcctgatgtcggtgcaggagctgaaggtgagtggagtgctgccaagaatatgcccgactccccatgacaagacagaactttgtaacaaacagtaccaatttattttggccgtgggtttttgctttttttccagttgatgactttgtgaacattcccaggtattggagcctctgtggccttaaatgtggctcagtggagggagacccagcatagccaggccagtatggagcacctcacgcacagctctcagaagctgcaggcggacgaacatctgaccaaagaggtgtggtcgaggctcctgaaagagaaagggcctgctggtctcatcctctgcttcctttgcctttaccctatacctctctgcacgtcccaccccattttgctgtgtgctcacccccaggatgtgtacccggttgtagtaggagctgaaatccatgctgagctgtaccaggaacttgcatatctagagacagagactgagtcactggcccatctctttgctcttgtgccccaggccagaataaagaatagagtgtagagtgtc

SEQ ID NO: 199913 - DNA, 207 bp, Homo sapiens
  Payload ID: 19435
  Gene Name: WD repeat domain 6
  ENST ID: ENST00000627177
  CDS Start-End: 1-207
atggacgctctcgaggactacgtttggccgcgggcaacctcggagcttatactcctcccagtgacgggtctggagtgcgtgggggaccggctgttggcggagtctggctttggctttccaaagtgcccagattacaggcgtgagccaccgcacccggccgagaccaaggattttctaagattcaagctgcaggattgtgtgtcctga

SEQ ID NO: 199914 - DNA, 457 bp, Homo sapiens
  Payload ID: 19436
  Gene Name: WD repeat domain 60
  ENST ID: ENST00000397143
  CDS Start-End: 169-457
cgcagaaggagcacagactccctctgtgtgcacagcatttgggacagaagaaccaaagatgatacctggaaagcagatgacctcagaaaacatctctgggccatacagtcaggtggttccaaggaagaaagaaagcacagagagaagaagctgcgtaaggagtctgagatggaccttcctgaacataaggagccgaggtgcagggatcccgaccaggatgccaggagcagagacagggtggccgaagtccacaccgctaaggagagtcctcgtggggagagggacagagacagacagagggagaggagaagagacgcaaaagaccgggagaaagaaaagctgaaggagaaacatcgagaggcagaaaagtctcacagcagaggaaaggacagggaaaaagaaaaagacagaagggcccggaaggaagagctccggcagaccgtggcccaccacaacc

SEQ ID NO: 199915 - DNA, 3769 bp, Homo sapiens
  Payload ID: 19436
  Gene Name: WD repeat domain 60
  Uniprot ID: Q8WVS4
  ENST ID: ENST00000407559
  CDS Start-End: 159-3359
ctgggcagtgcttctgggccctctgctgctcctgcttgtcggttgctaggcgctgggacgcgcctcccgaagggtgcggggcacaggtggcctcttcggggtggaccgcgcctggccggggccgaggacaccgcggccgcccgggcctgcgggaagcgatggagcccgggaagagaagaaccaaagatgatacctggaaagcagatgacctcagaaaacatctctgggccatacagtcaggtggttccaaggaagaaagaaagcacagagagaagaagctgcgtaaggagtctgagatggaccttcctgaacataaggagccgaggtgcagggatcccgaccaggatgccaggagcagagacagggtggccgaagtccacaccgctaaggagagtcctcgtggggagagggacagagacagacagagggagaggagaagagacgcaaaagaccgggagaaagaaaagctgaaggagaaacatcgagaggcagaaaagtctcacagcagaggaaaggacagggaaaaagaaaaagacagaagggcccggaaggaagagctccggcagaccgtggcccaccacaacctgctgggccaggagacacgcgaccggcagctcctggagcgggcggagaggaaaggccgctcagtaagtaaagtaagaagtgaagagaaagatgaagactctgaaagaggagatgaagatagagaaagaagataccgagaaagaaagctgcagtacggagacagcaaggacaaccctctcaagtactggctttataaagaagaaggcgagaggagacacaggaagcccagagagccagatcgagacaacaaacaccgagaaaaaagcagcacaagggaaaaaagagagaaatattccaaagagaaaagtaattcattctctgacaaaggggaagaaagacataaagaaaagcgacacaaagaaggttttcattttgatgatgagaggcaccaaagcaacgtggatagaaaagagaaatcggcaaaagatgagcccaggaaaagggaatcccagaatggtgaacacagaaatcgaggtgcaagctcaaaaagagatgggaccagcagccagcatgctgagaatttagtaaggaatcatggaaaagataaagattcaagacggaagcatggccacgaggaaggctcttctgtgtggtggaagctggaccagaggccgggaggcgaggaaaccgtggaaattgaaaaggaagaaactgatttagaaaatgctagagctgatgcatatacagccagttgtgaagatgattttgaagactatgaagatgactttgaggtttgtgatggtgatgatgatgaaagcagtaatgaacctgagtcaagagaaaaactggaagaacttcctctagctcaaaaaaaggaaatacaagaaattcaaagagctattaatgcagaaaatgaaaggattggcgagttatctttgaaactgtttcagaagcgaggtagaacagaatttgaaaaggagcccaggacagatacaaacagttccccttccagagcctctgtttgtggaatttttgtggattttgcctcagcttcacaccgtcaaaagagtcggactcaggcccttaagcaaaagatgcgaagtacaaaactgcttcggctcattgacttagatttttcatttactttctctctcttggatctaccaccagtaaatgaatatgacatgtatatcagaaactttgggaaaaaaaataccaagcaggcatatgttcagtgtaacgaagataatgttgaaagagacattcaaacggaggaaatagagaccagggaagtgtggacccagcacccgggagaaagtactgttgtatctggaggcagtgaacaaagagatacctctgatgctgtagttatgccaaagattgatactccaaggttatgtagctttctgcgggctgcttgtcaggtgatggccgttttgctggaagaggatcgcttggcagctgaacccagctggaatcttagggctcaagacagggccctgtattttagtgacagctcatctcagctgaacaccagtctaccattccttcaaaatcgaaaagtatcctccttgcacacctcccgagttcagaggcagatggtggtctccgttcacgacttacccgagaagagctttgtgcccctgctggacagcaaatacgtcctctgtgtgtgggatatttggcagccttcagggccacagaaagttctgatatgtgagtcccaggtcacgtgttgctgcttgagccctttgaaagcatttttactgtttgccggaacagcgcacggctcagttgtcgtctgggatttgagagaagactcaaggctgcattactctgtgacgctgagcgatggcttctggacgttccggaccgccacgttttccaccgatggaatccttacctcagtaaaccaccgaagccctcttcaagcagtagaacctatctcaacgtccgtccacaaaaagcagagctttgtgctttcacccttttctactcaagaagaaatgtcaggtttgtccttccacatcgcttccttggatgagagtggggttctcaatgtatgggtggttgttgaattaccaaaggcagacatcgcaggttcaataagtgatttaggtctgatgcctggagggagggtcaagctggtacatagtgctctgatccagttgggtgacagtctttcccataaaggtaatgaattttggggcactacacaaacactgaatgttaaatttctgccttcagatcctaatcactttattattggcacagacatgggtctcataagccatggcacaagacaagatttgagagtggctcccaaactattcaaacctcagcaacatggtataagaccagtgaaagttaatgtcattgatttttcaccatttggagaaccaatatttttggccggctgttcggacggaagcatcaggctgcaccagctgagctccgcgtttccgctcctgcagtgggacagcagcacggacagccatgcggtcaccggcctgcagtggtccccaaccaggcctgccgtgttcctggtgcaggacgacacatccaacatctacatctgggacctcctccagagcgatctgggtcctgtcgccaaacagcaggtctcccccaacaggctggtggccatggctgcggtgggtgagcctgagaaggctggtggcagcttcctggccctggtgctggccagggcgtctggctccatcgacatccagcacctgaagaggcggtgggcggccccggaggtggacgagtgcaacaggctgcgtctgcttttgcaggaagccctgtggccagagggaaaactgcacaagtagcgggtgtggctgagaggaccgcgtttctgtaatgacccagatttaaaagacataaggtggataattctacatttgtgtgcaagtatatttatgtatatagactatgtatattctgtatataatttattttacatgaatatgtctttggtattcccagtaaatagatgactacttttgagtggaaacaaagaacattctagcatttacaaaacttccaggggaatgtagagccacgtccagggtgctcttttctgagagtatttcgagttatttttagaacagtttaaatattgtcacattactgctagattttaaacagcctaccatgaaaatgtatcttaatgaactattttcttatgcataaagtatgtgaacacatgtctaaattaaaaggaattactccaccgaaa

SEQ ID NO: 199916 - DNA, 2769 bp, Homo sapiens
  Payload ID: 19436
  Gene Name: WD repeat domain 60
  ENST ID: ENST00000444851
  CDS Start-End: 1-1569
gacaacaaacaccgagaaaaaagcagcacaagggaaaaaagagagaaatattccaaagagaaaagtaattcattctctgacaaaggggaagaaagacataaagaaaagcgacacaaagaaggttttcattttgatgatgagaggcaccaaagcaacgtggatagaaaagagaaatcggcaaaagatgagcccaggaaaagggaatcccagaatggtgaacacagaaatcgaggtgcaagctcaaaaagagatgggaccagcagccagcatgctgagaatttagtaaggaatcatggaaaagataaagattcaagacggaagcatggccacgaggaaggctcttctgtgtggtggaagctggaccagaggccgggaggcgaggaaaccgtggaaattgaaaaggaagaaactgatttagaaaatgctagagctgatgcatatacagccagttgtgaagatgattttgaagactatgaagatgactttgaggtttgtgatggtgatgatgatgaaagcagtaatgaacctgagtcaagagaaaaactggaagaacttcctctagctcaaaaaaaggaaatacaagaaattcaaagagctattaatgcagaaaatgaaaggattggcgagttatctttgaaactgtttcagaagcgaggtagaacagaatttgaaaaggagcccaggacagatacaaacagttccccttccagagcctctgtttgtggaatttttgtggattttgcctcagcttcacaccgtcaaaagagtcggactcaggcccttaagcaaaagatgcgaagtacaaaactgcttcggctcattgacttagatttttcatttactttctctctcttggatctaccaccagtaaatgaatatgacatgtatatcagaaactttgggaaaaaaaataccaagcaggcatatgttcagtgtaacgaagataatgttgaaagagacattcaaacggaggaaatagagaccagggaagtgtggacccagcacccgggagaaagtactgttgtatctggaggcagtgaacaaagagatacctctgatgctgtagttatgccaaagattgatactccaaggttatgtagctttctgcgggctgcttgtcaggtgatggccgttttgctggaagaggatcgcttggcagctgaacccagctggaatcttagggctcaagacagggccctgtattttagtgacagctcatctcagctgaacaccagtctaccattccttcaaagtcacgtgttgctgcttgagccctttgaaagcatttttactgtttgccggaacagcgcacggctcagttgtcgtctgggatttgagagaagactcaaggctgcattactctgtgacgctgagcgatggcttctggacgttccggaccgccacgttttccaccgatggaatccttacctcagtaaaccaccgaagccctcttcaagcagtagaacctatctcaacgtccgtccacaaaaagcagagctttgtgctttcacccttttctactcaagaagaaatgtcaggtttgtccttccacatcgcttccttggatgagagtggggttctcaatgtatgggtggttgttgaattaccaaaggcagacatcgcaggttcaataagtgatttaggtctgatgcctggagggagggtcaagctggtacatagtgctctgatccagttgggtgacagtctttcccataaaggtaatgaattttggggcactacacaaacactgaatgttaaatttctgccttcagatcctaatcactttattattggcacagacatgggtctcataagccatggcacaagacaagatttgagagtggctcccaaactattcaaacctcagcaacatggtataagaccagtgaaagttaatgtcattgatttttcaccatttggagaaccaatatttttggccggctgttcggacggaagcatcaggctgcaccagctgagctccgcgtttccgctcctgcagtgggacagcagcacggacagccatgcggtcaccggcctgcagtggtccccaaccaggcctgccgtgttcctggtgcaggacgacacatccaacatctacatctgggacctcctccagagcgatctgggtcctgtcgccaaacagcaggtctcccccaacaggctggtggccatggctgcggtgggtgagcctgagaaggctggtggcagcttcctggccctggtgctggccagggcgtctggctccatcgacatccagcacctgaagaggcggtgggcggccccggaggtggacgagtgcaacaggctgcgtctgcttttgcaggaagccctgtggccagagggaaaactgcacaagtagcgggtgtggctgagaggaccgcgtttctgtaatgacccagatttaaaagacataaggtggataattctacatttgtgtgcaagtatatttatgtatatagactatgtatattctgtatataatttattttacatgaatatgtctttggtattcccagtaaatagatgactacttttgagtggaaacaaagaacattctagcatttacaaaacttccaggggaatgtagagccacgtccagggtgctcttttctgagagtatttcgagttatttttagaacagtttaaatattgtcacattactgctagattttaaacagcctaccatgaaaatgtatcttaatgaactattttcttatgcataaagtatgtgaacacatgtctaaattaaaaggaattactccaccgaaa

SEQ ID NO: 199917 - DNA, 812 bp, Homo sapiens
  Payload ID: 19436
  Gene Name: WD repeat domain 60
  ENST ID: ENST00000454771
  CDS Start-End: 1-591
tcagatcctaatcactttattattggcacagacatgggtctcataagccatggcacaagacaagatttgagagtggctcccaaactattcaaacctcagcaacatggtataagaccagtgaaagttaatgtcattgatttttcaccatttggagaaccaatatttttggccggctgttcggacggaagcatcaggctgcaccagctgagctccgcgtttccgctcctgcagtgggacagcagcacggacagccatgcggtcaccggcctgcagtggtccccaaccaggcctgccgtgttcctggtgcaggacgacacatccaacatctacatctgggacctcctccagagcgatctgggtcctgtcgccaaacagcaggtctcccccaacaggctggtggccatggctgcggtgggtgagcctgagaaggctggtggcagcttcctggccctggtgctggccagggcgtctggctccatcgacatccagcacctgaagaggcggtgggcggccccggaggtggacgagtgcaacaggctgcgtctgcttttgcaggaagccctgtggccagagggaaaactgcacaagtagcgggtgtggctgagaggaccgcgtttctgtaatgacccagatttaaaagacataaggctgtgatgccacaaagcaaatgaagaggcgagaaggcgacagggcttggagccggaacctcagcttgatgcccagatctgtggagcagccctgtccccaggcaagtcgccgactgcttcagatcccagtgcccggtggggactatacgtgccctgcttacctcc

SEQ ID NO: 199918 - DNA, 1387 bp, Homo sapiens
  Payload ID: 19437
  Gene Name: WD repeat domain 61
  Uniprot ID: Q9GZS3
  ENST ID: ENST00000267973
  CDS Start-End: 273-1190
aaatttccaactaccactcctctggaagcaggacctggcttcctccctcctctctccgcccaccctcgtcggcgtctgccccgcgcccgccatagcgacggcaacgggcgctgcggagtgctccgagccgtgagggcggggccggcgcgatgccccgccccttcgatagctcatctttgcgcgtcgcagtcgcgcggagcccggcttccgacgtgcagcctggcagtgcagtgagctgtctggccttttgtccttgatccttggttaaggaaatgaccaaccagtacggtattctcttcaaacaagagcaagcccatgatgatgccatttggtcagttgcttgggggacaaacaagaaggaaaactctgagacagtggtcacaggctccctagatgacctggtgaaggtctggaaatggcgtgatgagaggctggacctacagtggagtctggagggacatcagctgggagtggtgtctgtggacatcagccacaccctgcccattgctgcatccagctctcttgatgctcatattcgtctttgggacttggaaaatggcaaacagataaagtccatagatgcaggacctgtggatgcctggactttggccttttctcctgattcccagtatctggccacaggaactcatgtcgggaaagtgaacatttttggtgtggaaagtgggaaaaaggaatattctttggacacgagaggaaaattcattcttagtattgcatatagtcctgatgggaaatacctagccagtggagccatagatggaatcatcaatatttttgatattgcaactggaaaacttctgcataccctggaaggccatgccatgcccattcgctccttgaccttttccccggactcccagctccttgtcactgcttcagatgatggctacatcaagatctatgatgtacaacatgccaatttggctggcacgctgagcggccatgcctcctgggtgctgaacgttgcattctgtcctgatgacactcactttgtttccagttcgtctgacaaaagtgtaaaagtttgggatgttggaacgaggacttgtgttcacaccttctttgatcaccaggatcaggtctggggagtaaaatacaatggaaatggttcaaaaattgtgtctgttggagatgaccaggaaattcacatctatgattgtccaatttaaacatcaaagtctccaggcttatgctgcaaagagaatgtacggattgatcatgacattccttaccttcttaggcttgtttaaaagaaatatagcatttattgtagcaaagacttaaattttgtagatacaatatgaatcttttcatgttttattggaaatgctgttcatactttaacataaagctttcttaatgcaaa

SEQ ID NO: 199919 - DNA, 884 bp, Homo sapiens
  Payload ID: 19437
  Gene Name: WD repeat domain 61
  ENST ID: ENST00000558459
  CDS Start-End: 70-708
gcttccgacgtgcagcctggcagtgcagtgagctgtctggccttttgtccttgatccttggttaaggaaatgaccaaccagtacggtattctcttcaaacaagagcaagtggatgcctggactttggccttttctcctgattcccagtatctggccacaggaactcatgtcgggaaagtgaacatttttggtgtggaaagtgggaaaaaggaatattctttggacacgagaggaaaattcattcttagtattgcatatagtcctgatgggaaatacctagccagtggagccatagatggaatcatcaatatttttgatattgcaactggaaaacttctgcataccctggaaggccatgccatgcccattcgctccttgaccttttccccggactcccagctccttgtcactgcttcagatgatggctacatcaagatctatgatgtacaacatgccaatttggctggcacgctgagcggccatgcctcctgggtgctgaacgttgcattctgtcctgatgacactcactttgtttccagttcgtctgacaaaagtgtaaaagtttgggatgttggaacgaggacttgtgttcacaccttctttgatcaccaggatcaggtctggggagtaaaatacaatggaaatggttcaaaaattgtgtctgttggagatgaccaggaaattcacatctatgattgtccaatttaaacatcaaagtctccaggcttatgctgcaaagagaatgtacggattgatcatgacattccttaccttcttaggcttgtttaaaagaaatatagcatttattgtagcaaagacttaaattttgtagatacaatatgaatcttttcatgttttattggaaatgctgttcatactttaac

SEQ ID NO: 199920 - DNA, 463 bp, Homo sapiens
  Payload ID: 19437
  Gene Name: WD repeat domain 61
  ENST ID: ENST00000558453
  CDS Start-End: 1-219
cttctgcataccctggaaggccatgccatgcccattcgctccttgaccttttccccggactcccagctccttgtcactgcttcagatgatggctacatcaagatctatgatgtgtgtcgcttcttgctgctctcaagccctactccccatgcttctgcttctagcttgctgggagctgggaaactgaccaagcatggaaaactacagcaatgctcataacaggctaaaaggctctggggaagaaggcatttcaacagcagaaaagaggaagaagagggagaagagaaaatggagaaacaagaaataagccaacacaaaagaggggtgaagaaaagagagggtgcaaaagagaacaaagtaaaaacaaaaacaaaacaaaaaggacaaacaaatccccaaagaactctccaacggcaggtttcctggatgctccacccttccttataataaagaaggaaatgga

SEQ ID NO: 199921 - DNA, 832 bp, Homo sapiens
  Payload ID: 19437
  Gene Name: WD repeat domain 61
  ENST ID: ENST00000560610
  CDS Start-End: 80-226
gcggagcccggcttccgacgtgcagcctggcagtgcagtgagctgtctggccttttgtccttgatccttggttaaggaaatgaccaaccagtacggtattctcttcaaacaagagcaagcccatgatgatgccatttggtcagttgcttgggggacaaacaagaaggaaaactctgagacagtggtcacaggctccctagatgacctggtgaaggtctggaaatgaccattggtattgcatagtcacagggacccagaatttcagatgccaggtaaagtgtgttctttgtgaagaaatccatttctctgtcccctgttgaaggcgtgatgagaggctggacctacagtggagtctggagggacatcagctgggagtggtgtctgtggacatcagccacaccctgcccattgctgcatccagctctcttgatgctcatattcgtctttgggacttggaaaatggcaaacagataaagtccatagatgcaggacctgtggatgcctggactttggccttttctcctgattcccagtatctggccacaggaactcatgtcgggaaagtgaacatttttggtgtggaaagtgggaaaaaggaatattctttggacacgagaggaaaattcattcttagtattgcatatagtcctgatgggaaatacctagccagtggagccatagatggaatcatcaatatttttgatattgcaactggaaaacttctgcataccctggaaggccatgccatgcccattcgctccttgaccttttccccggactcccagctccttgtcactgcttcagatgatggctacatcaagatctatgatgt

SEQ ID NO: 199922 - DNA, 756 bp, Homo sapiens
  Payload ID: 19437
  Gene Name: WD repeat domain 61
  ENST ID: ENST00000559848
  CDS Start-End: 76-645
agcccggcttccgacgtgcagcctggcagtgcagtgagctgtctggccttttgtccttgatccttggttaaggaaatgaccaaccagtacggtattctcttcaaacaagagcaagcccatgatgatgccatttggtcagttgcttgggggacaaacaagaaggaaaactctgagacagtggtcacaggctccctagatgacctggtgaaggtctggaaatggcgtgatgagaggctggacctacagtggagtctggagggacatcagctgggagtggtgtctgtggacatcagccacaccctgcccattgctgcatccagctctcttgatgctcatattcgtctttgggacttggaaaatggcaaacagataaagtccatagatgcaggacctgtggatgcctggactttggccttttctcctgattcccagtatctggccacaggaactcatgtcgggaaagtgaacatttttggtgtggaaagtgggaaaaaggaatattctttggacacgagaggaaaattcattcttagtattgcatatagtcctgatgggaaatacctagccagtggagccatagatggaatcatcaatatttttgatattgcaactggaaaacttctgcataccctggaaggtggatgaaagtattgtgcccactgtccacaccggtggcctctggaaaggaggactgggtagctaaagaacaggggccatgccatgcccattcgctccttgaccttttccccggactcc

SEQ ID NO: 199923 - DNA, 1266 bp, Homo sapiens
  Payload ID: 19437
  Gene Name: WD repeat domain 61
  Uniprot ID: Q9GZS3
  ENST ID: ENST00000558311
  CDS Start-End: 152-1069
tcgcgcggagcccggcttccgacgtgcagcctggcagtgcagtggggaacttcctgtgtgccttctatcctgatgacaccccctcactgaaatcctggtgttgtttccacagagctgtctggccttttgtccttgatccttggttaaggaaatgaccaaccagtacggtattctcttcaaacaagagcaagcccatgatgatgccatttggtcagttgcttgggggacaaacaagaaggaaaactctgagacagtggtcacaggctccctagatgacctggtgaaggtctggaaatggcgtgatgagaggctggacctacagtggagtctggagggacatcagctgggagtggtgtctgtggacatcagccacaccctgcccattgctgcatccagctctcttgatgctcatattcgtctttgggacttggaaaatggcaaacagataaagtccatagatgcaggacctgtggatgcctggactttggccttttctcctgattcccagtatctggccacaggaactcatgtcgggaaagtgaacatttttggtgtggaaagtgggaaaaaggaatattctttggacacgagaggaaaattcattcttagtattgcatatagtcctgatgggaaatacctagccagtggagccatagatggaatcatcaatatttttgatattgcaactggaaaacttctgcataccctggaaggccatgccatgcccattcgctccttgaccttttccccggactcccagctccttgtcactgcttcagatgatggctacatcaagatctatgatgtacaacatgccaatttggctggcacgctgagcggccatgcctcctgggtgctgaacgttgcattctgtcctgatgacactcactttgtttccagttcgtctgacaaaagtgtaaaagtttgggatgttggaacgaggacttgtgttcacaccttctttgatcaccaggatcaggtctggggagtaaaatacaatggaaatggttcaaaaattgtgtctgttggagatgaccaggaaattcacatctatgattgtccaatttaaacatcaaagtctccaggcttatgctgcaaagagaatgtacggattgatcatgacattccttaccttcttaggcttgtttaaaagaaatatagcatttattgtagcaaagacttaaattttgtagatacaatatgaatcttttcatgttttattggaaatgctgttcatactttaacataaagctttcttaatgcaaa

SEQ ID NO: 199924 - DNA, 1036 bp, Homo sapiens
  Payload ID: 19437
  Gene Name: WD repeat domain 61
  ENST ID: ENST00000560569
  CDS Start-End: 155-1036
agtgcagtggtgagttggagcgcagggccgttggggattggggtcattagggccgttgacagtccaggccagagggcgagtgagcgaggttgggcccgaggctgcctgtaagcagagctgtctggccttttgtccttgatccttggttaaggaaatgaccaaccagtacggtattctcttcaaacaagagcaagcccatgatgatgccatttggtcagttgcttgggggacaaacaagaaggaaaactctgagacagtggtcacaggctccctagatgacctggtgaaggtctggaaatggcgtgatgagaggctggacctacagtggagtctggagggacatcagctgggagtggtgtctgtggacatcagccacaccctgcccattgctgcatccagctctcttgatgctcatattcgtctttgggacttggaaaatggcaaacagataaagtccatagatgcaggacctgtggatgcctggactttggccttttctcctgattcccagtatctggccacaggaactcatgtcgggaaagtgaacatttttggtgtggaaagtgggaaaaaggaatattctttggacacgagaggaaaattcattcttagtattgcatatagtcctgatgggaaatacctagccagtggagccatagatggaatcatcaatatttttgatattgcaactggaaaacttctgcataccctggaaggccatgccatgcccattcgctccttgaccttttccccggactcccagctccttgtcactgcttcagatgatggctacatcaagatctatgatgtacaacatgccaatttggctggcacgctgagcggccatgcctcctgggtgctgaacgttgcattctgtcctgatgacactcactttgtttccagttcgtctgacaaaagtgtaaaagtttgggatgttggaacgaggacttgtgttcacaccttctttgatcaccaggatcaggtctggggagtaaaatacaatggaaatggttcaaaaattgtgtctgttggagat

SEQ ID NO: 199925 - DNA, 789 bp, Homo sapiens
  Payload ID: 19437
  Gene Name: WD repeat domain 61
  ENST ID: ENST00000560807
  CDS Start-End: 1-490
gaacatttttggtgtggaaagtgggaaaaaggaatattctttggacacgagaggaaaattcattcttagtattgcatatagtcctgatgggaaatacctagccagtggagccatagatggaatcatcaatatttttgatattgcaactggaaaacttctgcataccctggaaggccatgccatgcccattcgctccttgaccttttccccggactcccagctccttgtcactgcttcagatgatggctacatcaagatctatgatgtacaacatgccaatttggctggcacgctgagcggccatgcctcctgggtgctgaacgttgcattctgtcctgatgacactcactttgtttccagttcgtctgacaaaagtgtaaaagtttgggatgttggaacgaggacttgtgttcacaccttctttgatcaccaggatcaggtgtcgcttcttgctgctctcaagccctactccccatgcttctgcttctagcttgctgggagctgggaaactgaccaagcatggaaaactacagcaatgctcataacaggctaaaaggctctggggaagaaggcatttcaacagcagaaaagaggaagaagagggagaagagaaaatggagaaacaagaaataagccaacacaaaagaggggtgaagaaaagagagggtgcaaaagagaacaaagtaaaaacaaaaacaaaacaaaaaggacaaacaaatccccaaagaactctccaacggcaggtttcctggatgctccacccttccttataataaagaaggaaatgga

SEQ ID NO: 199926 - DNA, 4632 bp, Homo sapiens
  Payload ID: 19438
  Gene Name: WD repeat domain 62
  Uniprot ID: O43379
  ENST ID: ENST00000270301
  CDS Start-End: 1-4557
atggcggccgtagggtccggaggctatgcgcggaacgatgcaggggagaagctgccctctgtcatggcgggagttccggcgcggaggggccagtcctccccgccccccgccccaccaatctgcctacggcggcggacgcgactctcgacggcctccgaggagacggtgcagaaccgggtgtcactcgagaaggtgcttggcatcacagcccagaacagcagtggcctaacctgtgaccccggcacaggccatgtggcctacctggcaggctgtgtggtggtgattttggaccccaaggagaacaagcagcagcacatctttaacaccgccaggaagtctctcagtgctctggccttctcccctgatgggaagtacatagtgacaggggagaatgggcataggcctgctgtgcgcatctgggatgtggaggagaagaatcaggtggcggagatgctaggccacaagtatggtgtggcgtgtgtggccttctcacccaatatgaagcacatcgtgtccatgggctaccaacatgacatggtgctcaacgtctgggactggaagaaagacatcgtagtggcctccaacaaggtatcttgtagagtcattgccctctccttctcagaggacagcagctattttgtcactgttgggaaccgccatgtgaggttctggttcttggaagtctccactgagacaaaggtgacgagcacagtgccccttgtagggcgctcgggcatcctgggcgagctgcacaacaacatcttctgtggtgtggcctgcggtcggggccggatggcgggcagtaccttctgtgtgtcctactcgggcctcctctgccagttcaatgagaagagggtgctggagaagtggatcaacctgaaggtctccctgtcttcctgcctctgtgtcagccaggagctcatcttctgtggctgcacagatgggatagtccgcatcttccaggcccatagcctgcactacctcgccaacctgcccaagccacactaccttggggtagacgtggcacagggcctggagcccagcttcctcttccacaggaaggcggaagcagtctacccagatacagtggcactgaccttcgaccccatccaccagtggctgtcctgcgtgtataaggaccacagcatctacatctgggatgtcaaggacatcaacagagtgggcaaggtgtggtcagagctcttccacagctcctacgtttggaacgtggaggtgtatcctgagtttgaagaccagagagcttgtttgccatcaggatcctttctgacttgttcttcagacaacaccattcgcttctggaacttggacagcagccctgattctcactggcagaaaaacatcttcagcaataccctgctgaaggtcgtgtacgtggagaatgacatccagcacctgcaggacatgtcacacttcccagaccgggggagcgagaatgggacacccatggacgtgaaagccggggtgcgggtcatgcaggtcagtcctgacggccagcatttggcttcaggcgaccgaagtggaaatctgaggatccacgagctgcacttcatggacgagctggtcaaggtggaggcccatgatgctgaggtgctgtgcctggagtactccaagccagagacggggctgaccttgctggcctcagccagtcgggaccggctgatccatgtgctgaacgtggagaagaactacaacctggagcagacgctggatgaccactcctcctccatcaccgccatcaagttcgctggcaacagagacatccagatgatcagctgtggggctgacaagagcatctactttcgcagtgcccagcagggttcggatggactacactttgtccgtacccaccacgtagcagagaaaaccaccttgtatgacatggacattgacatcacccagaagtacgtggccgtggcctgccaggaccgcaatgtgagagtctacaacactgtgaacgggaagcagaagaagtgctacaagggctcccagggtgacgaagggtccttgctgaaggtccatgtggacccctcaggcaccttcctggccaccagctgctctgacaaaagcatctcagtgattgacttttactcgggcgagtgcattgccaagatgtttggccattcagaaattattaccagcatgaagttcacctatgactgtcatcacttgatcacagtatctggagacagctgcgtgttcatctggcacctgggcccggagatcaccaactgcatgaagcagcacttgctggagattgaccaccggcagcagcagcagcacacaaatgacaagaagcggagtggccaccccaggcaggatacgtatgtgtccacacctagtgagattcactccctgagccctggagagcaaacagaggatgatctggaggaagagtgtgagccagaagagatgctgaagacaccatccaaagatagcttggatccagatcctcgttgcctgctaaccaacggcaagctgccactgtgggcaaagcggctgctaggggacgatgatgtggcagatggcttggccttccacgccaagcgcagctaccagccccacggccgctgggcagagcgggccggccaagagcccctcaagaccatcctggatgcccaggacctggattgctactttacccccatgaagcccgagagtctggagaactccattctggattcactggagccacagagcctggccagcctgctgagtgagtcagagagtccccaggaagctggccgcgggcacccctccttcctgccccagcagaaggaatcatctgaggccagtgagctcatcctctactctctggaggcagaagtgacagtcacagggacagacagccagtattgcaggaaggaggtggaggccgggcctggagaccagcagggcgactcctacctcagggtgtcctccgacagcccaaaggaccagagcccgcctgaggactcgggggagtcagaggccgacctggagtgcagcttcgcagccatccactccccagctccgcctcctgaccctgcccctcggtttgccacgtcgctgccccatttcccaggatgcgcaggtcccacagaagatgagctgtccctgcccgagggacccagcgtccccagcagctccctaccccagactccggagcaggagaagttcctccgccaccactttgagacactgactgagtccccctgcagagctctgggagacgtggaggcctctgaagctgaagaccacttcttcaacccacgcctgagtatctccacgcagttcctctcaagcctccagaaggcatccaggttcacccataccttccctccccgggcaacccagtgccttgtgaagtctccagaggtcaagctcatggaccgaggcggaagccagcccagagcaggtactggctacgcctccccagacaggacccacgtcctcgctgcagggaaggctgaagagaccctggaggcctggcgcccaccacctccctgccttacgagcctggcgtcctgtgtccctgcttcctccgtgctgcccacagacaggaatctcccaacgcccacatctgcacccaccccaggcctggctcagggtgtccatgccccctccacctgttcctacatggaggccactgccagctcccgtgccaggatatcacgcagcatctccctcggtgacagtgagggccctatcgtggccacactggcccagcccctccgtaggccatcgtccgttggggagctggcctccttgggccaggagcttcaggccatcaccaccgcgacaacacccagtttggacagtgagggccaagagcctgccctgcgttcctggggcaaccacgaggcccgggccaacctgagactgaccctgtcaagtgcctgtgatgggctcctgcagccccccgtggatacccagcctggcgtcaccgtccctgcagtgagcttcccagcccctagccctgtggaagagagcgccctgaggctccacggctctgcctttcgcccaagtctcccagctcctgagtcccctggccttcctgcccaccccagtaacccccagcttccagaggcccggcctggcatccctggcggcactgcctccctcctggagcccacctccggtgcacttggtctgttacagggcagccctgcccgctggagtgagccctgggtgccggttgaagccctgcccccatctccccttgagctgagcagggtggggaacatcttgcacaggctgcagaccaccttccaagaagccctcgacctttaccgtgtgttggtctccagtggccaggtggacaccgggcagcagcaggcacggactgagctggtctccaccttcctgtggatccacagccagctggaggctgaatgcctggtggggactagtgtggccccagcccaggctctgcccagcccaggacccccgtccccaccgacgctgtaccccctggccagcccagacctgcaggccctgctggaacactactcggagctgctggtgcaggccgtgcggaggaaggcacgggggcactgagggcgcagcccctccaccgcagccctgctgcttctgaggacttaggtattttaagcgaataaactgacagctttg

SEQ ID NO: 199927 - DNA, 4682 bp, Homo sapiens
  Payload ID: 19438
  Gene Name: WD repeat domain 62
  Uniprot ID: O43379
  ENST ID: ENST00000401500
  CDS Start-End: 36-4607
aggggatgtaacggtcgcccgcctccggcgtgacgatggcggccgtagggtccggaggctatgcgcggaacgatgcaggggagaagctgccctctgtcatggcgggagttccggcgcggaggggccagtcctccccgccccccgccccaccaatctgcctacggcggcggacgcgactctcgacggcctccgaggagacggtgcagaaccgggtgtcactcgagaaggtgcttggcatcacagcccagaacagcagtggcctaacctgtgaccccggcacaggccatgtggcctacctggcaggctgtgtggtggtgattttggaccccaaggagaacaagcagcagcacatctttaacaccgccaggaagtctctcagtgctctggccttctcccctgatgggaagtacatagtgacaggggagaatgggcataggcctgctgtgcgcatctgggatgtggaggagaagaatcaggtggcggagatgctaggccacaagtatggtgtggcgtgtgtggccttctcacccaatatgaagcacatcgtgtccatgggctaccaacatgacatggtgctcaacgtctgggactggaagaaagacatcgtagtggcctccaacaaggtatcttgtagagtcattgccctctccttctcagaggacagcagctattttgtcactgttgggaaccgccatgtgaggttctggttcttggaagtctccactgagacaaaggtgacgagcacagtgccccttgtagggcgctcgggcatcctgggcgagctgcacaacaacatcttctgtggtgtggcctgcggtcggggccggatggcgggcagtaccttctgtgtgtcctactcgggcctcctctgccagttcaatgagaagagggtgctggagaagtggatcaacctgaaggtctccctgtcttcctgcctctgtgtcagccaggagctcatcttctgtggctgcacagatgggatagtccgcatcttccaggcccatagcctgcactacctcgccaacctgcccaagccacactaccttggggtagacgtggcacagggcctggagcccagcttcctcttccacaggaaggcggaagcagtctacccagatacagtggcactgaccttcgaccccatccaccagtggctgtcctgcgtgtataaggaccacagcatctacatctgggatgtcaaggacatcaacagagtgggcaaggtgtggtcagagctcttccacagctcctacgtttggaacgtggaggtgtatcctgagtttgaagaccagagagcttgtttgccatcaggatcctttctgacttgttcttcagacaacaccattcgcttctggaacttggacagcagccctgattctcactggcagaaaaacatcttcagcaataccctgctgaaggtcgtgtacgtggagaatgacatccagcacctgcaggacatgtcacacttcccagaccgggggagcgagaatgggacacccatggacgtgaaagccggggtgcgggtcatgcaggtcagtcctgacggccagcatttggcttcaggcgaccgaagtggaaatctgaggatccacgagctgcacttcatggacgagctggtcaaggtggaggcccatgatgctgaggtgctgtgcctggagtactccaagccagagacggggctgaccttgctggcctcagccagtcgggaccggctgatccatgtgctgaacgtggagaagaactacaacctggagcagacgctggatgaccactcctcctccatcaccgccatcaagttcgctggcaacagagacatccagatgatcagctgtggggctgacaagagcatctactttcgcagtgcccagcagggttcggatggactacactttgtccgtacccaccacgtagcagagaaaaccaccttgtatgacatggacattgacatcacccagaagtacgtggccgtggcctgccaggaccgcaatgtgagagtctacaacactgtgaacgggaagcagaagaagtgctacaagggctcccagggtgacgaagggtccttgctgaaggtccatgtggacccctcaggcaccttcctggccaccagctgctctgacaaaagcatctcagtgattgacttttactcgggcgagtgcattgccaagatgtttggccattcagaaattattaccagcatgaagttcacctatgactgtcatcacttgatcacagtatctggagacagctgcgtgttcatctggcacctgggcccggagatcaccaactgcatgaagcagcacttgctggagattgaccaccggcagcagcagcagcacacaaatgacaagaagcggagtggccaccccaggcaggatacgtatgtgtccacacctagtgagattcactccctgagccctggagagcaaacagaggatgatctggaggaagagtgtgagccagaagagatgctgaagacaccatccaaagatagcttggatccagatcctcgttgcctgctaaccaacggcaagctgccactgtgggcaaagcggctgctaggggacgatgatgtggcagatggcttggccttccacgccaagcgcagctaccagccccacggccgctgggcagagcgggccggccaagagcccctcaagaccatcctggatgcccaggacctggattgctactttacccccatgaagcccgagagtctggagaactccattctggattcactggagccacagagcctggccagcctgctgagtgagtcagagagtccccaggaagctggccgcgggcacccctccttcctgccccagcagaaggaatcatctgaggccagtgagctcatcctctactctctggaggcagaagtgacagtcacagggacagacagccagtattgcaggaaggaggtggaggccgggcctggagaccagcagggcgactcctacctcagggtgtcctccgacagcccaaaggaccagagcccgcctgaggactcgggggagtcagaggccgacctggagtgcagcttcgcagccatccactccccagctccgcctcctgaccctgcccctcggtttgccacgtcgctgccccatttcccaggatgcgcaggtcccacagaagatgagctgtccctgcccgagggacccagcgtccccagcagctccctaccccagactccggagcaggagaagttcctccgccaccactttgagacactgactgagtccccctgcagagagctcttccccgcagctctgggagacgtggaggcctctgaagctgaagaccacttcttcaacccacgcctgagtatctccacgcagttcctctcaagcctccagaaggcatccaggttcacccataccttccctccccgggcaacccagtgccttgtgaagtctccagaggtcaagctcatggaccgaggcggaagccagcccagagcaggtactggctacgcctccccagacaggacccacgtcctcgctgcagggaaggctgaagagaccctggaggcctggcgcccaccacctccctgccttacgagcctggcgtcctgtgtccctgcttcctccgtgctgcccacagacaggaatctcccaacgcccacatctgcacccaccccaggcctggctcagggtgtccatgccccctccacctgttcctacatggaggccactgccagctcccgtgccaggatatcacgcagcatctccctcggtgacagtgagggccctatcgtggccacactggcccagcccctccgtaggccatcgtccgttggggagctggcctccttgggccaggagcttcaggccatcaccaccgcgacaacacccagtttggacagtgagggccaagagcctgccctgcgttcctggggcaaccacgaggcccgggccaacctgagactgaccctgtcaagtgcctgtgatgggctcctgcagccccccgtggatacccagcctggcgtcaccgtccctgcagtgagcttcccagcccctagccctgtggaagagagcgccctgaggctccacggctctgcctttcgcccaagtctcccagctcctgagtcccctggccttcctgcccaccccagtaacccccagcttccagaggcccggcctggcatccctggcggcactgcctccctcctggagcccacctccggtgcacttggtctgttacagggcagccctgcccgctggagtgagccctgggtgccggttgaagccctgcccccatctccccttgagctgagcagggtggggaacatcttgcacaggctgcagaccaccttccaagaagccctcgacctttaccgtgtgttggtctccagtggccaggtggacaccgggcagcagcaggcacggactgagctggtctccaccttcctgtggatccacagccagctggaggctgaatgcctggtggggactagtgtggccccagcccaggctctgcccagcccaggacccccgtccccaccgacgctgtaccccctggccagcccagacctgcaggccctgctggaacactactcggagctgctggtgcaggccgtgcggaggaaggcacgggggcactgagggcgcagcccctccaccgcagccctgctgcttctgaggacttaggtattttaagcgaataaactgacagctttg

SEQ ID NO: 199928 - DNA, 955 bp, Homo sapiens
  Payload ID: 19438
  Gene Name: WD repeat domain 62
  ENST ID: ENST00000427823
  CDS Start-End: 1-955
ggaggctatgcgcggaacgatgcaggggagaagctgccctctgtcatggcgggagttccggcgcggaggggccagtcctccccgccccccgccccaccaatctgcctacggcggcggacgcgactctcgacggcctccgaggagacggtgcagaaccgggtgtcactcgagaaggtgcttggcatcacagcccagaacagcagtggcctaacctgtgaccccggcacaggccatgtggcctacctggcaggaatgtggagaatggggcctgcctctgagagctgtggagaggattccatagccccctctctgtctagaacagttcctggcatgtactgtgtggtggtgattttggaccccaaggagaacaagcagcagcacatctttaacaccgccaggaagtctctcagtgctctggccttctcccctgatgggaagtacatagtgacaggggagaatgggcataggcctgctgtgcgcatctgggatgtggaggagaagaatcaggtggcggagatgctaggccacaagtatggtgtggcgtgtgtggccttctcacccaatatgaagcacatcgtgtccatgggctaccaacatgacatggtgctcaacgtctgggactggaagaaagacatcgtagtggcctccaacaaggtatcttgtagagtcattgccctctccttctcagaggacagcagctattttgtcactgttgggaaccgccatgtgaggttctggttcttggaagtctccactgagacaaaggtgacgagcacagtgccccttgtagggcgctcgggcatcctgggcgagctgcacaacaacatcttctgtggtgtggcctgcggtcggggccggatggcgggcagtaccttctgtgtgtcctactcgggcctcctctgccagttcaatgagaagagggtgctggagaagtggatcaacctgaaggtctccc

SEQ ID NO: 199929 - DNA, 5971 bp, Homo sapiens
  Payload ID: 19438
  Gene Name: WD repeat domain 62
  Uniprot ID: O43379
  ENST ID: ENST00000587391
  CDS Start-End: 10-1461
ggcgtgacgatggcggccgtagggtccggaggctatgcgcggaacgatgcaggggagaagctgccctctgtcatggcgggagttccggcgcggaggggccagtcctccccgccccccgccccaccaatctgcctacggcggcggacgcgactctcgacggcctccgaggagacggtgcagaaccgggtgtcactcgagaaggtgcttggcatcacagcccagaacagcagtggcctaacctgtgaccccggcacaggccatgtggcctacctggcaggctgtgtggtggtgattttggaccccaaggagaacaagcagcagcacatctttaacaccgccaggaagtctctcagtgctctggccttctcccctgatgggaagtacatagtgacaggggagaatgggcataggcctgctgtgcgcatctgggatgtggaggagaagaatcaggtggcggagatgctaggccacaagtatggtgtggcgtgtgtggccttctcacccaatatgaagcacatcgtgtccatgggctaccaacatgacatggtgctcaacgtctgggactggaagaaagacatcgtagtggcctccaacaaggtatcttgtagagtcattgccctctccttctcagaggacagcagctattttgtcactgttgggaaccgccatgtgaggttctggttcttggaagtctccactgagacaaaggtgacgagcacagtgccccttgtagggcgctcgggcatcctgggcgagctgcacaacaacatcttctgtggtgtggcctgcggtcggggccggatggcgggcagtaccttctgtgtgtcctactcgggcctcctctgccagttcaatgagaagagggtgctggagaagtggatcaacctgaaggtctccctgtcttcctgcctctgtgtcagccaggagctcatcttctgtggctgcacagatgggatagtccgcatcttccaggcccatagcctgcactacctcgccaacctgcccaagccacactaccttggggtagacgtggcacagggcctggagcccagcttcctcttccacaggaaggcggaagcagtctacccagatacagtggcactgaccttcgaccccatccaccagtggctgtcctgcgtgtataaggaccacagcatctacatctgggatgtcaaggacatcaacagagtgggcaaggtgtggtcagagctcttccacagctcctacgtttggaacgtggaggtgtatcctgagtttgaagaccagagagcttgtttgccatcaggatcctttctgacttgttcttcagacaacaccattcgcttctggaacttggacagcagccctgattctcactggcagaaaaacatcttcagcaatttggctcctgctctgcagatgtgtggacgtggccactcccggcagcccaacacacccagcccaggtgaaattgcttcctaagtcttgagatggaattccctgggagagcacctgatgagccagcccattcagctgccacacaaccctgctgaaggtcgtgtacgtggagaatgacatccagcacctgcaggacatgtcacacttcccagaccgggggagcgagaatgggacacccatggacgtgaaagccggggtgcgggtcatgcaggtcagtcctgacggccagcatttggcttcaggcgaccgaagtggaaatctgaggatccacgagctgcacttcatggacgagctggtcaaggtggaggcccatgatgctgaggtgctgtgcctggagtactccaagccagagacggggctgaccttgctggcctcagccagtcgggaccggctgatccatgtgctgaacgtggagaagaactacaacctggagcagacgctggatgaccactcctcctccatcaccgccatcaagttcgctggcaacagagacatccagatgatcagctgtggggctgacaagagcatctactttcgcagtgcccagcagggttcggatggactacactttgtccgtacccaccacgtagcagagaaaaccaccttgtatgacatggacattgacatcacccagaagtacgtggccgtggcctgccaggaccgcaatgtgagagtctacaacactgtgaacgggaagcagaagaagtgctacaagggctcccagggtgacgaagggtccttgctgaaggtccatgtggacccctcaggcaccttcctggccaccagctgctctgacaaaagcatctcagtgattgacttttactcgggcgagtgcattgccaagatgtttggccattcagaaattattaccagcatgaagttcacctatgactgtcatcacttgatcacagtatctggagacagctgcgtgttcatctggcacctgggcccggagatcaccaactgcatgaagcagcacttgctggagattgaccaccggcagcagcagcagcacacaaatgacaagaagcggagtggccaccccaggcaggatacgtatgtgtccacacctagtgagattcactccctgagccctggagagcaaacagaggatgatctggaggaagagtgtgagccagaagagatgctgaagacaccatccaaagatagcttggatccagatcctcgttgcctgctaaccaacggcaagctgccactgtgggcaaagcggctgctaggggacgatgatgtggcagatggcttggccttccacgccaagcgcagctaccagccccacggccgctgggcagagcgggccggccaagagcccctcaagaccatcctggatgcccaggacctggattgctactttacccccatgaagcccgagagtctggagaactccattctggattcactggagccacagagcctggccagcctgctgagtgagtcagagagtccccaggaagctggccgcgggcacccctccttcctgccccagcagaaggaatcatctgaggccagtgagctcatcctctactctctggaggcagaagtgacagtcacagggacagacagccagtattgcaggaaggaggtggaggccgggcctggagaccagcagggcgactcctacctcagggtgtcctccgacagcccaaaggaccagagcccgcctgagggtgagtgcagggcaggcagggaccctgtgacagtctgtgcgttcagccaagcccctttctgggcaccgatggtgactttgacccagtactgaagctcagagtctgtcgaggaagacacatgtggtccctgctgctgcctgaggattctgggcccagctgcctacagctgagagcccagctctgccacctccttgatgtggaacttcccttattcataaaatggggggcagctgctcttaccatccctcctccagatggggaaactgagcccagggaagggtagccctggccctggctcaccagaatggtcaggctgtgggctcctgaccccgactctgtccttcagactcgggggagtcagaggccgacctggagtgcagcttcgcagccatccactccccagctccgcctcctgaccctgcccctcggtttgccacgtcgctgccccatttcccaggtaagcaggggccagacacgcaggggactcgctgctcgggcctggcttagggccagtcacaatgtctaagcacaggccctgcacttggagcccactgagcctggaagacggggatccctgcttctcagcctgcgggcaacagggcagggatgggtggggcccgctttctccatttcaggtggcgtctgctgtgactcatggtgttggctcctcttgtccctcccctccttccctgtcaggatgcgcaggtcccacagaagatgagctgtccctgcccgagggacccagcgtccccagcagctccctaccccagactccggagcaggagaagttcctccgccaccactttgagacactgactgagtccccctgcagaggtagggccctgcctcacccacacctgccgaggccgtctgtgcagcctgggcacagcattggcgtccctggagttggctccccagcagggccaggagggtgagtggagagcaactgcttcgttttttttgagacggagtctcgctctgttgccaggctggagtgcggtggcccaatcttggctcactgcaacctccgactccctggttcaagcaattctcctgcctcagcctcctgagtagctgggattataggcatccacaaccacgccctgctaattttttgtatttttagtagagatgaggtttcaccatgttggccagactggtctcaaactcctgcctcagatgatctgcccgccttggcctcccaaagtgctgggattacaggcgtgagccaccgtgcccggcccactgcttcactcttgacctgagcctcacgatgcctcctcacccactgcccctgctcgtaccctgtgtctgtacataagggtttctggggagtgccccgctgggctgtgggctggcctagggccagggctgctcggcgggaagggttatgagggtcccctcgggatcttcccctagagctcttccccgcagctctgggagacgtggaggcctctgaagctgaagaccacttcttcaacccacgcctgagtatctccacgcagttcctctcaagcctccagaaggcatccaggttcacccataccttccctccccgggcaacccagtgccttgtgaagtctccagaggtcaagctcatggaccgaggcggaagccagcccagagcaggtactggctacgcctccccagacaggacccacgtcctcgctgcagggaaggctgaagagaccctggaggcctggcgcccaccacctccctgccttacgagcctggcgtcctgtgtccctgcttcctccgtgctgcccacagacaggaatctcccaacgcccacatctgcacccaccccaggcctggctcagggtgtccatgccccctccacctgttcctacatggaggccactgccagctcccgtgccaggatatcacgcagcatctccctcggtgacagtgagggccctatcgtggccacactggcccagcccctccgtaggccatcgtccgttggggagctggcctccttgggccaggagcttcaggccatcaccaccgcgacaacacccagtttggacagtgagggccaagagcctgccctgcgttcctggggcaaccacgaggcccgggccaacctgagactgaccctgtcaagtgcctgtgatgggctcctgcagccccccgtggatacccagcctggcgtcaccgtccctgcagtgagcttcccagcccctagccctgtggaagagagcgccctgaggctccacggctctgcctttcgcccaagtctcccagctcctgagtcccctggccttcctgcccaccccagtaacccccagcttccagaggcccggcctggcatccctggcggcactgcctccctcctggagcccacctccggtgcacttggtctgttacagggcagccctgcccgctggagtgagccctgggtgccggttgaagccctgcccccatctccccttgagctgagcagggtggggaacatcttgcacaggctgcagaccaccttccaagaagccctcgacctttaccgtgtgttggtctccagtggccaggtggacaccgggcagcagcaggcacggactgagctggtctccaccttcctgtggatccacagccagctggaggctgaatgcctggtggggactagtgtggccccagcccaggctctgcccagcccaggacccccgtccccaccgacgctgtaccccctggccagcccagacctgcaggccctgctggaacactactcggagctgctggtgcaggccgtgcggaggaaggcacgggggcactgagggcgcagcccctccaccgcagccctgctgcttctgaggacttaggtattttaagcgaataaactgacagctttgagg

SEQ ID NO: 199930 - DNA, 2995 bp, Homo sapiens
  Payload ID: 19439
  Gene Name: WD repeat domain 63
  Uniprot ID: Q8IWG1
  ENST ID: ENST00000294664
  CDS Start-End: 181-2856
agcgacagatgcgtcctggcaacagtcggcagagttgctgcggtttgtgcccttgcgatttctttttctgagagaggagagtcaaactcccacctccagctctcgaaggagcttttcctgagggcactgcaaagaggctccttttctttcagatcagcagtatcagcccaagtcagaaccatggctccaaaacaaaagaaaaagacatcacgtggcaaaaaaagactaaaaccagtattagctgctagtgaagacatggaaccagtaaatatggagagcatgggtcatccagaaatttatcctttagtattaaccaccaagacccaagaaatatttaactgccgaatagatgaagatgtcacagatgaacaaccttataagcttatcaataaagaagacatttttgaggacctgcgcaacagagctgcagtatctgatttccacccagtcaaaaaaattgtccaggaatatcctggaaatgagcttctgcttgtttatgacaaagacttcaaatatggacttaacttttatcttattgcaactgaagagggcaaagaaaactatttaaatcccccagaagtaccagaagaacaagaagaatataaagaacatattcctgaagatgtgtatatttataaaccacctgtctctaaaccatgggtttctttgggcagtgaaaaagaaattgaggaagaatcagttacggaatctacaaagcagattacatatatgatttctcgaaaacgaagtgaatttggtgcaccaattaagttcagtgaccagaatgcttccagtgtaaaagatgcctatattgaatgtacagcctacccagataaaaattttacccttaaacaacttgaaaaagatgttggcatgcaagtaatcccccaaataaaggacataagcactcagacaaaatggacatatcctaaaaatgctactacgcaatattatccaagagaattctcagaagaggaaaaagagacactcaaacaatcaaagcctttggttgattttcttaacaatgcatccataagtgttgaaatagccctgcagcaaaatgaaatcatgaacacatttattgatgactggaaatacctcgcagaagaagaaggcacctttggggacaagaccgatacccacctgaaagagtaccagtcctttaccgaccttcatagcccaacggagaaaatgattacctgtgtctcatggcatccaactatctatgggctaatagctgtgtcggtagccgtgcgactttcttttgaagacagagttcacttttctggtaaattattgctgcagccatcactgattcttttctggagcttctctgatcctatacatcctcagttaatgctggagagcccagatgacatcttctgcttcaagttctgtccgagtgatcctaatatcattgctggaggctgtatcaatgggcagattgtcatgtgggatatcaccgcacatgcagatcgcatagaaaacattaaggcaggtggtagtagaagtaaaagagccacactgaagcctatgtttctccttgaaccggagagtaataaagaagcaatgtatatcagacactgtgcagtctcttcaatagaaaatggacataagaaagtaattacagatatacactggttgtctgacacatttgagattaacagaatgggctccgtctttgagaatcgaagtggaatatgctgtcaacttgtcacatgttcagcagattgcacaatatgtttttgggatattagaccacagaaacctttaaccccccaaacaacagagaaaaagaaggaggaaagtattgaaattccttttgatgtaccatctacttttttgcatctggatctctcctggaaacctctcactaaggtaaggctgtccaagggtgaaacaagtttagaccactgtccaaccaagataagcctgaatgaagaccatcttctttgcaaaacacaagacaaaatgttagcacagagcaaaacagagaaggcagaagaaatgaacccgtatcataatctggaaagtgggatggccaatcttctcaagccaatagatgacttctgcacaaagttctttgtgggaacagaggaaggcgaagtgatatacacagattggaaaatggaaaaagaccctgaaactggccgacttatgtcaaagaagccagtgagccaccacaccattcacgacggaactgtccacactattcagagatcacctttctacaacgacattattctcacggttggaggttggaacgtggccatatggaaagaaggtgttatgactggaccgctccttcagtcatgctgtgcaccaaaaaggtacacctcaggccactggtccctgactcggcccggagttttctacatcggccgagaagatggatacattgatatctgggaccttctggagaaaacccatgaaccagcccagtctcaaaacatttgcataactatgatcacctacatcaaaccctggatcttttcttctaaacagcaatttatagccacagctgattattatggaacactgcatatattagaaattccttggacattaagtcgcccttccaccaatgagatggcaagtgtcaaccactattttgaaagagaagtcaagcatctggaatacgtagaacagcgcaaaaaaattcgtgagcaagaaaagaaagaaatggaactagaaatggcaaagaaaaaagttaaaacatatcagaagtcaaaagaacaaatgcaggctgaattaaaaatggactatgagagttatctggaactggaaaagactgttcttatcaaccttggcctaatcaaagtcacagagaaggggtcatacatggaggtgatgtaaaaaagcttcctgaaggggtgttttggggacttcttccctctatttatttttatgtcaggtgaactggcatgctgaacatatatatatataggctcatttatagacttttatttccctgctattaaaacttttgaatttt

SEQ ID NO: 199931 - DNA, 2888 bp, Homo sapiens
  Payload ID: 19439
  Gene Name: WD repeat domain 63
  Uniprot ID: Q8IWG1
  ENST ID: ENST00000326813
  CDS Start-End: 190-2748
ttttctcttagcgacagatgcgtcctggcaacagtcggcagagttgctgcggtttgtgcccttgcgatttctttttctgagagaggagagtcaaactcccacctccagctctcgaaggagcttttcctgagggcactgcaaagaggctccttttctttcagatcagcagtatcagcccaagtcagaaccatggctccaaaacaaaagaaaaagacatcacgtggcaaaaaaagactaaaaccagtattagctgctagtgaagacatggaaccagtaaatatggagagcatgggtcatccagaaatttatcctttagtattaaccaccaagacccaagaaatatttaactgccgaatagatgaagatgtcacagatgaacaaccttataagcttatcaataaagaagacatttttgaggacctgcgcaacagagctgcagtatctgatttccacccagtcaaaaaaattgtccaggaatatcctggaaatgagcttctgcttgtttatgacaaagacttcaaatatggacttaacttttatcttattgcaactgaagagggcaaagaaaactatttaaatcccccagaagtaccagaagaacaagaagaatataaagaacatattcctgaagatgtgtatatttataaaccacctgtctctaaaccatgggtttctttgggcagtgaaaaagaaattgaggaagaatcagttacggaatctacaaagcagattacatatatgatttctcgaaaacgaagtgaatttggtgcaccaattaagttcagtgaccagaatgcttccagtgtaaaagatgcctatattgaatgtacagcctacccagataaaaattttacccttaaacaacttgaaaaagatgttggcatgcaagtaatcccccaaataaaggacataagcactcagacaaaatgtgttgaaatagccctgcagcaaaatgaaatcatgaacacatttattgatgactggaaatacctcgcagaagaagaaggcacctttggggacaagaccgatacccacctgaaagagtaccagtcctttaccgaccttcatagcccaacggagaaaatgattacctgtgtctcatggcatccaactatctatgggctaatagctgtgtcggtagccgtgcgactttcttttgaagacagagttcacttttctggtaaattattgctgcagccatcactgattcttttctggagcttctctgatcctatacatcctcagttaatgctggagagcccagatgacatcttctgcttcaagttctgtccgagtgatcctaatatcattgctggaggctgtatcaatgggcagattgtcatgtgggatatcaccgcacatgcagatcgcatagaaaacattaaggcaggtggtagtagaagtaaaagagccacactgaagcctatgtttctccttgaaccggagagtaataaagaagcaatgtatatcagacactgtgcagtctcttcaatagaaaatggacataagaaagtaattacagatatacactggttgtctgacacatttgagattaacagaatgggctccgtctttgagaatcgaagtggaatatgctgtcaacttgtcacatgttcagcagattgcacaatatgtttttgggatattagaccacagaaacctttaaccccccaaacaacagagaaaaagaaggaggaaagtattgaaattccttttgatgtaccatctacttttttgcatctggatctctcctggaaacctctcactaaggtaaggctgtccaagggtgaaacaagtttagaccactgtccaaccaagataagcctgaatgaagaccatcttctttgcaaaacacaagacaaaatgttagcacagagcaaaacagagaaggcagaagaaatgaacccgtatcataatctggaaagtgggatggccaatcttctcaagccaatagatgacttctgcacaaagttctttgtgggaacagaggaaggcgaagtgatatacacagattggaaaatggaaaaagaccctgaaactggccgacttatgtcaaagaagccagtgagccaccacaccattcacgacggaactgtccacactattcagagatcacctttctacaacgacattattctcacggttggaggttggaacgtggccatatggaaagaaggtgttatgactggaccgctccttcagtcatgctgtgcaccaaaaaggtacacctcaggccactggtccctgactcggcccggagttttctacatcggccgagaagatggatacattgatatctgggaccttctggagaaaacccatgaaccagcccagtctcaaaacatttgcataactatgatcacctacatcaaaccctggatcttttcttctaaacagcaatttatagccacagctgattattatggaacactgcatatattagaaattccttggacattaagtcgcccttccaccaatgagatggcaagtgtcaaccactattttgaaagagaagtcaagcatctggaatacgtagaacagcgcaaaaaaattcgtgagcaagaaaagaaagaaatggaactagaaatggcaaagaaaaaagttaaaacatatcagaagtcaaaagaacaaatgcaggctgaattaaaaatggactatgagagttatctggaactggaaaagactgttcttatcaaccttggcctaatcaaagtcacagagaaggggtcatacatggaggtgatgtaaaaaagcttcctgaaggggtgttttggggacttcttccctctatttatttttatgtcaggtgaactggcatgctgaacatatatatatataggctcatttatagacttttatttccctgctattaaaacttttgaatttta

SEQ ID NO: 199932 - DNA, 2905 bp, Homo sapiens
  Payload ID: 19439
  Gene Name: WD repeat domain 63
  Uniprot ID: Q8IWG1
  ENST ID: ENST00000370596
  CDS Start-End: 207-2765
tggagcccggggtttggggacccctgcagacggagaaatagtttcaaaagggagatctgaggatctcaaacattaatgtgcatatgagtcaccagagtttttattgaagcagactgattcagtaggacctgaggttttgcatttctagcaagaagatgctcctgctgctgctgctgctgctggtcccactctcccaagtcagaaccatggctccaaaacaaaagaaaaagacatcacgtggcaaaaaaagactaaaaccagtattagctgctagtgaagacatggaaccagtaaatatggagagcatgggtcatccagaaatttatcctttagtattaaccaccaagacccaagaaatatttaactgccgaatagatgaagatgtcacagatgaacaaccttataagcttatcaataaagaagacatttttgaggacctgcgcaacagagctgcagtatctgatttccacccagtcaaaaaaattgtccaggaatatcctggaaatgagcttctgcttgtttatgacaaagacttcaaatatggacttaacttttatcttattgcaactgaagagggcaaagaaaactatttaaatcccccagaagtaccagaagaacaagaagaatataaagaacatattcctgaagatgtgtatatttataaaccacctgtctctaaaccatgggtttctttgggcagtgaaaaagaaattgaggaagaatcagttacggaatctacaaagcagattacatatatgatttctcgaaaacgaagtgaatttggtgcaccaattaagttcagtgaccagaatgcttccagtgtaaaagatgcctatattgaatgtacagcctacccagataaaaattttacccttaaacaacttgaaaaagatgttggcatgcaagtaatcccccaaataaaggacataagcactcagacaaaatgtgttgaaatagccctgcagcaaaatgaaatcatgaacacatttattgatgactggaaatacctcgcagaagaagaaggcacctttggggacaagaccgatacccacctgaaagagtaccagtcctttaccgaccttcatagcccaacggagaaaatgattacctgtgtctcatggcatccaactatctatgggctaatagctgtgtcggtagccgtgcgactttcttttgaagacagagttcacttttctggtaaattattgctgcagccatcactgattcttttctggagcttctctgatcctatacatcctcagttaatgctggagagcccagatgacatcttctgcttcaagttctgtccgagtgatcctaatatcattgctggaggctgtatcaatgggcagattgtcatgtgggatatcaccgcacatgcagatcgcatagaaaacattaaggcaggtggtagtagaagtaaaagagccacactgaagcctatgtttctccttgaaccggagagtaataaagaagcaatgtatatcagacactgtgcagtctcttcaatagaaaatggacataagaaagtaattacagatatacactggttgtctgacacatttgagattaacagaatgggctccgtctttgagaatcgaagtggaatatgctgtcaacttgtcacatgttcagcagattgcacaatatgtttttgggatattagaccacagaaacctttaaccccccaaacaacagagaaaaagaaggaggaaagtattgaaattccttttgatgtaccatctacttttttgcatctggatctctcctggaaacctctcactaaggtaaggctgtccaagggtgaaacaagtttagaccactgtccaaccaagataagcctgaatgaagaccatcttctttgcaaaacacaagacaaaatgttagcacagagcaaaacagagaaggcagaagaaatgaacccgtatcataatctggaaagtgggatggccaatcttctcaagccaatagatgacttctgcacaaagttctttgtgggaacagaggaaggcgaagtgatatacacagattggaaaatggaaaaagaccctgaaactggccgacttatgtcaaagaagccagtgagccaccacaccattcacgacggaactgtccacactattcagagatcacctttctacaacgacattattctcacggttggaggttggaacgtggccatatggaaagaaggtgttatgactggaccgctccttcagtcatgctgtgcaccaaaaaggtacacctcaggccactggtccctgactcggcccggagttttctacatcggccgagaagatggatacattgatatctgggaccttctggagaaaacccatgaaccagcccagtctcaaaacatttgcataactatgatcacctacatcaaaccctggatcttttcttctaaacagcaatttatagccacagctgattattatggaacactgcatatattagaaattccttggacattaagtcgcccttccaccaatgagatggcaagtgtcaaccactattttgaaagagaagtcaagcatctggaatacgtagaacagcgcaaaaaaattcgtgagcaagaaaagaaagaaatggaactagaaatggcaaagaaaaaagttaaaacatatcagaagtcaaaagaacaaatgcaggctgaattaaaaatggactatgagagttatctggaactggaaaagactgttcttatcaaccttggcctaatcaaagtcacagagaaggggtcatacatggaggtgatgtaaaaaagcttcctgaaggggtgttttggggacttcttccctctatttatttttatgtcaggtgaactggcatgctgaacatatatatatataggctcatttatagacttttatttccctgctattaaaacttttgaatttta

SEQ ID NO: 199933 - DNA, 3477 bp, Homo sapiens
  Payload ID: 19439
  Gene Name: WD repeat domain 63
  ENST ID: ENST00000464801
  CDS Start-End: 116-1222
ttctgagagaggagagtcaaactcccacctccagctctcgaaggagcttttcctgagggcactgcaaagaggctccttttctttcagatcagcagtatcagcccaagtcagaaccatggctccaaaacaaaagaaaaagacatcacgtggcaaaaaaagactaaaaccagtattagctgctagtgaagacatggaaccagtaaatatggagagcatgggtcatccagaaatttatcctttagtattaaccaccaagacccaagaaatatttaactgccgaatagatgaagatgtcacagatgaacaaccttataagcttatcaataaagaagacatttttgaggacctgcgcaacagagctgcagtatctgatttccacccagtcaaaaaaattgtccaggaatatcctggaaatgagcttctgcttgtttatgacaaagacttcaaatatggacttaacttttatcttattgcaactgaagagggcaaagaaaactatttaaatcccccagaagtaccagaagaacaagaagaatataaagaacatattcctgaagatgtgtatatttataaaccacctgtctctaaaccatgggtttctttgggcagtgaaaaagaaattgaggaagaatcagttacggaatctacaaagcagattacatatatgatttctcgaaaacgaagtgaatttggtgcaccaattaagttcagtgaccagaatgcttccagtgtaaaagatgcctatattgaatgtacagcctacccagataaaaattttacccttaaacaacttgaaaaagatgttggcatgcaagtaatcccccaaataaaggacataagcactcagacaaaatggacatatcctaaaaatgctactacgcaatattatccaagagaattctcagaagaggaaaaagagacactcaaacaatcaaagcctttggttgattttcttaacaatgcatccataagtgttgaaatagccctgcagcaaaatgaaatcatgaacacatttattgatgactggaaatacctcgcagaagaagaaggcacctttggggacaagaccgatacccacctgaaagagtaccagtcctttaccgaccttcatagcccaacggagaaaatgattacctgtgtctcatggcatccaactatctatggtacctgccatgtgctttccacgccctcactgtcatgtgtcctcccaacaaccctgtaggatacacacctgtcattatctctgtttcacaacaaaaggacccaagctcaactcagggaagtgactcgcccaggtcacccagatggcataaggcagagtctgggttgggcttgggcctgttgctctcccaaggctaaatttcttcctcctaacactgcctttctgattactagacaagagaggaaatgtgcctcctttaaagagctcagcagccaagggaggtaggtagggatgtgcaaagatggaaacatggaaagagagaggtatttgtcctctttcttcctcctttcaccctacactggcccttttctcacaaaaaagaaacaaaacaagattttcttttcttccaaaatcttctgagtcccctgtatattttatactaacagtacatgtcagtttggaccagccagatttcaagtgctaaataagtagcatgtaactagtggcaaccacattagccagcagagctctaagaaaactcttgctctcctgtggacaaagtgtaaatgaagagtggctgtgtagaaaagcaaaagctagagacatctctccatgtatagttgctgccaactttaatttctacatgtgtttccatcagggctaatagctgtgtcggtagccgtgcgactttcttttgaagacagagttcacttttctggtaaattattgctgcagccatcactgattcttttctggagcttctctgatcctatacatcctcagttaatgctggagagcccagatgacatcttctgcttcaagttctgtccgagtgatcctaatatcattgctggaggctgtatcaatgggcagattgtcatgtgggatatcaccgcacatgcagatcgcatagaaaacattaaggcaggtggtagtagaagtaaaagagccacactgaagcctatgtttctccttgaaccggagagtaataaagaagcaatgtatatcagacactgtgcagtctcttcaatagaaaatggacataagaaagtaattacagatatacactggttgtctgacacatttgagattaacagaatgggctccgtctttgagaatcgaagtggaatatgctgtcaacttgtcacatgttcagcagattgcacaatatgtttttgggatattagaccacagaaacctttaaccccccaaacaacagagaaaaagaaggaggaaagtattgaaattccttttgatgtaccatctacttttttgcatctggatctctcctggaaacctctcactaaggtaaggctgtccaagggtgaaacaagtttagaccactgtccaaccaagataagcctgaatgaagaccatcttctttgcaaaacacaagacaaaatgttagcacagagcaaaacagagaaggcagaagaaatgaacccgtatcataatctggaaagtgggatggccaatcttctcaagccaatagatgacttctgcacaaagttctttgtgggaacagaggaaggcgaagtgatatacacagattggaaaatggaaaaagaccctgaaactggccgacttatgtcaaagaagccagtgagccaccacaccattcacgacggaactgtccacactattcagagatcacctttctacaacgacattattctcacggttggaggttggaacgtggccatatggaaagaaggtgttatgactggaccgctccttcagtcatgctgtgcaccaaaaaggtacacctcaggccactggtccctgactcggcccggagttttctacatcggccgagaagatggatacattgatatctgggaccttctggagaaaacccatgaaccagcccagtctcaaaacatttgcataactatgatcacctacatcaaaccctggatcttttcttctaaacagcaatttatagccacagctgattattatggaacactgcatatattagaaattccttggacattaagtcgcccttccaccaatgagatggcaagtgtcaaccactattttgaaagagaagtcaagcatctggaatacgtagaacagcgcaaaaaaattcgtgagcaagaaaagaaagaaatggaactagaaatggcaaagaaaaaagttaaaacatatcagaagtcaaaagaacaaatgcaggctgaattaaaaatggactatgagagttatctggaactggaaaagactgttcttatcaaccttggcctaatcaaagtcacagagaaggggtcatacatggaggtgatgtaaaaaagcttcctgaaggggtgttttgggga

SEQ ID NO: 199934 - DNA, 548 bp, Homo sapiens
  Payload ID: 19439
  Gene Name: WD repeat domain 63
  ENST ID: ENST00000528899
  CDS Start-End: 175-548
agatgcgtcctggcaacagtcggcagagttgctgcggtttgtgcccttgcgatttctttttctgagagaggagagtcaaactcccacctccagctctcgaaggagcttttcctgagggcactgcaaagaggctccttttctttcagatcagcagtatcagcccaagtcagaaccatggctccaaaacaaaagaaaaagacatcacgtggcaaaaaaagactaaaaccagtattagctggtcatccagaaatttatcctttagtattaaccaccaagacccaagaaatatttaactgccgaatagatgaagatgtcacagatgaacaaccttataagcttatcaataaagaagacatttttgaggacctgcgcaacagagctgcagtatctgatttccacccagtcaaaaaaattgtccaggaatatcctggaaatgagcttctgcttgtttatgacaaagacttcaaatatggacttaacttttatcttattgcaactgaagagggcaaagaaaactatttaaatcccccagaagtaccagaagaaca

SEQ ID NO: 199935 - DNA, 447 bp, Homo sapiens
  Payload ID: 19439
  Gene Name: WD repeat domain 63
  ENST ID: ENST00000484007
  CDS Start-End: 1-387
acctcaggccactggtccctgactcggcccggagttttctacatcggccgagaagatggatacattgatatctgggaccttctggagaaaacccatgaaccagcccagtctcaaaacatttgcataactatgatcacctacatcaaaccctggatcttttcttctaaacagcaatttatagccacagctgattattatggaacactgcatatattagaaattccttggacattaagtcgcccttccaccaatgagatggcaagtgtcaaccactattttgaaagagaagtcaagcatctggaatacgtagaacagcgcaaaaaaattcgtgagcaagaaaagaaagaaatggaactagaaatggcaaagaaaaaagttgtaagttaaatttcagaaatgaaagatgttttcctcgaacaccagtggaaatatatttgtttggcttaa

SEQ ID NO: 199936 - DNA, 4371 bp, Homo sapiens
  Payload ID: 19440
  Gene Name: WD repeat domain 64
  Uniprot ID: B1ANS9
  ENST ID: ENST00000366552
  CDS Start-End: 208-3453
atcagacctaaatcagctttcctccctgctaacatcctagtggcaactcttactcctacccgcactatgggattttaagatcaaaggaattagacctagggcaaaaactgagacagcagggaggcactgtaacaactggaaagttttccaaattggtaaacttgcagtattctttctgtacagaagtaaaagatcccctatgtccctatggatatcaggaaggaaaagcgtctcaacatggcacttcagatgagcaatttcaaaaaggctttgaacaggtttgaaaaattggttgaacaaacagcagcccagaaaagagatgaaagagcaggcttatttatccataaagaagatgcaattggttatgacaagttttatgcatcggtacagaagctctttggtccagatgtgaagaatcaagatgtgaaacgcttttacaggaaactgtgcaacaacacggatgcatctgcagactggtgtgagatctttggatacttctcctctgaagaagatcctattgcttcccagttggatgaagaaaatttggttttctttgtgtctagaaaaaggcgaattttaatttcaggtagtagaagacgagatgtgattaagagcattgtcaagatacctcacctggatttactaataacagctactcagaaaggattaataacagtttttaataaccaggacacctcctggattacagggtgtgattacctcttgcagctgaaacgaatcgtagccacaaccgaaaggaccattattgtctgggattataaagctcaagggagcagccaggaaaattattttgtcataaaaccaatggatcactgcctcctgtgtgtgtgtgtggtgcctttgcctgaccatctctgccgagatgacatcctcttgggggatgatgggggttttgtgaacagattcacagtcaacagtgatgactttggaataaagcaggcaaaatccaaaagaaaattacaaaatcaggtcttagactcaaagaactttaaaagtgttaaaaggaagctacataatgactgggttatgaaaattagatatatttcagccctaaattgttttggatcctgctccttagacagtaatcattcattagttttggaatccttgaagagactcgaggataatttgcctgtcagagagttttccatgccaagaggagccaacactttttgctactgtgttaaggcaaatgtgattgtcactggaggagatgataaggtcatccggttgtggcaccccaatatcagcaccaagccagtagggaaacttgtaggacacatgttcagtatcgccgagatcgtaaccaatgaaaaagatcaacatgtcgtcagcctttcctctgcaaaggttttccgggtgtgggatatacaaactctttcactattacaagtcttccatgacagccagggaggaccaggagacatgcagatttactctatgatatatgatgccaatcatggcatgcttattacgggatctagtgttatggacatgtatcctttgactaggatgatacaagatacaaaacaggttcctcacactcatgaacgagaaatcaatgtcatgctttacaacaaatattttcatcaagtactcactatctgctctgaatccataattagggtatgggaactcgagactgggctccaagtataccagattttagaacctcatggtttcaatactgaagtgacttctgcagctgtcgatgaaagtggatttctttttgccacaggagcgtataatggaacagtcagaatctgggactttggcagtgggcaggagatgaaggtgttgccggaggggaaagactggaaggaggacgagcactgcctacgacgcctcattttcctcaaagcccaagaaaaacaccagcagctggtcctggccttggagcgcaacgggactatcaaaatgatccagggtaaggaagatgatatctacctcatggtgatctgggagctgcctgatgttgtgcctttcctacaagatgggaaacatgctgtgcatctgagaatgtctactagagacaggaacatggctattcctttcccagatgtcgagttgatagttgagaggaacttttctcaacctactgataatcccaccatggatttattacgagtgaactgcattgatttactacaagtagaaggatataatttgatagcagctggaaccttaaatggtgtgatcatcttatggaattttgtgacgtctactgtcaaaaaagtgtaccgacctgaagattgcttcactgtaaaccctgacttgcatcccaagcactttaaaattaatgacatactgttcctctttcgtacccctgaatgtgcaaggagatcaagtcaggattccatatgttcttcatcccagtgtgaatccagcaaaggtccacagagcagtaagggaagcaagcaaagcatacatgacagtgaggttaaaggtgaacaaacagatgtaatggtgggaaagcaacagccaatggacaaaaaacaccctggaattgccaatttaccagaagcccagccacctatccttgtcactgctcatgaggatggacacctccgcttgtggactctggagggaagactactgaaagatatgctacctttcacaaaacattctgccatttctctgacatcgctgtatactgattcatgtacgaggatactactggctggaaatgtggaaggacatgttatcctttgcaatattagctctttcctggatccacctcatgatgaaaagaaattcaagcagctgctttcctggcgtgctcattctttggaaattattcaagtaatctatgtagaagaaaaacaagtggtacttactgcctccatcgatggctcagtaaggctctggcatgccctcaatggacattattgtggatattttggacagcgaaggctctttgaattatcacagacaagagatttcattttgccttgtgatgttactgaatatcccatagaaataaaagaagaaagcaagttcacagagaagcaaaaatatgaatatcctctgatatttgaccgggaaaaatggagaaaaatgagctcagtgtctctacttttcaaacgcacacctcccaaggcctttgaagtggaacaggatttcaagtttttcaagtctctttcttctcctaagattcgaagatatcccttggaaggtttcgtgactgaaaacagagaggcagggattgttttcggctctctgcctatatacagtatatcaagccccactagtctaagatttcttccactgattggcgtagaagcccaaaaggactcttcagatggcattacaggaaagaagaagggaggtcatgttcaacgtgaaaaagcaccacgaagaagaagtttgaaaaaaaatttagtcccacaaataaatctggcttcttccttcttcccagctatacccaagtaaggagaaaaaatcagaaatggctgctgcacataaaatggcaacgtttggatgatacctgctctttatttcaggatgagagggagaaaccaccagacactatcagtcatctctggtgtcaggccatcctattgatgggaaagattgcttagggagttctggtgaccttaactctgaataccaagcaagcagcaagcagccagaagtttaggcggtgtttcttatttactgtcagcaaactgacacataagaaaacaaatgaaatcaacagcattagtaggtctaaaataatatggttatcaatgtttagctttccacttcctcccattggtcaccttactccacagcaagaatgactgtcagaacatgtgcagtaaaaggcactttcaagtcatgctatgtgttgtacaaaaagaattattaaaaagaaaaatgtaccagtcagatctctagatgtttgtcttcttcatttagagaaatattatctggaagaaaatgtcctaagtttctcaaagtcagaaattatttctatgtagtccagacctgactccagataaatataaaagacggcaaagaaaggaagaaaaatgggtcatagaaatagaaaaagcatagtaacatggtagatttaaccttaaatatatcaataattatgaaacctttaataggttaaagtatgcaagtttaaaaggttgtcagaatggattaaaaaaacaaaatccaactatatgttgtttacaagaaacacatctaacatacaaggacaccaaactcttaaagataaaagaatgaaaaaagatgtatgatgcaaaaactaacctaaagaaaatcaatatagccatattaatattaaaatacactttaagaaaataaacaagaatctttataaaagttttataaagttattaataataactcaaa

SEQ ID NO: 199937 - DNA, 2310 bp, Homo sapiens
  Payload ID: 19440
  Gene Name: WD repeat domain 64
  ENST ID: ENST00000437684
  CDS Start-End: 154-2058
ttgggggatgatgggggttttgtgaacagattcacagtcaacagtgatgactttggaataaagcaggcaaaatccaaaagaaaattacaaaatcaggtcttagactcaaagaactttaaaagtgttaaaaggaagctacataatgactgggttatgaaaattagatatatttcagccctaaattgttttggatcctgctccttagacagtaatcattcattagttttggaatccttgaagagactcgaggataatttgcctgtcagagagttttccatgccaagaggagccaacactttttgctactgtgttaaggcaaatgtgattgtcactggaggagatgataaggtcatccggttgtggcaccccaatatcagcaccaagccagtagggaaacttgtaggacacatgttcagtatcgccgagatcgtaaccaatgaaaaagatcaacatgtcgtcagcctttcctctgcaaaggttttccgggtgtgggatatacaaactctttcactattacaagtcttccatgacagccagggaggaccaggagacatgcagatttactctatgatatatgatgccaatcatggcatgcttattacgggatctagtgttatggacatgtatcctttgactaggatgatacaagatacaaaacaggttcctcacactcatgaacgagaaatcaatgtcatgctttacaacaaatattttcatcaagtactcactatctgctctgaatccataattagggtatgggaactcgagactgggctccaagtataccagattttagaacctcatggtttcaatactgaagtgacttctgcagctgtcgatgaaagtggatttctttttgccacaggagcgtataatggaacagtcagaatctgggactttggcagtgggcaggagatgaaggtgttgccggaggggaaagactggaaggaggacgagcactgcctacgacgcctcattttcctcaaagcccaagaaaaacaccagcagctggtcctggccttggagcgcaacgggactatcaaaatgatccagggtaaggaagatgatatctacctcatggtgatctgggagctgcctgatgttgtgcctttcctacaagatgggaaacatgctgtgcatctgagaatgtctactagagacaggaacatggctattcctttcccagatgtcgagttgatagttgagaggaacttttctcaacctactgataatcccaccatggatttattacgagtgaactgcattgatttactacaagtagaaggatataatttgatagcagctggaaccttaaatgaaggacatgttatcctttgcaatattagctctttcctggatccacctcatgatgaaaagaaattcaagcagctgctttcctggcgtgctcattctttggaaattattcaagtaatctatgtagaagaaaaacaagtggtacttactgcctccatcgatggctcagtaaggctctggcatgccctcaatggacattattgtggatattttggacagcgaaggctctttgaattatcacagacaagagatttcattttgccttgtgatgttactgaatatcccatagaaataaaagaagaaagcaagttcacagagaagcaaaaatatgaatatcctctgatatttgaccgggaaaaatggagaaaaatgagctcagtgtctctacttttcaaacgcacacctcccaaggcctttgaagtggaacaggatttcaagtttttcaagtctctttcttctcctaagattcgaagatatcccttggaaggtttcgtgactgaaaacagagaggcagggattgttttcggctctctgcctatatacagtatatcaagccccactagtctaagatttcttccactgattggcgtagaagcccaaaaggactcttcagatggcattacaggaaagaagaagggaggtcatgttcaacgtgaaaaagtaacacgaagaagaagtttgaaaaaaaatttagtcccacaaataaatctggcttcttccttcttcccagctatacccaagtaaggagaaaaaatcagaaatggctgctgcacataaaatggcaacgtttggatgatacctgctctttatttcaggatgagagggagaaaccaccagacactatcagtcatctctggtgtcaggccatcctattgatgggaaagattgcttagggagttctggtgaccttaactctgaataccaagcaagcagcaagcagccagaagtttaggcggtgtttcttatttactgtcagcaaactgacacataagaaaa

SEQ ID NO: 199938 - DNA, 2122 bp, Homo sapiens
  Payload ID: 19440
  Gene Name: WD repeat domain 64
  ENST ID: ENST00000425826
  CDS Start-End: 1-1682
gaacagtcagaatctgggactttggcagtgggcaggagatgaaggtgttgccggaggggaaagactggaaggaggacgagcactgcctacgacgcctcattttcctcaaagcccaagaaaaacaccagcagctggtcctggccttggagcgcaacgggactatcaaaatgatccagggtaaggaagatgatatctacctcatggtgatctgggagctgcctgatgttgtgcctttcctacaagatgggaaacatgctgtgcatctgagaatgtctactagagacaggaacatggctattcctttcccagatgtcgagttgatagttgagaggaacttttctcaacctactgataatcccaccatggatttattacgagtgaactgcattgatttactacaagtagaaggatataatttgatagcagctggaaccttaaatggtgtgatcatcttatggaattttgtgacgtctactgtcaaaaaagtgtaccgacctgaagattgcttcactgtaaaccctgacttgcatcccaagcactttaaaattaatgacatactgttcctctttcgtacccctgaatgtgcaaggagatcaagtcaggattccatatgttcttcatcccagtgtgaatccagcaaaggtccacagagcagtaagggaagcaagcaaagcatacatgacagtgaggttaaaggtgaacaaacagatgtaatggtgggaaagcaacagccaatggacaaaaaacaccctggaattgccaatttaccagaagcccagccacctatccttgtcactgctcatgaggatggacacctccgcttgtggactctggagggaagactactgaaagatatgctacctttcacaaaacattctgccatttctctgacatcgctgtatactgattcatgtacgaggatactactggctggaaatgtggaaggacatgttatcctttgcaatattagctctttcctggatccacctcatgatgaaaagaaattcaagcagctgctttcctggcgtgctcattctttggaaattattcaagtaatctatgtagaagaaaaacaagtggtacttactgcctccatcgatggctcagtaaggctctggcatgccctcaatggacattattgtggatattttggacagcgaaggctctttgaattatcacagacaagagatttcattttgccttgtgatgttactgaatatcccatagaaataaaagaagaaagcaagttcacagagaagcaaaaatatgaatatcctctgatatttgaccgggaaaaatggagaaaaatgagctcagtgtctctacttttcaaacgcacacctcccaaggcctttgaagtggaacaggatttcaagtttttcaagtctctttcttctcctaagattcgaagatatcccttggaaggtttcgtgactgaaaacagagaggcagggattgttttcggctctctgcctatatacagtatatcaagccccactagtctaagatttcttccactgattggcgtagaagcccaaaaggactcttcagatggcattacaggaaagaagaagggaggtcatgttcaacgtgaaaaagcaccacgaagaagaagtttgaaaaaaaatttagtcccacaaataaatctggcttcttccttcttcccagctatacccaagtaaggagaaaaaatcagaaatggctgctgcacataaaatggcaacgtttggatgatacctgctctttatttcaggatgagagggagaaaccaccagacactatcagtcatctctggtgtcaggccatcctattgatgggaaagattgcttagggagttctggtgaccttaactctgaataccaagcaagcagcaagcagccagaagtttaggcggtgtttcttatttactgtcagcaaactgacacataagaaaacaaatgaaatcaacagcattagtaggtctaaaataatatggttatcaatgtttagctttccacttcctcccattggtcaccttactccacagcaagaatgactgtcagaacatgtgcagtaaaaggcactttcaagtcatgctatgtgttgtacaaaaagaattattaaaaagaaaaatgtaccagtc

SEQ ID NO: 199939 - DNA, 2306 bp, Homo sapiens
  Payload ID: 19440
  Gene Name: WD repeat domain 64
  ENST ID: ENST00000414635
  CDS Start-End: 1-2058
ttgggggatgatgggggttttgtgaacagattcacagtcaacagtgatgactttggaataaagcaggcaaaatccaaaagaaaattacaaaatcaggtcttagactcaaagaactttaaaagtgttaaaaggaagctacataatgactgggttatgaaaattagatatatttcagccctaaattgttttggatcctgctccttagacagtaatcattcattagttttggaatccttgaagagactcgaggataatttgcctgtcagagagttttccatgccaagaggagccaacactttttgctactgtgttaaggcaaatgtgattgtcactggaggagatgataaggtcatccggttgtggcaccccaatatcagcaccaagccagtagggaaacttgtaggacacatgttcagtatcgccgagatcgtaaccaatgaaaaagatcaacatgtcgtcagcctttcctctgcaaaggttttccgggtgtgggatatacaaactctttcactattacaagtcttccatgacagccagggaggaccaggagacatgcagatttactctatgatatatgatgccaatcatggcatgcttattacgggatctagtgttatggacatgtatcctttgactaggatgatacaagatacaaaacaggttcctcacactcatgaacgagaaatcaatgtcatgctttacaacaaatattttcatcaagtactcactatctgctctgaatccataattagggtatgggaactcgagactgggctccaagtataccagattttagaacctcatggtttcaatactgaagtgacttctgcagctgtcgatgaaagtggatttctttttgccacaggagcgtataatggaacagtcagaatctgggactttggcagtgggcaggagatgaaggtgttgccggaggggaaagactggaaggaggacgagcactgcctacgacgcctcattttcctcaaagcccaagaaaaacaccagcagctggtcctggccttggagcgcaacgggactatcaaaatgatccagggtaaggaagatgatatctacctcatggtgatctgggagctgcctgatgttgtgcctttcctacaagatgggaaacatgctgtgcatctgagaatgtctactagagacaggaacatggctattcctttcccagatgtcgagttgatagttgagaggaacttttctcaacctactgataatcccaccatggatttattacgagtgaactgcattgatttactacaagtagaaggatataatttgatagcagctggaaccttaaatgaaggacatgttatcctttgcaatattagctctttcctggatccacctcatgatgaaaagaaattcaagcagctgctttcctggcgtgctcattctttggaaattattcaagtaatctatgtagaagaaaaacaagtggtacttactgcctccatcgatggctcagtaaggctctggcatgccctcaatggacattattgtggatattttggacagcgaaggctctttgaattatcacagacaagagatttcattttgccttgtgatgttactgaatatcccatagaaataaaagaagaaagcaagttcacagagaagcaaaaatatgaatatcctctgatatttgaccgggaaaaatggagaaaaatgagctcagtgtctctacttttcaaacgcacacctcccaaggcctttgaagtggaacaggatttcaagtttttcaagtctctttcttctcctaagattcgaagatatcccttggaaggtttcgtgactgaaaacagagaggcagggattgttttcggctctctgcctatatacagtatatcaagccccactagtctaagatttcttccactgattggcgtagaagcccaaaaggactcttcagatggcattacaggaaagaagaagggaggtcatgttcaacgtgaaaaagcaccacgaagaagaagtttgaaaaaaaatttagtcccacaaataaatctggcttcttccttcttcccagctatacccaagtaaggagaaaaaatcagaaatggctgctgcacataaaatggcaacgtttggatgatacctgctctttatttcaggatgagagggagaaaccaccagacactatcagtcatctctggtgtcaggccatcctattgatgggaaagattgcttagggagttctggtgaccttaactctgaataccaagcaagcagcaagcagccagaagtttaggcggtgtttcttatttactgtcagcaaactgacacataag

SEQ ID NO: 199940 - DNA, 1661 bp, Homo sapiens
  Payload ID: 19440
  Gene Name: WD repeat domain 64
  ENST ID: ENST00000472717
  CDS Start-End: 1-1569
aggatgatacaagatacaaaacaggttcctcacactcatgaacgagaaatcaatgtcatgctttacaacaaatattttcatcaagtactcactatctgctctgaatccataattagggtatgggaactcgagactgggctccaagtataccagattttagaacctcatggtttcaatactgaagtgacttctgcagctgtcgatgaaagtggatttctttttgccacaggagcgtataatggaacagtcagaatctgggactttggcagtgggcaggagatgaaggtgttgccggaggggaaagactggaaggaggacgagcactgcctacgacgcctcattttcctcaaagcccaagaaaaacaccagcagctggtcctggccttggagcgcaacgggactatcaaaatgatccagggtaaggaagatgatatctacctcatggtgatctgggagctgcctgatgttgtgcctttcctacaagatgggaaacatgctgtgcatctgagaatgtctactagagacaggaacatggctattcctttcccagatgtcgagttgatagttgagaggaacttttctcaacctactgataatcccaccatggatttattacgagtgaactgcattgatttactacaagtagaaggatataatttgatagcagctggaaccttaaatggtgtgatcatcttatggaattttgtgacgtctactgtcaaaaaagtgtaccgacctgaagattgcttcactgtaaaccctgacttgcatcccaagcactttaaaattaatgacatactgttcctctttcgtacccctgaatgtgcaaggagatcaagtcaggattccatatgttcttcatcccagtgtgaatccagcaaaggtccacagagcagtaagggaagcaagcaaagcatacatgacagtgaggttaaaggtgaacaaacagatgtaatggtgggaaagcaacagccaatggacaaaaaacaccctggaattgccaatttaccagaagcccagccacctatccttgtcactgctcatgaggatggacacctccgcttgtggactctggagggaagactactgaaagatatgctacctttcacaaaacattctgccatttctctgacatcgctgtatactgattcatgtacgaggatactactggctggaaatgtggaaggacatgttatcctttgcaatattagctctttcctggatccacctcatgatgaaaagaaattcaagcagctgctttcctggcgtgctcattctttggaaattattcaagtaatctatgtagaagaaaaacaagtggtacttactgcctccatcgatggctcagtaaggctctggcatgccctcaatggacattattgtggatattttggacagcgaaggctctttgaattatcacagacaagagatttcattttgccttgtgatgttactgaatatcccatagaaataaaagaagaaagcaagttcacagagaagcaaaaatatgaatatcctctgatatttgaccgggaaaaattcgaagatatcccttggaaggtttcgtgactgaaaacagagaggcagggattgttttcggctctctgcctatatacagtatatcaagccccactagtctaagatttcttccactgattggc

SEQ ID NO: 199941 - DNA, 4467 bp, Homo sapiens
  Payload ID: 19441
  Gene Name: WD repeat domain 66
  Uniprot ID: Q8TBY9
  ENST ID: ENST00000288912
  CDS Start-End: 855-4304
tttatcctttcttttttattttaagatgtatgcatattaatcaatttaccatcactggggcatggcagtgtgggcggggagaattattcacattctcctaaaatgacagcagcagagagccttctgcctcagtggctctggctggtttcctgcaggggtcccagtggaaacccgtgtggccacctgttgccgtcttccatgagatgttagtggagagccactttgacgtggaatgatcctaatagatatagccagaccggttttgcggaaacgctttgtgctgagaaccgcaagctggtgcaccctgtgtcatatctgcccccagccagctggaattgtctgcaacacgcggtgcccggtgaggaggcaggcaggacggttgtgtgctgcatccatgagacctggaaattcagtttgcttttggaaaagagcattgtatccgagttcatacttctccaccccatcttgccaaggttgcggaaagtaaaaattggcagtattggccgctgcagcttcttaggggacgggaccatgtgaaaaggtgggatcgtgcgagcggaggaaggacagaaaagcgaggaaagtctatgccgccagcgaccggcaggaggcacgtcgggcacgctcgtcaccgtttcctggcacgtgaccaccgccctgccctgtcgctttagggcctgtcgcttccggcggtggcggttgccatggggacggagcttgggtggcaaccagaactagggagctggtggagaaggtggcggccgctggaaggaggcccgggaggtggctgaggggtccaggcggcgggacgactctggccttttgaagaccgggaggaaactctacagagaagaatgtcagatgcagcagaagctccccgagaagcaacaggagaaaatggagaaacagaaatgaaagaagaggaggaacctaatccaaattataaagaagtagaagatccacaacaggaatcaaaagatgacacaatagcatggagagagtctcaggaggaggagaggaaaacgggcgaggaggaaggggaggaggaggggaaggaggacaaaaagattgtcatggaagaaactgaggaaaaggctggagaagtccaagagaaggaggcttcaggaatacaggaagaaaccacagtagagccccaagaagtcacagcgtccatgatccgtttggagacacagattactgattcccagtcaatcacatcaggaattttcccaaaaacccaaagaggtagcaagtcaaagctttccttacaattggaggatgcagaaacagatgagcttttaagagacctgagcacacaaattgaatttcttgatttggatcaaatcagtcctgaggaacaacagattagttcccctgaaaggcagccctcaggagagcttgaggagaaaaccgaccggatgccccaagatgaactgggacaagaaagaagggacttggagccagaaaacagagaggagggacaagaaaggagagtatccgacatccagtccaaagcagggatctcccgggagtcactggtgtccagcaccacagaggacattctgtttcaaaaggataaaagcaccccggtgtatcccttgaccatgacctggtcgtttggatggaacagttctcttcctgtttactatattcgagaggaaaggcagagagttcttctgtatgtttgtgctcacactgcgatcatctacaacgtgttcaggaacaatcaataccaccttcagggccacgccaatattatctcctgcctctgcgtcagtgaagacaggcggtggatcgccacagcagacaaagggccagactgcctggtgattatatgggactccttcacaggtattcctgtgcacacaatatttgacagctgccctgaagggaatggcatcatggccatggccatgacccacgacgccaagtatctggcaaccatctcagatgctgaagtccagaaggtatgcatctggaagtggactttggcagtggaaacgccagcatgcactctcgaactccccacagagtacggtgttcagaactacgttacttttaacccaacaaataataaagaattggtgagcaatagtaaaacacgggcaatatattatgcatggtatgaagagagggatacactggctcacagtgccccacttttaactgaaaaaaccttcaacaagcttgtgggaaagtttagccagtccatctttcacttgaatttaacacaaatactctcagccacaatggaagggaagctggttgtctgggacatacaccgcccaccctcatctgcctccacctttttgggctttccctatatcaagccttgtaaattggttcatttgcagaaagagggtatcacggtacttaccacaattgatagctacattgtcacaggtgacattaaggggaacattaagttctatgatcacaccctgtctattgttaactggtacagtcacttgaaactgggcgccataagaactctgtccttttcaaagaccccagcaactcctcctactgaaaaatcaaactatcctcctgactgcactttaaaaggtgacctttttgtcttaaggaattttatcattggaacatctgatgccgcggtgtaccacttaacaacagatgggaccaaacttgagaagttatttgtagagcccaaggatgccatttgtgccatctcctgccacccatatcaacccctcattgccatcgggagcatctgtgggatgatcaaagtgtggaattatgaaaacaaacaatatcttttcagcagggtttttgagaaggggcttggagtccagagtctgacctacaaccccgaaggagcccttcttggagctggctttacagaggggacagtttacattcttgatgcaatgtctttagaaaatgaaagcccagagcctttcaaatattccagaaccagtgtgactcatataagcttttcccatgactcccagtatatggcaactgctgatagaagttttactgtggctgtttacatgctggtggtcagaaatggacagagggtctgggagtacttagcaagacttcgctctcatcgcaaaagcattcgaagtctcctgtttggggtttacctggacagcaatgagcctagactgctgagccttgggacagacaggctcttgatagagtatgatcttctcaggagctacaaagaccacctggaagtcctggacattcaccacaccgaccagggctgctatcccacctgcatggtctggtacccaccactcaccagggaactcttcctgcttatttgcaacagtggctacaaagtgaagctttttaatgctactaccaaaatgtgcagaaagacgcttctggggccagcttatggttcccctattgagcagacacaagtcctcccagtgagaagcatggcggagctacagaaacgctacttggtgtttattaacagagacaaggtgggacttcagatcttaccagttgacggcaatccacataagacatctgctattgtttgccacccgaacggggtggccggcatggccgtttcctatgatggctgctacgccttcactgcgggagggcacgatcgctcggtggtgcagtggaaaatcaccttaagtgtcctggaggcagcggtttctcttgggggtgaagacttgaccccattctatggtctgctgtctggtggccgggaaggaaaattctacagggagctagaagactacttctactattctcagctccgcagtcaaggcatcgacacaatggagaccagaaaggtgtcagaacacatttgcctgtcagagcttccttttgtcatgagagcaattggcttttacccatctgaagagaagattgatgatatatttaacgaaatcaaatttggtgaatatgtggacactggaaagctaatcgacaagatcaacttaccagatttcctaaaagtgtaccttaaccacaagccaccttttggtaacaccatgagtggcatccacaagagctttgaggtgctcggttataccaactccaaagggaaaaaggccattcgaagagaggacttcctgagactgctcgttactaaaggtgagcatatgacggaggaggagatgttggattgctttgcttcactgtttggcctgaatcccgagggatggaaatccgagcctgcaacctgctccgtcaaaggttcagaaatttgccttgaagaagaacttccagacgaaatcactgcagaaatattcgcgactgaaattcttggcttaaccatttcagaagattccggccaggatggtcagtgaagttaccaggaatgtttaaagcacaaaggactttgggtgtgtgtgcatgcacatgtgtgtgttttccatgaggcactgctttttatgcatttccctcccccctctcatctttagaacatttagacattaaagcaagtttctggtgagcaatggaattcacaaa

SEQ ID NO: 199942 - DNA, 3420 bp, Homo sapiens
  Payload ID: 19441
  Gene Name: WD repeat domain 66
  Uniprot ID: Q8TBY9
  ENST ID: ENST00000397454
  CDS Start-End: 138-2963
agaactagggagctggtggagaaggtggcggccgctggaaggaggcccgggaggtggctgaggggtccaggcggcgggacgactctggccttttgaagaccggggtgggtgctctctaggaaactctacagagaagaatgtcagatgcagcagaagctccccgagaagcaacaggagaaaatggagaaacagaaatgaaagaagaggaggaacctaatccaaattataaagaagtagaagatccacaacaggaatcaaaagatgacacaatagcatggagagagtctcaggaggaggagaggaaaacgggcgaggaggaaggggaggaggaggggaaggaggacaaaaagattgtcatggaagaaactgaggaaaaggctggagaagtccaagagaaggaggcttcaggaatacaggaagaaaccacagtagagccccaagaagtcacagcgtccatgatccgtttggagacacagattactgattcccagtcaatcacatcaggaattttcccaaaaacccaaagaggtagcaagtcaaagctttccttacaattggaggatgcagaaacagatgagcttttaagagacctgagcacacaaattgaatttcttgatttggatcaaatcagtcctgaggaacaacagattagttcccctgaaaggcagccctcaggagagcttgaggagaaaaccgaccggatgccccaagatgaactgggacaagaaagaagggacttggagccagaaaacagagaggagggacaagaaaggagagtatccgacatccagtccaaagcagggatctcccgggagtcactggtgtccagcaccacagaggacattctgtttcaaaaggataaaagcaccccggtgtatcccttgaccatgacctggtcgtttggatggaacagttctcttcctgtttactatattcgagaggaaaggcagagagttcttctgtatgtttgtgctcacactgcgatcatctacaacgtgttcaggaacaatcaataccaccttcagggccacgccaatattatctcctgcctctgcgtcagtgaagacaggcggtggatcgccacagcagacaaagggccagactgcctggtgattatatgggactccttcacaggtattcctgtgcacacaatatttgacagctgccctgaagggaatggcatcatggccatggccatgacccacgacgccaagtatctggcaaccatctcagatgctgaagtccagaaggtatgcatctggaagtggactttggcagtggaaacgccagcatgcactctcgaactccccacagagtacggtgttcagaactacgttacttttaacccaacaaataataaagaattggtgagcaatagtaaaacacgggcaatatattatgcatggtatgaagagagggatacactggctcacagtgccccacttttaactgaaaaaaccttcaacaagcttgtgggaaagtttagccagtccatctttcacttgaatttaacacaaatactctcagccacaatggaagggaagctggttgtctgggacatacaccgcccaccctcatctgcctccacctttttgggctttccctatatcaagccttgtaaattggttcatttgcagaaagagggtatcacggtacttaccacaattgatagctacattgtcacaggtgacattaaggggaacattaagttctatgatcacaccctgtctattgttaactggtacagtcacttgaaactgggcgccataagaactctgtccttttcaaagaccccagcaactcctcctactgaaaaatcaaactatcctcctgactgcactttaaaaggtgacctttttgtcttaaggaattttatcattggaacatctgatgccgcggtgtaccacttaacaacagatgggaccaaacttgagaagttatttgtagagcccaaggatgccatttgtgccatctcctgccacccatatcaacccctcattgccatcgggagcatctgtgggatgatcaaagtgtggaattatgaaaacaaacaatatcttttcagcagggtttttgagaaggggcttggagtccagagtctgacctacaaccccgaaggagcccttcttggagctggctttacagaggggacagtttacattcttgatgcaatgtctttagaaaatgaaagcccagagcctttcaaatattccagaaccagtgtgactcatataagcttttcccatgactcccagtatatggcaactgctgatagaagttttactgtggctgtttacatgctggtggtcagaaatggacagagggtctgggagtacttagcaagacttcgctctcatcgcaaaagcattcgaagtctcctgtttggggtttacctggacagcaatgagcctagactgctgagccttgggacagacaggctcttgatagagtatgatcttctcaggagctacaaagaccacctggaagtcctggacattcaccacaccgaccagggctgctatcccacctgcatggtctggtacccaccactcaccagggaactcttcctgcttatttgcaacagtggctacaaagtgaagctttttaatgctactaccaaaatgtgcagaaagacgcttctggggccagcttatggttcccctattgagcagacacaagtcctcccagtgagaagcatggcggagctacagaaacgctacttggtgtttattaacagagacaaggtgggacttcagatcttaccagttgacggcaatccacataagacatctgctattgtttgccacccgaacggggtggccggcatggccgtttcctatgatggctgctacgccttcactgcgggagggcacgatcgctcggtggtgcagtggaaaatcaccttaagccatcctgggagccaggcaccaatattatccccatcagacacatcaagaagctaactccaaggggtctgatgactgcccaagcaatggaggaggcagtggagctgggattcacagccagggctttctaagtccaccccacaccttaacaaacattcattacaggaggaaaataaaggacttttgtctccaatctttgtgatatggtttggctctgtgttcctacccaaatctcatcttgaattgtactccgataattcccgtgtatggtgggagggacctggtgggagatggttggatggtgggggagcagggggtggtttcccccatgttgttctcgtggtagtgaataagtctcacaagatctgatggtttgataaggggaaacctgtttcacttggctctcattctctcttgccactgccatgtgagacgtgcctttcaccttccgccatgattgtgaggcctccccagccacatgaaactgtaacaataaacctctttcttttgtaaa

SEQ ID NO: 199943 - DNA, 14083 bp, Homo sapiens
  Payload ID: 19442
  Gene Name: WD repeat domain 7
  Uniprot ID: Q9Y4E6
  ENST ID: ENST00000254442
  CDS Start-End: 212-4684
ggcggcaccggcaccttgcagtatcactggggagacggcggctgtatagcgcttgccgccccacggattatcccagcaggatctacgcaccccgcatcctccgtagttccgccctatccttgtcctccttggctggggcgcccaccggcggtctgataggctacatcgcggcatgagatgaagctgtgacaggtttgaaaacacaaacacaatggcaggaaacagccttgttctacccattgttctttggggtcgaaaagcgcccacacattgcatctcagccgtacttttaacagatgatggggccacgatcgtaacaggatgtcacgacggacaaatatgtctctgggatctttcagtagaactgcaaattaatcctcgagcactgttgtttggtcatacagcatcaatcacttgtttgtctaaagcttgtgcttccagtgacaaacagtatattgtgagtgcatctgaaagtggagagatgtgcctctgggatgtgagtgatggcagatgtattgaatttacaaaattagcttgcacacatactggcatacagttctaccagttctctgttgggaatcagcgagaaggaaggcttttatgccacggacattaccctgaaatccttgttgtggatgctaccagccttgaagtattatactccttagtatcaaagatatcaccagactggattagctccatgagtattattcgatcccaccgaacacaagaggacacagtggtagcactctcggtgactggcatcctgaaggtctggattgttacctcggaaataagtgacatgcaggatactgagccaatatttgaggaggaatccaaaccaatttattgtcagaattgccaaagcatctctttttgtgcatttacacaaaggtcacttttggttgtgtgttccaaatattggagggtgttcgatgccggagactattccttgttgtgttcaggtcctagtgaaaatggacagacatggaccgggggggactttgtctcatcagataaagtcatcatttggacagaaaatgggcaaagttatatttacaaactacctgccagttgccttccagctagtgattcattccgcagtgatgtggggaaggcagttgaaaatttaattcctcctgtacaacatatcctcttggatcgaaaagataaagagttgctaatttgtcctcctgttactcggttcttctatggatgcagagaatatttccataaactgttaattcagggtgattcttctggaaggttgaatatttggaacatatcagacacagctgataaacagggaagtgaagaagggctggcaatgacaacttctattagtttgcaagaggcatttgataaactgaatccttgtcctgctggaattatagatcagctgagtgtgattcccaatagtaatgaacctcttaaagtaactgcaagtgtgtacataccagcacatggacgacttgtttgtggtcgtgaagatggaagcatagttattgtacctgccacacagacggccatagtacagctgttgcaaggggaacacatgctcagaagaggttggccacctcacagaacactccgtggtcatcggaacaaagtcacatgtttgctatatcctcatcaggtctcagctcggtatgatcaaagatacctgatatctggaggtgtggatttttcagtcataatttgggacatattttctggagaaatgaaacatatcttctgtgttcatggtggtgagattactcaacttctagttccacctgaaaactgtagtgcaagagtacagcactgcatctgctctgtagccagtgaccactcagtaggacttctaagtttgcgagagaaaaaatgcataatgttggcatctcgtcacctttttcctattcaagtaatcaaatggaggccttctgatgattacctggtggtggggtgttcagatggttctgtgtacgtctggcaaatggatactggtgcattggatcgttgtgtgatggggataacagcagttgagattctaaacgcttgtgatgaagctgttcctgctgctgttgattcacttagtcatccagcagtcaacctaaaacaagctatgacgagacgtagtcttgctgctcttaaaaatatggcccatcataagctacaaacccttgcaactaacctcttggcttctgaggcatctgacaagggaaatttacctaaatattctcataactccctgatggttcaagcaataaagacaaacctaacagacccggacatacatgtgctattctttgatgtggaagcgttgattattcaactcctgactgaagaagcctctaggccgaatactgctcttatttccccagagaatttgcaaaaagcatctggcagttcagacaaagggggctcttttttaactggaaaacgagcagcagttctcttccaacaagtgaaagaaacgatcaaagagaacatcaaggaacacctccttgatgatgaagaggaggatgaggagataatgaggcagagaagggaagaaagtgatcctgaatatcggtccagcaaatcaaagccattgaccctattagaatataatttaactatggacactgcaaagctgtttatgtcctgccttcacgcctggggtttgaatgaagtactggatgaagtttgcctggatcgccttggaatgctgaaaccccactgcaccgtatcgtttggcctcttgtcaagaggaggccatatgtcactgatgctgccgggttataatcagcctgcttgtaaactgtcacatgggaaaacagaagtaggaaggaagctgccagcgtctgagggagtaggaaagggaacttacggagtgtcccgtgccgtcaccacacagcatctcctgtctatcatttctttggcaaatactttaatgagtatgaccaatgcaacttttattggtgatcatatgaagaagggtcctaccaggccacctagaccaagcaccccagacctttctaaggcaaggggttcccctccaacttccagtaatattgtgcaaggacagattaaacaagttgctgcacctgtcgtttccgctcggtctgatgctgatcactctggctctgaccctccttctgctcctgctttacatacctgtttcttagtaaatgaaggttggagtcagttagctgctatgcactgtgttatgctgccagacctactgggattggataaatttaggcctccccttctggagatgctggcccgaagatggcaagatcgatgcttggaggtgagagaagccgcgcaggccctgcttctggcggaactgagaagaattgagcaggcaggcaggaaggaagccattgatgcctgggctccttacttacctcagtacatagaccacgtcatatcacctggagtcacatcagaagccgcgcagactatcaccacggctcctgatgcctcagggcctgaagcaaaagtccaggaggaagagcatgaccttgttgacgatgacatcaccactggttgcttatcaagtgtcccacaaatgaaaaaaatttctacatcttacgaggaaagacggaagcaagctaccgctattgttttacttggagtaataggagctgaatttggtgctgaaattgaacctcctaaactattgaccagacctcgaagctctagccaaattcctgagggattcgggttgactagtggtggatccaactactcgctggccagacatacttgcaaggcactgacgtttcttctgctacagcctccaagccccaaacttcctccacacagcactatccgaagaacagccattgatctgattggacgtgggttcactgtttgggagccttacatggatgtgtccgctgttctgatggggcttctcgaactttgtgccgatgccgagaaacaacttgccaacatcacaatggggttgcctctgagcccagcagctgactcggcccgctctgcgaggcatgccctctcgctcattgccaccgccagaccacccgccttcatcaccaccatagccaaagaggtacacagacatacggctcttgcagcaaatacccaatcacagcagaatatgcacacaacaactcttgcacgagctaaaggggaaattttgagagtcattgaaattcttattgaaaagatgcccacagatgttgtggatcttctcgtggaggttatggacatcattatgtactgccttgaaggatctttagttaaaaagaaaggtcttcaagaatgtttcccagccatctgcaggttctacatggtcagctattatgagcggaatcacagaatagcagttggagctcgccatggttcagtggccctgtacgacatccggactggaaaatgtcagacaatccatggacacaagggaccaatcactgcagtggcttttgctcctgatggaagatatcttgccacctactcaaacactgacagccacatttctttttggcagatgaacacgtcactgctgggaagcatcggcatgctgaactcggcacctcagctgcgctgcattaaaacctaccaggtgccccctgtgcagcccgcgtcccccggctcccacaatgccctcaagctggcccggctcatctggacttccaaccgcaacgtcatcctcatggcccatgacgggaaggagcaccgcttcatggtctaatgctgctgcctgccgccgtgactgcgttttagttctctaaattatccaagccgatgttgctctgtccttcctcacaccagattgttcccaggggcctgcccaccccagtgccatccagtggcacggccgggtcttgtcacttgtgcatgcttctcaggggcagaacccgctcgtgccatctgtcgattcagaggcacgcacacatgctctgcaggatgtggccatcctgtcaccaggtagtttttccctgccagagatggcaggggaaagccagtggttcctgggaacgctcttgttgcttggtgcaacagaagcacaaaaatcaataaacactgtgattgcactcccagcccagatcagcatttttagccatctcaaccgcacctctgaagtgctgcttgaatctggccgttctgacactgggtgttgaggtcatgtggcagtcctcacgattgaaattattgccctttgaattacctaaaatattgtttaccaaaaagattctgtgtttacatgttcttttcttctggtgattgctaggaaattactcaatccaatttcctagggtttagctaccaccttctttatcaacagctaaccaatttgagattcatgattaattatgtacacaaaaatattttccttgtagaaaatagttttccagacacttagccttctgaagtgctcatctcttgcttaaatgatagtctatttagtagtttaaaataaaaataatcactccctatgatctagttaatgtaattatccagtcactgtaactaatctcttgaagggacttttgtgataaagagccaagttcagaagcatagcgtgtaccgaaaatgaagactctcctatctactgctacagatcctgttgaagaaagagcttacccctttcccccggaaaacttgcaatcctgtagttcccatatgtgtggcatatgtcagttatgaaattattataattcagccttcaaactactactgatcaactaaaggaaagctaataaggtatttcttttaaacaagtattctggaaaagtaataactatggcacaaatgttcaggagtgtatataaaaatatgtgggctctcgatttatttgagcaaacattgcaatgagggtgttcattatgcttctaagtaagctttaactagaccactttcttcttatgtcagattgtgctggttctagctcataataatgaaaaaaatagaattatattttgtatgaattgtttctaacaaaccttgatctgtatatacttgtgaggggttgtttggttgcctaattgttgattggttggttagttgggcaaaatcatttattacatgcaaaaatagaaaattatttgttaaattcagagaaaatatgtgaagtttacaaaggaaccaaaatgataatgggagaatttagtcttaaaagtttaggttgtcagagtttatctgatatacaaaaaagtaggatcaaagtctaggaacaaacattggttatttcactgaaacagatttttaaagagcatattaagaaattaagaccattagatcatctctttcataatgatatgatgttatttccattgacggcaaatctatactgttccttggttttagagttgggtattctttcaaaagtgaatttaggcacatgcatgtacattgtatttataaagattatatatgtagtttccaaggaagaaacaaagacctatacagtttagactttatttgtttggtgaacgtgctgttgtgtttggcatagctagagaaatgtaaggtaaaaggctcactttgttttccagtgggtccagagtcttctctatacccaacatatgtttactttatgaacttaaatggaaattaatttattgtagactacatctctatttggaatgatgaggtaaatgtataccttagcattttctttaacaaaaatgttctgtgtgtcaggaaagaggtgtgagagtggtaggcagcctgccgcaaacacacggatggctccccccgccacgaaggttgagaacaaagccagggggcccagaggagcaatagccctgggccacaagcgtgggtaggcctttcacgtattccgtctgcacaggcaaccaaggccagtagaaagctatggctgcaaaaccctggggtggacgatgtttgatgattagacggtcatctctaactactaaactaatatctgcattcttgttaacataaatctctccttggctattttaatagccacagtcccaaacttcatcccagcttagatttctcagcactgaggtaaactctgcattgtcatcccagcgtacacctttaatgttttattgatttcactggcactgtatttggacctgtccttgtatatgtagagacatatgtggcttcattggtaatttacaagcaaaagatgacatgacgtgacacctgtatgaaaatgtgatgattgaactccctgtgtacagcgagtgaattaaaatgtctgcctctccagacatttcttaatgattccacttaatagactctatgtgtgctgaatgttcctgtgtacatatgtgtgttaaataaaacaattgtattgaagactgtttttctcacaatattaccttttccagtgttcactcatcttaaacatcctcagttgaaatccgtatgctccgctagccctgctgcttctaatcattcatttccctggagagctggcttgggaaaggcaacttattcccagaggacagtagagcagaagtgcagaggtaagctctccctccagaaactcactggcactctctgtggtttgggaaaggcgttgcatgcctgttgctttatctctactctacatgctcccaaatagactggtaatggcaccaaatcatatcttgtcagattggatggcatgggttggctgcctctcgggagctaggctgagatcatcaagttcattgcatttcacgctcagtttggagtcgaatttgaatccctcaggtaaagggtataattggttttcagaaaaatcaagaataataaaataggtccttactgctcatagagggttatgtgtaagtagtgaatgtacttcttgtctcttaattatttcagataagaacacaaaagcttgatttgagtcaatcatcgtgtaacagtataattttctgtaagaattcggtgaacattccaggagtggtctgaggcatcttgggccctattaaatgcccactgtgggccccaggaaatgttttaacatctcatgacttaaatgtattcttatagggaaaataggggcagtaacagttctatatgatcagcgatcacataaactgatcaaatgtggaaaggcgtgacgttaataggaaggtaaagccaagcagtgctgggtgaactttcacctttcaccccttcggctgactgacagagcccagtgttgaagaaaatcaatactttggagccaggagggaaatacttccaccctctaactagagaatgtgttttgacaaggccaagataatccaagctgcacaggagaaagagaaaagaagactcatttttaaagcctgacacttcaaggtgtttttgtgcaatggtttagagatcgtcaatacatacaaataccaaaggtcaaaaagaaaagccagaagaatttcaaaaattagatgttcagttctttttgctgtttaaaaaaaaaaaaaaaaggactacagagagttttgtgcttgtaattgtccttttaatgaactaagctcacaattgtgtgaccattgaggtgatcatccctctttaatcaaaacttacatttttgtagcagcagaacgatgaatattgaatgctcaaaaagcattcagacttcctgcttctgtacaccttttggctacagattgttttgttttgttttgttttgtttttttgagtggttacattgttttgtgctaacatctcagaatttggttttgcaattcatgttgattctgccataatggcattgtaaatcctggatcctccttcacattcagttcaatcctttgcatgagaaaagagttcttgtacctagaacttaattttttttctagtttcccaagtccctttaagcaaattacttatgaagatattctaattaatgtctctctgagtgagaggtttatgcacctctaggaagatggtaaacaattcattcttaccagcaagattagagccattcattctgtagacaaatacctccatcaagtggatatagattctttgctttcctactgataagaaaactaagaagccagtggtgcccatacctgccagacaagctcagaaggacaaaggagtcttaagtatctaaagtacatcatcaggcctgctgtaaacatgtgctaattaaagagtattaaaaatatagtgaaaatatagcttctatttatatacctgcttactcattaataaatcccgttctattctgaggtgatagatcaggctggaaatttttattttgttttgtttcaaaaagagaacgcagccagccaaacctcctcaatattctgagatttcccagagaaggccaggagtctagcactgctcgaattgtaggggtatgaagtaaatatgtgctgcatttgtgaaatccattgtattgcacctgtcaaatgctcagaagagtggcacacaggaagcactcaatagatgtaagctaatatttttaggagacaggagtcctaattgagcatggataaacaagatgacctgtgttctttggaaaacttggatttttgttttatgttttcatctctatgtggactccacaagtagatctgaacatcctatccaaaggagggctcctgtggttctgtttgtattccccagctgctttgccatattgctatgtgttaccaccccgcttctcaccaaaatttgtagacatgaagaaatgcctaaatacatgccaatggaggaaactggttggttgtggctgaagttatcactgattcctcaaaaagaaagatcaccgcattagatttaggactcacattagcatcaggggtgactttgagtttcttaatgagtttcttccaaatatgcatctatcgagattgaataagactctggacaaaagtattgtagagtggatttcatggaatcaccaaagcaaaggaaactgaatatgtaggttctgttgccaatatcttcttgttctgacttaacgtcaaaatgacttagtgctttagtcttcccaaatttgaaatgtattctctaaaacagcggccctcaacccctgatatcagactgtggcctgtgaggaaccaggctgcacagcaggaggtgagtggtggtgagccagcaaagtttcatctgtatttacagaggtccccatcacttgcattactgcctgagctcagcctcctgtcatatcagctgcggcattagattctcataagagcgtgaatcctattgtgaactgagcatgtgagggatctaggttgcactctccttgtgagaatctaatacctgatgatctgtcagtgtatcccatcacccccagagaggaccgtttagttgcaggaaaacaagctcagggctctcactgattctacattatggtgagttgtataattattttatatatatatatatatatatatatatatatatatatatatatacagtgtaataatagaaataatgtgcacaataaatataatgcatttgaatcatcccgaaaacatccccaaccaccagccttttttgcatgaaactggtccctcgtgcaaaaaaggttgggaaatgatgctctaaaacttgacccacccagcggcacttcaagttttagtgaaaatgtgtgaataaagatacggcaatgaaacattatttgtattcaaccagcaagcttgtattgaaccttagaatatgccaagcgtatgttctttattttattttcctcttgctgatgagctcacaatctcaccaagcaccataacactatggaataagtgctgagacccggggcaggtaaagagcaatgagaacacaggaagtgatcgattctgatgaggtggtattgttaggtttcccagagaggaaacatttgggctaggccttaaaaaataaataggaattaattaggaggatactggggatgttataatgtaggaatttatagaagtcaaagttttgtgtgatcggaatgagtataaactacttcagacctacaacctgaaggacattggtagatgctgccaacaatcaagaaagttcttcactttgcagccattattgcaataacagaaaaccagactcctttgtcaaaggacactcgaaatccataagtcaaaaaccctaataaaagatttttccggctttagtgttttccatgtttcattttctttatttaagaaaagcttttgttgttttaaaaataagttgtgtgttctcctactcctggattctactgtgtgactggcacagtgagttgaatgcctggcacagtgcactgcccaggtcctcccacccccacccaaatcccactgcagaaccgaagcattctaacagctgtgtgctgagtccttccgtaaagattgcttcccagccaaagagaactgtctcacccaaggtcatgcttcctttcctggggagcaaacacatcccatgatgggtcaggaaagaggtttaaagacccagccccggctgaggtgtggtggctcatgcctgtaatcccagcattttgcgagggtgaggcggggaggatcacttgaggtcaggagttcaagaccagcctggacaatgtggtgaaaccccatctgtattagaaatacaaaaattagatgggcgtgttggtgggcatctgtaatcccagctactcaggaggctgaggcaggagaatcacttgaacccaggaggtggaggttgcaacaagccgagattgtgccactgcactccagcccaggcaagagagtgagactctgggtgacagagactcagcaagtcgtaaggaaggtgctaaggatggtgagtctccgcctcaaaaaaaaaataaataaataaaaataaaagacccagccccaagctccatttcaaaaccacttggaaaggccatcccagctccagaactcccttgagcattgactgaaggcttcactgaactgcatcccagctcaacctctctgtctgcccaggcctgggcatttccttacagatgctgatcccgagaacactgctccataaacttcctatgtgcagacctctctcacacatagtctgcatcccaaagaacccaccaggagtgtcccaagaaaacagattcaaaaatggagtttgggagctgagccacccattgaaccatgaaaagaaggacccatcactggtcgtgggccctcatggacagcctctggcacgcttggctgcacaattgttaaaactttccttggtgatgcttgtatggcgtgctgatggagggcgatgtgctggagggtaccacgtggcaggaattgaaaagtaagggaaaggaaaaattataaagacgatggacttggatgactgttgtggagtgctctggaaaaaagacaatgaaaagctgaagggtgattaatcacccagtagaggctaaatgtgaaagcctctggctttctctcagagagagaaagtctctctgagactccttaacatctaaggagagcttcatctcctacagccaaacatgagcaggctcagcccatggagaagcacagctccagaggctgaactcacctctaaaaatcttctgccccagggtcagagccctgacagaggtgaacggggttctctgggttgatgcacttgaacaatcttgaacccccgattccagtgaaccctcctcgggcctgcctacatggccagctcctccctgttcaaagccggcgttcctctttctttgcttgaagataatgcagaggcttctcccatgcaaaactacacatgccccccactggagtgacttgggttaagtcatggtacaacctggctgccaaagtgctggacctgctaggacagggaaagaaccatctcccataggagctgtaggtcctcaccaacatgtacccaacatagccactgaaatgggactggatttagcaggtgctgggtcaaggggaaacggactataaagtgggtcaagggagagtttatcgataggagattgaacaacccgcaaggacccagggaaaaagtgctgccctgatgttataagctgcttggcttggagaaaatggtggctgacactaagaagaaatgtcagaactgatgtgacagagggtggaggcaagaacaggaaagctcagagtgaggagactgctggagcaggtatgctaggtacccccaaatccactggatgcctctgctctgcgagagaggctggggacattcattccagcaatgaattgaaggaaggtgctagaagggcacccacatccctgcaggccaggactgagggtagaagatgtcatgacagaactgggccccaggtatcaaggaggatgacaaggtcctgaaataatacagacctggtgggtgcaatcatcataattagtagcaagtttggagtggcggccagagagaccagacctgcagagatctttggatctaataaaacatgtcatccctaagtgcaagatgggagggcagccaacaagggtattgttcatctatacaggcaaaagaaatcgaaaatggatcacaggaggctgaaagcagccattccagtaagaagtcaaaatcccttgcctggtttgtaaacccaaatggcatggttagcaggagctcagaccccttgtggatgagactctgggtttgcccagtagtaagcaatggaaagtagcagagattcttgccaagggggaggagagtttagaatgagtagtagagaagggaagcaatagatatcagtggtggctttgggagcagctgcgacagcaggggttgtagtttgttccactaatatttctgttatgtttcccccagaatcctggaatggctgttcccaggcttttttcaaagcaagtggatctgagcggggcaaagggtgaaggcaggggacactgtggtatgcattcactcccccaggtactgggttgtcggcagctgatatttcccaactgagacctgctacaggaattgcttgaggctaaagagagccactctcctcaaggccacatcctcctccctaatgagagctacacccaataacccatcatggggataaaaggactcaaccctctttgcttcagtttggaacatctctgaagggccattccagcttcatagctcccagcgcatttgtcagagaactctgttgcaaccacatcacagtccagctcccccctgcctatgtattgcttccttcacacagatgttgatcccaggaacacttcctaatacacccgctttcagcaaa

SEQ ID NO: 199944 - DNA, 7213 bp, Homo sapiens
  Payload ID: 19442
  Gene Name: WD repeat domain 7
  Uniprot ID: Q9Y4E6
  ENST ID: ENST00000357574
  CDS Start-End: 236-4609
ctgatttactgcagtggcggcggcggcggcaccggcaccttgcagtatcactggggagacggcggctgtatagcgcttgccgccccacggattatcccagcaggatctacgcaccccgcatcctccgtagttccgccctatccttgtcctccttggctggggcgcccaccggcggtctgataggctacatcgcggcatgagatgaagctgtgacaggtttgaaaacacaaacacaatggcaggaaacagccttgttctacccattgttctttggggtcgaaaagcgcccacacattgcatctcagccgtacttttaacagatgatggggccacgatcgtaacaggatgtcacgacggacaaatatgtctctgggatctttcagtagaactgcaaattaatcctcgagcactgttgtttggtcatacagcatcaatcacttgtttgtctaaagcttgtgcttccagtgacaaacagtatattgtgagtgcatctgaaagtggagagatgtgcctctgggatgtgagtgatggcagatgtattgaatttacaaaattagcttgcacacatactggcatacagttctaccagttctctgttgggaatcagcgagaaggaaggcttttatgccacggacattaccctgaaatccttgttgtggatgctaccagccttgaagtattatactccttagtatcaaagatatcaccagactggattagctccatgagtattattcgatcccaccgaacacaagaggacacagtggtagcactctcggtgactggcatcctgaaggtctggattgttacctcggaaataagtgacatgcaggatactgagccaatatttgaggaggaatccaaaccaatttattgtcagaattgccaaagcatctctttttgtgcatttacacaaaggtcacttttggttgtgtgttccaaatattggagggtgttcgatgccggagactattccttgttgtgttcaggtcctagtgaaaatggacagacatggaccgggggggactttgtctcatcagataaagtcatcatttggacagaaaatgggcaaagttatatttacaaactacctgccagttgccttccagctagtgattcattccgcagtgatgtggggaaggcagttgaaaatttaattcctcctgtacaacatatcctcttggatcgaaaagataaagagttgctaatttgtcctcctgttactcggttcttctatggatgcagagaatatttccataaactgttaattcagggtgattcttctggaaggttgaatatttggaacatatcagacacagctgataaacagggaagtgaagaagggctggcaatgacaacttctattagtttgcaagaggcatttgataaactgaatccttgtcctgctggaattatagatcagctgagtgtgattcccaatagtaatgaacctcttaaagtaactgcaagtgtgtacataccagcacatggacgacttgtttgtggtcgtgaagatggaagcatagttattgtacctgccacacagacggccatagtacagctgttgcaaggggaacacatgctcagaagaggttggccacctcacagaacactccgtggtcatcggaacaaagtcacatgtttgctatatcctcatcaggtctcagctcggtatgatcaaagatacctgatatctggaggtgtggatttttcagtcataatttgggacatattttctggagaaatgaaacatatcttctgtgttcatggtggtgagattactcaacttctagttccacctgaaaactgtagtgcaagagtacagcactgcatctgctctgtagccagtgaccactcagtaggacttctaagtttgcgagagaaaaaatgcataatgttggcatctcgtcacctttttcctattcaagtaatcaaatggaggccttctgatgattacctggtggtggggtgttcagatggttctgtgtacgtctggcaaatggatactggtgcattggatcgttgtgtgatggggataacagcagttgagattctaaacgcttgtgatgaagctgttcctgctgctgttgattcacttagtcatccagcagtcaacctaaaacaagctatgacgagacgtagtcttgctgctcttaaaaatatggcccatcataagctacaaacccttgcaactaacctcttggcttctgaggcatctgacaagggaaatttacctaaatattctcataactccctgatggttcaagcaataaagacaaacctaacagacccggacatacatgtgctattctttgatgtggaagcgttgattattcaactcctgactgaagaagcctctaggccgaatactgctcttatttccccagagaatttgcaaaaagcatctggcagttcagacaaagggggctcttttttaactggaaaacgagcagcagttctcttccaacaagtgaaagaaacgatcaaagagaacatcaaggaacacctccttgatgatgaagaggaggatgaggagataatgaggcagagaagggaagaaagtgatcctgaatatcggtccagcaaatcaaagccattgaccctattagaatataatttaactatggacactgcaaagctgtttatgtcctgccttcacgcctggggtttgaatgaagtactggatgaagtttgcctggatcgccttggaatgctgaaaccccactgcaccgtatcgtttggcctcttgtcaagaggaggccatatgtcactgatgctgccgggttataatcagcctgcttgtaaactgtcacatgggaaaacagaagtaggaaggaagctgccagcgtctgagggagtaggaaagggaacttacggagtgtcccgtgccgtcaccacacagcatctcctgtctatcatttctttggcaaatactttaatgagtatgaccaatgcaacttttattggtgatcatatgaagaagggtcctaccaggccacctagaccaagcaccccagacctttctaaggcaaggggttcccctccaacttccagtaatattgtgcaaggacagattaaacaaggttggagtcagttagctgctatgcactgtgttatgctgccagacctactgggattggataaatttaggcctccccttctggagatgctggcccgaagatggcaagatcgatgcttggaggtgagagaagccgcgcaggccctgcttctggcggaactgagaagaattgagcaggcaggcaggaaggaagccattgatgcctgggctccttacttacctcagtacatagaccacgtcatatcacctggagtcacatcagaagccgcgcagactatcaccacggctcctgatgcctcagggcctgaagcaaaagtccaggaggaagagcatgaccttgttgacgatgacatcaccactggttgcttatcaagtgtcccacaaatgaaaaaaatttctacatcttacgaggaaagacggaagcaagctaccgctattgttttacttggagtaataggagctgaatttggtgctgaaattgaacctcctaaactattgaccagacctcgaagctctagccaaattcctgagggattcgggttgactagtggtggatccaactactcgctggccagacatacttgcaaggcactgacgtttcttctgctacagcctccaagccccaaacttcctccacacagcactatccgaagaacagccattgatctgattggacgtgggttcactgtttgggagccttacatggatgtgtccgctgttctgatggggcttctcgaactttgtgccgatgccgagaaacaacttgccaacatcacaatggggttgcctctgagcccagcagctgactcggcccgctctgcgaggcatgccctctcgctcattgccaccgccagaccacccgccttcatcaccaccatagccaaagaggtacacagacatacggctcttgcagcaaatacccaatcacagcagaatatgcacacaacaactcttgcacgagctaaaggggaaattttgagagtcattgaaattcttattgaaaagatgcccacagatgttgtggatcttctcgtggaggttatggacatcattatgtactgccttgaaggatctttagttaaaaagaaaggtcttcaagaatgtttcccagccatctgcaggttctacatggtcagctattatgagcggaatcacagaatagcagttggagctcgccatggttcagtggccctgtacgacatccggactggaaaatgtcagacaatccatggacacaagggaccaatcactgcagtggcttttgctcctgatggaagatatcttgccacctactcaaacactgacagccacatttctttttggcagatgaacacgtcactgctgggaagcatcggcatgctgaactcggcacctcagctgcgctgcattaaaacctaccaggtgccccctgtgcagcccgcgtcccccggctcccacaatgccctcaagctggcccggctcatctggacttccaaccgcaacgtcatcctcatggcccatgacgggaaggagcaccgcttcatggtctaatgctgctgcctgccgccgtgactgcgttttagttctctaaattatccaagccgatgttgctctgtccttcctcacaccagattgttcccaggggcctgcccaccccagtgccatccagtggcacggccgggtcttgtcacttgtgcatgcttctcaggggcagaacccgctcgtgccatctgtcgattcagaggcacgcacacatgctctgcaggatgtggccatcctgtcaccaggtagtttttccctgccagagatggcaggggaaagccagtggttcctgggaacgctcttgttgcttggtgcaacagaagcacaaaaatcaataaacactgtgattgcactcccagcccagatcagcatttttagccatctcaaccgcacctctgaagtgctgcttgaatctggccgttctgacactgggtgttgaggtcatgtggcagtcctcacgattgaaattattgccctttgaattacctaaaatattgtttaccaaaaagattctgtgtttacatgttcttttcttctggtgattgctaggaaattactcaatccaatttcctagggtttagctaccaccttctttatcaacagctaaccaatttgagattcatgattaattatgtacacaaaaatattttccttgtagaaaatagttttccagacacttagccttctgaagtgctcatctcttgcttaaatgatagtctatttagtagtttaaaataaaaataatcactccctatgatctagttaatgtaattatccagtcactgtaactaatctcttgaagggacttttgtgataaagagccaagttcagaagcatagcgtgtaccgaaaatgaagactctcctatctactgctacagatcctgttgaagaaagagcttacccctttcccccggaaaacttgcaatcctgtagttcccatatgtgtggcatatgtcagttatgaaattattataattcagccttcaaactactactgatcaactaaaggaaagctaataaggtatttcttttaaacaagtattctggaaaagtaataactatggcacaaatgttcaggagtgtatataaaaatatgtgggctctcgatttatttgagcaaacattgcaatgagggtgttcattatgcttctaagtaagctttaactagaccactttcttcttatgtcagattgtgctggttctagctcataataatgaaaaaaatagaattatattttgtatgaattgtttctaacaaaccttgatctgtatatacttgtgaggggttgtttggttgcctaattgttgattggttggttagttgggcaaaatcatttattacatgcaaaaatagaaaattatttgttaaattcagagaaaatatgtgaagtttacaaaggaaccaaaatgataatgggagaatttagtcttaaaagtttaggttgtcagagtttatctgatatacaaaaaagtaggatcaaagtctaggaacaaacattggttatttcactgaaacagatttttaaagagcatattaagaaattaagaccattagatcatctctttcataatgatatgatgttatttccattgacggcaaatctatactgttccttggttttagagttgggtattctttcaaaagtgaatttaggcacatgcatgtacattgtatttataaagattatatatgtagtttccaaggaagaaacaaagacctatacagtttagactttatttgtttggtgaacgtgctgttgtgtttggcatagctagagaaatgtaaggtaaaaggctcactttgttttccagtgggtccagagtcttctctatacccaacatatgtttactttatgaacttaaatggaaattaatttattgtagactacatctctatttggaatgatgaggtaaatgtataccttagcattttctttaacaaaaatgttctgtgtgtcaggaaagaggtgtgagagtggtaggcagcctgccgcaaacacacggatggctccccccgccacgaaggttgagaacaaagccagggggcccagaggagcaatagccctgggccacaagcgtgggtaggcctttcacgtattccgtctgcacaggcaaccaaggccagtagaaagctatggctgcaaaaccctggggtggacgatgtttgatgattagacggtcatctctaactactaaactaatatctgcattcttgttaacataaatctctccttggctattttaatagccacagtcccaaacttcatcccagcttagatttctcagcactgaggtaaactctgcattgtcatcccagcgtacacctttaatgttttattgatttcactggcactgtatttggacctgtccttgtatatgtagagacatatgtggcttcattggtaatttacaagcaaaagatgacatgacgtgacacctgtatgaaaatgtgatgattgaactccctgtgtacagcgagtgaattaaaatgtctgcctctccagacatttcttaatgattccacttaatagactctatgtgtgctgaatgttcctgtgtacatatgtgtgttaaataaaacaattgtattgaagactgtttttctcacaata

SEQ ID NO: 199945 - DNA, 650 bp, Homo sapiens
  Payload ID: 19442
  Gene Name: WD repeat domain 7
  ENST ID: ENST00000593058
  CDS Start-End: 144-650
ctagccgggggcggtgctagctgtcagatcgctgcggctgcaagcctgcaggtcgggcccaaaagtaggcgccgttaccaagagcgtgggggccagccgggggtctttgtggctcccttgcctggtttgaaaacacaaacacaatggcaggaaacagccttgttctacccattgttctttggggtcgaaaagcgcccacacattgcatctcagccgtacttttaacagatgatggggccacgatcgtaacaggatgtcacgacggacaaatatgtctctgggatctttcagtagaactgcaaattaatcctcgagcactgttgtttggtcatacagcatcaatcacttgtttgtctaaagcttgtgcttccagtgacaaacagtatattgtgagtgcatctgaaagtggagagatgtgcctctgggatgtgagtgatggcagatgtattgaatttacaaaattagcttgcacacatactggcatacagttctaccagttctctgttgggaatcagcgagaaggaaggcttttatgccacggacattaccctgaaatccttgttgtggatgctaccagccttgaagtattatactccttagtatcaaagatatcaccagactggattagctccatgagtattattcgatcc

SEQ ID NO: 199946 - DNA, 572 bp, Homo sapiens
  Payload ID: 19442
  Gene Name: WD repeat domain 7
  ENST ID: ENST00000585669
  CDS Start-End: 1-122
acatggtcagctattatgagcggaatcacagaatagcagttggagctcgccatggttcagtggccctgtacgacatccggactggaaaatgtcaggcactataccaggcaaaggagaggtgacaaaggagcgggaacacatgtgaagatcctgacctactgctctaaccaaaccatcttccgttaaccataacccaaatcaaaacccacgaaaatgccaagtcccatcatgacggacatttacttaggaatgtgattgctgtccagtgagttagtgtgtacatgtgtctgctgaagtcctgccatgtaaaagcctgaaatgtctagaaagggtggagataatcaagaccattcatgctgctgaggaactccatgtggaagcaggaggggagggatttattttcatagcacagtataagacttctagcatgtgttcaaatagttttctattagaaatactgaaaaaaacatttagctttgggtttgcccagatctgaagaaaacattttgtgtgactttttaggcatatgcaagtgaaactttaataaatatttcatatgagcagtgtaaata

SEQ ID NO: 199947 - DNA, 544 bp, Homo sapiens
  Payload ID: 19442
  Gene Name: WD repeat domain 7
  ENST ID: ENST00000589935
  CDS Start-End: 235-438
agttggggctggtgtcagctgatttactgcagtggcggcggcggcggcaccggcaccttgcagtatcactggggagacggcggctgtatagcgcttgccgccccacggattatcccagcaggatctacgcaccccgcatcctccgtagttccgccctatccttgtcctccttggctggggcgcccaccggcggtctgataggctacatcgcggcatgagatgaagctgtgacagatgaacacgtcactgctgggaagcatcggcatgctgaactcggcacctcagctgcgctgcattaaaacctaccaggtgccccctgtgcagcccgcgtcccccggctcccacaatgccctcaagctggcccggctcatctggacttccaaccgcaacgtcatcctcatggcccatgacgggaaggagcaccgcttcatggtctaatgctgctgcctgccgccgtgactgcgttttagttctctaaattatccaagccgatgttgctctgtccttcctcacaccagattgttcccaggggcctgcccacccc

SEQ ID NO: 199948 - DNA, 522 bp, Homo sapiens
  Payload ID: 19442
  Gene Name: WD repeat domain 7
  ENST ID: ENST00000591449
  CDS Start-End: 1-188
atgccctctcgctcattgccaccgccagaccacccgccttcatcaccaccatagccaaagagcaggcatatgaaaactcaaatacattaaaggtgttcacacttttcacatgtacacagacatacggctcttgcagcaaatacccaatcacagcagaatatgcacacaacaactcttgcacgagctaaaggggaaattttgagagtcattgaaattcttattgaaaagatgcccacagatgttgtggatcttctcgtggaggttatggacatcattatgtactgccttgaaggatctttagttaaaaagaaaggtcttcaagaatgtttcccagccatctgcaggttctacatggtcagctattatgagcggaatcacagaatagcagttggagctcgccatggttcagtggccctgtacgacatccggactggaaaatgtcagacaatccatggacacaagggaccaatcactgcagtggcttttgctcctgatggaagatatcttgccacctactcaaac

SEQ ID NO: 199949 - DNA, 5257 bp, Homo sapiens
  Payload ID: 19442
  Gene Name: WD repeat domain 7
  ENST ID: ENST00000615645
  CDS Start-End: 212-2659
ggcggcaccggcaccttgcagtatcactggggagacggcggctgtatagcgcttgccgccccacggattatcccagcaggatctacgcaccccgcatcctccgtagttccgccctatccttgtcctccttggctggggcgcccaccggcggtctgataggctacatcgcggcatgagatgaagctgtgacaggtttgaaaacacaaacacaatggcaggaaacagccttgttctacccattgttctttggggtcgaaaagcgcccacacattgcatctcagccgtacttttaacagatgatggggccacgatcgtaacaggatgtcacgacggacaaatatgtctctgggatctttcagtagaactgcaaattaatcctcgagcactgttgtttggtcatacagcagttctcttccaacaagtgaaagaaacgatcaaagagaacatcaaggaacacctccttgatgatgaagaggaggatgaggagataatgaggcagagaagggaagaaagtgatcctgaatatcggtccagcaaatcaaagccattgaccctattagaatataatttaactatggacactgcaaagctgtttatgtcctgccttcacgcctggggtttgaatgaagtactggatgaagtttgcctggatcgccttggaatgctgaaaccccactgcaccgtatcgtttggcctcttgtcaagaggaggccatatgtcactgatgctgccgggttataatcagcctgcttgtaaactgtcacatgggaaaacagaagtaggaaggaagctgccagcgtctgagggagtaggaaagggaacttacggagtgtcccgtgccgtcaccacacagcatctcctgtctatcatttctttggcaaatactttaatgagtatgaccaatgcaacttttattggtgatcatatgaagaagggtcctaccaggccacctagaccaagcaccccagacctttctaaggcaaggggttcccctccaacttccagtaatattgtgcaaggacagattaaacaagttgctgcacctgtcgtttccgctcggtctgatgctgatcactctggctctgaccctccttctgctcctgctttacatacctgtttcttagtaaatgaaggttggagtcagttagctgctatgcactgtgttatgctgccagacctactgggattggataaatttaggcctccccttctggagatgctggcccgaagatggcaagatcgatgcttggaggtgagagaagccgcgcaggccctgcttctggcggaactgagaagaattgagcaggcaggcaggaaggaagccattgatgcctgggctccttacttacctcagtacatagaccacgtcatatcacctggagtcacatcagaagccgcgcagactatcaccacggctcctgatgcctcagggcctgaagcaaaagtccaggaggaagagcatgaccttgttgacgatgacatcaccactggttgcttatcaagtgtcccacaaatgaaaaaaatttctacatcttacgaggaaagacggaagcaagctaccgctattgttttacttggagtaataggagctgaatttggtgctgaaattgaacctcctaaactattgaccagacctcgaagctctagccaaattcctgagggattcgggttgactagtggtggatccaactactcgctggccagacatacttgcaaggcactgacgtttcttctgctacagcctccaagccccaaacttcctccacacagcactatccgaagaacagccattgatctgattggacgtgggttcactgtttgggagccttacatggatgtgtccgctgttctgatggggcttctcgaactttgtgccgatgccgagaaacaacttgccaacatcacaatggggttgcctctgagcccagcagctgactcggcccgctctgcgaggcatgccctctcgctcattgccaccgccagaccacccgccttcatcaccaccatagccaaagaggtacacagacatacggctcttgcagcaaatacccaatcacagcagaatatgcacacaacaactcttgcacgagctaaaggggaaattttgagagtcattgaaattcttattgaaaagatgcccacagatgttgtggatcttctcgtggaggttatggacatcattatgtactgccttgaaggatctttagttaaaaagaaaggtcttcaagaatgtttcccagccatctgcaggttctacatggtcagctattatgagcggaatcacagaatagcagttggagctcgccatggttcagtggccctgtacgacatccggactggaaaatgtcagacaatccatggacacaagggaccaatcactgcagtggcttttgctcctgatggaagatatcttgccacctactcaaacactgacagccacatttctttttggcagatgaacacgtcactgctgggaagcatcggcatgctgaactcggcacctcagctgcgctgcattaaaacctaccaggtgccccctgtgcagcccgcgtcccccggctcccacaatgccctcaagctggcccggctcatctggacttccaaccgcaacgtcatcctcatggcccatgacgggaaggagcaccgcttcatggtctaatgctgctgcctgccgccgtgactgcgttttagttctctaaattatccaagccgatgttgctctgtccttcctcacaccagattgttcccaggggcctgcccaccccagtgccatccagtggcacggccgggtcttgtcacttgtgcatgcttctcaggggcagaacccgctcgtgccatctgtcgattcagaggcacgcacacatgctctgcaggatgtggccatcctgtcaccaggtagtttttccctgccagagatggcaggggaaagccagtggttcctgggaacgctcttgttgcttggtgcaacagaagcacaaaaatcaataaacactgtgattgcactcccagcccagatcagcatttttagccatctcaaccgcacctctgaagtgctgcttgaatctggccgttctgacactgggtgttgaggtcatgtggcagtcctcacgattgaaattattgccctttgaattacctaaaatattgtttaccaaaaagattctgtgtttacatgttcttttcttctggtgattgctaggaaattactcaatccaatttcctagggtttagctaccaccttctttatcaacagctaaccaatttgagattcatgattaattatgtacacaaaaatattttccttgtagaaaatagttttccagacacttagccttctgaagtgctcatctcttgcttaaatgatagtctatttagtagtttaaaataaaaataatcactccctatgatctagttaatgtaattatccagtcactgtaactaatctcttgaagggacttttgtgataaagagccaagttcagaagcatagcgtgtaccgaaaatgaagactctcctatctactgctacagatcctgttgaagaaagagcttacccctttcccccggaaaacttgcaatcctgtagttcccatatgtgtggcatatgtcagttatgaaattattataattcagccttcaaactactactgatcaactaaaggaaagctaataaggtatttcttttaaacaagtattctggaaaagtaataactatggcacaaatgttcaggagtgtatataaaaatatgtgggctctcgatttatttgagcaaacattgcaatgagggtgttcattatgcttctaagtaagctttaactagaccactttcttcttatgtcagattgtgctggttctagctcataataatgaaaaaaatagaattatattttgtatgaattgtttctaacaaaccttgatctgtatatacttgtgaggggttgtttggttgcctaattgttgattggttggttagttgggcaaaatcatttattacatgcaaaaatagaaaattatttgttaaattcagagaaaatatgtgaagtttacaaaggaaccaaaatgataatgggagaatttagtcttaaaagtttaggttgtcagagtttatctgatatacaaaaaagtaggatcaaagtctaggaacaaacattggttatttcactgaaacagatttttaaagagcatattaagaaattaagaccattagatcatctctttcataatgatatgatgttatttccattgacggcaaatctatactgttccttggttttagagttgggtattctttcaaaagtgaatttaggcacatgcatgtacattgtatttataaagattatatatgtagtttccaaggaagaaacaaagacctatacagtttagactttatttgtttggtgaacgtgctgttgtgtttggcatagctagagaaatgtaaggtaaaaggctcactttgttttccagtgggtccagagtcttctctatacccaacatatgtttactttatgaacttaaatggaaattaatttattgtagactacatctctatttggaatgatgaggtaaatgtataccttagcattttctttaacaaaaatgttctgtgtgtcaggaaagaggtgtgagagtggtaggcagcctgccgcaaacacacggatggctccccccgccacgaaggttgagaacaaagccagggggcccagaggagcaatagccctgggccacaagcgtgggtaggcctttcacgtattccgtctgcacaggcaaccaaggccagtagaaagctatggctgcaaaaccctggggtggacgatgtttgatgattagacggtcatctctaactactaaactaatatctgcattcttgttaacataaatctctccttggctattttaatagccacagtcccaaacttcatcccagcttagatttctcagcactgaggtaaactctgcattgtcatcccagcgtacacctttaatgttttattgatttcactggcactgtatttggacctgtccttgtatatgtagagacatatgtggcttcattggtaatttacaagcaaaagatgacatgacgtgacacctgtatgaaaatgtgatgattgaactccctgtgtacagcgagtgaattaaaatgtctgcctctccagacatttcttaatgattccacttaatagactctatgtgtgctgaatgttcctgtgtacatatgtgtgttaaataaaacaattgtattgaagactgtttttctc

SEQ ID NO: 199950 - DNA, 2983 bp, Homo sapiens
  Payload ID: 19443
  Gene Name: WD repeat domain 70
  Uniprot ID: Q9NW82
  ENST ID: ENST00000265107
  CDS Start-End: 157-2121
cgcggtccctctgcggaaggcgccgctcttggcttcggcggcgccgctgtagcttgaaggcggtacttcctccagcatttgccgcaagttattggcaagttcccctgcagttgtttgggctgtccctgtggctggttctggggtgtgcggccagccatggagcgctctgggcccagcgaagtgacaggctcagacgcgtcgggaccggacccgcagcttgcggtcaccatgggcttcacggggttcggtaaaaaagctcgcacatttgacttggaagcaatgtttgaacaaactcgaaggacagctgtggaaagaagtcgcaaaacactggaagcaagagaaaaagaggaagaaatgaacagagagaaagaattaagaagacaaaatgaagatattgagccaacatcctcaagatcaaatgtggtcagagattgctccaaatcatcttccagggatacgagcagcagtgaaagtgaacagagttctgactcttctgatgatgagttaattggccctcctttaccccctaaaatggtaggaaaaccagttaattttatggaggaagatatcctcggtcctttacctccacctcttaatgaagaagaagaagaagcagaggaagaagaagaggaagaggaggaagaggaaaatcctgttcacaagattcctgactcgcatgagataacgctgaagcatggcactaaaacagtgtctgctttgggtctggatccctcaggtgcccgtttggtgacaggaggatatgactatgatgttaagttttgggattttgctggaatggatgcttcttttaaggcatttcgatcccttcagccctgtgagtgccatcagatcaagtcattacagtatagtaacacaggagacatgattcttgttgtatctggaagctctcaggccaaggtgattgacagagatggttttgaagtaatggaatgtataaaaggagaccagtatattgtggacatggccaacaccaagggtcatacagcaatgcttcatactggctcatggcatcccaaaataaagggagaatttatgacttgctcaaatgatgcgactgtgaggacgtgggaagttgaaaatccaaagaagcaaaaaagtgtgtttaaaccacggacgatgcaaggcaaaaaagtcattcccactacgtgcacatatagtagagatggaaacctcatagcagctgcctgccagaatggaagcatacagatctgggaccgaaatttgactgttcatcctaagttccactataaacaggctcatgactcgggcacagacacttcttgcgtgactttttcctatgatggtaatgtccttgcctctcgtggaggtgacgattcattaaaattatgggacatccgacaatttaataaaccacttttttcagcctcgggtcttcccaccatgttcccaatgactgactgctgtttcagtccagatgataagctcatagtcactggtacatctattcaaagaggatgtggcagcggcaaacttgttttctttgagcgtaggactttccaaagggtgtatgaaatagacatcacagatgcgagtgttgttcgctgcctgtggcatccaaagctgaaccagatcatggttggaactggaaatggattggctaaagtctattacgaccccaacaagagtcagaggggagcaaaattatgtgtggttaaaacccagcggaaggcaaaacaagctgagactctaactcaggactacatcatcacccctcatgccttgcctatgttccgtgagccccgccaacggagtacaaggaaacagctggagaaggacagactggatcccctgaagtcgcataaacctgaacctcctgtagcaggcccaggtcgtggtggccgagttggaacccacgggggcactctctcttcctatattgtgaagaacattgctttggacaagaccgatgacagtaatcctcgggaagccattttgcgtcatgccaaagcagcagaagacagcccatattgggtttctccagcatattccaagactcagcccaaaaccatgtttgcccaagttgaatctgatgatgaggaagcaaagaatgagccagaatggaaaaaacgtaaaatttgaagaatctcatttgagagctgtttgcatgagtgggaggggtatgggacaggtttgggttttttttttatgctcatgaaattaaaaattcatttttatgaacaggttttgtcctttgcattattgaactggtcaaaagtttggtggctaggcttcactaaaattgtgcttaaattttcttacctgcaactattaaactgattacagataaacaagaaacagattcttagtctattaccaagtactttaggtatttggaaactttattcaacaattattggtcttgtccagattctcataaccttagagaggaaaatgtacattaagatgtgcatctgtctctagcaattctaggaacataatatagaaatagagatcaaaaagtttaatgtttctgtataatttcacaacagttgtttacatgactgtaattaattaggctgagttcaaaccaaatacattgccatactgggaaagagcattatctcattatccttcaatagcagaatacagtggttaagagttaggagtgggctttgaagtcagactcatgtggattcaagtcctggctttgctctttacttctgggtcatcttaagagagttatttaacttttcttttctagcctcagatgatgaaatagtacgtactttgcaggttcgtcagaagaattaaatgggacatgcctcacagagcatttagtacagtacctggaacacagtaaatgtataccaaatatttgctattttaaaatagggctaatatttactttgcttggtttttatcagtattaaattagaaaggtatagaattgctttgtaaatgtaaagactaaacagaagacattaaaaattattctaaaaaa

SEQ ID NO: 199951 - DNA, 1526 bp, Homo sapiens
  Payload ID: 19443
  Gene Name: WD repeat domain 70
  ENST ID: ENST00000504564
  CDS Start-End: 84-1247
agcatttgccgcaagttattggcaagttcccctgcagttgtttgggctgtccctgtggctggttctggggtgtgcggccagccatggagcgctctgggcccagcgaagtgacaggctcagacgcgtcgggaccggacccgcagcttgcggtcaccatgggcttcacggggttcggtaaaaaagctcgcacatttgacttggaagcaatgtttgaacaaactcgaaggacagctgtggaaagaagtcgcaaaacactggaagcaagagaaaaagaggaagaaatgaacagagagaaagaattaagaagacaaaatgaagatattgagccaacatcctcaagatcaaatgtggtcagagattgctccaaatcatcttccagggatacgagcagcagtgaaagtgaacagagttctgactcttctgatgatgagttaattggccctcctttaccccctaaaatggtaggaaaaccagttaattttatggaggaagatatcctcggtcctttacctccacctcttaatgaagaagaagaagaagcagaggaagaagaagaggaagaggaggaagaggaaaatcctgttcacaagattcctgactcgcatgagataacgctgaagcatggcactaaaacagtgtctgctttgggtctggatccctcaggtgcccgtttggtgacaggaggatatgactatgatgttaagttttgggattttgctggaatggatgcttcttttaaggcatttcgatcccttcagccctgtgagtgccatcagatcaagtcattacagtatagtaacacaggagacatgattcttgttgtatctggaagctctcaggccaaggtgattgacagagatggttttgaagtaatggaatgtataaaaggagaccagtatattgtggacatggccaacaccaagggtcatacagcaatgcttcatactggctcatggcatcccaaaataaagggagaatttatgacttgctcaaatgatgcgactgtgaggacgtgggaagttgaaaatccaaagaagcaaaaaagtgtgtttaaaccacggacgatgcaaggcaaaaaagtcattcccactacgtgcacatatagtagagatggaaacctcatagcagctgcctgccagaatggaagcatacagatctgggaccgaaatttgactagcaacaagttaagactgtcatatggaactgtctgcatgctctgggctcacactgaagtttgtgtgatgtgaatccactggactctataacttttaaggttcatcctaagttccactataaacaggctcatgactcgggcacagacacttcttgcgtgactttttcctatgatggtaatgtccttgcctctcgtggaggtaggttaaaagctttctttttgatgtatttctctatataaaataatcatctttaacaaatatgacaataatatcctagtgcttagtaaagcttgctttgatttttgttaatgcacctttgccagtctgatttcttcattaaaatacatttct

SEQ ID NO: 199952 - DNA, 5887 bp, Homo sapiens
  Payload ID: 19444
  Gene Name: WD repeat domain 72
  Uniprot ID: Q3MJ13
  ENST ID: ENST00000360509
  CDS Start-End: 43-3351
cctctgccgctcctccgccccacggctcaggattcgcccaaaatgaggacttccctgcaggcagtggcactctggggacagaaggcccctccccacagcatcactgccatcatgatcactgatgaccagcgaacgattgtgactggaagtcaagagggtcagctctgtctctggaatctctcacatgaactaaagatttcagcgaaagaactcctatttggtcattcagcttcggtaacatgtttggcaagagcaagggacttctctaaacagccctacattgttagtgctgctgaaaatggggagatgtgtgtttggaatgtcaccaatggacagtgcatggagaaggctacacttccttacaggcacactgcaatctgttattaccactgctcattccggatgacaggagaaggctggcttctttgttgtggagaatatcaagatgtccttataattgatgccaaaactttggctgttgttcacagttttagatcatctcagtttcctgactggatcaactgcatgtgcattgttcactccatgagaattcaagaagattctctcttggtggtatcagtagctggtgagctcaaagtatgggatctttcctcatctatcaacagcattcaggaaaagcaagatgtctatgaaaaagaatccaagtttcttgagtccttgaactgccagacaattcgattttgcacatatactgagagacttctattggtggtattttctaaatgttggaaggtttatgattattgtgatttttcccttctgctgactgaagttagtagaaatgggcagttctttgctggtggagaagtgattgctgctcacagaatcctcatctggacagaagatggtcacagttacatctatcagctgctgaacagtgggctttcaaaaagcatataccctgctgatggaagagtgcttaaagagaccatttatcctcatttactgtgctctacttctgtgcaggaaaataaggaacagagccgtccctttgttatgggctacatgaatgaaaggaaagagcctttttacaaggtacttttctctggagaagtctcaggaagaattactttgtggcacatccctgatgttcctgtatccaagtttgatggttctcctagagagataccagtaactgccacctggactcttcaagataattttgataagcatgatactatgtcacaaagtattattgactatttctctgggcttaaagatggggcaggaactgctgtagtcacttcatcagagtatattccaagtcttgataaactaatatgtggctgtgaagatgggacaattatcattacccaggctttgaatgctgccaaagcaagacttctggaaggtggttctttagtaaaagattctccccctcataaagttcttaaaggccaccaccaaagtgtcacttcattactctatccacatggtctctcttcgaaattagaccaaagttggatgttgtctggggacctggactcatgtgtgatcttgtgggatatctttactgaagaaattttgcataaattctttttggaagctggtccagtaacaagtcttttgatgtcaccagagaagtttaaactaaggggtgagcagataatttgctgtgtgtgcggtgaccattccgtggctctccttcaccttgagggaaagagttgcctcctgcatgcccggaagcacctttttcctgtgaggatgataaaatggcacccggttgagaattttttaattgttggatgtgcagatgactcagtttatatctgggaaattgaaacaggcactttggaaagacatgagacaggagaaagagcacgaattattcttaattgttgtgatgattcacagcttgtgaagtctgtacttcccattgcctcagagacacttaagcacaaaagtatagaacagagatcctccagcccctaccagcttgggccattaccttgccctggtctgcaggtggagtcttcatgtaaggttactgatgccaaattttgcccaagaccttttaatgtcttgcctgtgaagacaaaatggagtaacgttggctttcatattcttctatttgatctggaaaaccttgttgaacttttgctaccaactccactcagtgatgttgactcttccagttcattctatggtggtgaggtcctgagaagagccaagagcacagtggagaagaagacactgacactgagaaaaagtaaaactgcctgtggtcctctttcagcagaggcactagccaagcctattactgaaagcctggcccaaggagataataccatcaaattctcagaagaaaatgatggcattaaaaggcagaagaaaatgaagatctccaaaaaaatgcagcctaagccatcaagaaaagtagatgccagtctcacaatagacacagcaaaattgtttctgtcttgccttttgccatggggagtggataaagatttagattatctttgcattaagcacctcaatattttaaagcttcagggtcctatttctttgggaatttctttgaatgaagataatttctcactgatgttgccaggttgggatttatgcaatagtggaatgataaaagactattcaggagtaaatttattttccaggaaagttttggacttgtcagataaatacacagccactcttccaaatcaggttggaattccaagaggattggaaaataattgtgattctttgcgagagtcagatactatagtttatttgttgagcagactatttttagttaataaattagttaacatgcctttagaattggcatgtagagttggcagttctttcagaatggaaagtatacataataagatgagaggtgctgggaatgacattttaaatatgtcaagcttctacagttgcttacgaaatggtaagaatgaatcccatgtacctgaggctgacctttcacttttgaagctaatttcctgttggagagaccagtctgtgcaggtaactgaagcaatacaagctgttctcttggcggaagttcaacaacacatgaagagtttgggaaagatacccgtcaatagtcaaccagtgtccatggcagagaatggtaactgtgagatgaagcagatgctgccaaagctggaatggacagaagaactagagttacagtgtgttagaaacactttgcctctgcaaactccagtcagcccggtcaagcatgacagcaactcaaactcggcaaacttccaagacgtggaggacatgcctgacagatgtgccttggaagagtctgagagtccaggtgagccaaggcatcattcatggatagcaaaggtctgcccctgcaaggtgtcttaaatggaatctcatcagtaggagctgaatttggacaaattaagaaatccaaaagatgccatttgtttattactgtataaaagcattgttgttattggtcaagttattaggctgtagtggatttgctaatactttagccaacatgtattaaagtgattttaatacatgctgattacaatgcaatacatactgattgaaaatattcatattcatctaattttagaaaaatattgcctagatcattctctattcctgtttcttactttttctgttaatatttccaacagggaatgccagtccacagacacaaatttaatactgctttaaattttctcctatccttttagtccctgaattatataataaacaatgttaaaaccaatgtagtacacaatacttacttacaaatttaatactgcttcaaggtatttaatctaaaattttaccaactttgatttgtctggttaggatattttgttttagtggatatgctttaattcggatcaattactgcagtaaatctcatccctaagcatgaaatgttgtcaacaaatacccagttccatttagttatcaattagcccaaataagagatacaaagtataacagtgaccaaccttgtactgttgagttaatttgaacttctaatgacattgaggctaatgtctttagctcaaggttgatcttgttggccatatagatgtgaactagggaaggggaatcaacttacagcatatcacaattgatccttattaagtataaactcttgtaggtcttttcccagaaagaagcttgactagcaggaattctaaaactgaaatatatcaaacagcataaataggaatagacataaagtgctcttctattaaagcctttggtgatctatttactatgatttatattgtacagttcctcgatttacagaaaatcatcaaaattattaatctacatatcttatgtatataaatattgcctaatccatagaaaaaaggatataaagtattaaatatgtgatatatagctatatctatctatctatgtatctaatagggaagtccaagtcacttcaattgaagaaacatatctctgagcataggagcagcctcaggtcctatggtgggatgcagtggacaggagagggggaaattagaaaagagaactatataattgaaaaagggatataaagcattaaatatatgatatatagctatatctatgtatgtatctaacagagaagttcaagtcacttcaattaaagaaacatttttgagcatgggaccagcctcaggtcttatgctgggatgcagtagacaggagatggggaaattagaaaagagaactgtgtaattgaaatgacgtgggctgcacccttaaggaacttataattaatgatgatctgaataaacataccaggataaagatgtcaaatgagtgtgactcccttaaagtagattaaagtgtgcattctttgtttcctaaaatatgattttactgcttgaaattacatttgagttgaagtttagaaactaacatagcattaatatgaataatcatggaaaattattatcctttgaaaactgattgataaatatattccccctcctttagaaacagtcaaaagccacttcaaacaagtttcaaaataaaggaaggtagcaagttaggcgatggattatattttcttgcttgttgtataccagttgtcaaggacattataaggactcccaaaagcattttgaaggatggcaatatcaaataagtgtatgtcctctcaaatgaggcatttttaattgttaaaatctatttggacgctcaggttatgatatgtttatgaaaaataagcttcattatttttatagctacatcctattattcccttttagaaacaagaataacaataggttttaatagttgccatacttagcatttatcagttctaatgaaaccaatattgaatctctgataaatattttctgatgttactagctatgggaaattagaactggcacaaccctgacattactaagtggaaatgttaggatttttcggcatcgcatgttagaatctctaaaatttaaacattcctgttaaatgactaaggtttgcttttatcaatatgaattctgaaggccaatatcataccattaactatgaaagcttttaattcctaaaaatagttttagagatattcaagcaatgctctcctaatatccatacgcaagtgtgtttatgacacaaattcactagtctgtttaaaaatgaattctttatattgactggtgttccacatatttcagtaatttctgttatgagaggacttgaaatagcaaattgccacacagttaactggatagaccacgtacgtggtgatcataaccacttggtactacacccagaaactcaaaattgtctttctcctgatgagatatgggtgtccttttgtacgtctaggcctaggtaaccagtggagtgattatattagcaaatgtgtttgtatccggagtcttcctgtcattgtaataaaaaatttatttaaaaa

SEQ ID NO: 199953 - DNA, 7507 bp, Homo sapiens
  Payload ID: 19444
  Gene Name: WD repeat domain 72
  Uniprot ID: Q3MJ13
  ENST ID: ENST00000396328
  CDS Start-End: 241-3549
gttcttttgttcttttctctctgcccccattttgtgggcccccaaattattatgggtcctgggcaccgtccctaatggataagccagccctgatctgagacacagagaggctgagggtctctaagaccactaagctagctacagcagagctcagacaagagcaactaggtctagacctctttctacatttgcgactatgaaaactatggagaaggctctgctcaagaggattcgcccaaaatgaggacttccctgcaggcagtggcactctggggacagaaggcccctccccacagcatcactgccatcatgatcactgatgaccagcgaacgattgtgactggaagtcaagagggtcagctctgtctctggaatctctcacatgaactaaagatttcagcgaaagaactcctatttggtcattcagcttcggtaacatgtttggcaagagcaagggacttctctaaacagccctacattgttagtgctgctgaaaatggggagatgtgtgtttggaatgtcaccaatggacagtgcatggagaaggctacacttccttacaggcacactgcaatctgttattaccactgctcattccggatgacaggagaaggctggcttctttgttgtggagaatatcaagatgtccttataattgatgccaaaactttggctgttgttcacagttttagatcatctcagtttcctgactggatcaactgcatgtgcattgttcactccatgagaattcaagaagattctctcttggtggtatcagtagctggtgagctcaaagtatgggatctttcctcatctatcaacagcattcaggaaaagcaagatgtctatgaaaaagaatccaagtttcttgagtccttgaactgccagacaattcgattttgcacatatactgagagacttctattggtggtattttctaaatgttggaaggtttatgattattgtgatttttcccttctgctgactgaagttagtagaaatgggcagttctttgctggtggagaagtgattgctgctcacagaatcctcatctggacagaagatggtcacagttacatctatcagctgctgaacagtgggctttcaaaaagcatataccctgctgatggaagagtgcttaaagagaccatttatcctcatttactgtgctctacttctgtgcaggaaaataaggaacagagccgtccctttgttatgggctacatgaatgaaaggaaagagcctttttacaaggtacttttctctggagaagtctcaggaagaattactttgtggcacatccctgatgttcctgtatccaagtttgatggttctcctagagagataccagtaactgccacctggactcttcaagataattttgataagcatgatactatgtcacaaagtattattgactatttctctgggcttaaagatggggcaggaactgctgtagtcacttcatcagagtatattccaagtcttgataaactaatatgtggctgtgaagatgggacaattatcattacccaggctttgaatgctgccaaagcaagacttctggaaggtggttctttagtaaaagattctccccctcataaagttcttaaaggccaccaccaaagtgtcacttcattactctatccacatggtctctcttcgaaattagaccaaagttggatgttgtctggggacctggactcatgtgtgatcttgtgggatatctttactgaagaaattttgcataaattctttttggaagctggtccagtaacaagtcttttgatgtcaccagagaagtttaaactaaggggtgagcagataatttgctgtgtgtgcggtgaccattccgtggctctccttcaccttgagggaaagagttgcctcctgcatgcccggaagcacctttttcctgtgaggatgataaaatggcacccggttgagaattttttaattgttggatgtgcagatgactcagtttatatctgggaaattgaaacaggcactttggaaagacatgagacaggagaaagagcacgaattattcttaattgttgtgatgattcacagcttgtgaagtctgtacttcccattgcctcagagacacttaagcacaaaagtatagaacagagatcctccagcccctaccagcttgggccattaccttgccctggtctgcaggtggagtcttcatgtaaggttactgatgccaaattttgcccaagaccttttaatgtcttgcctgtgaagacaaaatggagtaacgttggctttcatattcttctatttgatctggaaaaccttgttgaacttttgctaccaactccactcagtgatgttgactcttccagttcattctatggtggtgaggtcctgagaagagccaagagcacagtggagaagaagacactgacactgagaaaaagtaaaactgcctgtggtcctctttcagcagaggcactagccaagcctattactgaaagcctggcccaaggagataataccatcaaattctcagaagaaaatgatggcattaaaaggcagaagaaaatgaagatctccaaaaaaatgcagcctaagccatcaagaaaagtagatgccagtctcacaatagacacagcaaaattgtttctgtcttgccttttgccatggggagtggataaagatttagattatctttgcattaagcacctcaatattttaaagcttcagggtcctatttctttgggaatttctttgaatgaagataatttctcactgatgttgccaggttgggatttatgcaatagtggaatgataaaagactattcaggagtaaatttattttccaggaaagttttggacttgtcagataaatacacagccactcttccaaatcaggttggaattccaagaggattggaaaataattgtgattctttgcgagagtcagatactatagtttatttgttgagcagactatttttagttaataaattagttaacatgcctttagaattggcatgtagagttggcagttctttcagaatggaaagtatacataataagatgagaggtgctgggaatgacattttaaatatgtcaagcttctacagttgcttacgaaatggtaagaatgaatcccatgtacctgaggctgacctttcacttttgaagctaatttcctgttggagagaccagtctgtgcaggtaactgaagcaatacaagctgttctcttggcggaagttcaacaacacatgaagagtttgggaaagatacccgtcaatagtcaaccagtgtccatggcagagaatggtaactgtgagatgaagcagatgctgccaaagctggaatggacagaagaactagagttacagtgtgttagaaacactttgcctctgcaaactccagtcagcccggtcaagcatgacagcaactcaaactcggcaaacttccaagacgtggaggacatgcctgacagatgtgccttggaagagtctgagagtccaggtgagccaaggcatcattcatggatagcaaaggtctgcccctgcaaggtgtcttaaatggaatctcatcagtaggagctgaatttggacaaattaagaaatccaaaagatgccatttgtttattactgtataaaagcattgttgttattggtcaagttattaggctgtagtggatttgctaatactttagccaacatgtattaaagtgattttaatacatgctgattacaatgcaatacatactgattgaaaatattcatattcatctaattttagaaaaatattgcctagatcattctctattcctgtttcttactttttctgttaatatttccaacagggaatgccagtccacagacacaaatttaatactgctttaaattttctcctatccttttagtccctgaattatataataaacaatgttaaaaccaatgtagtacacaatacttacttacaaatttaatactgcttcaaggtatttaatctaaaattttaccaactttgatttgtctggttaggatattttgttttagtggatatgctttaattcggatcaattactgcagtaaatctcatccctaagcatgaaatgttgtcaacaaatacccagttccatttagttatcaattagcccaaataagagatacaaagtataacagtgaccaaccttgtactgttgagttaatttgaacttctaatgacattgaggctaatgtctttagctcaaggttgatcttgttggccatatagatgtgaactagggaaggggaatcaacttacagcatatcacaattgatccttattaagtataaactcttgtaggtcttttcccagaaagaagcttgactagcaggaattctaaaactgaaatatatcaaacagcataaataggaatagacataaagtgctcttctattaaagcctttggtgatctatttactatgatttatattgtacagttcctcgatttacagaaaatcatcaaaattattaatctacatatcttatgtatataaatattgcctaatccatagaaaaaaggatataaagtattaaatatgtgatatatagctatatctatctatctatgtatctaatagggaagtccaagtcacttcaattgaagaaacatatctctgagcataggagcagcctcaggtcctatggtgggatgcagtggacaggagagggggaaattagaaaagagaactatataattgaaaaagggatataaagcattaaatatatgatatatagctatatctatgtatgtatctaacagagaagttcaagtcacttcaattaaagaaacatttttgagcatgggaccagcctcaggtcttatgctgggatgcagtagacaggagatggggaaattagaaaagagaactgtgtaattgaaatgacgtgggctgcacccttaaggaacttataattaatgatgatctgaataaacataccaggataaagatgtcaaatgagtgtgactcccttaaagtagattaaagtgtgcattctttgtttcctaaaatatgattttactgcttgaaattacatttgagttgaagtttagaaactaacatagcattaatatgaataatcatggaaaattattatcctttgaaaactgattgataaatatattccccctcctttagaaacagtcaaaagccacttcaaacaagtttcaaaataaaggaaggtagcaagttaggcgatggattatattttcttgcttgttgtataccagttgtcaaggacattataaggactcccaaaagcattttgaaggatggcaatatcaaataagtgtatgtcctctcaaatgaggcatttttaattgttaaaatctatttggacgctcaggttatgatatgtttatgaaaaataagcttcattatttttatagctacatcctattattcccttttagaaacaagaataacaataggttttaatagttgccatacttagcatttatcagttctaatgaaaccaatattgaatctctgataaatattttctgatgttactagctatgggaaattagaactggcacaaccctgacattactaagtggaaatgttaggatttttcggcatcgcatgttagaatctctaaaatttaaacattcctgttaaatgactaaggtttgcttttatcaatatgaattctgaaggccaatatcataccattaactatgaaagcttttaattcctaaaaatagttttagagatattcaagcaatgctctcctaatatccatacgcaagtgtgtttatgacacaaattcactagtctgtttaaaaatgaattctttatattgactggtgttccacatatttcagtaatttctgttatgagaggacttgaaatagcaaattgccacacagttaactggatagaccacgtacgtggtgatcataaccacttggtactacacccagaaactcaaaattgtctttctcctgatgagatatgggtgtccttttgtacgtctaggcctaggtaaccagtggagtgattatattagcaaatgtgtttgtatccggagtcttcctgtcattgtaataaaaaatttatttaaaaattttgtcttgtgtttcttttttggtaatcatcttggtgatatttatgaatgtatttgtgtgtgtgtgtgtgtgtgtatacatacatatatatgtgtgtatatatatacacacatatatatacacatatatatgtgtgtatatatatatatatatggcatatcccccaaaggaatatcatattttcatttgcaagccttgattctttgacttgctgttgagtttcacattggctccattgtatattgcaggaaaaagtacctggaaagcctggagggttaaaagcagaggctcctcggcagcgtgtccaggccgtgtgtgcttgctgtgcttgtcagagcctcattccctcccctgtgttggagagctttctcacagggctcatccagaggtgctagaaagcaatgtgagcactattaaacacttcaaatataaggaaaaatgtataatgttagaaacacacagttaaaaagtagccccaggtatcaaacattctgttactattttagaaactaaattaaggctgctttgaacatgatggtattagaaaaatggtagaatacagtttgttaaatattaatattctatctttagatgatagcatttggtgacttttatttcttttctcatacattttttccagtgttctgtatttttaaaatcctttcataattattataatgaacactttagaaaagatactatttctcttccatccttagagggcacattataataattgagtattttaaaattaaattttatgccatgtatttaaaatgaaagttcaggttacattaattccaactgattttaaagccttattttcacagagtggactcattcaattttttaaattttatattcatacattttgattgctcagttatataaaagcggtgttatagactcctttattctccacaaaatgttgtcttatatgtaaagtgccaaaagttgtgtttaatttcctaagaaagtcattgctttgtaaacatttgcataatacttagtgttttttgtaattttaaaaaattagcttaaccaaaagagttgcaaaattaaaacttacttgagtaggtatctttcagacaaagctgcatggcttcatgtacaatagtccccagatcacctcgcactgtagtttgctcaagaaggagcctacagatggcaggtaggagaaggtaaactggaaattaacaggtctgtctgtaagagcatgccactggaaacacccatccaatttgggacccctggaagacagcatgtgtctaatgggaggcctgtcctagtacaactcctttactcttttcaccttcatcttgaccttctcagataccatctttatgtaaaatgttgatgttgtggagtttttgcagtaatttaatttttataaatattgtattaaaatatatttatcttga

SEQ ID NO: 199954 - DNA, 3602 bp, Homo sapiens
  Payload ID: 19444
  Gene Name: WD repeat domain 72
  ENST ID: ENST00000559418
  CDS Start-End: 35-3373
tcttcccttctttgtatgtcaggattcgcccaaaatgaggacttccctgcaggcagtggcactctggggacagaaggcccctccccacagcatcactgccatcatgatcactgatgaccagcgaacgattgtgactggaagtcaagagggtcagctctgtctctggaatctctcacatgaactaaagatttcagcgaaagaactcctatttggtcattcagcttcggtaacatgtttggcaagagcaagggacttctctaaacagccctacattgttagtgctgctgaaaatggggagatgtgtgtttggaatgtcaccaatggacagtgcatggagaaggctacacttccttacaggcacactgcaatctgttattaccactgctcattccggatgacaggagaaggctggcttctttgttgtggagaatatcaagatgtccttataattgatgccaaaactttggctgttgttcacagttttagatcatctcagtttcctgactggatcaactgcatgtgcattgttcactccatgagaattcaagaagattctctcttggtggtatcagtagctggtgagctcaaagtatgggatctttcctcatctatcaacagcattcaggaaaagcaagatgtctatgaaaaagaatccaagtttcttgagtccttgaactgccagacaattcgattttgcacatatactgagagacttctattggtggtattttctaaatgttggaaggtttatgattattgtgatttttcccttctgctgactgaagttagtagaaatgggcagttctttgctggtggagaagtgattgctgctcacagaatcctcatctggacagaagatggtcacagttacatctatcagctgctgaacaggtgggctcagatgggagcggcatacaaaacattcagtgggctttcaaaaagcatataccctgctgatggaagagtgcttaaagagaccatttatcctcatttactgtgctctacttctgtgcaggaaaataagagccgtccctttgttatgggctacatgaatgaaaggaaagagcctttttacaaggtacttttctctggagaagtctcaggaagaattactttgtggcacatccctgatgttcctgtatccaagtttgatggttctcctagagagataccagtaactgccacctggactcttcaagataattttgataagcatgatactatgtcacaaagtattattgactatttctctgggcttaaagatggggcaggaactgctgtagtcacttcatcagagtatattccaagtcttgataaactaatatgtggctgtgaagatgggacaattatcattacccaggctttgaatgctgccaaagcaagacttctggaaggtggttctttagtaaaagattctccccctcataaagttcttaaaggccaccaccaaagtgtcacttcattactctatccacatggtctctcttcgaaattagaccaaagttggatgttgtctggggacctggactcatgtgtgatcttgtgggatatctttactgaagaaattttgcataaattctttttggaagctggtccagtaacaagtcttttgatgtcaccagagaagtttaaactaaggggtgagcagataatttgctgtgtgtgcggtgaccattccgtggctctccttcaccttgagggaaagagttgcctcctgcatgcccggaagcacctttttcctgtgaggatgataaaatggcacccggttgagaattttttaattgttggatgtgcagatgactcagtttatatctgggaaattgaaacaggcactttggaaagacatgagacaggagaaagagcacgaattattcttaattgttgtgatgattcacagcttgtgaagtctgtacttcccattgcctcagagacacttaagcacaaaagtatagaacagagatcctccagcccctaccagcttgggccattaccttgccctggtctgcaggtggagtcttcatgtaaggttactgatgccaaattttgcccaagaccttttaatgtcttgcctgtgaagacaaaatggagtaacgttggctttcatattcttctatttgatctggaaaaccttgttgaacttttgctaccaactccactcagtgatgttgactcttccagttcattctatggtggtgaggtcctgagaagagccaagagcacagtggagaagaagacactgacactgagaaaaagtaaaactgcctgtggtcctctttcagcagaggcactagccaagcctattactgaaagcctggcccaaggagataataccatcaaattctcagaagaaaatgatggcattaaaaggcagaagaaaatgaagatctccaaaaaaatgcagcctaagccatcaagaaaagtagatgccagtctcacaatagacacagcaaaattgtttctgtcttgccttttgccatggggagtggataaagatttagattatctttgcattaagcacctcaatattttaaagcttcagggtcctatttctttgggaatttctttgaatgaagataatttctcactgatgttgccaggttgggatttatgcaatagtggaatgataaaagactattcaggagtaaatttattttccaggaaagttttggacttgtcagataaatacacagccactcttccaaatcaggttggaattccaagaggattggaaaataattgtgattctttgcgagagtcagatactatagtttatttgttgagcagactatttttagttaataaattagttaacatgcctttagaattggcatgtagagttggcagttctttcagaatggaaagtatacataataagatgagaggtgctgggaatgacattttaaatatgtcaagcttctacagttgcttacgaaatggtaagaatgaatcccatgtacctgaggctgacctttcacttttgaagctaatttcctgttggagagaccagtctgtgcaggtaactgaagcaatacaagctgttctcttggcggaagttcaacaacacatgaagagtttgggaaagatacccgtcaatagtcaaccagtgtccatggcagagaatggtaactgtgagatgaagcagatgctgccaaagctggaatggacagaagaactagagttacagtgtgttagaaacactttgcctctgcaaactccagtcagcccggtcaagcatgacagcaactcaaactcggcaaacttccaagacgtggaggacatgcctgacagatgtgccttggaagagtctgagagtccaggtgagccaaggcatcattcatggatagcaaaggtctgcccctgcaaggtgtcttaaatggaatctcatcagtaggagctgaatttggacaaattaagaaatccaaaagatgccatttgtttattactgtataaaagcattgttgttattggtcaagttattaggctgtagtggatttgctaatactttagccaacatgtattaaagtgattttaatacatgctgattacaatgcaatacatactgattgaaaatattcatattcatctaattttagaaaaatatt

SEQ ID NO: 199955 - DNA, 5900 bp, Homo sapiens
  Payload ID: 19444
  Gene Name: WD repeat domain 72
  ENST ID: ENST00000557913
  CDS Start-End: 61-3360
aggtaaggcaggcacccccagagcgcaggtcgggctgccgggtcccaggattcgcccaaaatgaggacttccctgcaggcagtggcactctggggacagaaggcccctccccacagcatcactgccatcatgatcactgatgaccagcgaacgattgtgactggaagtcaagagggtcagctctgtctctggaatctctcacatgaactaaagatttcagcgaaagaactcctatttggtcattcagcttcggtaacatgtttggcaagagcaagggacttctctaaacagccctacattgttagtgctgctgaaaatggggagatgtgtgtttggaatgtcaccaatggacagtgcatggagaaggctacacttccttacaggcacactgcaatctgttattaccactgctcattccggatgacaggagaaggctggcttctttgttgtggagaatatcaagatgtccttataattgatgccaaaactttggctgttgttcacagttttagatcatctcagtttcctgactggatcaactgcatgtgcattgttcactccatgagaattcaagattctctcttggtggtatcagtagctggtgagctcaaagtatgggatctttcctcatctatcaacagcattcaggaaaagcaagatgtctatgaaaaagaatccaagtttcttgagtccttgaactgccagacaattcgattttgcacatatactgagagacttctattggtggtattttctaaatgttggaaggtttatgattattgtgatttttcccttctgctgactgaagttagtagaaatgggcagttctttgctggtggagaagtgattgctgctcacagaatcctcatctggacagaagatggtcacagttacatctatcagctgctgaacagtgggctttcaaaaagcatataccctgctgatggaagagtgcttaaagagaccatttatcctcatttactgtgctctacttctgtgcaggaaaataagagccgtccctttgttatgggctacatgaatgaaaggaaagagcctttttacaaggtacttttctctggagaagtctcaggaagaattactttgtggcacatccctgatgttcctgtatccaagtttgatggttctcctagagagataccagtaactgccacctggactcttcaagataattttgataagcatgatactatgtcacaaagtattattgactatttctctgggcttaaagatggggcaggaactgctgtagtcacttcatcagagtatattccaagtcttgataaactaatatgtggctgtgaagatgggacaattatcattacccaggctttgaatgctgccaaagcaagacttctggaaggtggttctttagtaaaagattctccccctcataaagttcttaaaggccaccaccaaagtgtcacttcattactctatccacatggtctctcttcgaaattagaccaaagttggatgttgtctggggacctggactcatgtgtgatcttgtgggatatctttactgaagaaattttgcataaattctttttggaagctggtccagtaacaagtcttttgatgtcaccagagaagtttaaactaaggggtgagcagataatttgctgtgtgtgcggtgaccattccgtggctctccttcaccttgagggaaagagttgcctcctgcatgcccggaagcacctttttcctgtgaggatgataaaatggcacccggttgagaattttttaattgttggatgtgcagatgactcagtttatatctgggaaattgaaacaggcactttggaaagacatgagacaggagaaagagcacgaattattcttaattgttgtgatgattcacagcttgtgaagtctgtacttcccattgcctcagagacacttaagcacaaaagtatagaacagagatcctccagcccctaccagcttgggccattaccttgccctggtctgcaggtggagtcttcatgtaaggttactgatgccaaattttgcccaagaccttttaatgtcttgcctgtgaagacaaaatggagtaacgttggctttcatattcttctatttgatctggaaaaccttgttgaacttttgctaccaactccactcagtgatgttgactcttccagttcattctatggtggtgaggtcctgagaagagccaagagcacagtggagaagaagacactgacactgagaaaaagtaaaactgcctgtggtcctctttcagcagaggcactagccaagcctattactgaaagcctggcccaaggagataataccatcaaattctcagaagaaaatgatggcattaaaaggcagaagaaaatgaagatctccaaaaaaatgcagcctaagccatcaagaaaagtagatgccagtctcacaatagacacagcaaaattgtttctgtcttgccttttgccatggggagtggataaagatttagattatctttgcattaagcacctcaatattttaaagcttcagggtcctatttctttgggaatttctttgaatgaagataatttctcactgatgttgccaggttgggatttatgcaatagtggaatgataaaagactattcaggagtaaatttattttccaggaaagttttggacttgtcagataaatacacagccactcttccaaatcaggttggaattccaagaggattggaaaataattgtgattctttgcgagagtcagatactatagtttatttgttgagcagactatttttagttaataaattagttaacatgcctttagaattggcatgtagagttggcagttctttcagaatggaaagtatacataataagatgagaggtgctgggaatgacattttaaatatgtcaagcttctacagttgcttacgaaatggtaagaatgaatcccatgtacctgaggctgacctttcacttttgaagctaatttcctgttggagagaccagtctgtgcaggtaactgaagcaatacaagctgttctcttggcggaagttcaacaacacatgaagagtttgggaaagatacccgtcaatagtcaaccagtgtccatggcagagaatggtaactgtgagatgaagcagatgctgccaaagctggaatggacagaagaactagagttacagtgtgttagaaacactttgcctctgcaaactccagtcagcccggtcaagcatgacagcaactcaaactcggcaaacttccaagacgtggaggacatgcctgacagatgtgccttggaagagtctgagagtccaggtgagccaaggcatcattcatggatagcaaaggtctgcccctgcaaggtgtcttaaatggaatctcatcagtaggagctgaatttggacaaattaagaaatccaaaagatgccatttgtttattactgtataaaagcattgttgttattggtcaagttattaggctgtagtggatttgctaatactttagccaacatgtattaaagtgattttaatacatgctgattacaatgcaatacatactgattgaaaatattcatattcatctaattttagaaaaatattgcctagatcattctctattcctgtttcttactttttctgttaatatttccaacagggaatgccagtccacagacacaaatttaatactgctttaaattttctcctatccttttagtccctgaattatataataaacaatgttaaaaccaatgtagtacacaatacttacttacaaatttaatactgcttcaaggtatttaatctaaaattttaccaactttgatttgtctggttaggatattttgttttagtggatatgctttaattcggatcaattactgcagtaaatctcatccctaagcatgaaatgttgtcaacaaatacccagttccatttagttatcaattagcccaaataagagatacaaagtataacagtgaccaaccttgtactgttgagttaatttgaacttctaatgacattgaggctaatgtctttagctcaaggttgatcttgttggccatatagatgtgaactagggaaggggaatcaacttacagcatatcacaattgatccttattaagtataaactcttgtaggtcttttcccagaaagaagcttgactagcaggaattctaaaactgaaatatatcaaacagcataaataggaatagacataaagtgctcttctattaaagcctttggtgatctatttactatgatttatattgtacagttcctcgatttacagaaaatcatcaaaattattaatctacatatcttatgtatataaatattgcctaatccatagaaaaaaggatataaagtattaaatatgtgatatatagctatatctatctatctatgtatctaatagggaagtccaagtcacttcaattgaagaaacatatctctgagcataggagcagcctcaggtcctatggtgggatgcagtggacaggagagggggaaattagaaaagagaactatataattgaaaaagggatataaagcattaaatatatgatatatagctatatctatgtatgtatctaacagagaagttcaagtcacttcaattaaagaaacatttttgagcatgggaccagcctcaggtcttatgctgggatgcagtagacaggagatggggaaattagaaaagagaactgtgtaattgaaatgacgtgggctgcacccttaaggaacttataattaatgatgatctgaataaacataccaggataaagatgtcaaatgagtgtgactcccttaaagtagattaaagtgtgcattctttgtttcctaaaatatgattttactgcttgaaattacatttgagttgaagtttagaaactaacatagcattaatatgaataatcatggaaaattattatcctttgaaaactgattgataaatatattccccctcctttagaaacagtcaaaagccacttcaaacaagtttcaaaataaaggaaggtagcaagttaggcgatggattatattttcttgcttgttgtataccagttgtcaaggacattataaggactcccaaaagcattttgaaggatggcaatatcaaataagtgtatgtcctctcaaatgaggcatttttaattgttaaaatctatttggacgctcaggttatgatatgtttatgaaaaataagcttcattatttttatagctacatcctattattcccttttagaaacaagaataacaataggttttaatagttgccatacttagcatttatcagttctaatgaaaccaatattgaatctctgataaatattttctgatgttactagctatgggaaattagaactggcacaaccctgacattactaagtggaaatgttaggatttttcggcatcgcatgttagaatctctaaaatttaaacattcctgttaaatgactaaggtttgcttttatcaatatgaattctgaaggccaatatcataccattaactatgaaagcttttaattcctaaaaatagttttagagatattcaagcaatgctctcctaatatccatacgcaagtgtgtttatgacacaaattcactagtctgtttaaaaatgaattctttatattgactggtgttccacatatttcagtaatttctgttatgagaggacttgaaatagcaaattgccacacagttaactggatagaccacgtacgtggtgatcataaccacttggtactacacccagaaactcaaaattgtctttctcctgatgagatatgggtgtccttttgtacgtctaggcctaggtaaccagtggagtgattatattagcaaatgtgtttgtatccggagtcttcctgtcattgtaataaaaaatttatttaaaaatttt

SEQ ID NO: 199956 - DNA, 2572 bp, Homo sapiens
  Payload ID: 19444
  Gene Name: WD repeat domain 72
  ENST ID: ENST00000560036
  CDS Start-End: 248-2572
cagatgtggcatcaggagtgaacaaagccgctcatctcgcagtatccctacctatgctcctgggaggagtctaccccagatacgctctgaccttcggcaagttacttatgttctccaagactcattttcttcatgtttggaatagtgataataatgcatattgatattatgaggaccgcatgaagcagtgaacgtaatctaagcagcacagtgtctacaacttaacatatagtcagattcgcccaaaatgaggacttccctgcaggcagtggcactctggggacagaaggcccctccccacagcatcactgccatcatgatcactgatgaccagcgaacgattgtgactggaagtcaagagggtcagctctgtctctggaatctctcacatgaactaaagatttcagcgaaagaactcctatttggtcattcagcttcggtaacatgtttggcaagagcaagggacttctctaaacagccctacattgttagtgctgctgaaaatggggagatgtgtgtttggaatgtcaccaatggacagtgcatggagaaggctacacttccttacaggcacactgcaatctgttattaccactgctcattccggatgacaggagaaggctggcttctttgttgtggagaatatcaagatgtccttataattgatgccaaaactttggctgttgttcacagttttagatcatctcagtttcctgactggatcaactgcatgtgcattgttcactccatgagaattcaagaagattctctcttggtggtatcagtagctggtgagctcaaagtatgggatctttcctcatctatcaacagcattcaggaaaagcaagatgtctatgaaaaagaatccaagtttcttgagtccttgaactgccagacaattcgattttgcacatatactgagagacttctattggtggtattttctaaatgttggaaggtttatgattattgtgatttttcccttctgctgactgaagttagtagaaatgggcagttctttgctggtggagaagtgattgctgctcacagaatcctcatctggacagaagatggtcacagttacatctatcagctgctgaacagtgggctttcaaaaagcatataccctgctgatggaagagtgcttaaagagaccatttatcctcatttactgtgctctacttctgtgcaggaaaataaggaacagagccgtccctttgttatgggctacatgaatgaaaggaaagagcctttttacaaggtacttttctctggagaagtctcaggaagaattactttgtggcacatccctgatgttcctgtatccaagtttgatggttctcctagagagataccagtaactgccacctggactcttcaagataattttgataagcatgatactatgtcacaaagtattattgactatttctctgggcttaaagatggggcaggaactgctgtagtcacttcatcagagtatattccaagtcttgataaactaatatgtggctgtgaagatgggacaattatcattacccaggctttgaatgctgccaaagcaagacttctggaaggtggttctttagtaaaagattctccccctcataaagttcttaaaggccaccaccaaagtgtcacttcattactctatccacatggtctctcttcgaaattagaccaaagttggatgttgtctggggacctggactcatgtgtgatcttgtgggatatctttactgaagaaattttgcataaattctttttggaagctggtccagtaacaagtcttttgatgtcaccagagaagtttaaactaaggggtgagcagataatttgctgtgtgtgcggtgaccattccgtggctctccttcaccttgagggaaagagttgcctcctgcatgcccggaagcacctttttcctgtgaggatgataaaatggcacccggttgagaattttttaattgttggatgtgcagatgactcagtttatatctgggaaattgaaacaggcactttggaaagacatgagacaggagaaagagcacgaattattcttaattgttgtgatgattcacagcttgtgaagtctgtacttcccattgcctcagagacacttaagcacaaaagtatagaacagagatcctccagcccctaccagcttgggccattaccttgccctggtctgcaggtggagtcttcatgtaaggttactgatgccaaattttgcccaagaccttttaatgtcttgcctgtgaagacaaaatggagtaacgttggctttcatattcttctatttgatctggaaaaccttgttgaacttttgctaccaactccactcagtgatgttgactcttccagttcattctatggtggtgaggtcctgagaagagccaagagcacagtggagaagaagacactgacactgagaaaaagtaaaactgcctgtggtcctctttcagcagaggcactagccaagcctattactgaaagcctggcccaaggagataataccatcaaattctcagaagaaaatgatggcattaaaaggcagaagaaaatgaagatctcc

SEQ ID NO: 199957 - DNA, 4224 bp, Homo sapiens
  Payload ID: 19444
  Gene Name: WD repeat domain 72
  ENST ID: ENST00000614174
  CDS Start-End: 1-267
atggcgggcgtccctcccccagcctggctgccgccttgcagtttgatctcagactgctgtgctagcaatcagcgagactccgtgggcgtaggaccctccgagccagctccagtcagcccggtcaagcatgacagcaactcaaactcggcaaacttccaagacgtggaggacatgcctgacagatgtgccttggaagagtctgagagtccaggtgagccaaggcatcattcatggatagcaaaggtctgcccctgcaaggtgtcttaaatggaatctcatcagtaggagctgaatttggacaaattaagaaatccaaaagatgccatttgtttattactgtataaaagcattgttgttattggtcaagttattaggctgtagtggatttgctaatactttagccaacatgtattaaagtgattttaatacatgctgattacaatgcaatacatactgattgaaaatattcatattcatctaattttagaaaaatattgcctagatcattctctattcctgtttcttactttttctgttaatatttccaacagggaatgccagtccacagacacaaatttaatactgctttaaattttctcctatccttttagtccctgaattatataataaacaatgttaaaaccaatgtagtacacaatacttacttacaaatttaatactgcttcaaggtatttaatctaaaattttaccaactttgatttgtctggttaggatattttgttttagtggatatgctttaattcggatcaattactgcagtaaatctcatccctaagcatgaaatgttgtcaacaaatacccagttccatttagttatcaattagcccaaataagagatacaaagtataacagtgaccaaccttgtactgttgagttaatttgaacttctaatgacattgaggctaatgtctttagctcaaggttgatcttgttggccatatagatgtgaactagggaaggggaatcaacttacagcatatcacaattgatccttattaagtataaactcttgtaggtcttttcccagaaagaagcttgactagcaggaattctaaaactgaaatatatcaaacagcataaataggaatagacataaagtgctcttctattaaagcctttggtgatctatttactatgatttatattgtacagttcctcgatttacagaaaatcatcaaaattattaatctacatatcttatgtatataaatattgcctaatccatagaaaaaaggatataaagtattaaatatgtgatatatagctatatctatctatctatgtatctaatagggaagtccaagtcacttcaattgaagaaacatatctctgagcataggagcagcctcaggtcctatggtgggatgcagtggacaggagagggggaaattagaaaagagaactatataattgaaaaagggatataaagcattaaatatatgatatatagctatatctatgtatgtatctaacagagaagttcaagtcacttcaattaaagaaacatttttgagcatgggaccagcctcaggtcttatgctgggatgcagtagacaggagatggggaaattagaaaagagaactgtgtaattgaaatgacgtgggctgcacccttaaggaacttataattaatgatgatctgaataaacataccaggataaagatgtcaaatgagtgtgactcccttaaagtagattaaagtgtgcattctttgtttcctaaaatatgattttactgcttgaaattacatttgagttgaagtttagaaactaacatagcattaatatgaataatcatggaaaattattatcctttgaaaactgattgataaatatattccccctcctttagaaacagtcaaaagccacttcaaacaagtttcaaaataaaggaaggtagcaagttaggcgatggattatattttcttgcttgttgtataccagttgtcaaggacattataaggactcccaaaagcattttgaaggatggcaatatcaaataagtgtatgtcctctcaaatgaggcatttttaattgttaaaatctatttggacgctcaggttatgatatgtttatgaaaaataagcttcattatttttatagctacatcctattattcccttttagaaacaagaataacaataggttttaatagttgccatacttagcatttatcagttctaatgaaaccaatattgaatctctgataaatattttctgatgttactagctatgggaaattagaactggcacaaccctgacattactaagtggaaatgttaggatttttcggcatcgcatgttagaatctctaaaatttaaacattcctgttaaatgactaaggtttgcttttatcaatatgaattctgaaggccaatatcataccattaactatgaaagcttttaattcctaaaaatagttttagagatattcaagcaatgctctcctaatatccatacgcaagtgtgtttatgacacaaattcactagtctgtttaaaaatgaattctttatattgactggtgttccacatatttcagtaatttctgttatgagaggacttgaaatagcaaattgccacacagttaactggatagaccacgtacgtggtgatcataaccacttggtactacacccagaaactcaaaattgtctttctcctgatgagatatgggtgtccttttgtacgtctaggcctaggtaaccagtggagtgattatattagcaaatgtgtttgtatccggagtcttcctgtcattgtaataaaaaatttatttaaaaattttgtcttgtgtttcttttttggtaatcatcttggtgatatttatgaatgtatttgtgtgtgtgtgtgtgtgtgtatacatacatatatatgtgtgtatatatatacacacatatatatacacatatatatgtgtgtatatatatatatatatggcatatcccccaaaggaatatcatattttcatttgcaagccttgattctttgacttgctgttgagtttcacattggctccattgtatattgcaggaaaaagtacctggaaagcctggagggttaaaagcagaggctcctcggcagcgtgtccaggccgtgtgtgcttgctgtgcttgtcagagcctcattccctcccctgtgttggagagctttctcacagggctcatccagaggtgctagaaagcaatgtgagcactattaaacacttcaaatataaggaaaaatgtataatgttagaaacacacagttaaaaagtagccccaggtatcaaacattctgttactattttagaaactaaattaaggctgctttgaacatgatggtattagaaaaatggtagaatacagtttgttaaatattaatattctatctttagatgatagcatttggtgacttttatttcttttctcatacattttttccagtgttctgtatttttaaaatcctttcataattattataatgaacactttagaaaagatactatttctcttccatccttagagggcacattataataattgagtattttaaaattaaattttatgccatgtatttaaaatgaaagttcaggttacattaattccaactgattttaaagccttattttcacagagtggactcattcaattttttaaattttatattcatacattttgattgctcagttatataaaagcggtgttatagactcctttattctccacaaaatgttgtcttatatgtaaagtgccaaaagttgtgtttaatttcctaagaaagtcattgctttgtaaacatttgcataatacttagtgttttttgtaattttaaaaaattagcttaaccaaaagagttgcaaaattaaaacttacttgagtaggtatctttcagacaaagctgcatggcttcatgtacaatagtccccagatcacctcgcactgtagtttgctcaagaaggagcctacagatggcaggtaggagaaggtaaactggaaattaacaggtctgtctgtaagagcatgccactggaaacacccatccaatttgggacccctggaagacagcatgtgtctaatgggaggcctgtcctagtacaactcctttactcttttcaccttcatcttgaccttctcagataccatctttatgtaaaatgttgatgttgtggagtttttgcagtaatttaatttttataaatattgtattaaaatatatttatcttg

SEQ ID NO: 199958 - DNA, 5387 bp, Homo sapiens
  Payload ID: 19445
  Gene Name: WD repeat domain 73
  Uniprot ID: Q6P4I2
  ENST ID: ENST00000434634
  CDS Start-End: 62-1198
agagccgcgcggcccccgaaggctcgcaggcggaagtgagacgccggaagcggtcgttgccatggatcctggggacgactggctggtggaatccttgcgcttgtaccaggatttctatgcattcgacctgtcaggagccactcgagtccttgaatggattgatgacaaaggagtctttgttgctggctatgaaagcctgaaaaagaatgaaattcttcatctgaaattacctctcagactttctgtaaaggaaaacaagggcttattcccagaaagagatttcaaagtgcgccatggaggattttcagacaggtctatctttgatctaaagcatgtgccacataccagattgctggttaccagtggccttccaggttgttatctgcaggtgtggcaggttgcagaggacagtgatgtcattaaagctgtcagcaccattgctgtgcatgagaaagaggagagtctctggcctagggtggccgtcttctccacattggcacccggagtcctccatggggcgaggctccgaagtctgcaggtcgttgatctggagtcccggaagaccacgtacacctcagatgtcagtgacagtgaggagctgagtagcctgcaggtcctagatgcagacacctttgccttctgctgtgcttcaggccggctggggcttgttgacacccggcagaagtgggcaccgttggagaatcgcagccctggccctgggtctggtggagagagatggtgtgctgaagttgggagctggggccagggccctgggcccagcattgccagccttggctcagatgggcgtctttgtcttcttgacccccgggatctctgccatcctgtgagctcagtccagtgcccagtatccgtacctagccctgacccagagctgctgcgagtgacttgggccccaggcctgaagaattgcttggccatctcaggttttgatggtacagtccaggtctatgatgccacatcttgggatggaacacggagccaagatggaacacggagccaagtagaacctctcttcactcacagaggtcacatcttcctagatggaaatgggatggaccctgctcctttggtcaccacccacacctggcatccctgcagaccaaggactttgttatcagcaacaaatgatgcctctctgcatgtgtgggactgggtggacctttgtgccccccgctgacaccagcatctttccatctaggcctctagaaaggggaggagctgctgtagtagcaagggtgctcatgtaggactcaagtgactaccagtccctgttaccagctgtgtggccttgggcaagtctgccagcgtcacttagcctcagtttccttatctgtaaaatgaggatagtaagaactacctcgtagtgatattgcgaaggttagaagaaacgcatggcataattacttggtagctattgttagatctgggagtgtgaaatggtagcgttttgtccctgtcttcacactatcatagggagaatcaaaagagctaacaaatataaacatgctttgtgaatttttttaaagaaaaaaatgtagaggggccaataaacatgaaaaaatcccagccctagtagcaattaaggaaatagcaaaacaggatttctgctcctcttgagtgggtctcatgggaacacaggtgcactttcccacacttgtccccccaggtgactaggttcaagagacatttgcttttggtggccccacaaacatttccttttgagggcccatagtgaatattaaagtgtgctggacatggtggctcatgcctgtaatcccagcactttcagaggctgaggtgggcagattgcttgagctgaggagtttgagaccagcctgggcaacatagcaagatcccttcccttaaaaaaaaaaaaaaatttggctgggcatggtggctcatgcctgtaatcccagcaatgtaggcagccaagacaggtggatcacttgagtccaggagttcgagactagcctgagcaacatggcgaaaccttgtctctactaaaaatacaagttagctggttgtggtggtatgagcctgcagtcccagctattcaagaggctgaggtgggagggttgcctgagcctggcagttgaagtttgcagtgagctgtgatcatgccactgtattccagcctgggcaacagaatgagaccctgttacacacacacacacaaaatagataagttgttcactctgtcagcatctattagcccttcccatgtgcaacactaattacatgctagaaatacataaatgagaggcttcctaaggtggttgaattttttttttttttttttttgtagtagagatggagtcttgctctgtcacccaggcttgagtgcagtggcgtgatctcggctcactgcaacctccacctcatgggttcaagcaatgctcctgcctcagcctgccaagtagctgggattacaggcacgtaccaccatgcccaggtaatttttgtatttttggtacagacggagtttcaccatgttggccagaatggtcttgatctcttgaccttgtgatctacccacctcggcctcccgaagagctgggattacaggtgtgagccaccgcgcccggccaggggatttctcctgtgtgaattcgctggttaagtgataattaactgcagttaaaattcaggtcaagcatgtggctcatgtctgtaatcccagtactttgggaggctgaggtgggaggatagcttgagtccaggaggagttcgagatcagcctgggcaccatggtgaacccctgtctctaaaaaaaaagaaagatttttatttaaaaaacctaaacaaattcagataggaatttaaagatagaccaggcacagtggctcacgcctgtaatcccagcactttgtggggggccaaggtgggtggatcacttgaggtcaggagttcaagaccagcctggccaacatggtgaaaccccgtctctactaaaaatataaaaattagagacgggcatggtggtggcacacctgtaatccccactactcaggagggtgaggcaggagaattgcttgaacctgagaggtagaggctgcagtgaaccgagattgtgccactgcattccagcctgggtgacagggtgagactccatctcaaaaaaaataaaataaagataaaatcataaacactcataattcagttataccttttttcaagtaactaaagttcaaacttacttaggggaacaggctttcctgggtgccacctgcttctcaagtcctgtgctttccacaccacagaatagtaaactgggtgcactgagtgcctggttcccctcagcccttaaccagtgctggcttgtccgagtttagaatcccagggctgactttgttggtggaatgctagctcccattcatttcccacctgcactggacgttttctgaatctccttgaagtccgggagatcttcattccaaagctcttcacttttctgcagcattgtgaccccatctggctggggaactggaagtcctgctcagagaaaagcaggaggggacatggagttctgaaattcactttctgctcccatgtctggaagtgacaggtgaaatgagaatgatagtgcctctcaagaaggtctagttcccagaagagaaagtttaatgactcattttcccccttttactcctttgagggtacaggataatgcccttatctattttcataataattataatgatgatgataatgaaaactaacgtttgccaagtgctaatactgtgtcaggatcctcataacagcccagggaggtagaaaccatcacaatgtccactgtccagatgagaaaatggaggctaagggtatttaaagaggttgcccaagaacaacaaaccttttaaatggcagactggtgtgtataatctacgcagggttcacatctatggaacactttattttaaattcttttaataatattattatttttcagctgagtctgggtctcactctgtcgcccaggctggaatgcagtggcatgatcacagctcactgcggcctccaactcctgggctcaagtgattctcctgccccagcctcccgagtagctgggactacaggcttgcgccaccatgcccggcttatagggcactttagatggaaacaaatgactggatctttaactcctacctttctctcctctcttcctgtaatgttgttactgaaggcaggaagggagactccttggctaaagagcagagcaagagcctcaaagtggtctttgtgagccaccctggactactggttcagtagagggttgagtcaagcaatatttgaggacgggatataaacagtatttcttaaagttgtcaccaatttttcccccgatgaggccattccagacccaaattagtcataacagagccaggacaataatcacatctcctgattctgagcctgaatgcttcccacaggactgcgtcgctcccactgctctgaggtccattgtgggggagagttgccactgggattccacctcaaggcctggggaccaagcctccaggattcctcttgagactcctccactatttcattaccatcccgccacatcttctagtgctatgccctggttccctttggaatcctctcaatcccaaagaaggcctcctaccacctctaaggcatcaaaggtgttagaaagtgccccaagactcaacagggcatccatctcatcatagaagacactggtgcctggtgtgtaggtgctcctggctttgcagtagtcggtcaggaggtttttgaaccgatagcaacattgctccagggtccacaggaagccatgttctcacagctgctcagccataatccggtacacctggtggtttcgatggcaggtgcggagtttttcgtggatccaggcctctgagaattcccagaaaaatcttggtttctttgtatccccagtgcactcctgccaccttctcatcctccagggcctgccactccagctcgctccaggtcttggcttttctccagattagcacctggccagacttgactctcaccccagccactgagcagtctttcacactctctttttctccagaatttgaagatctagatgctgtgggttttcatcctactccacgtgggagttcactttgggcctatggattggaaaatctgtttgcaggcagacaaaagggagatgtaatggtttggtaaatctaatcccaaccattttatatgccagggagaggagatagtaattttttttttttaattctggggggattcttgggaaagctcagtgaaaagaacaactagaaaaaaaaattcaggcccaaatgcataactatatatccacgttcatctatcttaaataaaattcagacacatacctaaactga

SEQ ID NO: 199959 - DNA, 933 bp, Homo sapiens
  Payload ID: 19445
  Gene Name: WD repeat domain 73
  ENST ID: ENST00000559178
  CDS Start-End: 1-395
actggctggtggaatccttgcgcttgtaccaggatttctatgcattcgacctgtcaggagccactcgagtccttgaatggattgatgacaaaggagtctttgttgctggctatgaaagcctgaaaaagaatgaaattcttcatctgaaattacctctcagactttctgtaaaggaaaacaagggcttattcccagaaagagatttcaaagtgcgccatggaggattttcagacaggtctatctttgatctaaagcatgtgccacataccagattgctggttaccagtggccttccaggttgttatctgcaggtgtggcaggttgcagaggacagtgctactcaggaggctgaggcagaagaatttcttgaacctgagaggcggaggctgcagtgagctgagattgtgccactggactccagcctgggcaacagagtgagactctgtctcaaaaaaacaaaagaaccaaaacaaaacttgactcaaagccaaggatgttccattcagtgtaaaaaagatgtggactttcttgtccaccttacaagacaatgacatctgtaatgtgacctgtacttgctaggctttagcaagtcactcgaggtcatggaacatgtttttgaagaaataatatcagttcatgaattctgtacctgtttcttgtcgctgaagggatgtcattaaagctgtcagcaccattgctgtgcatgagaaagaggagagtctctggcctagggtggccgtcttctccacattggcacccggagtcctccatggggcgaggctccgaagtctgcaggtcgttgatctggagtcccggaagaccacgtacacctcaggtgttggggatacacagtgaataagaggtaagccctggcctctaagggctcctatgctggggcaggattaggcagtcccagggaccagcacccaacca

SEQ ID NO: 199960 - DNA, 997 bp, Homo sapiens
  Payload ID: 19445
  Gene Name: WD repeat domain 73
  ENST ID: ENST00000558521
  CDS Start-End: 1-536
tggatcctggggacgactggctggtggaatccttgcgcttgtaccaggatttctatgcattcgacctgtcaggagccactcgagtccttgaatggattgatgacaaaggagtctttgttgctggctatgaaagcctgaaaaagaatgaaattcttcatctgaaattacctctcagactttctgtaaaggaaaacaagggcttattcccagaaagagatttcaaagtgcgccatggaggattttcagacaggtctatctttgatctaaagcatgtgccacataccagattgctggttaccagtggccttccaggttgttatctgcaggtgtggcaggttgcagaggacagtgatgtcattaaagctgtcagcaccattgctgtgcatgagaaagaggagagtctctggcctagggtggccgtcttctccacattggcacccggagtcctccatggggcgaggctccgaagtctgcaggtcgttgatctggagtcccggaagaccacgtacacctcaggtgttggggatacacagtgaataagaggtaagccctggcctctaagggctcctatgctggggcaggattaggcagtcccagggaccagcacccaaccagctgagcagacaatgatgtcagtgacagtgaggagctgagtagcctgcaggtcctagatgcagacacctttgccttctgctgtgcttcaggccggctggggcttgttgacacccggcagaagtgggcaccgttggagaatcgcagccctggccctgggtctggtggagagagatggtgtgctgaagttgggagctggggccagggccctgggcccagcattgccagccttggctcagatgggcgtctttgtcttcttgacccccgggatctctgccatcctgtgagctcagtccagtgcccagtatccgtacctagccctgacccagagctgctgcgagtgacttgggccccaggcctgaagaattgcttggccatctcaggt

SEQ ID NO: 199961 - DNA, 788 bp, Homo sapiens
  Payload ID: 19445
  Gene Name: WD repeat domain 73
  ENST ID: ENST00000559224
  CDS Start-End: 1-256
tggggacgactggctggtggaatccttgcgcttgtaccaggatttctatgcattcgacctgtcaggagccactcgagtccttgaatggattgatgacaaaggagtctttgttgctggctatgaaagcctgaaaaagaatgaaattcttcatctgaaattacctctcagactttctgtaaaggaaaacaagattgctggttaccagtggccttccaggttgttatctgcaggtgtggcaggttgcagaggacagtgatgtcattaaagctgtcagcaccattgctgtgcatgagaaagaggagagtctctggcctagggtggccgtcttctccacattggcacccggagtcctccatggggcgaggctccgaagtctgcaggtcgttgatctggagtcccggaagaccacgtacacctcagatgtcagtgacagtgaggagctgagtagcctgcaggtcctagatgcagacacctttgccttctgctgtgcttcaggccggctggggcttgttgacacccggcagaagtgggcaccgttggagaatcgcagccctggccctgggtctggtggagagagatggtgtgctgaagttgggagctggggccagggccctgggcccagcattgccagccttggctcagatgggcgtctttgtcttcttgacccccgggatctctgccatcctgtgagctcagtccagtgcccagtatccgtacctagccctgacccagagctgctgcgagtgacttgggccccaggcctgaagaattgcttggccatctcaggt

SEQ ID NO: 199962 - DNA, 1289 bp, Homo sapiens
  Payload ID: 19446
  Gene Name: WD repeat domain 74
  Uniprot ID: Q6RFH5
  ENST ID: ENST00000278856
  CDS Start-End: 92-1249
agcaactacactgcgctgcatcggactcgacgcccgctggtgacgcacacgctgcgccggaagtgtgaactgtctgcctccaggctttgtcatggcggctgctgctgcacgctggaaccatgtgtgggtcggcaccgagactgggatcttgaaaggggtaaatcttcagcgaaaacaggcggcgaacttcacggccggaggacagccgcggcgcgaggaggcagtgagcgccctgtgttggggcaccggcggcgagacccagatgctggtgggctgcgcggacaggacggtgaagcacttcagcaccgaggatggcatattccagggtcagagacactgcccgggcggggagggcatgttccgtggcctcgcccaggccgacggcaccctcatcacatgtgtggattctgggattctcagagtctggcatgacaaggacaaggacacatcctctgacccactcctggaactgagagtgggccctggggtgtgtaggatgcgccaagacccagcacacccccatgtggttgccacaggtgggaaagagaatgctttgaagatatgggacctgcagggctctgaggaacctgtgttcagggccaagaacgtgcggaatgactggctggacttgcgggttcccatctgggaccaggacatacagtttctcccaggatcacagaagcttgtcacctgcacagggtaccaccaggtccgtgtttatgatccagcatccccccagcgccggccagtcctagagaccacctatggagagtacccactaacagccatgaccctcactccgggaggcaactcagtgattgtgggaaacactcatgggcagctggcagaaattgaccttcggcaagggcgtctactgggctgtctgaaggggctggcaggcagtgtgcgtgggttgcagtgccacccttcaaagcctctactagcctcctgtggcttggacagagtcttgaggatacacaggatccagaatccacggggtctggagcataaggtttatctcaagtctcaattgaactgcctcctcttgtcaggcagggacaactgggaggatgagccccaagagcctcaagaacccaacaaggtgcccctagaagacacagagacagatgaactttgggcatccttggaggcagctgccaagcggaagctctcgggtttggagcagccccaaggagctctccaaacgagacggagaaagaagaagcggcctgggtccaccagcccctgacgcccctgtgcccactttgtaaataaactgctgaacaccc

SEQ ID NO: 199963 - DNA, 1153 bp, Homo sapiens
  Payload ID: 19446
  Gene Name: WD repeat domain 74
  Uniprot ID: Q6RFH5
  ENST ID: ENST00000311713
  CDS Start-End: 12-1112
caggctttgtcatggcggctgctgctgcacgctggaaccatgtgtgggtcggcaccgagactgggatcttgaaaggggtaaatcttcagcgaaaacaggcggcgaacttcacggccggaggacagccgcggcgcgaggaggcagtgagcgccctgtgttggggcaccggcggcgagacccagatgctggtgggctgcgcggacaggacggtgaagcacttcagcaccgaggatggcatattccagggtcagagacactgcccgggcggggagggcatgttccgtggcctcgcccaggccgacggcaccctcatcacatgtgtggattctgggattctcagagtctggcatgacaaggacaaggacacatcctctgacccactcctggaactgagagtgggccctggggtgtgtaggatgcgccaagacccagcacacccccatgtggttgccacaggtgggaaagagaatgctttgaagatatgggacctgcagggctctgaggaacctgtgttcagggccaagaacgtgcggaatgactggctggacttgcgggttcccatctgggaccaggacatacagtttctcccaggatcacagaagcttgtcacctgcacagggtaccaccaggtccgtgtttatgatccagcatccccccagcgccggccagtcctagagaccacctatggagagtacccactaacagccatgaccctcactccgggaggcaactcagtgattgtgggaaacactcatgggcagctggcagaaattgaccttcggcaagggcgtctactgggctgtctgaaggggctggcaggcagtgtgcgtgggttgcagtgccacccttcaaagcctctactagcctcctgtggcttggacagagtcttgaggatacacaggatccagaatccacggggtctggagcataaggatgagccccaagagcctcaagaacccaacaaggtgcccctagaagacacagagacagatgaactttgggcatccttggaggcagctgccaagcggaagctctcgggtttggagcagccccaaggagctctccaaacgagacggagaaagaagaagcggcctgggtccaccagcccctgacgcccctgtgcccactttgtaaataaactgctgaacaccca

SEQ ID NO: 199964 - DNA, 1724 bp, Homo sapiens
  Payload ID: 19446
  Gene Name: WD repeat domain 74
  ENST ID: ENST00000525752
  CDS Start-End: 738-1724
ctccggagtagctgggactacaggcgcccgccaccacgcccggctagttttgtttttgtatgtttagtagagacggggattcaccgtgttagccaagatggtctcgatctcctgacctcatgatccgcccgcctcggcctcccaaagtgctgggattacaggcgtgagccaccgcgcctcgctgtccgcctcttgaagagtaaacgaggccgggcgcggtggtttagtaataccagctgtaatcccagctacttgggaggctgaggcagaagaatcgcttgaacccgggaggcggaggttgagtccagaacacatattacataatggagccgggagacagactagggctggcttgatccggccacgcagtccaggaaaggtgcttttcacccccaagtgcaaaatgatcaatgtattcttccgatctacataaacaagcacctcctggtttcattttcgtaaagcaaaacaagcatggaagctttactgtttcggctcttcaaacttccagcaactacactgcgctgcatcggactcgacgcccgctggtgacgcacacgctgcgccggaagtgtgaactgtctgcctccaggctttgtcatggcggctgctgctgcacgctggaaccatgggtaaatcttcagcgaaaacaggcggcgaacttcacggccggaggacagccgcggcgcgaggaggcagtgagcgccctgtgttggggcaccggcggcgagacccagatgctggtgggctgcgcggacaggacggtgaagcacttcagcaccgaggatggcatattccagggtcagagacactgcccgggcggggagggcatgttccgtggcctcgcccaggccgacggcaccctcatcacatgtgtggattctgggattctcagagtctggcatgacaaggacaaggacacatcctctgacccactcctggaactgagagtgggccctggggtgtgtaggatgcgccaagacccagcacacccccatgtggttgccacaggtgggaaagagaatgctttgaagatatgggacctgcagggctctgaggaacctgtgttcagggccaagaacgtgcggaatgactggctggacttgcgggttcccatctgggaccaggacatacagtttctcccaggatcacagaagcttgtcacctgcacagggtaccaccaggtccgtgtttatgatccagcatccccccagcgccggccagtcctagagaccacctatggagagtacccactaacagccatgaccctcactccgggaggcaactcagtgattgtgggaaacactcatgggcagctggcagaaattgaccttcggcaagggcgtctactgggctgtctgaaggggctggcaggcagtgtgcgtgggttgcagtgccacccttcaaagcctctactagcctcctgtggcttggacagagtcttgaggatacacaggatccagaatccacggggtctggagcataaggtttatctcaagtctcaattgaactgcctcctcttgtcaggcagggacaactgggaggatgagccccaagagcctcaagaacccaacaaggtgcccctagaagacacagagacagatgaactttgggcatccttggaggcagctgccaagcggaagctctcgggtttggagcagccccaaggagctctccaaacgagacggagaaagaagaagcggcctgggtccaccagcccctga

SEQ ID NO: 199965 - DNA, 1736 bp, Homo sapiens
  Payload ID: 19446
  Gene Name: WD repeat domain 74
  Uniprot ID: Q6RFH5
  ENST ID: ENST00000525239
  CDS Start-End: 539-1696
atcgcttctcggccttttggctaagatcaagtgtagtatctgttcttatcagtttaatatctgatacgtcctctatccgaggacaatatattaaatggatttttggaaataggagatggaataggagcttgctccgtccactccacgcatcgacctggtattgcagtacttccaggaacggtgcactctcccttcggggagagaacaaccgttgtttaatggaagatttcgatcagttaggtccagaacacatattacataatggagccgggagacagactagggctggcttgatccggccacgcagtccaggaaaggtgcttttcacccccaagtgcaaaatgatcaatgtattcttccgatctacataaacaagcacctcctggtttcattttcgtaaagcaaaacaagcatggaagctttactgtttcggctcttcaaacttccagcaactacactgcgctgcatcggactcgacgcccgctggtgacgcacacgctgcgccggaagtgtgaactgtctgcctccaggctttgtcatggcggctgctgctgcacgctggaaccatgtgtgggtcggcaccgagactgggatcttgaaaggggtaaatcttcagcgaaaacaggcggcgaacttcacggccggaggacagccgcggcgcgaggaggcagtgagcgccctgtgttggggcaccggcggcgagacccagatgctggtgggctgcgcggacaggacggtgaagcacttcagcaccgaggatggcatattccagggtcagagacactgcccgggcggggagggcatgttccgtggcctcgcccaggccgacggcaccctcatcacatgtgtggattctgggattctcagagtctggcatgacaaggacaaggacacatcctctgacccactcctggaactgagagtgggccctggggtgtgtaggatgcgccaagacccagcacacccccatgtggttgccacaggtgggaaagagaatgctttgaagatatgggacctgcagggctctgaggaacctgtgttcagggccaagaacgtgcggaatgactggctggacttgcgggttcccatctgggaccaggacatacagtttctcccaggatcacagaagcttgtcacctgcacagggtaccaccaggtccgtgtttatgatccagcatccccccagcgccggccagtcctagagaccacctatggagagtacccactaacagccatgaccctcactccgggaggcaactcagtgattgtgggaaacactcatgggcagctggcagaaattgaccttcggcaagggcgtctactgggctgtctgaaggggctggcaggcagtgtgcgtgggttgcagtgccacccttcaaagcctctactagcctcctgtggcttggacagagtcttgaggatacacaggatccagaatccacggggtctggagcataaggtttatctcaagtctcaattgaactgcctcctcttgtcaggcagggacaactgggaggatgagccccaagagcctcaagaacccaacaaggtgcccctagaagacacagagacagatgaactttgggcatccttggaggcagctgccaagcggaagctctcgggtttggagcagccccaaggagctctccaaacgagacggagaaagaagaagcggcctgggtccaccagcccctgacgcccctgtgcccactttgtaaataaactgctgaacaccc

SEQ ID NO: 199966 - DNA, 1366 bp, Homo sapiens
  Payload ID: 19446
  Gene Name: WD repeat domain 74
  Uniprot ID: Q6RFH5
  ENST ID: ENST00000529106
  CDS Start-End: 169-1326
tagtaataccagctgtaatcccagctacttgggaggctgaggcagaagaatcgcttgaacccgggaggcggaggttgagcaactacactgcgctgcatcggactcgacgcccgctggtgacgcacacgctgcgccggaagtgtgaactgtctgcctccaggctttgtcatggcggctgctgctgcacgctggaaccatgtgtgggtcggcaccgagactgggatcttgaaaggggtaaatcttcagcgaaaacaggcggcgaacttcacggccggaggacagccgcggcgcgaggaggcagtgagcgccctgtgttggggcaccggcggcgagacccagatgctggtgggctgcgcggacaggacggtgaagcacttcagcaccgaggatggcatattccagggtcagagacactgcccgggcggggagggcatgttccgtggcctcgcccaggccgacggcaccctcatcacatgtgtggattctgggattctcagagtctggcatgacaaggacaaggacacatcctctgacccactcctggaactgagagtgggccctggggtgtgtaggatgcgccaagacccagcacacccccatgtggttgccacaggtgggaaagagaatgctttgaagatatgggacctgcagggctctgaggaacctgtgttcagggccaagaacgtgcggaatgactggctggacttgcgggttcccatctgggaccaggacatacagtttctcccaggatcacagaagcttgtcacctgcacagggtaccaccaggtccgtgtttatgatccagcatccccccagcgccggccagtcctagagaccacctatggagagtacccactaacagccatgaccctcactccgggaggcaactcagtgattgtgggaaacactcatgggcagctggcagaaattgaccttcggcaagggcgtctactgggctgtctgaaggggctggcaggcagtgtgcgtgggttgcagtgccacccttcaaagcctctactagcctcctgtggcttggacagagtcttgaggatacacaggatccagaatccacggggtctggagcataaggtttatctcaagtctcaattgaactgcctcctcttgtcaggcagggacaactgggaggatgagccccaagagcctcaagaacccaacaaggtgcccctagaagacacagagacagatgaactttgggcatccttggaggcagctgccaagcggaagctctcgggtttggagcagccccaaggagctctccaaacgagacggagaaagaagaagcggcctgggtccaccagcccctgacgcccctgtgcccactttgtaaataaactgctgaacaccc

SEQ ID NO: 199967 - DNA, 988 bp, Homo sapiens
  Payload ID: 19446
  Gene Name: WD repeat domain 74
  ENST ID: ENST00000542347
  CDS Start-End: 13-138
ccaggctttgtcatggcggctgctgctgcacgctggaaccatgtgtgggtcggcaccgagactgggatcttgaaaggtgggtggcaggctcgggcgtcgggaagtgcaggggtgcactcgcgcccctggcgtgactgacgccttcgtctctcaggggtaaatcttcagcgaaaacaggcggcgaacttcacggccggaggacagccgcggcgcgaggaggcagtgagcgccctgtgttggggcaccggcggcgagacccagatgctggtgggctgcgcggacaggacggtgaagcacttcagcaccgaggatggcatattccagggtcagagacactgcccgggcggggagggcatgttccgtggcctcgcccaggccgacggcaccctcatcacatgtgtggattctgggattctcagagtctggcatgacaaggacaaggacacatcctctgacccactcctggaactgagagtgggccctggggtgtgtaggatgcgccaagacccagcacacccccatgtggttgccacaggtgggaaagagaatgctttgaagatatgggacctgcagggctctgaggaacctgtgttcagggccaagaacgtgcggaatgactggctggacttgcgggttcccatctgggaccaggacatacagtttctcccaggatcacagaagcttgtcacctgcacagggtaccaccaggtccgtgtttatgatccagcatccccccagcgccggccagtcctagagaccacctatggagagtacccactaacagccatgaccctcactccgggaggcaactcagtgattgtgggaaacactcatgggcagctggcagaaattgaccttcggcaagggcgtctactgggctgtctgaaggggctggcaggcagtgtgcgtgggttgcagtgccacccttcaaagcctctactagcctcctgtggcttggacagagtcttgaggatacacaggatccaga

SEQ ID NO: 199968 - DNA, 371 bp, Homo sapiens
  Payload ID: 19446
  Gene Name: WD repeat domain 74
  ENST ID: ENST00000536401
  CDS Start-End: 1-116
tttgggcatccttggaggcagctgccaagcggaagctctcgggtttggagcagccccaaggagctctccaaacgagacggagaaagaagaagcggcctgggtccaccagcccctgacgcccctgtgcccactttgcgccgaagatatcgacttgaactccccggaccatccgaatcacaagtcgaacgaaagccttctgattaccgtgctgtggcggcgactatccacgttcggtcgtcggggctcctcgcggccaagcaagaggcaaccagaccagattcggaagcaggagagtccgatccgagaaggcaaccaggaggagccggagaagggatgaccccagacctgctctcagtccgccccaacctcca

SEQ ID NO: 199969 - DNA, 548 bp, Homo sapiens
  Payload ID: 19446
  Gene Name: WD repeat domain 74
  ENST ID: ENST00000538098
  CDS Start-End: 378-548
atcgcttctcggccttttggctaagatcaagtgtagtatctgttcttatcagtttaatatctgatacgtcctctatccgaggacaatatattaaatggatttttggaaataggagatggaataggagcttgctccgtccactccacgcatcgacctggtattgcagtacttccaggaacggtgcactctcccttcggggagagaacaaccgttgtttaatggaagatttcgatcagttaggcaaaacaagcatggaagctttactgtttcggctcttcaaacttccagcaactacactgcgctgcatcggactcgacgcccgctggtgacgcacacgctgcgccggaagtgtgaactgtctgcctccaggctttgtcatggcggctgctgctgcacgctggaaccatgtgtgggtcggcaccgagactgggatcttgaaaggggtaaatcttcagcgaaaacaggcggcgaacttcacggccggaggacagccgcggcgcgaggaggcagtgagcgccctgtgttggggcaccggcggcgagacccag

SEQ ID NO: 199970 - DNA, 2701 bp, Homo sapiens
  Payload ID: 19447
  Gene Name: WD repeat domain 75
  Uniprot ID: Q8IWA0
  ENST ID: ENST00000314761
  CDS Start-End: 61-2553
ggctcaacgaaggaagttcagggcgggaccagagattggccattccgctactgcgcaaagatggtggaggaggagaacatccgcgtggttcgttgtggcggcagcgagttgaactttaggagagctgtgttctctgcagattctaagtatatcttctgtgtctctggagactttgttaaagtttacagcacagttacagaagagtgtgtacacatactgcatggacacagaaatctggtgactggaatccagcttaaccccaacaaccatctacagctgtattcttgttcccttgatggcacaattaaactgtgggactatatagatggcatcttaataaagactttcatagttggatgtaaacttcatgccctctttactcttgcccaagctgaggattctgtctttgttatagtgaataaagaaaaaccagatatatttcagctggtttcagtgaaactgccaaaatcctcaagccaggaagtagaagccaaggagctgtcctttgttttggattacataaaccagtcacccaagtgcattgcctttggaaacgagggagtatatgttgctgcagtacgggaattttacttgtctgtttattttttcaaaaagaaaacaacatcaaggtttactttatcatcatcaagaaataagaagcatgctaaaaacaattttacatgtgtagcatgtcacccaacggaagactgcatcgcatctggtcacatggatggcaaaattcgtctttggaggaatttttatgatgataagaaatatacgtacacatgtttacattggcaccatgatatggttatggatttggctttttcagtgacaggcaccagtctgctgagtggcggtcgtgaatctgtacttgtagagtggcgcgatgcaacagagaagaataaggagtttctcccgcgtttaggagctactattgaacatatctcagtctcgcctgcaggagatttattctgcacttctcactctgataataagataataattattcaccgaaaccttgaagcatccgcagtaattcaaggcctagtgaaagataggagtatcttcactggtttgatgattgatccaagaactaaagctttggttttgaatggaaaacctggccacctgcagttttattctctccagagtgataaacagttatacaatttagatattatacagcaagaatatattaatgattatggtctgatccaaattgaactaacaaaggctgcatttggctgctttggtaactggcttgcaacagtggaacagcggcaagaaaaggaaactgagcttgaattgcaaatgaaactgtggatgtataataagaaaacacaagggtttattcttaacactaaaattaacatgccacacgaagactgcattacagctctctgtttctgtaatgcagaaaaatctgaacagcccaccttggttacagctagcaaagatggttacttcaaagtatggatattaacagatgactctgacatatacaaaaaagctgttggctggacctgtgactttgttggtagttatcacaagtatcaagcaactaactgttgtttctccgaagatggttctttactagcagttagttttgaggaaatagtcacaatatgggattctgtaacatgggaacttaaatgtacattttgccaacgagctgggaaaataaggcacctttgctttgggagattgacgtgttcaaagtatctacttggtgctactgaaaatggcattctttgctgttggaatctgctgagctgtgcattggagtggaatgcaaaattaaatgttagagttatggaacccgatcctaattcagagaatattgctgcaatctctcagtcttcagtgggttcagacttgtttgtatttaaacctagtgagccaaggccattgtatattcaaaagggtatctccagagagaaagtccagtggggagtgtttgttccacgagatgtccctgaatccttcacctcagaagcttaccagtggctaaatagatcccagttttacttcctaacaaaatcacagagtttattgacattcagtacaaagtctccagaagaaaaactcacaccaacaagcaaacagctgctagcagaagaaagtcttcccacaaccccattttatttcatattgggaaaacacaggcaacagcaggatgaaaaactaaacgaaactttagagaatgagctggtacaactacccttaacagaaaacatacccgcaattagtgagcttcttcacactccagcccatgtcctgccatctgctgctttcctgtgctccatgtttgtaaattcattgctgctgtctaaagagactaagagtgctaaggaaattcctgaagatgtagatatggaagaagaaaaagaaagtgaagattcagatgaagaaaatgattttaccgaaaaagtccaggatacaagtaacacaggtttaggagaagacattatacatcagttgtcaaaatctgaagaaaaagaactgagaaaatttaggaaaatagactacagctggatagctgccctttaagccttggagatggggaggatccttggactttgtgtttttgattgtatgttgatattctaaaaacatctattttaatgttatttctgttctaaaaataagataataaatattaacaaactttgcttttttaaaaaactgataatatgaa

SEQ ID NO: 199971 - DNA, 4297 bp, Homo sapiens
  Payload ID: 19447
  Gene Name: WD repeat domain 75
  ENST ID: ENST00000427960
  CDS Start-End: 12-305
actgcgcaaagatggtggaggaggagaacatccgcgtggttcgttgtggcggcagcgagttgaactttaggagagctgtgttctctgcagattctaagtatatcttctgtgtctctggagactttgttaaagtttacagcacagttacagaagagtgtgtacacatactgcatggacacagaaatctggtgactggaatccagcttaaccccaacaaccatctacagtcacagccaacttggaagttattgattaaggatggatttgcattgccattcacttttattccaaaggaaataaagtagcaccgatcttttctttccaaaattaaatgagctacttctaaaaatcaaagttaagtaacttttctacgggatccaagtacatattttatgcttgccgtcctctgagggtttgacaaaagtttatcgctgtgtgtagtgtttgaatgtttttaatagcaaaactattattttgttaaaattgaaatttgtgaagtccatatactaagttttatagccaaaaaaacgtatacacaattcataaaagctttgtttcggatgactgaaagtgagtaaaattagagaagggcagttttatcagatttggttgaggtgcaggggcagcagttctggacttaggagtcacagtgtttgtgtattaaccattgttttgacagtaattatatgtttgacttgttacattttactagtccatatttatgattctcatatgcagtaattgtgatataaatttcctagtttgtataattttttgacttggatagataatatggttttactccaacatttttacattcctcttctctgagtccatgtctctatttgcagaaatcctaaaattgccactttctttaaaaatattaaaattctttgtaaacattataagcaaagtattttcctataacaacgacaacaaaatctagcagaaacttagtattaataaaactaagtacactgggacaaaagtaagcctatgtgttagtaaggtcttctggtgctaccaaagtatggtccacagaccagtgtcctaaaccattagttaccattctgtataagagtacagaatgtgagtgtcacaaaacactttgacattgcctcagcatccaagcatattataatttctattgtattttatgaaagtattggtccttgatggattggaagaaatttttttaagcagaatattcttcagtcacttgagaagcactcccttaatgctcatataaggtaaaaggagtttggctaataaaactgagtaagctgagttctggcaggaagagcaacaagctcttgtgtgggtgtttttgttttgttttgtttggttttggtttttttttctggagagtctcactctgtctcccaggctggagtacagcgatgtgattgatctcagctcactgcaacctcagcctcccaagtagctaggattacagggatgtgccaccacgcctggctaatttttgtaggggtttcgtcatgttggccaggctggtctcgaactcctggcctcaagtgatgcacccacctgggcctcccaaagtgctgagattacaggtggcagccactgcaccttggtgcttttcatatctcattcaaaaccttaccatctccctcttcaagacagaaagttggcttttttcctctctcttttagttaaaacttgaaatggatggatctgcttcttgcagaaagctgtgaaaagattgttttgcagaagcaatataaataaatgactctacctctttaaggttaacagtgaattaatgaatagaaaatgcccctgatcaacatttaattattcatttgatatcttgatgaatttcttttttttaaatcaattttgtattgttttacccttttagctgtattcttgttcccttgatggcacaattaaactgtgggactatatagatggcatcttaataaagactttcatagttggatgtaaacttcatgccctctttactcttgcccaagctgaggattctgtctttgttatagtgaataaagaaaaaccagatatatttcagctggtttcagtgaaactgccaaaatcctcaagccaggaagtagaagccaaggagctgtcctttgttttggattacataaaccagtcacccaagtgcattgcctttggaaacgagggagtatatgttgctgcagtacgggaattttacttgtctgtttattttttcaaaaagaaaacaacatcaaggtttactttatcatcatcaagaaataagaagcatgctaaaaacaattttacatgtgtagcatgtcacccaacggaagactgcatcgcatctggtcacatggatggcaaaattcgtctttggaggaatttttatgatgataagaaatatacgtacacatgtttacattggcaccatgatatggttatggatttggctttttcagtgacaggcaccagtctgctgagtggcggtcgtgaatctgtacttgtagagtggcgcgatgcaacagagaagaataaggagtttctcccgcgtttaggagctactattgaacatatctcagtctcgcctgcaggagatttattctgcacttctcactctgataataagataataattattcaccgaaaccttgaagcatccgcagtaattcaaggcctagtgaaagataggagtatcttcactggtttgatgattgatccaagaactaaagctttggttttgaatggaaaacctggccacctgcagttttattctctccagagtgataaacagttatacaatttagatattatacagcaagaatatattaatgattatggtctgatccaaattgaactaacaaaggctgcatttggctgctttggtaactggcttgcaacagtggaacagcggcaagaaaaggaaactgagcttgaattgcaaatgaaactgtggatgtataataagaaaacacaagggtttattcttaacactaaaattaacatgccacacgaagactgcattacagctctctgtttctgtaatgcagaaaaatctgaacagcccaccttggttacagctagcaaagatggttacttcaaagtatggatattaacagatgactctgacatatacaaaaaagctgttggctggacctgtgactttgttggtagttatcacaagtatcaagcaactaactgttgtttctccgaagatggttctttactagcagttagttttgaggaaatagtcacaatatgggattctgtaacatgggaacttaaatgtacattttgccaacgagctgggaaaataaggcacctttgctttgggagattgacgtgttcaaagtatctacttggtgctactgaaaatggcattctttgctgttggaatctgctgagctgtgcattggagtggaatgcaaaattaaatgttagagttatggaacccgatcctaattcagagaatattgctgcaatctctcagtcttcagtgggttcagacttgtttgtatttaaacctagtgagccaaggccattgtatattcaaaagggtatctccagagagaaagtccagtggggagtgtttgttccacgagatgtccctgaatccttcacctcagaagcttaccagtggctaaatagatcccagttttacttcctaacaaaatcacagagtttattgacattcagtacaaagtctccagaagaaaaactcacaccaacaagcaaacagctgctagcagaagaaagtcttcccacaaccccattttatttcatattgggaaaacacaggcaacagcaggatgaaaaactaaacgaaactttagagaatgagctggtacaactacccttaacagaaaacatacccgcaattagtgagcttcttcacactccagcccatgtcctgccatctgctgctttcctgtgctccatgtttgtaaattcattgctgctgtctaaagagactaagagtgctaaggaaattcctgaagatgtagatatggaagaagaaaaagaaagtgaagattcagatgaagaaaatgattttaccgaaaaagtccaggatacaagtaacacaggtttaggagaagacattatacatcagttgtcaaaatctgaagaaaaagaactgagaaaatttaggaaaatagactacagctggatagctgccctttaagccttggagatggggaggatccttggactttgtgtttttgattgtatgttgatattctaaaaacatctattttaatgttatttctgttctaaaaataagataataaatattaacaaactttgcttttttaaaaaa

SEQ ID NO: 199972 - DNA, 2703 bp, Homo sapiens
  Payload ID: 19447
  Gene Name: WD repeat domain 75
  ENST ID: ENST00000436347
  CDS Start-End: 48-317
aagttcagggcgggaccagagattggccattccgctactgcgcaaagatggtggaggaggagaacatccgcgtggttcgttgtggcggcagcgagttgaactttaggagagctgtgttctctgcagattctaagtatatcttctgtgtctctggagactttgttaaagtttacagcacagttacagaagagtgtgtacacatactgcatggacacagaaatctggtgactggaatccagcttaaccccaacaaccatctacaggttcccttacatgcattgcgaatatccaaaagagctgtattcttgttcccttgatggcacaattaaactgtgggactatatagatggcatcttaataaagactttcatagttggatgtaaacttcatgccctctttactcttgcccaagctgaggattctgtctttgttatagtgaataaagaaaaaccagatatatttcagctggtttcagtgaaactgccaaaatcctcaagccaggaagtagaagccaaggagctgtcctttgttttggattacataaaccagtcacccaagtgcattgcctttggaaacgagggagtatatgttgctgcagtacgggaattttacttgtctgtttattttttcaaaaagaaaacaacatcaaggtttactttatcatcatcaagaaataagaagcatgctaaaaacaattttacatgtgtagcatgtcacccaacggaagactgcatcgcatctggtcacatggatggcaaaattcgtctttggaggaatttttatgatgataagaaatatacgtacacatgtttacattggcaccatgatatggttatggatttggctttttcagtgacaggcaccagtctgctgagtggcggtcgtgaatctgtacttgtagagtggcgcgatgcaacagagaagaataaggagtttctcccgcgtttaggagctactattgaacatatctcagtctcgcctgcaggagatttattctgcacttctcactctgataataagataataattattcaccgaaaccttgaagcatccgcagtaattcaaggcctagtgaaagataggagtatcttcactggtttgatgattgatccaagaactaaagctttggttttgaatggaaaacctggccacctgcagttttattctctccagagtgataaacagttatacaatttagatattatacagcaagaatatattaatgattatggtctgatccaaattgaactaacaaaggctgcatttggctgctttggtaactggcttgcaacagtggaacagcggcaagaaaaggaaactgagcttgaattgcaaatgaaactgtggatgtataataagaaaacacaagggtttattcttaacactaaaattaacatgccacacgaagactgcattacagctctctgtttctgtaatgcagaaaaatctgaacagcccaccttggttacagctagcaaagatggttacttcaaagtatggatattaacagatgactctgacatatacaaaaaagctgttggctggacctgtgactttgttggtagttatcacaagtatcaagcaactaactgttgtttctccgaagatggttctttactagcagttagttttgaggaaatagtcacaatatgggattctgtaacatgggaacttaaatgtacattttgccaacgagctgggaaaataaggcacctttgctttgggagattgacgtgttcaaagtatctacttggtgctactgaaaatggcattctttgctgttggaatctgctgagctgtgcattggagtggaatgcaaaattaaatgttagagttatggaacccgatcctaattcagagaatattgctgcaatctctcagtcttcagtgggttcagacttgtttgtatttaaacctagtgagccaaggccattgtatattcaaaagggtatctccagagagaaagtccagtggggagtgtttgttccacgagatgtccctgaatccttcacctcagaagcttaccagtggctaaatagatcccagttttacttcctaacaaaatcacagagtttattgacattcagtacaaagtctccagaagaaaaactcacaccaacaagcaaacagctgctagcagaagaaagtcttcccacaaccccattttatttcatattgggaaaacacaggcaacagcaggatgaaaaactaaacgaaactttagagaatgagctggtacaactacccttaacagaaaacatacccgcaattagtgagcttcttcacactccagcccatgtcctgccatctgctgctttcctgtgctccatgtttgtaaattcattgctgctgtctaaagagactaagagtgctaaggaaattcctgaagatgtagatatggaagaagaaaaagaaagtgaagattcagatgaagaaaatgattttaccgaaaaagtccaggatacaagtaacacaggtttaggagaagacattatacatcagttgtcaaaatctgaagaaaaagaactgagaaaatttaggaaaatagactacagctggatagctgccctttaagccttggagatggggaggatccttggactttgtgtttttgattgtatgttgatattctaaaaacatctattttaatgttatttctgttctaaaaataagataataaatattaacaaactttgctttttt

SEQ ID NO: 199973 - DNA, 270 bp, Homo sapiens
  Payload ID: 19447
  Gene Name: WD repeat domain 75
  ENST ID: ENST00000631047
  CDS Start-End: 1-270
atggtggaggaggagaacatccgcgtggttcgttgtggcggcagcgagttgaactttaggagagctgtgttctctgcagattctaagtatatcttctgtgtctctggagactttgttaaagtttacagcacagttacagaagagtgtgtacacatactgcatggacacagaaatctggtgactggaatccagcttaaccccaacaaccatctacaggttcccttacatgcattgcgaatatccaaaagagctgtattcttgttcccttga

SEQ ID NO: 199974 - DNA, 3978 bp, Homo sapiens
  Payload ID: 19448
  Gene Name: WD repeat domain 76
  Uniprot ID: Q9H967
  ENST ID: ENST00000263795
  CDS Start-End: 71-1951
tcggacccgcccctcccggcctcccgccgcaatcttggcgggaaggcgccggccgctaagaagccgaaagatgtccaggtcgggcgcggcggctgagaaggcggactccagacagcgaccccagatgaaggtaaatgaatataaagaaaatcaaaacatcgcttatgtgtctctgagaccagcacagactacagttttaataaaaacagctaaggtctatcttgcccccttttcactcagtaattaccagctagaccagcttatgtgccccaaatccctatcagaaaagaattctaacaatgaagtggcgtgtaagaagactaaaataaagaaaacttgcagaaggattatacctccaaagatgaaaaacacatcttccaaggcagaatccacgctgcaaaattcatcctcagctgttcatactgaaagtaacaagctacaacccaagagaacggcagatgcgatgaatctcagtgttgatgtggaaagtagtcaggatggagacagtgatgaagataccacaccatccctggatttttcgggattgtcaccctacgaaaggaagagactgaagaacatatcagaaaacgcagacttttttgcttctcttcagttgtctgagtctgctgcaagactccgtgaaatgatagagaagagacagcctcctaaatccaaaagaaagaagcctaagagagaaaatgggattggatgtagaaggtcaatgcgattactaaaagttgatccttcgggagtttcattaccagcagctccaacaccgccgacattagtagcagatgaaactcctttgttacctcctgggcctttagaaatgacttctgaaaatcaagaagacaacaatgaacgatttaaaggatttctgcacacatgggcaggaatgagcaagccaagtagtaagaacactgagaagggattatctagcattaaaagctacaaagccaatttaaatggcatggtcattagtgaagataccgtttacaaagttaccacaggcccaatattctctatggctctccatccatcagaaactagaactttggtagcagttggggccaaatttgggcaagttggactttgtgatttgacccagcaacctaaagaagatggagtttatgtttttcatccccatagtcagccagttagctgtctttacttctcacccgccaatccggcccacatactgtcactgagctatgatggcacgttacgctgtggggatttttccagggctatttttgaagaggtgtatagaaatgaaagaagtagcttttcctccttcgacttcttggcagaagatgcctccactttaatagtaggacactgggatggaaatatgtcactggtggatagacggacacctggaacttcttatgagaaacttaccagttcttctatgggaaaaataagaactgttcatgtccacccagtgcatagacagtattttatcactgccggattgagggatactcatatttatgatgcaaggcgattgaattccaggagaagtcagcctttgatttctttgactgaacatacaaagagcattgcttccgcctatttttcacctcttactggtaacagagtggtgaccacatgtgctgattgtaatctgagaatttttgacagcagctgtatatcttctaagattccgctcctcaccaccatcaggcacaacactttcactgggcgatggctgaccaggttccaagccatgtgggatcctaaacaagaagactgtgtcatagttggcagcatggcccatccacgacgggtagaaatcttccatgagacaggaaagagggtgcattcgtttggtggagaataccttgtctctgtgtgttccatcaatgccatgcacccaactcggtatattttggctggaggtaattccagcgggaagatacatgtttttatgaatgaaaaaagctgctgagtttttggtttaggaacatcaatttgttcaaattgaccactgtctaaggagcctagtaatcggcgtgccttagtgtgtttatgtggtaatgtgttacatttagcaattataacattgttttattaataagactataagaagagtgtacttttagtaagggagaagtcttggagggttgcttctgcaggacggggagggaatttgaggggaggctgaggtgccgtcaggactttttttttttttttttttttgagatggagttttgctcttgttgcccaggctggagtgcaatagcgcgatcttggctcaccgcaacctccgcctcccaggttcaagcgattctcctgcctcagactcctaagtagctgggattacaggcacctgccaccacgcctggctatttttttgtatttttagtagagatggggtttcatcatgttggccaggctggtctcgagctcctgacctcaggtgatctgcccgcctcggcctccaaaagtgctggaattacaggcgtgagccaccatgcctggccatcagaacttgtaatcaagacagtatgttgagaaattctaacattataaattacaaagctttgactattaaagtttttgtgatctaatgatacagttttgattctatagtaatttgtggcttattttatagtttataatgaatacttatttctagactcatacactggaaggggacccggaaaggtaatgtaactcagtgattttaaaacttgatttttttaactgagaactttttttgccccctgcctgtaggttaagtcttacgtgaaatgccaagataattgctgagcagctttggttacccagggcggggtctgggtctgtctgtactttgcctttactctagatggctcctgagacacaggcaggactcccaagcaccgggttgggatctgccctggtcccggcattccagtataagattgcctcagacctgtgtttttcagactgggtttttgctcttcacatgaaatcaagttagatgacaatgactggtgttgaaaaaaatgaaaaggaaagaatttgtaaagaacagaaaatatatttgagtaagtattgtttggtaaaacttagttacatatgcatatatatttgttaggtatatatgtttatgtgtattctgatgtaaaatatatatatatatatattttattactatagtaccatgggtaatggataaagaagttaaagctactgcttagaatgaagaaggccccaggcttacctgtcccgatctttaaactgtccgaaggaaattcaatagcctgttaagtgaataccttcattcttacttgtatttgggggaatattatgaaatactcaccacttttggtattttatgaaaatgttttcttttcagaagttatggtaatttcaatgtgtttgttgttgggaggggagctgccaaatcagttactaatattactgtgtgacatctatccaacttttttcattattcttcattgccaaatactgaaagacttgtaaatggctttggcaatatgtttgaattctaagaggaaatattttcccataattgtatatcagagaaatatagtgatatacaatttccttgaaaaccaatttctaaataattttcttctctgtaatctaagtgtaaaaaggtttagttttttaataggtttaggtgtttataagcaatagttctctattttctagttgatataagtagaagaattgacaagtgagatggaaatgttaatttataaagggaaagaaaagctaggtgaggttgagttataattaaactgttcaggaaacatcgtaaaggctttaggctccctttttcatttctataccaattaatctcatgggttctagagtggttagttctacgggaattgtttttgtttttgtttttaaagatgctgaaaactactctcaatcaaattagtaccatcatttaagctttgaatacttggcagtaattgcctgggctcgtcaataaatgttagcaaattcttgatgttc

SEQ ID NO: 199975 - DNA, 2586 bp, Homo sapiens
  Payload ID: 19448
  Gene Name: WD repeat domain 76
  ENST ID: ENST00000381246
  CDS Start-End: 272-1960
ggcctcccgccgcaatcttggcgggaaggcgccggccgctaagaagccgaaagatgtccaggtcgggcgcggcggctgagaaggcggactccagacagcgaccccagatgaaggtgagaaacggactggtgcttccaaggtaaatgaatataaagaaaatcaaaacatcgcttatgtgtctctgagaccagcacagactacagttttaataaaaacagctaaggtctatcttgcccccttttcactcagtaattaccagctagaccagcttatgtgccccaaatccctatcagaaaagaattctaacaatgaagtggcgtgtaagaagactaaaataaagaaaacttgcagaaggattatacctccaaagatgaaaaacacatcttccaaggcagaatccacgctgcaaaattcatcctcagctgttcatactgaaagtaacaagctacaacccaagagaacggcagatgcgatgaatctcagtgttgatgtggaaagtagtcaggatggagacagtgatgaagataccacaccatccctggatttttcgggattgtcaccctacgaaaggaagagactgaagaacatatcagaaaacgcagacttttttgcttctcttcagttgtctgagtctgctgcaagactccgtgaaatgatagagaagagacagcctcctaaatccaaaagaaagaagcctaagagagaaaatgggattggatgtagaaggtcaatgcgattactaaaagttgatccttcgggagtttcattaccagcagctccaacaccgccgacattagtagcagatgaaactcctttgttacctcctgggcctttagaaatgacttctgaaaatcaagaagacaacaatgaacgatttaaaggatttctgcacacatgggcaggaatgagcaagccaagtagtaagaacactgagaagggattatctagcattaaaagctacaaagccaatttaaatggcatggtcattagtgaagataccgtttacaaagttaccacaggcccaatattctctatggctctccatccatcagaaactagaactttggtagcagttggggccaaatttgggcaagttggactttgtgatttgacccagcaacctaaagaagatggagtttatgtttttcatccccatagtcagccagttagctgtctttacttctcacccgccaatccggcccacatactgtcactgagctatgatggcacgttacgctgtggggatttttccagggctatttttgaagaggtgtatagaaatgaaagaagtagcttttcctccttcgacttcttggcagaagatgcctccactttaatagtaggacactgggatggaaatatgtcactggtggatagacggacacctggaacttcttatgagaaacttaccagttcttctatgggaaaaataagaactgttcatgtccacccagtgcatagacagtattttatcactgccggattgagggatactcatatttatgatgcaaggcgattgaattccaggagaagtcagcctttgatttctttgactgaacatacaaagagcattgcttccgcctatttttcacctcttactggtaacagagtggtgaccacatgtgctgattgtaatctgagaatttttgacagcagctgtatatcttctaagattccgctcctcaccaccatcaggcacaacactttcactgggcgatggctgaccaggttccaagccatgtgggatcctaaacaagaagactgtgtcatagttggcagcatggcccatccacgacgggtagaaatcttccatgagacaggaaagagggtgcattcgtttggtggagaataccttgtctctgtgtgttccatcaatgccatgcacccaactcggtatattttggctggaggtaattccagcgggaagatacatgtttttatgaatgaaaaaagctgctgagtttttggtttaggaacatcaatttgttcaaattgaccactgtctaaggagcctagtaatcggcgtgccttagtgtgtttatgtggtaatgtgttacatttagcaattataacattgttttattaataagactataagaagagtgtacttttagtaagggagaagtcttggagggttgcttctgcaggacggggagggaatttgaggggaggctgaggtgccgtcaggactttttttttttttttttttttgagatggagttttgctcttgttgcccaggctggagtgcaatagcgcgatcttggctcaccgcaacctccgcctcccaggttcaagcgattctcctgcctcagactcctaagtagctgggattacaggcacctgccaccacgcctggctatttttttgtatttttagtagagatggggtttcatcatgttggccaggctggtctcgagctcctgacctcaggtgatctgcccgcctcggcctccaaaagtgctggaattacaggcgtgagccaccatgcctggccatcagaacttgtaatcaagacagtatgttgagaaattctaacattataaattacaaagctttgactattaaagtttttgtgatctaatgat

SEQ ID NO: 199976 - DNA, 813 bp, Homo sapiens
  Payload ID: 19448
  Gene Name: WD repeat domain 76
  ENST ID: ENST00000452115
  CDS Start-End: 128-813
gccgcaatcttggcgggaaggcgccggccgctaagaagccgaaagatgtccaggtcgggcgcggcggctgagaaggcggactccagacagcgaccccagatgaagtaattaccagctagaccagcttatgtgccccaaatccctatcagaaaagaattctaacaatgaagtggcgtgtaagaagactaaaataaagaaaacttgcagaaggattatacctccaaagatgaaaaacacatcttccaaggcagaatccacgctgcaaaattcatcctcagctgttcatactgaaagtaacaagctacaacccaagagaacggcagatgcgatgaatctcagtgttgatgtggaaagtagtcaggatggagacagtgatgaagataccacaccatccctggatttttcgggattgtcaccctacgaaaggaagagactgaagaacatatcagaaaacgcagacttttttgcttctcttcagttgtctgagtctgctgcaagactccgtgaaatgatagagaagagacagcctcctaaatccaaaagaaagaagcctaagagagaaaatgggattggatgtagaaggtcaatgcgattactaaaagttgatccttcgggagtttcattaccagcagctccaacaccgccgacattagtagcagatgaaactcctttgttacctcctgggcctttagaaatgacttctgaaaatcaagaagacaacaatgaacgatttaaaggatttctgcacacatgggcaggaatgagcaagccaagtagtaagaacactgagaagggattatctagcattaaaag

SEQ ID NO: 199977 - DNA, 2576 bp, Homo sapiens
  Payload ID: 19449
  Gene Name: WD repeat domain 77
  Uniprot ID: Q9BQA1
  ENST ID: ENST00000235090
  CDS Start-End: 208-1236
agtcaagtaacgctgagagcctatcgcatgagggcgacagccggaaagcaggatggagccatagaagcaattctcgcgagaagtagagttgcggttccctcgggagaggggcggaggctcagaggtgcaccacgtggggtttgctgccggagcggagtctccggccggcgtccagtttgagtctaggttggagttggaaccgtggagatgcggaaggaaaccccaccccccctagtgcccccggcggcccgggagtggaatcttcccccaaatgcgcccgcctgcatggaacggcagttggaggctgcgcggtaccggtccgatggggcgcttctcctcggggcctccagcctgagtgggcgctgctgggccggctccctctggctttttaaggacccctgtgccgcccccaacgaaggcttctgctccgccggagtccaaacggaggctggagtggctgacctcacttgggttggggagagaggtattctagtggcctccgattcaggtgctgttgaattgtgggaactagatgagaatgagacacttattgtcagcaagttctgcaagtatgagcatgatgacattgtgtctacagtcagtgtcttgagctctggcacacaagctgtcagtggtagcaaagacatctgcatcaaggtttgggaccttgctcagcaggtggtactgagttcataccgagctcatgctgctcaggtcacttgtgttgctgcctctcctcacaaggactctgtgtttctttcatgcagcgaggacaatagaattttactctgggatacccgctgtcccaagccagcatcacagattggctgcagtgcgcctggctaccttcctacctcgctggcttggcatcctcagcaaagtgaagtctttgtctttggtgatgagaatgggacagtctcccttgtggacaccaagagtacaagctgtgtcctgagctcagctgtacactcccagtgtgtcactgggctggtgttctccccacacagtgttcccttcctggcctctctcagtgaagactgctcacttgctgtgctggactcaagcctttctgagttgtttagaagccaagcccacagagactttgtgagagatgcgacttggtccccgctcaatcactccctgcttaccacagtgggctgggaccatcaggtcgtccaccacgttgtgcccacagaacctctcccagcccctggacctgcaagtgttactgagtagattggatttaagacaaaaagcaagtcccccatgagtgtccacttctttgccctgccctctcagcttgtgagacaacacaggagccttctatagtatgttgatatgctagatctgtgccgttaataggcatcgtctctcagcctgagggaggctggattctgggttcctgtagtcacagggaggaaaagctttcttaaaaatggacatgtatgtgcgtgtgagtgtgtgtgtagatttatagtttttggtagtggcaggaataaaaaaaatccatcctacatcttccctaagcactgcctctctctcaccccccaaaacaagttgacgaaagggttttatgtagctgtctatgaggaattggccgtgtctgggtgggttatgggatgtgggcatccctgggttcttggaagcagctcttatgctactcatagagatgggattgactttatttttttatagtgcttaattcaccattatgagaaatgcttccagtcacaaaaatgcagcccagctcactctgaggaagaagcaggacttggtacggttttacacaactccttaccattaaactgaatcagaaatccattttctggctgaataaaaagtttggcttgcctgtgtaatgcccactcccttccccctggctccctagtgatgggacatatatgagagagaagtgtttttctatcatagacaccataggggaaagtttggggatgaaggagagcttaaaggtgtttcaattaagttagaaaactgacacaggctgttgagaattctttgccacttttcccaccccaaaacagcatggggcctgacatcttctgccctggtcccctttctcttgatgtggaaagtctgaatgcagtatttatagacttctaaggttttaaaatccagtatcaagaagaaaatcagaaatactggttggtgaaataaagagtttaggcattgttggcctgtcttttttgaagcatgtgtgttatgtgtagttagatatatttcacttatgtgagtcatcatggtgttggtcttgtagcccattatttttcctgtgcttccccagcttcccaaagtagctagttagaacttaaggtaaatatttattcttgggttggtggagtggatattgccagttaggagtcatggatcaattactgattatattgaaagtaaatataatcaattatgtacttttgagctttgcaggttcaatttaggtaaaaatcacattatgaaactgggaaagtctgaaggaatatgggcaaaatatttctcagtaaagcttccatgcttcacccttgacatgattacccttgagtaaaacatgggaatttgta

SEQ ID NO: 199978 - DNA, 877 bp, Homo sapiens
  Payload ID: 19449
  Gene Name: WD repeat domain 77
  ENST ID: ENST00000449340
  CDS Start-End: 1-875
cctgtgccgcccccaacgaaggcttctgctccgccggagtccaaacggaggctggagtggctgacctcacttgggttggggagagaggtattctagtggcctccgattcaggtgctgttgaattgtgggaactagatgagaatgagacacttattgtcagcaagttctgcaagtatgagcatgatgacattgtgtctacagtcagtgtcttgagctctggcacacaagctgtcagtggtagcaaagacatctgcatcaaggtttgggaccttgctcagcaggtggtactgagttcataccgagctcatgctgctcaggtcacttgtgttgctgcctctcctcacaaggactctgtgtttctttcatgcagcgaggacaatagaattttactctgggatacccgctgtcccaagccagcatcacagattggctgcagtgcgcctggctaccttcctacctcgctggcttggcatcctcagcaaagtgaagtctttgtctttggtgatgagaatgggacagtctcccttgtggacaccaagagtacaagctgtgtcctgagctcagctgtacactcccagtgtgtcactgggctggtgttctccccacacaggctggacctttcacaaccctctcctccatctgatagtgttcccttcctggcctctctcagtgaagactgctcacttgctgtgctggactcaagcctttctgagttgtttagaagccaagcccacagagactttgtgagagatgcgacttggtccccgctcaatcactccctgcttaccacagtgggctgggaccatcaggtcgtccaccacgttgtgcccacagaacctctcccagcccctggacctgcaagtgttactgagtagat

SEQ ID NO: 199979 - DNA, 1520 bp, Homo sapiens
  Payload ID: 19450
  Gene Name: WD repeat domain 78
  ENST ID: ENST00000371022
  CDS Start-End: 16-978
ggctccaccgtcgccatgacgcccggcaaacattccggagcctcggcccgagccgctaacggaggagcttgggggtacagggacttcagaggcggccaaaaaaaggggtggtgcaccactccccagctggtcgccaccatgccagtctctccggcaggcagtcacaagcagcagaacttcgggttgaacaatgccacacaaccaaagaagtctattagcttttttgctacaatgaaagcaacttcagtgaaaggatatactggtgcaaatcaaagcagaatggctgtgtccaaaaccgtgcttattccacctgaactgaaaactgtagaaaaaccaaatcccaatataaagacaacacaggtatttgacataaatggaactgatgttactccccgacctctttaccatccagatccacttactggtacagcaaaaccaagtaaactcttgacatcacaagaaggatcacttggatcagaatttatatcttcctatagcctttatcagaatacaataaatcctagtacgttagggcagtttacaaggtcagttttaggaagcagtacagtttctaagtcaagtgtatcagcaagtgaatcaatagcagaagacctggaagaaccatcctataaacgggaaagattgactagtttcacagatttgcaagttataagggcagcacctgaaaaaattgtaacaaaagaagacctggagaagaatatagagataatactcacagagacagaaacactgagattttttgacttgcccacagtcatggtctctgtagaatctgaagaagctgagaaagtaactcagagaaacaagaattatgaagtcctttgtagaaacagattaggcaatgacctatatgttgaaaggatgatgcagactttcaatggagcaccaaagaataaagatgttcaatgtgataaaatcataatggaagataaaggtaatttctatcattctgcttgataaactataatgttctaatatacattttttgagtctgtcaatcgacaagtgaatattgaaatgtataaagcaaaaataaaaataatttggccaaaccacaacagtagttggacactgtgttctatagctttcagaatttgacatgttaagtaataaatatatagatttgaataacataattattcatcttggtttttatgcatactatatcatagaactttatactctttaaacgtttatataaactgattatttactatgtcacaaagaatatcagccataactattaacattttaaatgtgtcagacactatgtccttcacatgtattaactggtttaatttttacagcaaccctatgaggtagatactattatgcttccccattttatagatgaggaaacaggcaaagagaagtttgctaactgttctggttctagagcttgtgcacttaactactatacttaccacctctcactgtgtacaaattaacaaccctgagcacattgcatagccaaaatctgtagggtgtagccaaagaag

SEQ ID NO: 199980 - DNA, 1697 bp, Homo sapiens
  Payload ID: 19450
  Gene Name: WD repeat domain 78
  Uniprot ID: Q5VTH9
  ENST ID: ENST00000371023
  CDS Start-End: 10-1647
accgtcgccatgacgcccggcaaacattccggagcctcggcccgagccgctaacggaggagcttgggggtacagggacttcagaggcggccaaaaaaaggggtggtgcaccactccccagctggtcgccaccatgccagtctctccggcaggcagtcacaagcagcagaacttcgggttgaacaatgccacacaaccaaagaagtctattagcttttttgctacaatgaaagcaacttcagtgaaaggatatactggtgcaaatcaaagcagaatggctgtgtccaaaaccgtgcttattccacctgaactgaaaactgtagaaaaaccaaatcccaatataaagacaacacaggtatttgacataaatggaactgatgttactccccgacctctttaccatccagatccacttactggtacagcaaaaccaagtaaactcttgacatcacaagaaggatcacttggatcagaatttatatcttcctatagcctttatcagaatacaataaatcctagtacgttagggcagtttacaaggtcagttttaggaagcagtacagtttctaagtcaagtgtatcagcaagtgaatcaatagcagaagacctggaagaaccatcctataaacgggaaagattgactagtttcacagatttgcaagttataagggcagcacctgaaaaaattgtaacaaaagaagacctggagaagaatatagagataatactcacagagacagaaacactgagattttttgacttgcccacagtcatggtctctgtagaatctgaagaagctgagaaagtaactcagagaaacaagaattatgaagtcctttgtagaaacagattaggcaatgacctatatgttgaaaggatgatgcagactttcaatggagcaccaaagaataaagatgttcaatgtgataaaatcataatggaagataaaggcataatgtccactgcctgggatttgtatgattcttacaatgctatggaacttgtatctttatcagtaaaacaatctgtggttgagtcaagtagtaaagcaaatgtacttcctaaagatcaggaccaaagattgccagggagcactacagaaaaaaatagtgaaactagttctctaatggacatagaaaatgtaattctggcaaaaatccatgaagatgaggaagaccactcagatgcaatattaaaatctgacaaatttcatcaggacttattttttatggaacgggttctgatggaaaatatatttcagcccaaacttgcagcttatcgtcagcttcctgttttaaaagaacctgaacctgaagagcctgaagatgttttagaaagtgcaaaacatgaagaggtagaggaagaatctaagaaggaggaggaagaagaaatacatgcagaagaatcaacaatacccgccaacttggaacgactttggtctttttcctgtgacttaaccaaaggcctcaatgtgagcagccttgcctggaataaaacaaatccagatcttttggctgttggctatgggcactttggatttaaagagcaaaaaagaggactggcttgctgctggtcaataaagaatcccatggtaacccaaacaagaataagaagcatttttatctggctgttgacaaaattctcataaaatatataattacatgtaataattaaataaagtctagaaaattttatcaa

SEQ ID NO: 199981 - DNA, 3848 bp, Homo sapiens
  Payload ID: 19450
  Gene Name: WD repeat domain 78
  Uniprot ID: Q5VTH9
  ENST ID: ENST00000371026
  CDS Start-End: 57-2603
ctcgtgccgccagccaaccgcgcggccgcttgttgagccagggctccaccgtcgccatgacgcccggcaaacattccggagcctcggcccgagccgctaacggaggagcttgggggtacagggacttcagaggcggccaaaaaaaggggtggtgcaccactccccagctggtcgccaccatgccagtctctccggcaggcagtcacaagcagcagaacttcgggttgaacaatgccacacaaccaaagaagtctattagcttttttgctacaatgaaagcaacttcagtgaaaggatatactggtgcaaatcaaagcagaatggctgtgtccaaaaccgtgcttattccacctgaactgaaaactgtagaaaaaccaaatcccaatataaagacaacacaggtatttgacataaatggaactgatgttactccccgacctctttaccatccagatccacttactggtacagcaaaaccaagtaaactcttgacatcacaagaaggatcacttggatcagaatttatatcttcctatagcctttatcagaatacaataaatcctagtacgttagggcagtttacaaggtcagttttaggaagcagtacagtttctaagtcaagtgtatcagcaagtgaatcaatagcagaagacctggaagaaccatcctataaacgggaaagattgactagtttcacagatttgcaagttataagggcagcacctgaaaaaattgtaacaaaagaagacctggagaagaatatagagataatactcacagagacagaaacactgagattttttgacttgcccacagtcatggtctctgtagaatctgaagaagctgagaaagtaactcagagaaacaagaattatgaagtcctttgtagaaacagattaggcaatgacctatatgttgaaaggatgatgcagactttcaatggagcaccaaagaataaagatgttcaatgtgataaaatcataatggaagataaaggcataatgtccactgcctgggatttgtatgattcttacaatgctatggaacttgtatctttatcagtaaaacaatctgtggttgagtcaagtagtaaagcaaatgtacttcctaaagatcaggaccaaagattgccagggagcactacagaaaaaaatagtgaaactagttctctaatggacatagaaaatgtaattctggcaaaaatccatgaagatgaggaagaccactcagatgcaatattaaaatctgacaaatttcatcaggacttattttttatggaacgggttctgatggaaaatatatttcagcccaaacttgcagcttatcgtcagcttcctgttttaaaagaacctgaacctgaagagcctgaagatgttttagaaagtgcaaaacatgaagaggtagaggaagaatctaagaaggaggaggaagaagaaatacatgcagaagaatcaacaatacccgccaacttggaacgactttggtctttttcctgtgacttaaccaaaggcctcaatgtgagcagccttgcctggaataaaacaaatccagatcttttggctgttggctatgggcactttggatttaaagagcaaaaaagaggactggcttgctgctggtcaataaagaatcccatgtggccagaacgtatttatcagagtccatatggagttactgctgtggatttttcaattggagcacctaaccttttagccgttggctatcacaatggcacaattgcaatttacaatgtacggagcaacagtaatgttccagttctggatagtagtgaatcacctcaaaaacatttgggacctgtatggcaactacagtggatagaacaagatcgaggaacaacaggagatggcaaaagagaaatactagtttctatatcagcagatggaagaatctccaaatgggttatacgaaaaggactagactgttatgatttgatgcgattaaagagaactacagctgccagtaacaaaaaaggaggggaaaaggaaaagaaagatgaagctttgatatctcgacaggctcctggaatgtgttttgcttttcatcccaaggacacaaatatctatttggctggcactgaagaaggtcatattcacaaatgttcttgttcatataatgaacaatacttagatacctacagaggacataagggtccagtgtataaagtgacatggaatccattttgtcatgatgtatttttaagctgttctgcagattggggtgttattatatggcaacaggagaatgtcaagccatctttgagtttttatccagctacttctgttgtttacgacgttgcctggtctccaaaatcatcctatatatttgcagctgcaaatgagaacagggtggagatttgggaccttcatatcagcactttggaccctctgattgtgaatactgctaaccctggaatcaagttcacaaccattctctttgccaaacaaacagattgccttctggtaggagacagtgatggacaggtttctgtgtatgaactgagaaatatgcctactgttttggaaactggccggggagatataatggatactttgcttggatccaagtcaaaccaatcagcataattcatcattcctaatatttttcttgtagttgttttaaaaaaggaattaacatccaatattctgtattacatactgtacaccagattttgatttcagaaaacaatatttgatgtataacttccacttaatttaaatttaataaacttttatttcagagatatttgattagtttacaatctaagagttattcttaagagtttcagtggaattttcttaatttttctaaagatattcctactctcttgatcatattctaagtacatatgagtacatgtacattcttatacaatgtctaaatgggttagaaaattattatacctatagaagcgaaacttggaaattaatagaatcacttaaaccaaaatctttataagacacaattctattgattttaaagcttctgctttccaggctctgttttccagagtttataattacgtagtttttagtagatgaaaataatggattcttgtacctaacattttatcctcttagatctaagagccgaagctatagaactttgttagactatttggcaagcaaaatatatgacagtaaatatcagaattttatggtttgaccagcgcttatcacattcccaattcagtgagaaaaattcatctgggacacaacagggtactcttctctgtttgcccagaatcagctctggattttaagcccagacttcagtggacccagatagaaaatataaagtctctgatctataggccacatcaggatgttattttatgaagagttctagagcaaggttgcggaaatcggggtggagatggggagcagtgactcctccaaatattcattgctaacaggccattctatgcagtttgttttaacaaatcctgggttaaactgaggccacaggacatgatgggctgttctataaagcattctaagtggagaggagacgatagggcatatgaaattcactaaactctctggaaaaaaaatatgtatatattaaaaaccaagactggaatcagtgcaacagtgggaactaccttttacaagtatccattgcttcataaactccatttgtttggaccaatcccttaaacaaaagcaaggcaaattttacatggatttagagcctaggtcaggttattaggattataaattttccactggtatgtcattgtgattatctttgtttttgtctttctgaaagattggattttctataacaccttgtgtaagaaaataaaaaacttgatctaactgaaaaaa

SEQ ID NO: 199982 - DNA, 569 bp, Homo sapiens
  Payload ID: 19450
  Gene Name: WD repeat domain 78
  ENST ID: ENST00000532629
  CDS Start-End: 1-168
aaacattccggagcctcggcccgagccgctaacggaggagcttgggggtacagggacttcagaggcggccaaaaaaaggggtggtgcaccactccccagctggtcgccaccatgccagtctctccggcaggcagtcacaagcagcagaacttcgggttggaggcatgagacatcaatcaatatatgtaagaagtacattggttccatccagaaaggcagggacaacttgaagcagggagggggcttccaggtcacaggaacaatgccacacaaccaaagaagtctattagcttttttgctacaatgaaagcaacttcagtgaaaggatatactggtgcaaatcaaagcagaatggctgtgtccaaaaccgtgcttattccacctgaactgaaaactgtagaaaaaccaaatcccaatataaagacaacacaggtatttgacataaatggaactgatgttactccccgacctctttaccatccagatccacttactggtacagcaaaaccaagtaaactcttgacatcacaagaaggatcacttggatcagaatttatatcttcctatag

SEQ ID NO: 199983 - DNA, 684 bp, Homo sapiens
  Payload ID: 19450
  Gene Name: WD repeat domain 78
  ENST ID: ENST00000469450
  CDS Start-End: 1-367
tcagagaaacaagaattatgaagtcctttgtagaaacagattaggcaatgacctatatgttgaaaggatgatgcagactttcaatggagcaccaaagaataaagatgttcaatgtgataaaatcataatggaagataaaggcataatgtccactgcctgggatttgtatgattcttacaatgctatggaacttgtatctttatcagtaaaacaatctgtggttgagtcaagtagtaaagcaaatgtacttcctaaagatcaggaccaaagattgccagggagcactacagaaaaaactgtggtctgggagagagacgtgatgacagaagaaggtcagcgggaatgcaatcaatgttgctgtctttgaagatgaaggaaaggttgtggtggcccccagaaactgaaaaaatcaaggaaacaaattctcctttaaaaccttcagaaaggaacaaagccctatcaacttcttggttttagctcagtgacatctgttaggcctctaatctactgaactgtaagataaatttgcattgttttaagccactgtgatttgttacagcagcaagagaaaacttaatacaatagtatagtatttctgtatagcaataatcaaatcagacctttttctgaaggctgatcatcttatttcaacttgaattttaaaagaataaagacaaaaattac

SEQ ID NO: 199984 - DNA, 550 bp, Homo sapiens
  Payload ID: 19450
  Gene Name: WD repeat domain 78
  ENST ID: ENST00000531552
  CDS Start-End: 1-504
ggcataatgtccactgcctgggatttgtatgattcttacaatgctatggaacttgtatctttatcagtaaaacaatctgtggttgagtcaagtagtaaagcaaatgtacttcctaaagatcaggaccaaagattgccagggagcactacagaaaaaaaacctgaacctgaagagcctgaagatgttttagaaagtgcaaaacatgaagaggtagaggaagaatctaagaaggaggaggaagaagaaatacatgcagaagaatcaacaatacccgccaacttggaacgactttggtctttttcctgtgacttaaccaaaggcctcaatgtgagcagccttgcctggaataaaacaaatccagatcttttggctgttggctatgggcactttggatttaaagagcaaaaaagaggactggcttgctgctggtcaataaagaatcccatggtaacccaaacaagaataagaagcatttttatctggctgttgacaaaattctcataaaatatataattacatgtaataattaaataaagtctagaaaatttta

SEQ ID NO: 199985 - DNA, 1906 bp, Homo sapiens
  Payload ID: 19450
  Gene Name: WD repeat domain 78
  ENST ID: ENST00000464352
  CDS Start-End: 1-1746
aatatagagataatactcacagagacagaaacactgagattttttgacttgcccacagtcatggtctctgtagaatctgaagaagctgagaaagtaactcagagaaacaagaattatgaagtcctttgtagaaacagattaggcaatgacctatatgttgaaaggatgatgcagactttcaatggagcaccaaagaataaagatgttcaatgtgataaaatcataatggaagataaaggcataatgtccactgcctgggatttgtatgattcttacaatgctatggaacttgtatctttatcagtaaaacaatctgtggttgagtcaagtagtaaagcaaatgtacttcctaaagatcaggaccaaagattgccagggagcactacagaaaaaaatagtgaaactagttctctaatggacatagaaaatgtaattctggcaaaaatccatgaagatgaggaagaccactcagatgcaatattaaaatctgacaaatttcatcaggacttattttttatggaacgggttctgatggaaaatatatttcagcccaaacttgcagcttatcgtcagcttcctgttttaaaagaacctgaacctgaagagcctgaagatgttttagaaagtgcaaaacatgaagaggtagaggaagaatctaagaaggaggaggaagaagaaatacatgcagaagaatcaacaatacccgccaacttggaacgactttggtctttttcctgtgacttaaccaaaggcctcaatgtgagcagccttgcctggaataaaacaaatccagatcttttggctgttggctatgggcactttggatttaaagagcaaaaaagaggactggcttgctgctggtcaataaagaatcccatgtggccagaacgtatttatcagagtccatatggagttactgctgtggatttttcaattggagcacctaaccttttagccgttggctatcacaatggcacaattgcaatttacaatgtacggagcaacagtaatgttccagttctggatagtagtgaatcacctcaaaaacatttgggacctgtatggcaactacagtggatagaacaagatcgaggaacaacaggagatggcaaaagagaaatactagtttctatatcagcagatggaagaatctccaaatgggttatacgaaaaggactagactgttatgatttgatgcgattaaagagaactacagctgccagtaacaaaaaaggaggggaaaaggaaaagaaagatgaagctttgatatctcgacaggctcctggaatgtgttttgcttttcatcccaagggtccagtgtataaagtgacatggaatccattttgtcatgatgtatttttaagctgttctgcagattggggtgttattatatggcaacaggagaatgtcaagccatctttgagtttttatccagctacttctgttgtttacgacgttgcctggtctccaaaatcatcctatatatttgcagctgcaaatgagaacagggtggagatttgggaccttcatatcagcactttggaccctctgattgtgaatactgctaaccctggaatcaagttcacaaccattctctttgccaaacaaacagattgccttctggtaggagacagtgatggacaggtttctgtgtatgaactgagaaatatgcctactgttttggaaactggccggggagatataatggatactttgcttggatccaagtcaaaccaatcagcataattcatcattcctaatatttttcttgtagttgttttaaaaaaggaattaacatccaatattctgtattacatactgtacaccagattttgatttcagaaaacaatatttgatgtataacttccacttaatttaaatttaataaacttttatttcagagata

SEQ ID NO: 199986 - DNA, 613 bp, Homo sapiens
  Payload ID: 19450
  Gene Name: WD repeat domain 78
  ENST ID: ENST00000488333
  CDS Start-End: 143-292
agggaaaagagaaaaaaataagataggagacctggaattatggatggagaagagtccctgagacaccagtgacaagtttcagagttcacataaaaggaacaatgccacacaaccaaagaagtctattagcttttttgctacaatgaaagcaacttcagtgaaaggatatactggtgcaaatcaaagcagaatggctgtgtccaaaaccgtgcttattccacctgaactgaaaactgtagaaaaaccaaatcccaatataaagacaacacaggtaatattcttagaattctgagtttatttgaaaatggcactgtgaaaaactcaattgaaatgttaaagatagaaaatatgctgctttcagataatcactcataattttgaaatactgattttgttaatttttaccacatattattccatacaacataatattgacacttggctcctataactagttattgataagaagaatattagagtggaatgagaaaagtctattcatgaccttaagaactatttgcttatggtattaattatatacattacaactatctttcactgttgtcagcaatatagtcttgaaaatacaataaaattatttgtcataaagtca

SEQ ID NO: 199987 - DNA, 4206 bp, Homo sapiens
  Payload ID: 19450
  Gene Name: WD repeat domain 78
  ENST ID: ENST00000491297
  CDS Start-End: 1-478
tactggtgcaaatcaaagcagaatggctgtgtccaaaaccgtgcttattccacctgaactgaaaactgtagaaaaaccaaatcccaatataaagacaacacaggtatttgacataaatggaactgatgttactccccgacctctttaccatccagatccacttactggtacagcaaaaccaagtaaactcttgacatcacaagaaggatcacttggatcagaatttatatcttcctatagcctttatcagaatacaataaatcctagtacgttagggcagtttacaaggtcagttttaggaagcagtacagtttctaagtcaagtgtatcagcaagtgaatcaatagcagaagacctggaagaaccatcctataaacgggaaagattgactagtttcacaggtaatgaaaatatacttgtttatttcagtaacagtccgttatttagtcaatatgcttattattggttggatacttgagataaaagaaatatggtaatgatttccaaatgctggcttgtgaagtcgcttcaagagaattaccaggggaatatctatttttttaagttccctgggtgactgttttgaatcatcagcctgaggaaccaatggcgctttgtgttagagctcagctgctgcttctgctgctgctgttgctgctgctgcttctgcttcttcttcttcttcttcctcttcctcttcttcttcctcttccttttcttcctcttcctcttttcctcttcttttcctcttcttcctcacttcttcttcctcctcttcctcttcttcctcttcctcctcctcctcttccttctccccctcttcctctccctcctcctcctccccctcctctccttcttcttcttcctcttcctcctcttcctcctctgcttccttctcctcttcctcttcttcttcttcctcttcttctttcttctttcctctttttttttattttgagacagagtcttgctctgtcacacaggctggcgtgcagtggcacaatctcagctcactgcaacctccgcctcctgggttcaagcaattctcctctctcagcctcccaagtagctgggattgcaggtgtccgccaccatgcctggctaatttttttgtatttttaatagagacggggtttcatcatgttggccaggctggtttcaaacttctgacctcaaatgatttgcctgcctcagcctcccaaagtgctgggattacaggcctgagccactgtgcctggcctcttctttcttcttcttctcaggatctcactctgtcacccagactggagtgcaatcttggctcactgcaacctctgcttcctgggctccagcgatcctcccacctcagcctctgaagtacctgggaatacagtcagagaaacaagaattatgaagtcctttgtagaaacagattaggcaatgacctatatgttgaaaggatgatgcagactttcaatggagcaccaaagaataaagatgttcaatgtgataaaatcataatggaagataaaggcataatgtccactgcctgggatttgtatgattcttacaatgctatggaacttgtatctttatcagtaaaacaatctgtggttgagtcaagtagtaaagcaaatgtacttcctaaagatcaggaccaaagattgccagggagcactacagaaaaaaatagtgaaactagttctctaatggacatagaaaatgtaattctggcaaaaatccatgaagatgaggaagaccactcagatgcaatattaaaatctgacaaatttcatcaggacttattttttatggaacgggttctgatggaaaatatatttcagcccaaacttgcagcttatcgtcagcttcctgttttaaaagaacctgaacctgaagagcctgaagatgttttagaaagtgcaaaacatgaagaggtagaggaagaatctaagaaggaggaggaagaagaaatacatgcagaagaatcaacaatacccgccaacttggaacgactttggtctttttcctgtgacttaaccaaaggcctcaatgtgagcagccttgcctggaataaaacaaatccagatcttttggctgttggctatgggcactttggatttaaagagcaaaaaagaggactggcttgctgctggtcaataaagaatcccatgtgaatcacctcaaaaacatttgggacctgtatggcaactacagtggatagaacaagatcgaggaacaacaggagatggcaaaagagaaatactagtttctatatcagcagatggaagaatctccaaatgggttatacgaaaaggactagactgttatgatttgatgcgattaaagagaactacagctgccagtaacaaaaaaggaggggaaaaggaaaagaaagatgaagctttgatatctcgacaggctcctggaatgtgttttgcttttcatcccaaggacacaaatatctatttggctggcactgaagaaggtcatattcacaaatgttcttgttcatataatgaacaatacttagatacctacagaggacataagggtccagtgtataaagtgacatggaatccattttgtcatgatgtatttttaagctgttctgcagattggggtgttattatatggcaacaggagaatgtcaagccatctttgagtttttatccagctacttctgttgtttacgacgttgcctggtctccaaaatcatcctatatatttgcagctgcaaatgagaacagggtggagatttgggaccttcatatcagcactttggaccctctgattgtgaatactgctaaccctggaatcaagttcacaaccattctctttgccaaacaaacagattgccttctggtaggagacagtgatggacaggtttctgtgtatgaactgagaaatatgcctactgttttggaaactggccggggagatataatggatactttgcttggatccaagtcaaaccaatcagcataattcatcattcctaatatttttcttgtagttgttttaaaaaaggaattaacatccaatattctgtattacatactgtacaccagattttgatttcagaaaacaatatttgatgtataacttccacttaatttaaatttaataaacttttatttcagagatatttgattagtttacaatctaagagttattcttaagagtttcagtggaattttcttaatttttctaaagatattcctactctcttgatcatattctaagtacatatgagtacatgtacattcttatacaatgtctaaatgggttagaaaattattatacctatagaagcgaaacttggaaattaatagaatcacttaaaccaaaatctttataagacacaattctattgattttaaagcttctgctttccaggctctgttttccagagtttataattacgtagtttttagtagatgaaaataatggattcttgtacctaacattttatcctcttagatctaagagccgaagctatagaactttgttagactatttggcaagcaaaatatatgacagtaaatatcagaattttatggtttgaccagcgcttatcacattcccaattcagtgagaaaaattcatctgggacacaacagggtactcttctctgtttgcccagaatcagctctggattttaagcccagacttcagtggacccagatagaaaatataaagtctctgatctataggccacatcaggatgttattttatgaagagttctagagcaaggttgcggaaatcggggtggagatggggagcagtgactcctccaaatattcattgctaacaggccattctatgcagtttgttttaacaaatcctgggttaaactgaggccacaggacatgatgggctgttctataaagcattctaagtggagaggagacgatagggcatatgaaattcactaaactctctggaaaaaaaatatgtatatattaaaaaccaagactggaatcagtgcaacagtgggaactaccttttacaagtatccattgcttcataaactccatttgtttggaccaatcccttaaacaaaagcaaggcaaattttacatggatttagagcctaggtcaggttattaggattataaattttccactggtatgtcattgtgattatctttgtttttgtctttctgaaagattggattttctataacaccttgtgtaagaaaataaaaaacttgatctaactg

SEQ ID NO: 199988 - DNA, 574 bp, Homo sapiens
  Payload ID: 19450
  Gene Name: WD repeat domain 78
  ENST ID: ENST00000531980
  CDS Start-End: 1-189
aaacattccggagcctcggcccgagccgctaacggaggagcttgggggtacagggacttcagaggcggccaaaaaaaggggtggtgcaccactccccagctggtcgccaccatgccagtctctccggcaggcagtcacaagcagcagaacttcgggttatccacttactggtacagcaaaaccaagtaaactcttgacatcacaagaaggatcacttggatcagaatttatatcttcctatagcctttatcagaatacaataaatcctagtacgttagggcagtttacaaggtcagttttaggaagcagtacagtttctaagtcaagtgtatcagcaagtgaatcaatagcagaagacctggaagaaccatcctataaacgggaaagattgactagtttcacagtcagagaaacaagaattatgaagtcctttgtagaaacagattaggcaatgacctatatgttgaaaggatgatgcagactttcaatggagcaccaaagaataaagatgttcaatgtgataaaatcataatggaagataaaggcataatgtccactgcctgggatttgtatg

SEQ ID NO: 199989 - DNA, 3808 bp, Homo sapiens
  Payload ID: 19451
  Gene Name: WD repeat domain 81
  Uniprot ID: Q562E7
  ENST ID: ENST00000309182
  CDS Start-End: 222-2894
aaagagcaggcgaaagccacggcgtctgcgtttgcaatgcatgctggtccgtgtagttctcagcctgacaccgtcgttcccagaacccagcgcgctctgtgctggcgggcgcagaggcctcccaggaggagagcaaggacctggcaggggctgctgaggaggaggagagcgggctgcccggggccgggcctggctcctgtgcttttggggaggagattcccatggatggggagcctcctgcctcctcgggcctggggctcccagactacacgtctggcgtcagcttccacgaccaggctgacctccctgagacagaggacttccaagccgggctctatgtgactgagtctccccagccccaggaggctgaggctgtgagcctgggccggctgagtgacaagagcagcaccagcgagacctccctgggtgaggagcgggctccagacgaggggggtgcccccgtggacaagagcagccttcgatcaggtgacagcagccaggacttgaagcaaagcgagggctccgaggaggaagaggaggaggaggacagctgcgtggtgctagaggaggaggagggggagcaggaggaggtcaccggggcatctgagctcactctgtctgacacggtgctgtccatggagacggttgtggccggcggcagtgggggagatggagaagaagaggaggaggcactgcctgagcagtcagaaggcaaagaacagaagatcctccttgatacagcctgcaagatggtccgctggctgtctgccaagctcggccccacagtggcctctcgccacgtggcccggaacctgctccgcctgctgacgtcttgttatgttggacccactcggcagcagttcacagtgagcagtggcgagagcccaccgctgagcgccggcaacatctaccagaagaggccggtcctgggcgacatcgtgtcagggcctgtgctcagctgcctcctccacatcgcccgcctgtatggggagcctgtcctcacctaccagtacctgccctacatcagctacctggtggccccagggagtgcctcaggccccagccgactgaacagccgtaaggaggcggggctgctggccgcggtgacgctgactcagaagatcatcgtgtacctctcagacaccacactcatggacatcctgccccggatcagccatgaggtcctgctgcccgtgctcagcttcctcacctccctcgtcacggggttcccaagtggggcccaggctcggaccatcctgtgtgtgaaaaccatcagcctcatcgccctcatctgcctgcgcattggacaggagatggtccagcagcacctgagcgagcccgtggccacctttttccaggtcttctctcagctgcatgagcttcggcaacaggatctgaagctggaccctgcgggccgtggtgagggccagctgccacaggtggtcttctctgatgggcagcagcggcccgtggaccccgccctgctggacgagctgcagaaggtgttcaccctggagatggcatacacaatctacgtgcccttctcctgcctgttgggtgacatcatccggaaaatcatccccaaccacgagctggttggggagctggcggcgctgtacttggagagcatcagccccagcagtcgcaaccctgccagcgtggagcccaccatgcccggcaccgggcccgagtgggacccccatggtgggggctgccctcaggatgacggccactcagggacctttgggagcgtcctggtggggaaccgcattcagatccccaatgactctcggcctgagaaccccggaccactgggccccatctcgggggtgggtggcgggggcctgggcagcgggagcgacgacaacgccctgaagcaggagctgccgcggagcgtgcacgggctgagcggaaactggctggcgtactggcagtacgagatcggcgtgagccagcaggatgcccactttcacttccaccagatccgcctgcagagcttcccgggccactcgggggccgtcaagtgcgtggcacccctaagcagcgaggacttcttcctgagcggcagcaaggatcgtaccgtgcgcctctggccgctgtacaactacggcgacgggaccagcgagacggccccacgcctcgtctacacccagcaccgcaagagcgtcttcttcgtgggccagcttgaggccccgcagcacgtggtgagctgtgacggggctgtgcacgtctgggaccccttcacagggaagacccttcgcacagtggagccgctggacagccgggtgcccctgactgcggtggctgtcatgcccgccccccacaccagcatcaccatggccagctctgactctaccctgcgctttgtggactgcaggaagcctggtctgcagcacgagttccgactgggcggtgggctgaaccctgggcttgtccgtgccctggccatcagccccagtggccgtagtgtcgtggccggcttctcctcaggcttcatggtgctcctggacacccgcacaggcctggttctgcgaggctggccagcccacgagggggacattctgcagatcaaggcggtggagggcagcgtcctggtcagctcctcctctgaccattccttgaccgtctggaaggagctggagcagaagcccacccatcactacaagtcagcatccgaccccatccacacctttgacctgtacggcagcgaggtggtcactggcaccgtgtccaacaagattggcgtctgctccctgcttgagccaccctcgcaggccaccacgaagctcagctctgagaacttccgcggcacgctcaccagcctggccttgctgcccactaaacgccacctcctgctgggctcagacaacggggttatccgcctcctggcatagactgaggcaggagctggccgggcaagggtgggaagacatctgcgggcgcgtgtccactcaccctgttccctgagcagcagctccctccagggaggccctgggtcccacgccctgggtgcccacatggcctgccaactagggcctgcaaatggagtgggggagtcctggcccctgaatcaccagagccaccaagcctgccagaggggtctcattcatggcttggggacacagggctcctagcaagcaggaagttaagagcaggaggaagcgttgctaccttcacttctccccagctctgccctctgggtccacatgaggacagggaagctcgggaaggggaagggagactggccctgcccagccggtctctagcccctcagcccccgctgggcactctctgtcccatccctctaggacagggaagctggcctggtccagggcactgatggtgcttggattccagcctaaggaaggctggccgtggtccaggagttaagggcttgggtctggggtttaagtggccacccatccaggccctggccagtgtgggaccgggacgggaaggaagaaggaggctaggagcagggggaaaaggtgcacttggccagtggcgcctgccaggagtgagtccatgcgttgtctgcccacccctaccacagtgtttgtgccttcagctgagggggcagcctctgggccctgaacccctgctggggctccacgaccctgagagaaggggtgagaagaatcatctctgcacctcgggtctctgccagaggaagacttaagcatccctgcgacctcacattctagacagagatgaggtccaggggttggcccctgctgccttctcacaatttgcaatagatgtaaataggaccaataaatcctttggaagagccatggggtgaactgag

SEQ ID NO: 199990 - DNA, 6733 bp, Homo sapiens
  Payload ID: 19451
  Gene Name: WD repeat domain 81
  Uniprot ID: Q562E7
  ENST ID: ENST00000409644
  CDS Start-End: 1-5826
atggcccagggcagcggggggcgggaaggcgctctcagaaccccggccgggggctggcattccccgccaagcccagacatgcaggagctgctccggagcgtggagagggacctgagcatcgatcccaggcagctggctccggccccggggggcacccacgtggtggccctagtgcctgcgcgctggctggccagcctccgcgatcgccggctgcccctgggaccctgtccccgcgcagagggcctgggagaagcggaagtcaggactctcctgcagcgctctgtgcaaaggctgcctgccggctggacgcgcgtggaggtgcatgggctgcggaagcggagactgtcctaccctctgggcgggggcctgccctttgaggacgggtcctgcggccctgagaccctcactcgcttcatgcaggaggttgccgcccagaattatcgcaacctgtggcgccatgcataccacacttacggccagccgtacagtcacagccctgccccctcagctgtccctgccttggactcagtacggcaggctctgcagagggtctatggttgctccttcctgccagtgggtgaaactacccaatgcccttcatatgccagagaaggcccctgcccccctcggggcagccctgcttgccctagtcttttacgggctgaggccttgctggagtcgccggagatgctgtatgtggtacacccttacgtacagttctccctacatgacgtggtcaccttcagccctgccaagctgaccaacagccaggccaaggtgctgttcattctcttccgcgtgctgagggctatggacgcctgtcaccgccaggggctggcgtgtggggccctgtctttgtatcacatcgcagtggatgagaagctttgcagcgagctgcgactggacctgagtgcttatgagaggcccgaggaggacgagaatgaggaggcccctgtggcaagggatgaggcgggcattgtgtctcaagaggagcagggagggcaacctgggcaacccactggccaggaggaacttcggagcctcgtgctagattgggtccacggccgcatcagcaacttccactacctcatgcagctgaatcggttggcaggtcggcggcagggggaccccaactaccaccccgtgctgccctgggtggtggacttcactacgccccatgggcgcttccgagacctgcgcaagtccaagttccgcctcaacaagggggataagcaactggacttcacgtatgagatgacacggcaggcattcgtagcaggcggggcgggcggcggggaaccccctcatgttccccaccacatctcagacgtgctctccgacatcacgtactatgtgtacaaggctcggcgcacgcctcggtcggtgctctgcggacacgtccgcgcgcagtgggagccccatgagtatccggccagcatggagcggatgcagaactggaccccggatgagtgcattccggagttctacaccgatccctctatcttccgctccatccaccccgacatgcctgacctggatgtgccagcctggtgcagctccagccaggagttcgtagctgcccaccgagccctgctggagagccgcgaggtatcccgggacctgcaccattggatcgacctcacgtttggctataaactccagggtaaggaggctgtcaaggaaaagaatgtgtgtctgcacctggtggacgcccacactcacctggccagctacggggtggtgcagctcttcgatcagccacacccccagcgcctggctggggctcctgcccttgcccccgagcctcccctcatccccaagctgttggtccagaccatccaggagaccacaggccgggaggacttcacggaaaacccgggacagcttccaaatggagtgggccggccagttttagaggccactccctgtgaggctagctggaccagagacaggccggtggcaggagaagacgacttggaacaggccacagaagctctggattccatttcccttgctgggaaagcaggtgaccagctgggctcctccagtcaagcgtcccctggacttctctctttctcagtggcctcagcctcccgtccaggccgcaggaataaagctgctggggcagaccctggggagggtgaggaggggaggattcttcttcccgagggcttcaatcccatgcaggccctggaggagctggagaaaacgggcaacttcttggccaaaggcctagggggcctgttggaggtgcctgagcagccccgggtccagccggctgtgccactgcagtgcctactccacagggacatgcaggcgctgggtgtcctattggcagagatggtgtttgccaccagggtgcggacgctgcagcccgatgcacctttgtgggtacgcttccaggctgtccgagggctctgcacgcgccaccccaaggaggtccctgtgtctttgcagcccgtgctggacacactcctgcagatgagtggccccgaagtccccatgggagcagagaggggcaagctggaccaactgtttgagtacaggcctgtctcccagggcctgcccccaccctgcccaagccagcttctcagccccttcagctccgtggttcccttcccaccctacttcccggcactgcacagattcatcctcctgtaccaggcaaggcgtgtggaggacgaggcccaggggcgcgagctggtgtttgctctgtggcagcagctgggcgcggtgctgaaggacatcacccctgagggcctggagatcctgctgcccttcgtgctctcactcatgtccgaggagcacacagctgtgtacacggcctggtatctgtttgagcctgttgccaaggcactgggccccaaaaatgccaataagtacctcctgaagccgctcattggtgcctacgagagcccctgccagctacacggccgcttctacctgtacacggactgctttgtggcccagctgatggtgcggctgggcctgcaggcatttctcactcacctgctgccccatgtcctgcaggtgctggcgggcgcagaggcctcccaggaggagagcaaggacctggcaggggctgctgaggaggaggagagcgggctgcccggggccgggcctggctcctgtgcttttggggaggagattcccatggatggggagcctcctgcctcctcgggcctggggctcccagactacacgtctggcgtcagcttccacgaccaggctgacctccctgagacagaggacttccaagccgggctctatgtgactgagtctccccagccccaggaggctgaggctgtgagcctgggccggctgagtgacaagagcagcaccagcgagacctccctgggtgaggagcgggctccagacgaggggggtgcccccgtggacaagagcagccttcgatcaggtgacagcagccaggacttgaagcaaagcgagggctccgaggaggaagaggaggaggaggacagctgcgtggtgctagaggaggaggagggggagcaggaggaggtcaccggggcatctgagctcactctgtctgacacggtgctgtccatggagacggttgtggccggcggcagtgggggagatggagaagaagaggaggaggcactgcctgagcagtcagaaggcaaagaacagaagatcctccttgatacagcctgcaagatggtccgctggctgtctgccaagctcggccccacagtggcctctcgccacgtggcccggaacctgctccgcctgctgacgtcttgttatgttggacccactcggcagcagttcacagtgagcagtggcgagagcccaccgctgagcgccggcaacatctaccagaagaggccggtcctgggcgacatcgtgtcagggcctgtgctcagctgcctcctccacatcgcccgcctgtatggggagcctgtcctcacctaccagtacctgccctacatcagctacctggtggccccagggagtgcctcaggccccagccgactgaacagccgtaaggaggcggggctgctggccgcggtgacgctgactcagaagatcatcgtgtacctctcagacaccacactcatggacatcctgccccggatcagccatgaggtcctgctgcccgtgctcagcttcctcacctccctcgtcacggggttcccaagtggggcccaggctcggaccatcctgtgtgtgaaaaccatcagcctcatcgccctcatctgcctgcgcattggacaggagatggtccagcagcacctgagcgagcccgtggccacctttttccaggtcttctctcagctgcatgagcttcggcaacaggatctgaagctggaccctgcgggccgtggtgagggccagctgccacaggtggtcttctctgatgggcagcagcggcccgtggaccccgccctgctggacgagctgcagaaggtgttcaccctggagatggcatacacaatctacgtgcccttctcctgcctgttgggtgacatcatccggaaaatcatccccaaccacgagctggttggggagctggcggcgctgtacttggagagcatcagccccagcagtcgcaaccctgccagcgtggagcccaccatgcccggcaccgggcccgagtgggacccccatggtgggggctgccctcaggatgacggccactcagggacctttgggagcgtcctggtggggaaccgcattcagatccccaatgactctcggcctgagaaccccggaccactgggccccatctcgggggtgggtggcgggggcctgggcagcgggagcgacgacaacgccctgaagcaggagctgccgcggagcgtgcacgggctgagcggaaactggctggcgtactggcagtacgagatcggcgtgagccagcaggatgcccactttcacttccaccagatccgcctgcagagcttcccgggccactcgggggccgtcaagtgcgtggcacccctaagcagcgaggacttcttcctgagcggcagcaaggatcgtaccgtgcgcctctggccgctgtacaactacggcgacgggaccagcgagacggccccacgcctcgtctacacccagcaccgcaagagcgtcttcttcgtgggccagcttgaggccccgcagcacgtggtgagctgtgacggggctgtgcacgtctgggaccccttcacagggaagacccttcgcacagtggagccgctggacagccgggtgcccctgactgcggtggctgtcatgcccgccccccacaccagcatcaccatggccagctctgactctaccctgcgctttgtggactgcaggaagcctggtctgcagcacgagttccgactgggcggtgggctgaaccctgggcttgtccgtgccctggccatcagccccagtggccgtagtgtcgtggccggcttctcctcaggcttcatggtgctcctggacacccgcacaggcctggttctgcgaggctggccagcccacgagggggacattctgcagatcaaggcggtggagggcagcgtcctggtcagctcctcctctgaccattccttgaccgtctggaaggagctggagcagaagcccacccatcactacaagtcagcatccgaccccatccacacctttgacctgtacggcagcgaggtggtcactggcaccgtgtccaacaagattggcgtctgctccctgcttgagccaccctcgcaggccaccacgaagctcagctctgagaacttccgcggcacgctcaccagcctggccttgctgcccactaaacgccacctcctgctgggctcagacaacggggttatccgcctcctggcatagactgaggcaggagctggccgggcaagggtgggaagacatctgcgggcgcgtgtccactcaccctgttccctgagcagcagctccctccagggaggccctgggtcccacgccctgggtgcccacatggcctgccaactagggcctgcaaatggagtgggggagtcctggcccctgaatcaccagagccaccaagcctgccagaggggtctcattcatggcttggggacacagggctcctagcaagcaggaagttaagagcaggaggaagcgttgctaccttcacttctccccagctctgccctctgggtccacatgaggacagggaagctcgggaaggggaagggagactggccctgcccagccggtctctagcccctcagcccccgctgggcactctctgtcccatccctctaggacagggaagctggcctggtccagggcactgatggtgcttggattccagcctaaggaaggctggccgtggtccaggagttaagggcttgggtctggggtttaagtggccacccatccaggccctggccagtgtgggaccgggacgggaaggaagaaggaggctaggagcagggggaaaaggtgcacttggccagtggcgcctgccaggagtgagtccatgcgttgtctgcccacccctaccacagtgtttgtgccttcagctgagggggcagcctctgggccctgaacccctgctggggctccacgaccctgagagaaggggtgagaagaatcatctctgcacctcgggtctctgccagaggaagacttaagcatccctgcgacctcacattctagacagagatgaggtccaggggttggcccctgctgccttctcacaatttgcaatagatgtaaataggaccaataaatcctttggaagagccatggggtg

SEQ ID NO: 199991 - DNA, 3184 bp, Homo sapiens
  Payload ID: 19451
  Gene Name: WD repeat domain 81
  Uniprot ID: Q562E7
  ENST ID: ENST00000437219
  CDS Start-End: 54-2270
aaacgagagtcctaaagagcaggcgaaagccacggcgtctgcgtttgcaatgcatgctggtccgtgtagttctcagcctgacaccgtcgttcccagaacccagcgcgctctatacagcctgcaagatggtccgctggctgtctgccaagctcggccccacagtggcctctcgccacgtggcccggaacctgctccgcctgctgacgtcttgttatgttggacccactcggcagcagttcacagtgagcagtggcgagagcccaccgctgagcgccggcaacatctaccagaagaggccggtcctgggcgacatcgtgtcagggcctgtgctcagctgcctcctccacatcgcccgcctgtatggggagcctgtcctcacctaccagtacctgccctacatcagctacctggtggccccagggagtgcctcaggccccagccgactgaacagccgtaaggaggcggggctgctggccgcggtgacgctgactcagaagatcatcgtgtacctctcagacaccacactcatggacatcctgccccggatcagccatgaggtcctgctgcccgtgctcagcttcctcacctccctcgtcacggggttcccaagtggggcccaggctcggaccatcctgtgtgtgaaaaccatcagcctcatcgccctcatctgcctgcgcattggacaggagatggtccagcagcacctgagcgagcccgtggccacctttttccaggtcttctctcagctgcatgagcttcggcaacaggatctgaagctggaccctgcgggccgtggtgagggccagctgccacaggtggtcttctctgatgggcagcagcggcccgtggaccccgccctgctggacgagctgcagaaggtgttcaccctggagatggcatacacaatctacgtgcccttctcctgcctgttgggtgacatcatccggaaaatcatccccaaccacgagctggttggggagctggcggcgctgtacttggagagcatcagccccagcagtcgcaaccctgccagcgtggagcccaccatgcccggcaccgggcccgagtgggacccccatggtgggggctgccctcaggatgacggccactcagggacctttgggagcgtcctggtggggaaccgcattcagatccccaatgactctcggcctgagaaccccggaccactgggccccatctcgggggtgggtggcgggggcctgggcagcgggagcgacgacaacgccctgaagcaggagctgccgcggagcgtgcacgggctgagcggaaactggctggcgtactggcagtacgagatcggcgtgagccagcaggatgcccactttcacttccaccagatccgcctgcagagcttcccgggccactcgggggccgtcaagtgcgtggcacccctaagcagcgaggacttcttcctgagcggcagcaaggatcgtaccgtgcgcctctggccgctgtacaactacggcgacgggaccagcgagacggccccacgcctcgtctacacccagcaccgcaagagcgtcttcttcgtgggccagcttgaggccccgcagcacgtggtgagctgtgacggggctgtgcacgtctgggaccccttcacagggaagacccttcgcacagtggagccgctggacagccgggtgcccctgactgcggtggctgtcatgcccgccccccacaccagcatcaccatggccagctctgactctaccctgcgctttgtggactgcaggaagcctggtctgcagcacgagttccgactgggcggtgggctgaaccctgggcttgtccgtgccctggccatcagccccagtggccgtagtgtcgtggccggcttctcctcaggcttcatggtgctcctggacacccgcacaggcctggttctgcgaggctggccagcccacgagggggacattctgcagatcaaggcggtggagggcagcgtcctggtcagctcctcctctgaccattccttgaccgtctggaaggagctggagcagaagcccacccatcactacaagtcagcatccgaccccatccacacctttgacctgtacggcagcgaggtggtcactggcaccgtgtccaacaagattggcgtctgctccctgcttgagccaccctcgcaggccaccacgaagctcagctctgagaacttccgcggcacgctcaccagcctggccttgctgcccactaaacgccacctcctgctgggctcagacaacggggttatccgcctcctggcatagactgaggcaggagctggccgggcaagggtgggaagacatctgcgggcgcgtgtccactcaccctgttccctgagcagcagctccctccagggaggccctgggtcccacgccctgggtgcccacatggcctgccaactagggcctgcaaatggagtgggggagtcctggcccctgaatcaccagagccaccaagcctgccagaggggtctcattcatggcttggggacacagggctcctagcaagcaggaagttaagagcaggaggaagcgttgctaccttcacttctccccagctctgccctctgggtccacatgaggacagggaagctcgggaaggggaagggagactggccctgcccagccggtctctagcccctcagcccccgctgggcactctctgtcccatccctctaggacagggaagctggcctggtccagggcactgatggtgcttggattccagcctaaggaaggctggccgtggtccaggagttaagggcttgggtctggggtttaagtggccacccatccaggccctggccagtgtgggaccgggacgggaaggaagaaggaggctaggagcagggggaaaaggtgcacttggccagtggcgcctgccaggagtgagtccatgcgttgtctgcccacccctaccacagtgtttgtgccttcagctgagggggcagcctctgggccctgaacccctgctggggctccacgaccctgagagaaggggtgagaagaatcatctctgcacctcgggtctctgccagaggaagacttaagcatccctgcgacctcacattctagacagagatgaggtccaggggttggcccctgctgccttctcacaatttgcaatagatgtaaataggaccaataaatcctttggaagagccatggggtgaactgag

SEQ ID NO: 199992 - DNA, 582 bp, Homo sapiens
  Payload ID: 19451
  Gene Name: WD repeat domain 81
  ENST ID: ENST00000418841
  CDS Start-End: 186-582
acgtgacccgcgtcagctgacccgtcacggtggagcccggtgctcgcgcccggcagcctctgccccgccgcgcccggagcgcaggacccgcggaggggttcccaagtggggcccaggctcggaccatcctgtgtgtgaaaaccatcagcctcatcgccctcatctgcctgcgcattggacaggagatggtccagcagcacctgagcgagcccgtggccacctttttccaggtcttctctcagctgcatgagcttcggcaacaggatctgaagctggaccctgcgggccgtggtgagggccagctgccacaggtggtcttctctgatgggcagcagcggcccgtggaccccgccctgctggacgagctgcagaaggtgttcaccctggagatggcatacacaatctacgtgcccttctcctgcctgttgggtgacatcatccggaaaatcatccccaaccacgagctggttggggagctggcggcgctgtacttggagagcatcagccccagcagtcgcaaccctgccagcgtggagcccaccatgcccggcaccgggcccgagtgggacccccatggtgggg

SEQ ID NO: 199993 - DNA, 570 bp, Homo sapiens
  Payload ID: 19451
  Gene Name: WD repeat domain 81
  ENST ID: ENST00000455636
  CDS Start-End: 54-570
aaacgagagtcctaaagagcaggcgaaagccacggcgtctgcgtttgcaatgcatgctggtccgtgtagttctcagcctgacaccgtcgttcccagaacccagcgcgctctatacagcctgcaagatggtccgctggctgtctgccaagctcggccccacagtggcctctcgccacgtggcccggaacctgctccgcctgctgacgtcttgttatgttggacccactcggcagcagttcacagtgagcagtggcgagagcccaccgctgagcgccggcaacatctaccagaagaggccggtcctgggcgacatcgtgtcagggcctgtgctcagctgcctcctccacatcgcccgcctgtatggggagcctgtcctcacctaccagtacctgccctacatcagctacctggtggccccagggagtgcctcaggccccagccgactgaacagccgtaaggaggcggggctgctggccgcggtgacgctgactcagaagatcatcgtgtacctctcagacaccacactcatggacatcctgccccggatcagccatgaggtcctgctgcccg

SEQ ID NO: 199994 - DNA, 2968 bp, Homo sapiens
  Payload ID: 19451
  Gene Name: WD repeat domain 81
  ENST ID: ENST00000446363
  CDS Start-End: 423-2165
tgacaccgtcgttcccagaacccagcgcgctctgtgagttggcatttttaaactgagctcggaatccagcccggggaagtccttaaagggcgacagcccctccttgttggagtcgacccactcggcagcagttcacagtgagcagtggcgagagcccaccgctgagcgccggcaacatctaccagaagaggccggtcctgggcgacatcgtgtcagggcctgtgctcagctgcctcctccacatcgcccgcctgtatggggagcctgtcctcacctaccagtacctgccctacatcagctacctggtggccccagggagtgcctcaggccccagccgactgaacagccgtaaggaggcggggctgctggccgcggtgacgctgactcagaagatcatcgtgtacctctcagacaccacactcatggacatcctgccccggatcagccatgaggtcctgctgcccgtgctcagcttcctcacctccctcgtcacggggttcccaagtggggcccaggctcggaccatcctgtgtgtgaaaaccatcagcctcatcgccctcatctgcctgcgcattggacaggagatggtccagcagcacctgagcgagcccgtggccacctttttccaggtcttctctcagctgcatgagcttcggcaacaggatctgaagctggaccctgcgggccgtggtgagggccagctgccacaggtggtcttctctgatgggcagcagcggcccgtggaccccgccctgctggacgagctgcagaaggtgttcaccctggagatggcatacacaatctacgtgcccttctcctgcctgttgggtgacatcatccggaaaatcatccccaaccacgagctggttggggagctggcggcgctgtacttggagagcatcagccccagcagtcgcaaccctgccagcgtggagcccaccatgcccggcaccgggcccgagtgggacccccatggtgggggctgccctcaggatgacggccactcagggacctttgggagcgtcctggtggggaaccgcattcagatccccaatgactctcggcctgagaaccccggaccactgggccccatctcgggggtgggtggcgggggcctgggcagcgggagcgacgacaacgccctgaagcaggagctgccgcggagcgtgcacgggctgagcggaaactggctggcgtactggcagtacgagatcggcgtgagccagcaggatgcccactttcacttccaccagatccgcctgcagagcttcccgggccactcgggggccgtcaagtgcgtggcacccctaagcagcgaggacttcttcctgagcggcagcaaggatcgtaccgtgcgcctctggccgctgtacaactacggcgacgggaccagcgagacggccccacgcctcgtctacacccagcaccgcaagagcgtcttcttcgtgggccagcttgaggccccgcagcacgtggtgagctgtgacggggctgtgcacgtctgggaccccttcacagggaagacccttcgcacagtggagccgctggacagccgggtgcccctgactgcggtggctgtcatgcccgccccccacaccagcatcaccatggccagctctgactctaccctgcgctttgtggactgcaggaagcctggtctgcagcacgagttccgactgggcggtgggctgaaccctgggcttgtccgtgccctggccatcagccccagtggccgtagtgtcgtggccggcttctcctcaggcttcatggtgctcctggacacccgcacaggcctggttctgcgaggctggccagcccacgagggggacattctgcagatcaaggcggtggagggcagcgtcctggtcagctcctcctctgaccattccttgaccgtctggaaggagctggagcagaagcccacccatcactacaagtcagcatccgaccccatccacacctttgacctgtacggcagcgaggtggtcactggcaccgtgtccaacaagattggcgtctgctccctgcttgagccaccctcgcaggccaccacgaagctcagctctgagaacttccgcggcacgctcaccagcctggccttgctgcccactaaacgccacctcctgctgggctcagacaacggggttatccgcctcctggcatagactgaggcaggagctggccgggcaagggtgggaagacatctgcgggcgcgtgtccactcaccctgttccctgagcagcagctccctccagggaggccctgggtcccacgccctgggtgcccacatggcctgccaactagggcctgcaaatggagtgggggagtcctggcccctgaatcaccagagccaccaagcctgccagaggggtctcattcatggcttggggacacagggctcctagcaagcaggaagttaagagcaggaggaagcgttgctaccttcacttctccccagctctgccctctgggtccacatgaggacagggaagctcgggaaggggaagggagactggccctgcccagccggtctctagcccctcagcccccgctgggcactctctgtcccatccctctaggacagggaagctggcctggtccagggcactgatggtgcttggattccagcctaaggaaggctggccgtggtccaggagttaagggcttgggtctggggtttaagtggccacccatccaggccctggccagtgtgggaccgggacgggaaggaagaaggaggctaggagcagggggaaaaggtgcacttggccagtggcgcctgccaggagtgagtccatgcgttgtctgcccacccctaccacagtgtttgtgccttcagctgagggggcagcctctgggccctgaacccctgctggggctccacgaccctgagagaaggggtgagaagaatcatctctgcacctcgggtctctgccagaggaagacttaagcatccctgcgacctcac

SEQ ID NO: 199995 - DNA, 3315 bp, Homo sapiens
  Payload ID: 19451
  Gene Name: WD repeat domain 81
  Uniprot ID: Q562E7
  ENST ID: ENST00000419248
  CDS Start-End: 262-2406
tggagaccctttcagccccgggaggaagcggagcccagaccgagccagagcggagcagcgggagggagggcggggaggccgccgggcaggaagcggggtcccgcccgggcctctggagccacgtgcgcttgtttccgtgctggggcgatcacgtgacccgcgtcagctgacccgtcacggtggagcccggtgctcgcgcccggcagcctctgccccgccgcgcccggagcgcaggacccgcggagggatacagcctgcaagatggtccgctggctgtctgccaagctcggccccacagtggcctctcgccacgtggcccggaacctgctccgcctgctgacgtcttgttatgttggacccactcggcagcagttcacagtgagcagtggcgagagcccaccgctgagcgccggcaacatctaccagaagaggccggtcctgggcgacatcgtgtcagggcctgtgctcagctgcctcctccacatcgcccgcctgtatggggagcctgtcctcacctaccagtacctgccctacatcagctacctggtggccccagggagtgcctcaggccccagccgactgaacagccgtaaggaggcggggctgctggccgcggtgacgctgactcagaagatcatcgtgtacctctcagacaccacactcatggacatcctgccccggatcagccatgaggtcctgctgcccgtgctcagcttcctcacctccctcgtcacggggttcccaagtggggcccaggctcggaccatcctgtgtgtgaaaaccatcagcctcatcgccctcatctgcctgcgcattggacaggagatggtccagcagcacctgagcgagcccgtggccacctttttccaggtcttctctcagctgcatgagcttcggcaacaggatctgaagctggaccctgcgggccgtggtgagggccagctgccacaggtggtcttctctgatgggcagcagcggcccgtggaccccgccctgctggacgagctgcagaaggtgttcaccctggagatggcatacacaatctacgtgcccttctcctgcctgttgggtgacatcatccggaaaatcatccccaaccacgagctggttggggagctggcggcgctgtacttggagagcatcagccccagcagtcgcaaccctgccagcgtggagcccaccatgcccggcaccgggcccgagtgggacccccatggtgggggctgccctcaggatgacggccactcagggacctttgggagcgtcctggtggggaaccgcattcagatccccaatgactctcggcctgagaaccccggaccactgggccccatctcgggggtgggtggcgggggcctgggcagcgggagcgacgacaacgccctgaagcaggagctgccgcggagcgtgcacgggctgagcggaaactggctggcgtactggcagtacgagatcggcgtgagccagcaggatgcccactttcacttccaccagatccgcctgcagagcttcccgggccactcgggggccgtcaagtgcgtggcacccctaagcagcgaggacttcttcctgagcggcagcaaggatcgtaccgtgcgcctctggccgctgtacaactacggcgacgggaccagcgagacggccccacgcctcgtctacacccagcaccgcaagagcgtcttcttcgtgggccagcttgaggccccgcagcacgtggtgagctgtgacggggctgtgcacgtctgggaccccttcacagggaagacccttcgcacagtggagccgctggacagccgggtgcccctgactgcggtggctgtcatgcccgccccccacaccagcatcaccatggccagctctgactctaccctgcgctttgtggactgcaggaagcctggtctgcagcacgagttccgactgggcggtgggctgaaccctgggcttgtccgtgccctggccatcagccccagtggccgtagtgtcgtggccggcttctcctcaggcttcatggtgctcctggacacccgcacaggcctggttctgcgaggctggccagcccacgagggggacattctgcagatcaaggcggtggagggcagcgtcctggtcagctcctcctctgaccattccttgaccgtctggaaggagctggagcagaagcccacccatcactacaagtcagcatccgaccccatccacacctttgacctgtacggcagcgaggtggtcactggcaccgtgtccaacaagattggcgtctgctccctgcttgagccaccctcgcaggccaccacgaagctcagctctgagaacttccgcggcacgctcaccagcctggccttgctgcccactaaacgccacctcctgctgggctcagacaacggggttatccgcctcctggcatagactgaggcaggagctggccgggcaagggtgggaagacatctgcgggcgcgtgtccactcaccctgttccctgagcagcagctccctccagggaggccctgggtcccacgccctgggtgcccacatggcctgccaactagggcctgcaaatggagtgggggagtcctggcccctgaatcaccagagccaccaagcctgccagaggggtctcattcatggcttggggacacagggctcctagcaagcaggaagttaagagcaggaggaagcgttgctaccttcacttctccccagctctgccctctgggtccacatgaggacagggaagctcgggaaggggaagggagactggccctgcccagccggtctctagcccctcagcccccgctgggcactctctgtcccatccctctaggacagggaagctggcctggtccagggcactgatggtgcttggattccagcctaaggaaggctggccgtggtccaggagttaagggcttgggtctggggtttaagtggccacccatccaggccctggccagtgtgggaccgggacgggaaggaagaaggaggctaggagcagggggaaaaggtgcacttggccagtggcgcctgccaggagtgagtccatgcgttgtctgcccacccctaccacagtgtttgtgccttcagctgagggggcagcctctgggccctgaacccctgctggggctccacgaccctgagagaaggggtgagaagaatcatctctgcacctcgggtctctgccagaggaagacttaagcatccctgcgacctcacattctagacagagatgaggtccaggggttggcccctgctgccttctcacaatttgcaatagatgtaaataggaccaataaatcctttggaagagccatggggtgaa

SEQ ID NO: 199996 - DNA, 590 bp, Homo sapiens
  Payload ID: 19451
  Gene Name: WD repeat domain 81
  ENST ID: ENST00000575206
  CDS Start-End: 1-590
acttccaagccgggctctatgtgactgagtctccccagccccaggaggctgaggctgtgagcctgggccggctgagtgacaagagcagcaccagcgagacctccctgggtgaggagcgggctccagacgaggggggtgcccccgtggacaagagcagccttcgatcaggtgacagcagccaggacttgaagcaaagcgagggctccgaggaggaagaggaggaggaggacagctgcgtggtgctagaggaggaggagggggagcaggaggaggtcaccggggcatctgagctcactctgtctgacacggtgctgtccatggagacggttgtggccggcggcagtgggggagatggagaagaagaggaggaggcactgcctgagcagtcagaaggcaaagaacagaagatcctccttggacccactcggcagcagttcacagtgagcagtggcgagagcccaccgctgagcgccggcaacatctaccagaagaggccggtcctgggcgacatcgtgtcagggcctgtgctcagctgcctcctccacatcgcccgcctgtatggggagcctgtcctcacctaccagtacctg

SEQ ID NO: 199997 - DNA, 562 bp, Homo sapiens
  Payload ID: 19451
  Gene Name: WD repeat domain 81
  ENST ID: ENST00000468539
  CDS Start-End: 50-562
aaacgagagtcctaaagagcaggcgaaagccacggcgtctgcgtttgcaatgcatgctggtccgtgtagttctcagcctgacaccgtcgttcccagaacccagcgcgctctgttcccaagtggggcccaggctcggaccatcctgtgtgtgaaaaccatcagcctcatcgccctcatctgcctgcgcattggacaggagatggtccagcagcacctgagcgagcccgtggccacctttttccaggtcttctctcagctgcatgagcttcggcaacaggatctgaagctggaccctgcgggccgtggtgagggccagctgccacaggtggtcttctctgatgggcagcagcggcccgtggaccccgccctgctggacgagctgcagaaggtgttcaccctggagatggcatacacaatctacgtgcccttctcctgcctgttgggtgacatcatccggaaaatcatccccaaccacgagctggttggggagctggcggcgctgtacttggagagcatcagccccagcagtcgcaaccctgccagcgtggagcccaccatgccc

SEQ ID NO: 199998 - DNA, 561 bp, Homo sapiens
  Payload ID: 19451
  Gene Name: WD repeat domain 81
  ENST ID: ENST00000474958
  CDS Start-End: 1-371
tccgcctgctgacgtcttgttatgttggacccactcggcagcagttcacagtgagcagtggcgagagcccaccgctgagcgccggcaacatctaccagaagaggccggtcctgggcgacatcgtgtcagggcctgtgctcagctgcctcctccacatcgcccgcctgtatggggagcctgtcctcacctaccagtacctgccctacatcagctacctggttcccaagtggggcccaggctcggaccatcctgtgtgtgaaaaccatcagcctcatcgccctcatctgcctgcgcattggacaggagatggtccagcagcacctgagcgagcccgtggccacctttttccaggtcttctctcagctgcatgagcttcggcaacaggatctgaagctggaccctgcgggccgtggtgagggccagctgccacaggtggtcttctctgatgggcagcagcggcccgtggaccccgccctgctggacgagctgcagaaggtgttcaccctggagatggcatacacaatctacgtgcccttctcctgcctgttgggtgacatcatc

SEQ ID NO: 199999 - DNA, 3184 bp, Homo sapiens
  Payload ID: 19451
  Gene Name: WD repeat domain 81
  Uniprot ID: Q562E7
  ENST ID: ENST00000613616
  CDS Start-End: 54-2270
aaacgagagtcctaaagagcaggcgaaagccacggcgtctgcgtttgcaatgcatgctggtccgtgtagttctcagcctgacaccgtcgttcccagaacccagcgcgctctatacagcctgcaagatggtccgctggctgtctgccaagctcggccccacagtggcctctcgccacgtggcccggaacctgctccgcctgctgacgtcttgttatgttggacccactcggcagcagttcacagtgagcagtggcgagagcccaccgctgagcgccggcaacatctaccagaagaggccggtcctgggcgacatcgtgtcagggcctgtgctcagctgcctcctccacatcgcccgcctgtatggggagcctgtcctcacctaccagtacctgccctacatcagctacctggtggccccagggagtgcctcaggccccagccgactgaacagccgtaaggaggcggggctgctggccgcggtgacgctgactcagaagatcatcgtgtacctctcagacaccacactcatggacatcctgccccggatcagccatgaggtcctgctgcccgtgctcagcttcctcacctccctcgtcacggggttcccaagtggggcccaggctcggaccatcctgtgtgtgaaaaccatcagcctcatcgccctcatctgcctgcgcattggacaggagatggtccagcagcacctgagcgagcccgtggccacctttttccaggtcttctctcagctgcatgagcttcggcaacaggatctgaagctggaccctgcgggccgtggtgagggccagctgccacaggtggtcttctctgatgggcagcagcggcccgtggaccccgccctgctggacgagctgcagaaggtgttcaccctggagatggcatacacaatctacgtgcccttctcctgcctgttgggtgacatcatccggaaaatcatccccaaccacgagctggttggggagctggcggcgctgtacttggagagcatcagccccagcagtcgcaaccctgccagcgtggagcccaccatgcccggcaccgggcccgagtgggacccccatggtgggggctgccctcaggatgacggccactcagggacctttgggagcgtcctggtggggaaccgcattcagatccccaatgactctcggcctgagaaccccggaccactgggccccatctcgggggtgggtggcgggggcctgggcagcgggagcgacgacaacgccctgaagcaggagctgccgcggagcgtgcacgggctgagcggaaactggctggcgtactggcagtacgagatcggcgtgagccagcaggatgcccactttcacttccaccagatccgcctgcagagcttcccgggccactcgggggccgtcaagtgcgtggcacccctgagcagcgaggacttcttcctgagcggcagcaaggatcgtaccgtgcgcctctggccgctgtacaactacggcgacgggaccagcgagacggccccacgcctcgtctacacccagcaccgcaagagcgtcttcttcgtgggccagcttgaggccccacagcacgtggtgagctgtgacggggctgtgcacgtctgggaccccttcacagggaagacccttcgcacagtggagccgctggacagccgggtgcccctgactgcggtggctgtcatgcccgccccccacaccagcatcaccatggccagctctgactctaccctgcgctttgtggactgcaggaagcctggtctgcagcacgagttccgactgggcggtgggctgaaccctgggcttgtccgtgccctggccatcagccccagtggccgtagtgtcgtggccggcttctcctcaggcttcatggtgctcctggacacccgcacgggcctggttctgcgaggctggccagcccacgagggggacattctgcagatcaaggcggtggagggcagcgtcctggtcagctcctcctctgaccattccttgaccgtctggaaggagctggagcagaagcccacccatcactacaagtcagcatccgaccccatccacacctttgacctgtacggcagtgaggtggtcactggcaccgtgtccaacaagattggcgtctgctccctgcttgagccaccctcgcaggccaccacgaagctcagctctgagaacttccgcggcacgctcaccagcctggccttgctgcccactaaacgccacctcctgctgggctcagacaacggggttatccgcctcctggcatagactgaggcaggagctggccgggcaagggtgggaagacatctgcgggcgcgtgtccgctcaccctgttccctgagcagcagctccctccagggaggccctgggtcccacgccctgggtgcccacatggcctgccaactagggcctgcaaatggagtgggggagtcctggcccctgaatcaccagagccaccaagcctgccagaggggtctcattcatggcttggggacacagggctcctagcaagcaggaagttaagagcaggaggaagcgttgctaccttcacttctccccagctctgccctctgggtccacatgaggacagggaagctcgggaaggggaagggagactggccctgcccagccggtctctagcccctcagcccccgctgggcactctctgtcccatccctctaggacagggaagctggcctggtccagggcactgatggtgcttggattccagcctaaggaaggctggccgtggtccaggagttaagggcttgggtctggggtttaagtggccacccatccaggccctggccagtgtgggaccgggacgggaaggaagaaggaggctaggagcagggggaaaaggtgcacttggccagtggcgcctgccaggagtgagtccatgcgttgtctgcccacccctaccacagtgtttgtgccttcagctgagggggcagcctctgggccctgaacccctgctggggctccacgaccctgagagaagggttgagaagaatcatctctgcacctcgggtctctgccagaggaagacttaagcatccctgcgacctcacattctagacagagatgaggtccaagggttggcccctgctgccttctcacaatttgcaatagatgtaaataggaccaataaatcctttggaagagccatggggtgaactgag

SEQ ID NO: 200000 - DNA, 3315 bp, Homo sapiens
  Payload ID: 19451
  Gene Name: WD repeat domain 81
  Uniprot ID: Q562E7
  ENST ID: ENST00000613381
  CDS Start-End: 262-2406
tggagaccctttcagccccgggaggaagcggagcccagaccgagccagagcggagcagcgggagggagggcggggaggccgccgggcaggaagcggggtcccgcccgggcctctggagccacgtgcgcttgtttccgtgctggggcgatcacgtgacccgcgtcagctgacccgtcacggtggagcccggtgctcgcgcccggcagcctctgccccgccgcgcccggagcgcaggacccgcggagggatacagcctgcaagatggtccgctggctgtctgccaagctcggccccacagtggcctctcgccacgtggcccggaacctgctccgcctgctgacgtcttgttatgttggacccactcggcagcagttcacagtgagcagtggcgagagcccaccgctgagcgccggcaacatctaccagaagaggccggtcctgggcgacatcgtgtcagggcctgtgctcagctgcctcctccacatcgcccgcctgtatggggagcctgtcctcacctaccagtacctgccctacatcagctacctggtggccccagggagtgcctcaggccccagccgactgaacagccgtaaggaggcggggctgctggccgcggtgacgctgactcagaagatcatcgtgtacctctcagacaccacactcatggacatcctgccccggatcagccatgaggtcctgctgcccgtgctcagcttcctcacctccctcgtcacggggttcccaagtggggcccaggctcggaccatcctgtgtgtgaaaaccatcagcctcatcgccctcatctgcctgcgcattggacaggagatggtccagcagcacctgagcgagcccgtggccacctttttccaggtcttctctcagctgcatgagcttcggcaacaggatctgaagctggaccctgcgggccgtggtgagggccagctgccacaggtggtcttctctgatgggcagcagcggcccgtggaccccgccctgctggacgagctgcagaaggtgttcaccctggagatggcatacacaatctacgtgcccttctcctgcctgttgggtgacatcatccggaaaatcatccccaaccacgagctggttggggagctggcggcgctgtacttggagagcatcagccccagcagtcgcaaccctgccagcgtggagcccaccatgcccggcaccgggcccgagtgggacccccatggtgggggctgccctcaggatgacggccactcagggacctttgggagcgtcctggtggggaaccgcattcagatccccaatgactctcggcctgagaaccccggaccactgggccccatctcgggggtgggtggcgggggcctgggcagcgggagcgacgacaacgccctgaagcaggagctgccgcggagcgtgcacgggctgagcggaaactggctggcgtactggcagtacgagatcggcgtgagccagcaggatgcccactttcacttccaccagatccgcctgcagagcttcccgggccactcgggggccgtcaagtgcgtggcacccctgagcagcgaggacttcttcctgagcggcagcaaggatcgtaccgtgcgcctctggccgctgtacaactacggcgacgggaccagcgagacggccccacgcctcgtctacacccagcaccgcaagagcgtcttcttcgtgggccagcttgaggccccacagcacgtggtgagctgtgacggggctgtgcacgtctgggaccccttcacagggaagacccttcgcacagtggagccgctggacagccgggtgcccctgactgcggtggctgtcatgcccgccccccacaccagcatcaccatggccagctctgactctaccctgcgctttgtggactgcaggaagcctggtctgcagcacgagttccgactgggcggtgggctgaaccctgggcttgtccgtgccctggccatcagccccagtggccgtagtgtcgtggccggcttctcctcaggcttcatggtgctcctggacacccgcacgggcctggttctgcgaggctggccagcccacgagggggacattctgcagatcaaggcggtggagggcagcgtcctggtcagctcctcctctgaccattccttgaccgtctggaaggagctggagcagaagcccacccatcactacaagtcagcatccgaccccatccacacctttgacctgtacggcagtgaggtggtcactggcaccgtgtccaacaagattggcgtctgctccctgcttgagccaccctcgcaggccaccacgaagctcagctctgagaacttccgcggcacgctcaccagcctggccttgctgcccactaaacgccacctcctgctgggctcagacaacggggttatccgcctcctggcatagactgaggcaggagctggccgggcaagggtgggaagacatctgcgggcgcgtgtccgctcaccctgttccctgagcagcagctccctccagggaggccctgggtcccacgccctgggtgcccacatggcctgccaactagggcctgcaaatggagtgggggagtcctggcccctgaatcaccagagccaccaagcctgccagaggggtctcattcatggcttggggacacagggctcctagcaagcaggaagttaagagcaggaggaagcgttgctaccttcacttctccccagctctgccctctgggtccacatgaggacagggaagctcgggaaggggaagggagactggccctgcccagccggtctctagcccctcagcccccgctgggcactctctgtcccatccctctaggacagggaagctggcctggtccagggcactgatggtgcttggattccagcctaaggaaggctggccgtggtccaggagttaagggcttgggtctggggtttaagtggccacccatccaggccctggccagtgtgggaccgggacgggaaggaagaaggaggctaggagcagggggaaaaggtgcacttggccagtggcgcctgccaggagtgagtccatgcgttgtctgcccacccctaccacagtgtttgtgccttcagctgagggggcagcctctgggccctgaacccctgctggggctccacgaccctgagagaagggttgagaagaatcatctctgcacctcgggtctctgccagaggaagacttaagcatccctgcgacctcacattctagacagagatgaggtccaagggttggcccctgctgccttctcacaatttgcaatagatgtaaataggaccaataaatcctttggaagagccatggggtgaa

SEQ ID NO: 200001 - DNA, 3805 bp, Homo sapiens
  Payload ID: 19451
  Gene Name: WD repeat domain 81
  Uniprot ID: Q562E7
  ENST ID: ENST00000611758
  CDS Start-End: 219-2891
aaagagcaggcgaaagccacggcgtctgcgtttgcaatgcatgctggtccgtgtagttctcagcctgacaccgtcgttcccagaacccagcgcgctctgtgctggcgggcgcagaggcctcccaggaggagagcaaggacctggcaggggctgctgaggaggagagcgggctgcccggggccgggcctggctcctgtgcttttggggaggagattcccatggatggggagcctcctgcctcctcgggcctggggctcccagactacacgtctggcgtcagcttccacgaccaggctgacctccctgagacagaggacttccaagccgggctctatgtgactgagtctccccagccccaggaggctgaggctgtgagcctgggccggctgagtgacaagagcagcaccagcgagacctccctgggtgaggagcgggctccagacgaggggggtgcccccgtggacaagagcagccttcgatcaggtgacagcagccaggacttgaagcaaagcgagggctccgaggaggaagaggaggaggaggacagctgcgtggtgctagaggaggaggagggggagcaggaggaggtcaccggggcatctgagctcactctgtctgacacggtgctgtccatggagacggttgtggccggcggcagtgggggagatggagaagaagaggaggaggcactgcctgagcagtcagaaggcaaagaacagaagatcctccttgatacagcctgcaagatggtccgctggctgtctgccaagctcggccccacagtggcctctcgccacgtggcccggaacctgctccgcctgctgacgtcttgttatgttggacccactcggcagcagttcacagtgagcagtggcgagagcccaccgctgagcgccggcaacatctaccagaagaggccggtcctgggcgacatcgtgtcagggcctgtgctcagctgcctcctccacatcgcccgcctgtatggggagcctgtcctcacctaccagtacctgccctacatcagctacctggtggccccagggagtgcctcaggccccagccgactgaacagccgtaaggaggcggggctgctggccgcggtgacgctgactcagaagatcatcgtgtacctctcagacaccacactcatggacatcctgccccggatcagccatgaggtcctgctgcccgtgctcagcttcctcacctccctcgtcacggggttcccaagtggggcccaggctcggaccatcctgtgtgtgaaaaccatcagcctcatcgccctcatctgcctgcgcattggacaggagatggtccagcagcacctgagcgagcccgtggccacctttttccaggtcttctctcagctgcatgagcttcggcaacaggatctgaagctggaccctgcgggccgtggtgagggccagctgccacaggtggtcttctctgatgggcagcagcggcccgtggaccccgccctgctggacgagctgcagaaggtgttcaccctggagatggcatacacaatctacgtgcccttctcctgcctgttgggtgacatcatccggaaaatcatccccaaccacgagctggttggggagctggcggcgctgtacttggagagcatcagccccagcagtcgcaaccctgccagcgtggagcccaccatgcccggcaccgggcccgagtgggacccccatggtgggggctgccctcaggatgacggccactcagggacctttgggagcgtcctggtggggaaccgcattcagatccccaatgactctcggcctgagaaccccggaccactgggccccatctcgggggtgggtggcgggggcctgggcagcgggagcgacgacaacgccctgaagcaggagctgccgcggagcgtgcacgggctgagcggaaactggctggcgtactggcagtacgagatcggcgtgagccagcaggatgcccactttcacttccaccagatccgcctgcagagcttcccgggccactcgggggccgtcaagtgcgtggcacccctgagcagcgaggacttcttcctgagcggcagcaaggatcgtaccgtgcgcctctggccgctgtacaactacggcgacgggaccagcgagacggccccacgcctcgtctacacccagcaccgcaagagcgtcttcttcgtgggccagcttgaggccccacagcacgtggtgagctgtgacggggctgtgcacgtctgggaccccttcacagggaagacccttcgcacagtggagccgctggacagccgggtgcccctgactgcggtggctgtcatgcccgccccccacaccagcatcaccatggccagctctgactctaccctgcgctttgtggactgcaggaagcctggtctgcagcacgagttccgactgggcggtgggctgaaccctgggcttgtccgtgccctggccatcagccccagtggccgtagtgtcgtggccggcttctcctcaggcttcatggtgctcctggacacccgcacgggcctggttctgcgaggctggccagcccacgagggggacattctgcagatcaaggcggtggagggcagcgtcctggtcagctcctcctctgaccattccttgaccgtctggaaggagctggagcagaagcccacccatcactacaagtcagcatccgaccccatccacacctttgacctgtacggcagtgaggtggtcactggcaccgtgtccaacaagattggcgtctgctccctgcttgagccaccctcgcaggccaccacgaagctcagctctgagaacttccgcggcacgctcaccagcctggccttgctgcccactaaacgccacctcctgctgggctcagacaacggggttatccgcctcctggcatagactgaggcaggagctggccgggcaagggtgggaagacatctgcgggcgcgtgtccgctcaccctgttccctgagcagcagctccctccagggaggccctgggtcccacgccctgggtgcccacatggcctgccaactagggcctgcaaatggagtgggggagtcctggcccctgaatcaccagagccaccaagcctgccagaggggtctcattcatggcttggggacacagggctcctagcaagcaggaagttaagagcaggaggaagcgttgctaccttcacttctccccagctctgccctctgggtccacatgaggacagggaagctcgggaaggggaagggagactggccctgcccagccggtctctagcccctcagcccccgctgggcactctctgtcccatccctctaggacagggaagctggcctggtccagggcactgatggtgcttggattccagcctaaggaaggctggccgtggtccaggagttaagggcttgggtctggggtttaagtggccacccatccaggccctggccagtgtgggaccgggacgggaaggaagaaggaggctaggagcagggggaaaaggtgcacttggccagtggcgcctgccaggagtgagtccatgcgttgtctgcccacccctaccacagtgtttgtgccttcagctgagggggcagcctctgggccctgaacccctgctggggctccacgaccctgagagaagggttgagaagaatcatctctgcacctcgggtctctgccagaggaagacttaagcatccctgcgacctcacattctagacagagatgaggtccaagggttggcccctgctgccttctcacaatttgcaatagatgtaaataggaccaataaatcctttggaagagccatggggtgaactgag

SEQ ID NO: 200002 - DNA, 2968 bp, Homo sapiens
  Payload ID: 19451
  Gene Name: WD repeat domain 81
  ENST ID: ENST00000615141
  CDS Start-End: 423-2165
tgacaccgtcgttcccagaacccagcgcgctctgtgagttggcatttttaaactgagctcggaatccagcccggggaagtccttaaagggcgacagcccctccttgttggagtcgacccactcggcagcagttcacagtgagcagtggcgagagcccaccgctgagcgccggcaacatctaccagaagaggccggtcctgggcgacatcgtgtcagggcctgtgctcagctgcctcctccacatcgcccgcctgtatggggagcctgtcctcacctaccagtacctgccctacatcagctacctggtggccccagggagtgcctcaggccccagccgactgaacagccgtaaggaggcggggctgctggccgcggtgacgctgactcagaagatcatcgtgtacctctcagacaccacactcatggacatcctgccccggatcagccatgaggtcctgctgcccgtgctcagcttcctcacctccctcgtcacggggttcccaagtggggcccaggctcggaccatcctgtgtgtgaaaaccatcagcctcatcgccctcatctgcctgcgcattggacaggagatggtccagcagcacctgagcgagcccgtggccacctttttccaggtcttctctcagctgcatgagcttcggcaacaggatctgaagctggaccctgcgggccgtggtgagggccagctgccacaggtggtcttctctgatgggcagcagcggcccgtggaccccgccctgctggacgagctgcagaaggtgttcaccctggagatggcatacacaatctacgtgcccttctcctgcctgttgggtgacatcatccggaaaatcatccccaaccacgagctggttggggagctggcggcgctgtacttggagagcatcagccccagcagtcgcaaccctgccagcgtggagcccaccatgcccggcaccgggcccgagtgggacccccatggtgggggctgccctcaggatgacggccactcagggacctttgggagcgtcctggtggggaaccgcattcagatccccaatgactctcggcctgagaaccccggaccactgggccccatctcgggggtgggtggcgggggcctgggcagcgggagcgacgacaacgccctgaagcaggagctgccgcggagcgtgcacgggctgagcggaaactggctggcgtactggcagtacgagatcggcgtgagccagcaggatgcccactttcacttccaccagatccgcctgcagagcttcccgggccactcgggggccgtcaagtgcgtggcacccctgagcagcgaggacttcttcctgagcggcagcaaggatcgtaccgtgcgcctctggccgctgtacaactacggcgacgggaccagcgagacggccccacgcctcgtctacacccagcaccgcaagagcgtcttcttcgtgggccagcttgaggccccacagcacgtggtgagctgtgacggggctgtgcacgtctgggaccccttcacagggaagacccttcgcacagtggagccgctggacagccgggtgcccctgactgcggtggctgtcatgcccgccccccacaccagcatcaccatggccagctctgactctaccctgcgctttgtggactgcaggaagcctggtctgcagcacgagttccgactgggcggtgggctgaaccctgggcttgtccgtgccctggccatcagccccagtggccgtagtgtcgtggccggcttctcctcaggcttcatggtgctcctggacacccgcacgggcctggttctgcgaggctggccagcccacgagggggacattctgcagatcaaggcggtggagggcagcgtcctggtcagctcctcctctgaccattccttgaccgtctggaaggagctggagcagaagcccacccatcactacaagtcagcatccgaccccatccacacctttgacctgtacggcagtgaggtggtcactggcaccgtgtccaacaagattggcgtctgctccctgcttgagccaccctcgcaggccaccacgaagctcagctctgagaacttccgcggcacgctcaccagcctggccttgctgcccactaaacgccacctcctgctgggctcagacaacggggttatccgcctcctggcatagactgaggcaggagctggccgggcaagggtgggaagacatctgcgggcgcgtgtccgctcaccctgttccctgagcagcagctccctccagggaggccctgggtcccacgccctgggtgcccacatggcctgccaactagggcctgcaaatggagtgggggagtcctggcccctgaatcaccagagccaccaagcctgccagaggggtctcattcatggcttggggacacagggctcctagcaagcaggaagttaagagcaggaggaagcgttgctaccttcacttctccccagctctgccctctgggtccacatgaggacagggaagctcgggaaggggaagggagactggccctgcccagccggtctctagcccctcagcccccgctgggcactctctgtcccatccctctaggacagggaagctggcctggtccagggcactgatggtgcttggattccagcctaaggaaggctggccgtggtccaggagttaagggcttgggtctggggtttaagtggccacccatccaggccctggccagtgtgggaccgggacgggaaggaagaaggaggctaggagcagggggaaaaggtgcacttggccagtggcgcctgccaggagtgagtccatgcgttgtctgcccacccctaccacagtgtttgtgccttcagctgagggggcagcctctgggccctgaacccctgctggggctccacgaccctgagagaagggttgagaagaatcatctctgcacctcgggtctctgccagaggaagacttaagcatccctgcgacctcac

SEQ ID NO: 200003 - DNA, 582 bp, Homo sapiens; identical to SEQ ID NO: 199992
  Payload ID: 19451
  Gene Name: WD repeat domain 81
  ENST ID: ENST00000631560
  CDS Start-End: 186-582

SEQ ID NO: 200004 - DNA, 561 bp, Homo sapiens; identical to SEQ ID NO: 199998
  Payload ID: 19451
  Gene Name: WD repeat domain 81
  ENST ID: ENST00000632313
  CDS Start-End: 1-371

SEQ ID NO: 200005 - DNA, 590 bp, Homo sapiens; identical to SEQ ID NO: 199996
  Payload ID: 19451
  Gene Name: WD repeat domain 81
  ENST ID: ENST00000631907
  CDS Start-End: 1-590

SEQ ID NO: 200006 - DNA, 6730 bp, Homo sapiens
  Payload ID: 19451
  Gene Name: WD repeat domain 81
  ENST ID: ENST00000632244
  CDS Start-End: 1-5823
atggcccagggcagcggggggcgggaaggcgctctcagaaccccggccgggggctggcattccccgccaagcccagacatgcaggagctgctccggagcgtggagagggacctgagcatcgatcccaggcagctggctccggccccggggggcacccacgtggtggccctagtgcctgcgcgctggctggccagcctccgcgatcgccggctgcccctgggaccctgtccccgcgcagagggcctgggagaagcggaagtcaggactctcctgcagcgctctgtgcaaaggctgcctgccggctggacgcgcgtggaggtgcatgggctgcggaagcggagactgtcctaccctctgggcgggggcctgccctttgaggacgggtcctgcggccctgagaccctcactcgcttcatgcaggaggttgccgcccagaattatcgcaacctgtggcgccatgcataccacacttacggccagccgtacagtcacagccctgccccctcagctgtccctgccttggactcagtacggcaggctctgcagagggtctatggttgctccttcctgccagtgggtgaaactacccaatgcccttcatatgccagagaaggcccctgcccccctcggggcagccctgcttgccctagtcttttacgggctgaggccttgctggagtcgccggagatgctgtatgtggtacacccttacgtacagttctccctacatgacgtggtcaccttcagccctgccaagctgaccaacagccaggccaaggtgctgttcattctcttccgcgtgctgagggctatggacgcctgtcaccgccaggggctggcgtgtggggccctgtctttgtatcacatcgcagtggatgagaagctttgcagcgagctgcgactggacctgagtgcttatgagaggcccgaggaggacgagaatgaggaggcccctgtggcaagggatgaggcgggcattgtgtctcaagaggagcagggagggcaacctgggcaacccactggccaggaggaacttcggagcctcgtgctagattgggtccacggccgcatcagcaacttccactacctcatgcagctgaatcggttggcaggtcggcggcagggggaccccaactaccaccccgtgctgccctgggtggtggacttcactacgccccatgggcgcttccgagacctgcgcaagtccaagttccgcctcaacaagggggataagcaactggacttcacgtatgagatgacacggcaggcattcgtagcaggcggggcgggcggcggggaaccccctcatgttccccaccacatctcagacgtgctctccgacatcacgtactatgtgtacaaggctcggcgcacgcctcggtcggtgctctgcggacacgtccgcgcgcagtgggagccccatgagtatccggccagcatggagcggatgcagaactggaccccggatgagtgcattccggagttctacaccgatccctctatcttccgctccatccaccccgacatgcctgacctggatgtgccagcctggtgcagctccagccaggagttcgtagctgcccaccgagccctgctggagagccgcgaggtatcccgggacctgcaccattggatcgacctcacgtttggctataaactccagggtaaggaggctgtcaaggaaaagaatgtgtgtctgcacctggtggacgcccacactcacctggccagctacggggtggtgcagctcttcgatcagccacacccccagcgcctggctggggctcctgcccttgcccccgagcctcccctcatccccaagctgttggtccagaccatccaggagaccacaggccgggaggacttcacggaaaacccgggacagcttccaaatggagtgggccggccagttttagaggccactccctgtgaggctagctggaccagagacaggccggtggcaggagaagacgacttggaacaggccacagaagctctggattccatttcccttgctgggaaagcaggtgaccagctgggctcctccagtcaagcgtcccctggacttctctctttctcagtggcctcagcctcccgtccaggccgcaggaataaagctgctggggcagaccctggggagggtgaggaggggaggattcttcttcccgagggcttcaatcccatgcaggccctggaggagctggagaaaacgggcaacttcttggccaaaggcctagggggcctgttggaggtgcctgagcagccccgggtccagccggctgtgccactgcagtgcctactccacagggacatgcaggcgctgggtgtcctattggcagagatggtgtttgccaccagggtgcggacgctgcagcccgatgcacctttgtgggtacgcttccaggctgtccgagggctctgcacgcgccaccccaaggaggtccctgtgtctttgcagcccgtgctggacacactcctgcagatgagtggccccgaagtccccatgggagcagagaggggcaagctggaccaactgtttgagtacaggcctgtctcccagggcctgcccccaccctgcccaagccagcttctcagccccttcagctccgtggttcccttcccaccctacttcccggcactgcacagattcatcctcctgtaccaggcaaggcgtgtggaggacgaggcccaggggcgcgagctggtgtttgctctgtggcagcagctgggcgcggtgctaaaggacatcacccctgagggcctggagatcctgctgcccttcgtgctctcactcatgtccgaggagcacacagctgtgtacacggcctggtatctgtttgagcctgttgccaaggcactgggccccaaaaatgccaataagtacctcctgaagccgctcattggtgcctacgagagcccctgccagctacacggccgcttctacctgtacacggactgctttgtggcccagctgatggtgcggctgggcctgcaggcatttctcactcacctgctgccccatgtcctgcaggtgctggcgggcgcagaggcctcccaggaggagagcaaggacctggcaggggctgctgaggaggagagcgggctgcccggggccgggcctggctcctgtgcttttggggaggagattcccatggatggggagcctcctgcctcctcgggcctggggctcccagactacacgtctggcgtcagcttccacgaccaggctgacctccctgagacagaggacttccaagccgggctctatgtgactgagtctccccagccccaggaggctgaggctgtgagcctgggccggctgagtgacaagagcagcaccagcgagacctccctgggtgaggagcgggctccagacgaggggggtgcccccgtggacaagagcagccttcgatcaggtgacagcagccaggacttgaagcaaagcgagggctccgaggaggaagaggaggaggaggacagctgcgtggtgctagaggaggaggagggggagcaggaggaggtcaccggggcatctgagctcactctgtctgacacggtgctgtccatggagacggttgtggccggcggcagtgggggagatggagaagaagaggaggaggcactgcctgagcagtcagaaggcaaagaacagaagatcctccttgatacagcctgcaagatggtccgctggctgtctgccaagctcggccccacagtggcctctcgccacgtggcccggaacctgctccgcctgctgacgtcttgttatgttggacccactcggcagcagttcacagtgagcagtggcgagagcccaccgctgagcgccggcaacatctaccagaagaggccggtcctgggcgacatcgtgtcagggcctgtgctcagctgcctcctccacatcgcccgcctgtatggggagcctgtcctcacctaccagtacctgccctacatcagctacctggtggccccagggagtgcctcaggccccagccgactgaacagccgtaaggaggcggggctgctggccgcggtgacgctgactcagaagatcatcgtgtacctctcagacaccacactcatggacatcctgccccggatcagccatgaggtcctgctgcccgtgctcagcttcctcacctccctcgtcacggggttcccaagtggggcccaggctcggaccatcctgtgtgtgaaaaccatcagcctcatcgccctcatctgcctgcgcattggacaggagatggtccagcagcacctgagcgagcccgtggccacctttttccaggtcttctctcagctgcatgagcttcggcaacaggatctgaagctggaccctgcgggccgtggtgagggccagctgccacaggtggtcttctctgatgggcagcagcggcccgtggaccccgccctgctggacgagctgcagaaggtgttcaccctggagatggcatacacaatctacgtgcccttctcctgcctgttgggtgacatcatccggaaaatcatccccaaccacgagctggttggggagctggcggcgctgtacttggagagcatcagccccagcagtcgcaaccctgccagcgtggagcccaccatgcccggcaccgggcccgagtgggacccccatggtgggggctgccctcaggatgacggccactcagggacctttgggagcgtcctggtggggaaccgcattcagatccccaatgactctcggcctgagaaccccggaccactgggccccatctcgggggtgggtggcgggggcctgggcagcgggagcgacgacaacgccctgaagcaggagctgccgcggagcgtgcacgggctgagcggaaactggctggcgtactggcagtacgagatcggcgtgagccagcaggatgcccactttcacttccaccagatccgcctgcagagcttcccgggccactcgggggccgtcaagtgcgtggcacccctgagcagcgaggacttcttcctgagcggcagcaaggatcgtaccgtgcgcctctggccgctgtacaactacggcgacgggaccagcgagacggccccacgcctcgtctacacccagcaccgcaagagcgtcttcttcgtgggccagcttgaggccccacagcacgtggtgagctgtgacggggctgtgcacgtctgggaccccttcacagggaagacccttcgcacagtggagccgctggacagccgggtgcccctgactgcggtggctgtcatgcccgccccccacaccagcatcaccatggccagctctgactctaccctgcgctttgtggactgcaggaagcctggtctgcagcacgagttccgactgggcggtgggctgaaccctgggcttgtccgtgccctggccatcagccccagtggccgtagtgtcgtggccggcttctcctcaggcttcatggtgctcctggacacccgcacgggcctggttctgcgaggctggccagcccacgagggggacattctgcagatcaaggcggtggagggcagcgtcctggtcagctcctcctctgaccattccttgaccgtctggaaggagctggagcagaagcccacccatcactacaagtcagcatccgaccccatccacacctttgacctgtacggcagtgaggtggtcactggcaccgtgtccaacaagattggcgtctgctccctgcttgagccaccctcgcaggccaccacgaagctcagctctgagaacttccgcggcacgctcaccagcctggccttgctgcccactaaacgccacctcctgctgggctcagacaacggggttatccgcctcctggcatagactgaggcaggagctggccgggcaagggtgggaagacatctgcgggcgcgtgtccgctcaccctgttccctgagcagcagctccctccagggaggccctgggtcccacgccctgggtgcccacatggcctgccaactagggcctgcaaatggagtgggggagtcctggcccctgaatcaccagagccaccaagcctgccagaggggtctcattcatggcttggggacacagggctcctagcaagcaggaagttaagagcaggaggaagcgttgctaccttcacttctccccagctctgccctctgggtccacatgaggacagggaagctcgggaaggggaagggagactggccctgcccagccggtctctagcccctcagcccccgctgggcactctctgtcccatccctctaggacagggaagctggcctggtccagggcactgatggtgcttggattccagcctaaggaaggctggccgtggtccaggagttaagggcttgggtctggggtttaagtggccacccatccaggccctggccagtgtgggaccgggacgggaaggaagaaggaggctaggagcagggggaaaaggtgcacttggccagtggcgcctgccaggagtgagtccatgcgttgtctgcccacccctaccacagtgtttgtgccttcagctgagggggcagcctctgggccctgaacccctgctggggctccacgaccctgagagaagggttgagaagaatcatctctgcacctcgggtctctgccagaggaagacttaagcatccctgcgacctcacattctagacagagatgaggtccaagggttggcccctgctgccttctcacaatttgcaatagatgtaaataggaccaataaatcctttggaagagccatggggtg

SEQ ID NO: 200007 - DNA, 570 bp, Homo sapiens; identical to SEQ ID NO: 199993
  Payload ID: 19451
  Gene Name: WD repeat domain 81
  ENST ID: ENST00000634001
  CDS Start-End: 54-570

SEQ ID NO: 200008 - DNA, 562 bp, Homo sapiens; identical to SEQ ID NO: 199997
  Payload ID: 19451
  Gene Name: WD repeat domain 81
  ENST ID: ENST00000632643
  CDS Start-End: 50-562

SEQ ID NO: 200009 - DNA, 4293 bp, Homo sapiens
  Payload ID: 19452
  Gene Name: WD repeat domain 82
  Uniprot ID: Q6UXN9
  ENST ID: ENST00000296490
  CDS Start-End: 283-1224
ttctgcctgtcgccccaaaatggcggacacaatgagccggcgacgcgccggttgtccgtgaggtggctgtgaggacgaacggtcggcgaggctccacagtccaggcagaagaccctcgaccaagcaggaagaagaggaggaggcggcccaactgttggccgacttcccgctagccgccggcgcggcgcccgccccgcctgggttggcccctcggcagcccgcccgctcgccgccgggccccgccccggccctgcgccgccgctgccttccccagccgccgccatgaagctgaccgacagcgtgttgcggagcttccgcgtcgctaaggtgttccgcgaaaactcggacaagattaactgcttcgatttcagccccaacggcgagacggtcatctcgagtagcgacgacgactccatcgtgctctatgactgccaggagggcaaaccaaagagaaccctgtacagtaagaaatatggtgtggacctcatcagatacactcatgcagcaaacacagttgtttacagctctaacaaaatagacgatactattcgttacttgtccttgcatgacaacaaatacatcagatactttcctggacatagcaaaagggtggtggccttgtccatgtcacctgtggatgacactttcatttctgggtctcttgataagaccattcgactctgggatctccggtctcctaactgccagggcctcatgcatctgcaggggaagccagtttgttcttttgatccagaagggttaattttcgctgcaggtgtcaactctgaaatggtcaagctttatgaccttcgttcttttgataaggggccatttgctacctttaagatgcagtatgatcgaacttgtgagtggacaggacttaaattcagcaatgatggcaagctcatcctcatttccaccaacggcagcttcattcgtctgattgatgcattcaaaggagtggtgatgcacacatttgggggttatgccaacagcaaagctgtcacactggaggcttcatttactccagactctcagtttattatgattggttcagaggatggcaagatccatgtctggaatggagagagcggtataaaagtagctgtgttggatggtaaacacacaggcccgattacctgtttgcaattcaaccccaagttcatgacttttgccagtgcgtgttccaacatggccttttggttgcccaccattgatgactgaccctgttgctgcttggctatttctgtatagtgagggcggccagcaggaagaaactcagagggaactgagataatagtgggattggatcatttgactgggctggagaacatccttttacatggccttcccatggatgtgctgtacatctgctcaaaagaaaataattactttgatgagcgtcttcaaaaggactcttggtgcaacagactcaattggaactcagcttttctaactgtcactgcaccaagctctgctggaggagtgaccagactcacgatttggtatagtggggctctcaagcatcttcaatttgaatgtacatgctgctgaggagccggtgaagtcatcagttccgcacatcccttctaccctccaactgcatgggaagccaaagtcctggttttgaaatgcttgggcagctcagccgcttgccctcaccctgcatgtcttgttactgggtctccctgtgtacttgtggcattatccacaaccatcatgtttcttaggtgccaaacatttacagaaacattttcatatatcttggggtcagagaaagggacagatacagaaggaccttgcttgcaggaagccatgcagttagtttctgcagttagtcgtgtgaggctaggtggttgggcaggcctcgggctgtaggtgttgggtgggaaaaagacccaagggcctgaaagggagggaaaggggagggtagcgggagggtagcaggtgagttcctagggctggaaggtttagcagcagcctggtgcagtgccctgtcatcaagacaaacccacggtcctcctgggtgcctaccaagcttggtttgtacaaaagcaaggtgggagtctatttttgtacatgagatacatcacacttacctgtgggccagtattgtgaagtgagtctgagttgtttacactgatgccttccctgcccaccacaaattgtgtacatagtcttcagatgataccacccctttccccagctcccaaccaagagctggttctaggcctgtgttatatgtcatatttagcgtttttatatatgacctttgatttctgttgtttgtattttagcacagtgtatgcaccttcatttaaatacatctgtgtgcatacagatacgcatatatgtgtgtgcgtatgcatatatctctcatctgtagtttccaagagttcagctgaagcagatggagtcctgcagcccaggagacaccctgcatccctgctaatagtgtttgccacaagtattagtgagtcttccttattaatattttcatttcagaagactgaagcaaagctgatagtgtttgctgtttctttggcagctaagtgagggtcttgggatgacttgctgtgttcctcaagctgcactttggggccatctctgcagtattagccccctttttgcttggtggtactctgtctgtgcctgtgtgtgtgtgtgatagtcactcttgcatggcttccatgtctggtttgtggcatttggggataaggtgctgaagccagagcatttgcagtttgtttgaggcctcgttgccaatgatagatcactcctgttgacctggtatgtctgcttgcttgctgcttttccttgctttctcttggaagaggaaaggactctggtcaggcccaggctgagtgagatgagctgcagctggctcatggccttcttagagcagagagaggagtatgtcattttactaagttcctaaacaaacatttatgcaggcaacactccttgcagatccagaaactgaggcacaatagggttatgacttgctcaagaatatgtagctgctagggggtaaatcaaggcatcacaatttctgttcagcgggcaggaataggctgtgaattgctagcactttttttttttaagcaattactttttgacttgttcctctgaaagtgcaagaggcgtacacctttcccaaatgtagactagaatctgcaggatgccacccactgtatagttctgctttcccagagaggaagaacttttagaaaccaaatgatcttaattgttattgcccacccctggcttttccgggtagaaaattcacagtaggaatgattgttaagagagagtgcttggaaccatgggttaacaggaaaggctacctaacttcacatatctgcaaccagagcagccaccaagcattacttagcagcaggaaaatgattgtatttgagttcctgtgtgtccaaaactgagcaccatgttctttgaaaacatgccacctcaaggctgggcgcggtggctcacacctgtaatcccagcactttgggaggccgaggcgggcggatcaccggaggtcgggagtttgagaccagcctgaccaacatggagaaaccccatctctactaaaaatacaaaattagccgggcgtggtggcatgcgcctataatctcagctacttgggaggctgaggcaggagaattgcttgaacccaggaggcggaggttgcggtgagttgagatcgtgccattgcactccggcctgggcaacaacagcaaaactccgtctcaaaaaaaaaaaaaaaaaaatgccacctcacagtctctatcgttgggccctgtggttgcaaagctgcctcctgaattaagaaggaaagggaaaagatatagctggaagcgagtggaagagatgctgagggctggggctgcacagacgtgctcagcagggctacaggtgctcaagccctattggggatgggtggggagtggggcagcggcgtttgccaccttaagaattggggccaaagccactgatgtttatttgacagtgacactgcactgggtacttaaagaaattatttcccgttgtaattataattactgcttattaaggaaaatatgggaattttagaaagaatcaagtttgccacccaaatgctaccactgttaatcttttggtgttaaatgttccccctagacatttctgtgcatagatttttggtgtgtttacatagtcgttattctgtatatacaattttatgtcccttttgtacttaacgtataaacattttttccatgttacagtcttaaacagaattttatggctgca

SEQ ID NO: 200010 - DNA, 574 bp, Homo sapiens
  Payload ID: 19452
  Gene Name: WD repeat domain 82
  ENST ID: ENST00000463624
  CDS Start-End: 434-574
aaggtagggccttagcgagggaaatggctgccgcgtaatgcccggtgatgcgagaaagaagggcctgctgccaccaggacccgtcatcgcccagcccagggaccgcttctgaaggccatgcgagccctggcggcgcagacttaccagcccacagctccggccgcggtgcccagcgctggagaacggaaacataattcaagacatttcctgagtgccttctgtgtgggccgaatgctgtagctgctgggatagaccaaagagaaccctgtacagtaagaaatatggtgtggacctcatcagatacactcatgcagcaaacacagttgtttacagctctaacaaaatagacgatactattcgttacttgtccttgcatgacaacaaatacatcagatactttcctggacatagcaaaagggtggtggccttgtccatgtcacctgtggatgacactttcatttctgggtctcttgataagaccattcgactctgggatctccggtctcctaactgccagggcctcatgcatctgcaggggaagccagtttgttcttttgatccagaagggttaatt

SEQ ID NO: 200011 - DNA, 587 bp, Homo sapiens
  Payload ID: 19452
  Gene Name: WD repeat domain 82
  ENST ID: ENST00000469000
  CDS Start-End: 364-587
ctaaggtgttccgcgaaaactcggacaagattaactgcttcgatttcagccccaacggcgagacggtcatctcgagtagcgacgacgactccatcgtgctctatgactgccaggagggcaagtgagtgcggcggaggccctgggcccgagtctcagtgcctccctccggtggcccagcacagaccaaagagaaccctgtacagtaagaaatatggtgtggacctcatcagatacactcatgcagcaaacacagttgtttacagctctaacaaaatagacgatactattcgttacttgtccttgcatgacaacaaatacatcagatactttcctggacatagcaaaagggtggtggccttgtccatgtcacctgtggatgacactttcatttctgggtctcttgataagaccattcgactctgggatctccggtctcctaactgccagggcctcatgcatctgcaggggaagccagtttgttcttttgatccagaagggttaattttcgctgcaggtgtcaactctgaaatggtcaagctttatgaccttcgttcttttgataaggggccatttgctacctttaagat

SEQ ID NO: 200012 - DNA, 775 bp, Homo sapiens
  Payload ID: 19453
  Gene Name: WD repeat domain 83
  ENST ID: ENST00000425834
  CDS Start-End: 1-225
gacaagacgctgaagctgtggaacccgcttcgggggacgctgctgcggacgtacagcggccacggctacgaggtgctggatgcggccggctcctttgacaacagtagtctctgctccggcggcggggacaaggcggtggttctgtgggatgtggcatcagggcaggtcgtgcgcaaattccggggccacgcagggctccgtggatggccgcgtgagacgctatgacctaaggatggggcagctcttctcagactacgtgggcagccccatcacctgcacctgcttcagccgggatgggcagtgcaccctggtgtccagcctggactccacattgcggctcctggacaaagacacaggggagctgctgggcgagtacaagggccataagaaccaggaatacaagctggactgctgcctgagcgagcgtgacacacatgtggtcagctgttctgaggacgggaaggtgttcttctgggacctggtggagggtgcgctggctctggccctgcctgtgggttccggtgtggtgcagtcgctggcctaccacccaacagagccctgcctgctgaccgccatgggaggcagcgtccagtgctggcgagaggaggcctatgaggcagaggatggagcaggctgaagccaggggacccaccaacaggaccaaggaccgagacacagacatggaaggacttcagataccatcttattctagagacgtagctgaccaaaaagtaggggaggggctgggtctgcaaattaataaatagaagagggg

SEQ ID NO: 200013 - DNA, 1457 bp, Homo sapiens
  Payload ID: 19453
  Gene Name: WD repeat domain 83
  Uniprot ID: Q9BRX9
  ENST ID: ENST00000418543
  CDS Start-End: 350-1297
ccagggcgcggtctggaggctcacgggagagaggctgtagccctgggcaatcccgggggtcgttacaggaaggtaggaaaatgccaccctcagggcactggttgggctaaaggtgacactggcgtctcacgggctatgaagacggaatgcctcttaatgccggaattccaagacggaatgcctcttaatgccgggcaagtctcacatgaagctactcatcatttgcttcgtgtcctccgagctccgagagttggcaaagctgatgaaggagcagtagacagcgacccaagcacaccacttcagctagggaaagaccgatttaaggctgcaaggaaggagtcctgggagcatggctttccctgagccaaagccgcggcctccagagctgccgcagaaacggttgaagacgctggactgcgggcagggggcagtgcgagccgtacgatttaatgtggatggcaattactgcctgacgtgcggcagtgacaagacgctgaagctgtggaacccgcttcgggggacgctgctgcggacgtacagcggccacggctacgaggtgctggatgcggccggctcctttgacaacagtagtctctgctccggcggcggggacaaggcggtggttctgtgggatgtggcatcagggcaggtcgtgcgcaaattccggggccacgcagggaaggtgaacacggtgcagtttaatgaagaggccacagttatcctgtccggctctattgattccagtatccgctgttgggattgccgctcacggaggcctgagccagtgcagacgctggatgaggccagagatggcgtgtccagtgtgaaggtgtcagaccacgagatcctggcaggctccgtggatggccgcgtgagacgctatgacctaaggatggggcagctcttctcagactacgtgggcagccccatcacctgcacctgcttcagccgggatgggcagtgcaccctggtgtccagcctggactccacattgcggctcctggacaaagacacaggggagctgctgggcgagtacaagggccataagaaccaggaatacaagctggactgctgcctgagcgagcgtgacacacatgtggtcagctgttctgaggacgggaaggtgttcttctgggacctggtggagggtgcgctggctctggccctgcctgtgggttccggtgtggtgcagtcgctggcctaccacccaacagagccctgcctgctgaccgccatgggaggcagcgtccagtgctggcgagaggaggcctatgaggcagaggatggagcaggctgaagccaggggacccaccaacaggaccaaggaccgagacacagacatggaaggacttcagataccatcttattctagagacgtagctgaccaaaaagtaggggaggggctgggtctgcaaattaataaatagaagagggggtaagaccttcctgggaccgca

SEQ ID NO: 200014 - DNA, 770 bp, Homo sapiens
  Payload ID: 19453
  Gene Name: WD repeat domain 83
  ENST ID: ENST00000547481
  CDS Start-End: 37-498
accgatttaaggctgcaaggaaggagtcctgggagcatggctttccctgagccaaagccgcggcctccagagctgccgcagaaacggttgaagacgctggactgcgggcagggggcagtgcgagccgtacgatttaatgtggatggcaattactgcctgacgtgcggcagtgacaagacgctgaagctgtggaacccgcttcgggggacgctgctgcggacgtacagcggccacggctacgaggtgctggatgcggccggctcctttgacaacagtagtctctgctccggcggcggggacaaggcggtggttctgtgggatgtggcatcagggcaggtcgtgcgcaaattccggggccacgcagggaaggtgaacacggtgcagtttaatgaagaggccacagttatcctgtccgtatccgctgttgggattgccgctcacggaggcctgagccagtgcagacgctggatgaggccagagatggcgtgtccagtgtgaaggtgtcagaccacgagatcctggcaggctccgtggatggccgcgtgagacgctatgacctaaggatggggcagctcttctcagactacgtgggcagccccatcacctgcacctgcttcagccgggatgggcagtgcaccctggtgtccagcctggactccacattgcggctcctggacaaagacacaggggagctgctgggcgagtacaagggccataagaaccaggaatacaagctggactgctgcctgagcgagcgtgacacacatgtg

SEQ ID NO: 200015 - DNA, 1425 bp, Homo sapiens
  Payload ID: 19453
  Gene Name: WD repeat domain 83
  ENST ID: ENST00000548381
  CDS Start-End: 336-551
ggaggctcacgggagagaggctgtagccctgggcaatcccgggggtcgttacaggaaggtaggaaaatgccaccctcagggcactggttgggctaaaggtgacactggcgtctcacgggctatgaagacggaatgcctcttaatgccggaattccaagacggaatgcctcttaatgccgggcaagtctcacatgaagctactcatcatttgcttcgtgtcctccgagctccgagagttggcaaagctgatgaaggagcagtagacagcgacccaagcacaccacttcagctagggaaagaccgatttaaggctgcaaggaaggagtcctgggagcatggctttccctgagccaaagccgcggcctccagagctgccgcagaaacggttgaagacgctggactgcgggcagggggcagtgcgagccgtacgatttaatgtggatggcaattactgcctgacgtgcggcagtgacaagacgctgaagctgtggaacccgcttcgggggacgctgctgcggacgtacagcggccacggctacgagctcctttgacaacagtagtctctgctccggcggcggggacaaggcggtggttctgtgggatgtggcatcagggcaggtcgtgcgcaaattccggggccacgcagggaaggtgaacacggtgcagtttaatgaagaggccacagttatcctgtccggctctattgattccagtatccgctgttgggattgccgctcacggaggcctgagccagtgcagacgctggatgaggccagagatggcgtgtccagtgtgaaggtgtcagaccacgagatcctggcaggctccgtggatggccgcgtgagacgctatgacctaaggatggggcagctcttctcagactacgtgggcagccccatcacctgcacctgcttcagccgggatgggcagtgcaccctggtgtccagcctggactccacattgcggctcctggacaaagacacaggggagctgctgggcgagtacaagggccataagaaccaggaatacaagctggactgctgcctgagcgagcgtgacacacatgtggtcagctgttctgaggacgggaaggtgttcttctgggacctggtggagggtgcgctggctctggccctgcctgtgggttccggtgtggtgcagtcgctggcctaccacccaacagagccctgcctgctgaccgccatgggaggcagcgtccagtgctggcgagaggaggcctatgaggcagaggatggagcaggctgaagccaggggacccaccaacaggaccaaggaccgagacacagacatggaaggacttcagataccatcttattctagagacgtagctgaccaaaaagtaggggaggggctgggtctgcaaattaataaatagaagagggggtaagaccttcctgggaccgc

SEQ ID NO: 200016 - DNA, 632 bp, Homo sapiens
  Payload ID: 19453
  Gene Name: WD repeat domain 83
  ENST ID: ENST00000547797
  CDS Start-End: 1-632
cagggcaggtcgtgcgcaaattccggggccacgcagggaaggtgaacacggtgcagtttaatgaagaggccacagttatcctgtccggctctattgattccagtatccgctgttgggattgccgctcacggaggcctgagccagtgcagacgctggatgaggccagagatggcgtgtccagtgtgaaggtgtcagaccacgagatcctggcaggcagggcgtggtggtgcatgcctgtattcccatctactcgggaggctgaggaaggagaatctcttgaacccgggaggcagaggttccgctccgtggatggccgcgtgagacgctatgacctaaggatggggcagctcttctcagactacgtgggcagccccatcacctgcacctgcttcagccgggatgggcagtgcaccctggtgtccagcctggactccacattgcggctcctggacaaagacacaggggagctgctgggcgagtacaagggccataagaaccaggaatacaagctggactgctgcctgagcgagcgtgacacacatgtggtcagctgttctgaggacgggaaggtgttcttctgggacctggtggagggtgcgctggctctggccctgcctgtgggttccggtgtg

SEQ ID NO: 200017 - DNA, 1039 bp, Homo sapiens
  Payload ID: 19453
  Gene Name: WD repeat domain 83
  ENST ID: ENST00000553179
  CDS Start-End: 320-535
gaggctgtagccctgggcaatcccgggggtcgttacaggaaggtaggaaaatgccaccctcagggcactggttgggctaaaggtgacactggcgtctcacgggctatgaagacggaatgcctcttaatgccggaattccaagacggaatgcctcttaatgccgggcaagtctcacatgaagctactcatcatttgcttcgtgtcctccgagctccgagagttggcaaagctgatgaaggagcagtagacagcgacccaagcacaccacttcagctagggaaagaccgatttaaggctgcaaggaaggagtcctgggagcatggctttccctgagccaaagccgcggcctccagagctgccgcagaaacggttgaagacgctggactgcgggcagggggcagtgcgagccgtacgatttaatgtggatggcaattactgcctgacgtgcggcagtgacaagacgctgaagctgtggaacccgcttcgggggacgctgctgcggacgtacagcggccacggctacgagctcctttgacaacagtagtctctgctccggcggcggggacaaggcggtggttctgtgggatgtggcatcagggcaggtcgtgcgcaaattccggggccacgcagggtcctccaaagtccagcctcctctgagtggcaataactttctcagaaggtgaacacggtgcagtttaatgaagaggccacagttatcctgtccggctctattgattccagtatccgctgttgggattgccgctcacggaggcctgagccagtgcagacgctggatgaggccagagatggcgtgtccagtgtgaaggtgtcagaccacgagatcctggcaggctccgtggatggccgcgtgagacgctatgacctaaggatggggcagctcttctcagactacgtgggcagccccatcacctgcacctgcttcagccgggatgggcagtgcaccctggtgtccagcctggactccacattgcggctcctggacaaagacacaggggagctgctgggcgagtacaagggc

SEQ ID NO: 200018 - DNA, 599 bp, Homo sapiens
  Payload ID: 19454
  Gene Name: WD repeat domain 83 opposite strand
  ENST ID: ENST00000222190
  CDS Start-End: 1-315
atgtccactaacaatatgtcggacccacggaggccgaacaaagtgctgaggtacaagcccccgccgagcgaatgtaacccggccttggacgacccgacgccggactacatgaacctgctgggcatgatcttcagcatgtgcggcctcatgcttaagtggtgtgcttgggtcgctgtctactgctccttcatcagctttgccaactctcggagctcggaggacacgaagcaaatgatgagtagcttcatgctgtccatctctgccgtggtgatgtcctatctgcagaatcctcagcccatgacgcccccatggtgataccagcctagaagggtcacattttggaccctgtctatccactaggcctgggctttggctgctaaacctgctgccttcagctgccatcctggacttccctgaatgaggccgtctcggtgcccccagctggatagagggaacctggccctttcctagggaacaccctaggcttacccctcctgcctcccttcccctgcctgctgctgggggagatgctgtccatgtttctaggggtattcatttgctttctcgttgaaacctgttgttaataaagtttttcactc

SEQ ID NO: 200019 - DNA, 2562 bp, Homo sapiens
  Payload ID: 19454
  Gene Name: WD repeat domain 83 opposite strand
  Uniprot ID: Q9Y284
  ENST ID: ENST00000596731
  CDS Start-End: 1954-2274
tttagaaatcattttatctttttttttttgagatggagtctcactttgtcgcccaggctggagtgcagtggcacaatctcggctcactgcaacctccaactcccgggttcaggcgattctcctgcctccgcctcccgagtggctgggattacaggctcccgtcaccacacctggctaatttttgcatttttagtagagacggggtttcaccatgttggccaggctgatctcaacctcctgacctcaagtgatctgcccaccttggcctcccaaagtgctgggattacaggtgtgagccaccgtgcccggccagattattattattttgtagacagtctgtctttcacccagcatggagtgcaatggtgcctcgaactcttggactcaagtgatccttccacttcagcctcccaagtagctgggattacagctgtgtgccactgtgcccagctgagagtaggttttaatctgagcatgggggcagctatgattccccgtagcacctggggtgagaccaggtcctggctccactcaccctgccaggatctcgtggtctgacaccttcacactggacacgccatctctggcctcatccagcgtctgcactggctcaggcctccgtgagcggcaatcccaacagcggatactggaatcaatagagcctgtgaggccagcatgatggtgaggtcaggtttggagggggagggcagcaccctgggcccccgtgcttaggccccagactcaccggacaggataactgtggcctcttcattaaactgcaccgtgttcaccttctgagaaagttattgccactcagaggaggctggactttggaggactgggataaaggcagggttcccagtgtcggttaaagcaagggcgaaggggaggtgaaaggttttgggggaacagcaaggacaggggttggtgactgcctagcctggcatgcggagtgggggatcgtcatctggggaagggatccttacggtgtaatgggggtggccgtgtcaccacctatgcgctaatacgggtcccctccactcaaatgagggtctccaggctttcactcacccctgcgtggccccggaatttgcgcacgacctgccctgatgccacatcccacagaaccaccgccttgtccccgccgccggagcagagactactgttgtcaaaggagctggagtaaaggaggaggaggatcagcatcgacctcggatcccagcctcagcgctcccatcccagcctggtccccggctcacccggccgcatccagcacctcgtagccgtggccgctgtacgtccgcagcagcgtcccccgaagcgggttccacagcttcagcgtcttgtcactgccgcacgtcaggcagtaattgccatccactggggaacaccaggcgggggttactgggccgtcgatctcaggaggcgggaggaggacccggaatgaagacgaaggcgctcaccattaaatcgtacggctcgcactgccccctgcccgcagtccagcgtcttcaaccgtttctgcggcagctctggaggccgcggctttggctcagggaaagccatgctcccaggactccttccttgcagccttaaatcggtctgtacggaaaattccgcgccttagaaacccacgcttgggtgtaaccttattattgttcttcctgacctacttcctgtttatcacttccgggttcatcattttggcatttcggtgatcgggttggaactattgaagcccgctttcaggttcttttccccattttccctttgaaaggaagacttctggcttctcctaaatctccgttctctgggtaaggggagtccaagcctctgtcatgaggaacggaaatgcgagggcctcgggtgttactctaaaatccgccctcagcttgcacgccggaagctgcgattcctgcagcggaagaggcgtgatctggccttcgactcgctatgtccactaacaatatgtcggacccacggaggccgaacaaagtgctgaggtacaagcccccgccgagcgaatgtaacccggccttggacgacccgacgccggactacatgaacctgctgggcatgatcttcagcatgtgcggcctcatgcttaagctgaagtggtgtgcttgggtcgctgtctactgctccttcatcagctttgccaactctcggagctcggaggacacgaagcaaatgatgagtagcttcatgctgtccatctctgccgtggtgatgtcctatctgcagaatcctcagcccatgacgcccccatggtgataccagcctagaagggtcacattttggaccctgtctatccactaggcctgggctttggctgctaaacctgctgccttcagctgccatcctggacttccctgaatgaggccgtctcggtgcccccagctggatagagggaacctggccctttcctagggaacaccctaggcttacccctcctgcctcccttcccctgcctgctgctgggggagatgctgtccatgtttctaggggtattcatttgctttctcgttgaaacctgttgttaataaagtttttcactctggc

SEQ ID NO: 200020 - DNA, 627 bp, Homo sapiens
  Payload ID: 19454
  Gene Name: WD repeat domain 83 opposite strand
  ENST ID: ENST00000598732
  CDS Start-End: 1-256
gtccactaacaatatgtcggacccacggaggccgaacaaagtgctgaggtacaagcccccgccgagcgaatgtaacccggccttggacgacccgacgccggactacatgaacctgctgggcatgatcttcagcatgtgcggcctcatgcttaagctgaagtggtgtgcttgggtcgctgtctactgctccttcatcagctttgccaactctcggagctcggaggacacgaagcaaatgatgagtagcttcatgtgagacttgccctacagaacaagtgactcttgagtaaggggtggggggaccccagcctggccatcctagactgacacctctctcctgtctcaggctgtccatctctgccgtggtgatgtcctatctgcagaatcctcagcccatgacgcccccatggtgataccagcctagaagggtcacattttggaccctgtctatccactaggcctgggctttggctgctaaacctgctgccttcagctgccatcctggacttccctgaatgaggccgtctcggtgcccccagctggatagagggaacctggccctttcctagggaacaccctaggcttacccctcctgcctcccttcccctgcctgctgctgggggagat

SEQ ID NO: 200021 - DNA, 2023 bp, Homo sapiens
  Payload ID: 19455
  Gene Name: WD repeat domain 86
  Uniprot ID: Q86TI4
  ENST ID: ENST00000334493
  CDS Start-End: 432-1562
cggccggggagggcgcggggcgctcggcttcccgtgttcctctccccgccccagccccgtgggcgcgagaggaggcggggggctccttgtgcaccagagacgcagctgccttgttcgcccggtggggtgtggatcctccgagcggtgctgggaagggggttctctctgcccgcgcgcccaggactctacccagggcggaggtcccgagtgggccgccccccgcagcgccctgggttcgcgggcccagaggctggaggcagcggggagctagggtccttcaccctcccctcgccgcgtgcctccgcaggagtcgggctccccgttccccgcgatggccgcgggccgcagtcgtacggagccgccgcgcggaccccggggcgcccctccctagcggggcgcagctccttcttgttccccgccctgccagcgggatggggggcggcgggtcggccctgagggtctgcgccgaccaccgcgggggcatcaactggctgagcctgagccccgacgggcagcgcctgctgacgggcagcgaggacggcacggcccggctctggagcaccgcggacggccagtgctgcgcgctcctgcaaggacatgaaagctatgtgaccttctgccagctggaggatgaggctgccttcacatgcagcgccgactgcaccatcaggaggtgggacgtgctgaccgggcagtgtctgcaggtgtaccgaggacacacgtccatcgtgaacaggatcctggttgccaacaaccagctcttcagcagctcctatgaccggacagctcgggtctggagtgtggacaaggggcagatgtcccgggagttccggggccaccgcaactgcgtgctgaccctagcctactctgccccgtgggacctccccagcactccctgcgcggaggaggccgcggccggggggcttctggtgaccggcagcacagatggcacagccaaggtgtggcaggtggccagcggctgctgccaccagacgctgcggggccacacgggtgcagtgctgtgcctagtgctagacacgcccggccacacggccttcacaggcagcaccgacgccaccatccgtgcctgggacatcctgagtggggagcagctgcgggtgttccgggagcaccggggctccgtcatctgtctggagctggtgaaccgactcgtgtactctggcagcgcggacaggaccgtcaagtgctggctggcagacacaggggagtgtgtgcgcacgttcacggcccacagacgcaacgtgagcgccctcaagtaccacgcgggcaccttgttcacgggcagcggggacgcttgcgcccgggccttcgacgcgcagtctggagagctgcggagggtgttccggggccacacattcatcatcaactgcatccaggtgcacggccaggtgctctacaccgcctcgcacgacggcgccctgcgcctctgggacgtgcgcgggctccgaggtgccccgcggccccctccgcccatgcgcagcctctcgcggctcttcagcaacaaggtgggctgcgccgccgcgcccctgcagccggcctgatcccgcggggcccctgcagacgccagcccagacacccagcggctcccagagcgccccgccctgctacccgcggtggtggcgcccgatggccggcgaggggcgaggagcgaggaagcccgggcgggaggagagcccgtcgcaggcgtctggtttttctttggtggccaggaggcgctgggagcgggagtgctcgccctggggaccgcccccttttcccttttagggtggctcctgtcctccctccccatccctgacctggcgaaaggcctagtcctggggaccctcccacctcaggggctgcaggcggactgccccagctcccccagccccacgaaactgggcctttcctgctgagaggaagtgactttttacagaagccactgaacctggttattttggcaaatcgtccgtctcgagggccttggggggaactgaaatatacagcctgaacgttaaaagtg

SEQ ID NO: 200022 - DNA, 1428 bp, Homo sapiens
  Payload ID: 19455
  Gene Name: WD repeat domain 86
  Uniprot ID: Q86TI4
  ENST ID: ENST00000477459
  CDS Start-End: 357-1190
ttccccgtccccagcgaagtcggcgccggaactgccctaatggaaaccagccgccgggcgctccgggagggctcaggccgaccccggggtccattagaggcgccccaggccgagggagcccgcggcggctggaaggacatgaaagctatgtgaccttctgccagctggaggatgaggctgccttcacatgcagcgccgactgcaccatcaggaggtgggacgtgctgaccgggcagtgtctgcaggtgtaccgaggacacacgtccatcgtgaacaggatcctggttgccaacaaccagctcttcagcagctcctatgaccggacagctcgggtctggagtgtggacaaggggcagatgtcccgggagttccggggccaccgcaactgcgtgctgaccctagcctactctgccccgtgggacctccccagcactccctgcgcggaggaggccgcggccggggggcttctggtgaccggcagcacagatggcacagccaaggtgtggcaggtggccagcggctgctgccaccagacgctgcggggccacacgggtgcagtgctgtgcctagtgctagacacgcccggccacacggccttcacaggcagcaccgacgccaccatccgtgcctgggacatcctgagtggggagcagctgcgggtgttccgggagcaccggggctccgtcatctgtctggagtgttcacgggcagcggggacgcttgcgcccgggccttcgacgcgcagtctggagagctgcggagggtgttccggggccacacattcatcatcaactgcatccaggtgcacggccaggtgctctacaccgcctcgcacgacggcgccctgcgcctctgggacgtgcgcgggctccgaggtgccccgcggccccctccgcccatgcgcagcctctcgcggctcttcagcaacaaggtgggctgcgccgccgcgcccctgcagccggcctgatcccgcggggcccctgcagacgccagcccagacacccagcggctcccagagcgccccgccctgctacccgcggtggtggcgcccgatggccggcgaggggcgaggagcgaggaagcccgggcgggaggagagcccgtcgcaggcgtctggtttttctttggtggccaggaggcgctgggagcgggagtgctcgccctggggaccgcccccttttcccttttagggtggctcctgtcctccctccccatccctgacctggcgaaaggcctagtcctggggaccctcccacctcaggggctgcaggcggactgccccagctcccccagccccacgaaactgggcctttcctgctgagaggaagtgactttttacagaagccactgaacctggttattttggcaaatcgtccgtctcgagggccttggggggaactgaaatatacagcctgaacgttaaaagtg

SEQ ID NO: 200023 - DNA, 1691 bp, Homo sapiens
  Payload ID: 19455
  Gene Name: WD repeat domain 86
  Uniprot ID: Q86TI4
  ENST ID: ENST00000469830
  CDS Start-End: 43-1491
agcggggcgcagctccttcttgttccccgccctgccagcgggatggggggcggcgggtcggccctgagggtctgcgccgaccaccgcgggggcatcaactggctgagcctgagccccgacgggcagcgcctgctgacgggcagcgaggacggcacggcccggctctggagcaccgcggacggccagtgctgcgcgctcctgcaaggacatgaaagctatgtgaccttctgccagctggaggatgaggctgccttcacatgcagcgccgactgcaccatcaggaggtgggacgtgctgaccgggcagtgtctgcaggtgtaccgaggacacacgtccatcgtgaacaggatcctggttgccaacaaccagctcttcagcagctcctatgaccggacagctcgggtctggagtgtggacaaggggcagatgtcccgggagttccggggccaccgcaactgcgtgctgaccctagcctactctgccccgtgggacctccccagcactccctgcgcggaggaggccgcggccggggggcttctggtgaccggcagcacagatggcacagccaaggtgtggcaggtggccagcggctgctgccaccagacgctgcggggccacacgggtgcagtgctgtgcctagtgctagacacgcccggccacacggccttcacaggcagcaccgacgccaccatccgtgcctgggacatcctgagtggggagcagctgcgggtgttccgggagcaccggggctccgtcatctgtctggagagggagaggtctggggggcttcagagctgccccagctgccgaccttccctgctcctcctcgcagctggtgaaccgactcgtgtactctggcagcgcggacaggaccgtcaagtgctggctggcagacacaggggagtgtgtgcgcacgttcacggcccacagacgcaacgtgagcgccctcaagtaccacgcgggcaccttgttcacgggcagcggggacgcttgcgcccgggccttcgacgcgcagtctggagagctgcggagggtgttccggggccacacattcatcatcaactgcatccaggtgcacggccaggtgctctacaccgcctcgcacgacggcgccctgcgcctctgggacgtgcgcgggctccgaggtgccccgcggccccctccgcccatgcgcagcctctcgcggctcttcagcaacaaggtgggctgcgccgccgcgcccctgcagccggcctgatcccgcggggcccctgcagacgccagcccagacacccagcggctcccagagcgccccgccctgctacccgcggtggtggcgcccgatggccggcgaggggcgaggagcgaggaagcccgggcgggaggagagcccgtcgcaggcgtctggtttttctttggtggccaggaggcgctgggagcgggagtgctcgccctggggaccgcccccttttcccttttagggtggctcctgtcctccctccccatccctgacctggcgaaaggcctagtcctggggaccctcccacctcaggggctgcaggcggactgccccagctcccccagccccacgaaactgggcctttcctgctgagaggaagtgactttttacagaagccactgaacctggttattttggcaaatcgtccgtctcgagggccttggggggaactgaaatatacagcctgaacgtt

SEQ ID NO: 200024 - DNA, 1542 bp, Homo sapiens
  Payload ID: 19455
  Gene Name: WD repeat domain 86
  ENST ID: ENST00000621812
  CDS Start-End: 335-1081
gcgccggaactgccctaatggaaaccagccgccgggcgctccgggagggctcaggccgaccccggggtccattagaggcgccccaggccgagggagcccgcggcggctggaaggacatgaaagctatgtgaccttctgccagctggaggatgaggctgccttcacatgcagcgccgactgcaccatcaggaggtgggacgtgctgaccgggcagtgtctgcaggtgtaccgaggacacacgtccatcgtgaacaggatcctggttgccaacaaccagctcttcagcagctcctatgaccggacagctcgggtctggagtgtggacaaggggcagatgtcccgggagttccggggccaccgcaactgcgtgctgaccctagcctactctgccccgtgggacctccccagcactccctgcgcggaggaggccgcggccggggggcttctggtgaccggcagcacagatggcacagccaaggtgtggcaggtggccagcggctgctgccaccagacgctgcggggccacacgggtgcagtgctgtgcctagtgctagacacgcccggccacacggccttcacaggcagcaccgacgccaccatccgtgcctgggacatcctgagtggggagcagctgcgggtgttccgggagcaccggggctccgtcatctgtctggagctggtgaaccgactcgtgtactctggcagcgcggacaggaccgtcaagtgctggctggcagacacaggggagtgtgtgcgcacgttcacggcccacagacgcaacgtgagcgccctcaagtaccacgcgggcaccttgttcacgggcagcggggacgcttgcgcccgggccttcgacgcgcagtctggagagctgcggagggtgttccggggccacacattcatcatcaactgcatccaggtgcacggccaggtgctctacaccgcctcgcacgacggcgccctgcgcctctgggacgtgcgcgggctccgaggtgccccgcggccccctccgcccatgcgcagcctctcgcggctcttcagcaacaaggtgggctgcgccgccgcgcccctgcagccggcctgatcccgcggggcccctgcagacgccagcccagacacccagcggctcccagagcgccccgccctgctacccgcggtggtggcgcccgatggccggcgaggggcgaggagcgaggaagcccgggcgggaggagagcccgtcgcaggcgtctggtttttctttggtggccaggaggcgctgggagcgggagtgctcgccctggggaccgcccccttttcccttttagggtggctcctgtcctccctccccatccctgacctggcgaaaggcctagtcctggggaccctcccacctcaggggctgcaggcggactgccccagctcccccagccccacgaaactgggcctttcctgctgagaggaagtgactttttacagaagccactgaacctggttattttggcaaatcgtccgtctcgagggccttggggggaactgaaatatacagcctgaacgttaaaagtg

SEQ ID NO: 200025 - DNA, 1905 bp, Homo sapiens
  Payload ID: 19455
  Gene Name: WD repeat domain 86
  Uniprot ID: Q86TI4
  ENST ID: ENST00000628331
  CDS Start-End: 834-1667
accgtattgttccgcgctcggccggggagggcgcggggcgctcggcttcccgtgttcctctccccgccccagccccgtgggcgcgagaggaggcggggggctccttgtgcaccagagacgcagctgccttgttcgcccggtggggtgtggatcctccgagcggtgctgggaagggggttctctctgcccgcgcgcccaggactctacccagggcggaggtcccgagtgggccgccccccgcagcgccctgggttcgcgggcccagaggctggaggcagcggggagctagggtccttcaccctcccctcgccgcgtgcctccgcaggagtcgggctccccgttccccgcgatggccgcgggccgcagtcgtacggagccgccgcgcggaccccggggcgcccctccctagcggggcgcagctccttcttgttccccgccctgccagcgggatggggggcggcgggtcggccctgagggtctgcgccgaccaccgcgggggcatcaactggctgagcctgagccccgacgggcagcgcctgctgacgggcagcgaggacggcacggcccggctctggagcaccgcggacggccagtgctgcgcgctcctgcaaggacatgaaagctatgtgaccttctgccagctggaggatgaggctgccttcacatgcagcgccgactgcaccatcaggaggtgggacgtgctgaccgggcagtgtctgcaggtgtaccgaggacacacgtccatcgtgaacaggatcctggttgccaacaaccagctcttcagcagctcctatgaccggacagctcgggtctggagtgtggacaaggggcagatgtcccgggagttccggggccaccgcaactgcgtgctgaccctagcctactctgccccgtgggacctccccagcactccctgcgcggaggaggccgcggccggggggcttctggtgaccggcagcacagatggcacagccaaggtgtggcaggtggccagcggctgctgccaccagacgctgcggggccacacgggtgcagtgctgtgcctagtgctagacacgcccggccacacggccttcacaggcagcaccgacgccaccatccgtgcctgggacatcctgagtggggagcagctgcgggtgttccgggagcaccggggctccgtcatctgtctggagtgttcacgggcagcggggacgcttgcgcccgggccttcgacgcgcagtctggagagctgcggagggtgttccggggccacacattcatcatcaactgcatccaggtgcacggccaggtgctctacaccgcctcgcacgacggcgccctgcgcctctgggacgtgcgcgggctccgaggtgccccgcggccccctccgcccatgcgcagcctctcgcggctcttcagcaacaaggtgggctgcgccgccgcgcccctgcagccggcctgatcccgcggggcccctgcagacgccagcccagacacccagcggctcccagagcgccccgccctgctacccgcggtggtggcgcccgatggccggcgaggggcgaggagcgaggaagcccgggcgggaggagagcccgtcgcaggcgtctggtttttctttggtggccaggaggcgctgggagcgggagtgctcgccctggggaccgcccccttttcccttttagggtggctcctgtcctccctccccatccctgacctggcgaaaggcctagtcctggggaccctcccacctcaggggctgcaggcggactgccccagctcccccagccccacgaaactgggcctttcctgctgagaggaagtgactttttacagaagccactgaacctggttattttggcaaatcgtccgtctcgagggccttggggggaactgaaatatacagcctgaacgttaaaagtg

SEQ ID NO: 200026 - DNA, 8847 bp, Homo sapiens
  Payload ID: 19456
  Gene Name: WD repeat domain 87
  Uniprot ID: Q6ZQQ6
  ENST ID: ENST00000303868
  CDS Start-End: 226-8847
acgcgcgttcagacccctggcctcgggaagtccgccggctgcggggttgggggccaaccgttctgtgggcggagtcctctcgcaacatccgccaggtagcttcttagttgctgcccctagctctaggagctcctgagtgcacacgccgtacccgtcccttgtcgggaatcctgtcgcaggtttttaagcaacagtcctcaggagggccaagggagtctgacggtgatgtcttcccccaggctcattcccctgtggaaagatttaaaactcctcctaaatgacaccataaataaaagcaagcaaccttcggaagacccaaagaactgcctgattgtgctgagtgaccggtcccaggctgtagcatggatgaagagcaaaactgaggacatggttgagaaaagaacattctccatgactgaacgattgccacccatccagtccatggtccatgcaggctcctttcatatcctcgtggtctactgtggtgacctgatcctgcgactctttggggaccactttcgggcattcaaacccctgggtaaagtgccctgccgcttcaacatcagctgcctctgctatgacccggaaatgaagatgcttctgtctggcatcctgggggcagtggtgacctgggtcattgagctaggtggcacgggcctccaaatagcccacatggtctccatgccaggtgatgagcttgtccaggacatcgtgctgaatggtcccagtggctccctcctggccctgtgtgagacggtggtgagggtccttatgcaccagggcaagggccagctgggagaggtaaagaggttcacgtccaccagcagcggctcctccatcacctgctgcttcacctgttttgatcagggctttctctatgctggaaaccaagctggggaaatccaagtttggagcctccagcagggccatccactccacagtttccaggcccatcaatcaggagtgatctgtatccgcagccgaccagaggcccacaccctgctaacagctggtagtgacagcctaatcaaggagtggaacctgacttcagggagcctgcttcggcggctagagcttggtgaggagctataccggctccagtttattgacagcattactttcttctgccaaactgcccatagtttttccttgcaccgcctgccctgcttctacagcctcttcaatgtctgtggctctgctccccagcagttgcgtcgggtctgctgtggaaataactggttccggatcctgtgtaccactgaggatggcttgttgcgctttgtgtccccagtaacaggggaccttctggttatcacctggcccttctcaatcctggaccaggctgtggattgggcctacgacccaggtaaagaggagctctttgtagcaacaggcagctcagaggttctggtatttgacacaacccgctgcccttgcccagccaagtatctcttaggcacctcaccaaattctcaggactttgtacaatgcctggcttatgggcatttcaacttggggcggggtctagagggactgatattctctgggcaccagagtggtgtgataagagtgctctcccagcacagctgtgctcgattagaaaaattcatgcactttggcgctgtactggcactctccacgctgtctggagggatttttggtggccaaggaaactctctgctctgttcctatggaatggatgactatgtgcacctgtcagaagctgtgcttgatggggtcaaagtacaactgcggcctctcgccagcattctcagcagctgtcacctaacacatctgatactcttgcccaagtctgtgggtgccatcacagagacaaactgcctgcgtctctggaagttccatgattttctgtcctctgggtcacagaatggcttgaaattcatagaaacactgcctctgcacctgtgtgccatcacatcctttgatgtctgcctctccttgagtctttttgtcacaggttctgccgatggctctgttcggatctgggacttccatggcagactcataggcattctggactcatcactgcactttggcccagtctgttttgcaaatgaccggggtgacctgcttgtgacttttaaccagagtctttacctagtgtcctgtttaaaattgcttcccccagccctgctgactcgcctttcctttatgagcatatcagatgaagtactggaagtccctaagcctttcataccaagcttcttcttctcctttgagaccatgtttgtgcccaagtacatctaccctggacaagcgcaacagaaattagtgggtctggagaaacttgtcaacaaccgggccattgcctttgaccattctgtgccacatgtgatagaagaagatgaggaagggagcccagtgttactgcgttcctccatgcattattctttgcaggacatggaagattggatgcaggtgagcaaacgttaccaatgccattatgtgcttcctccccagctacaactgactagctgggatggactcaacccctatcagatattgcgatactactttggtcatgggcgggaatggctttttgcccctgactgctatatccccaattcagtgattcgtgcccgtctttggccagagggcaccccaatatacctacagtgcaacctgcatgcaccccagcgggagctggaatgggacaggtctcaagaattctttttctggcacagcagggtaagagctataagtaatacagaatatccaaagaataaggaggaggatgaacacttcctagaaatgagactttccaaggatgtaacctacagtgtccttacagatggagcaaaccgaagttggctgggaagaaagatgagtgaaataaccattaatagcatgattgagacaatgctcaatattatggtccatgcttccttgctgaagtaccagtgctgtgttggtgcactagggcaaatctttgcctcttaccaggtgtccccagccctacgctctgagacagcccgtcggctactgaatgatacaaccaattccaacccgctgatccgagaactagcttgggaagggctgaagcgtctaggaatgattactcatctttttgccatgcctctggctcaaggattaatggacaaggatgaaagagtgaggatcaagaccctaagcctcatggctgagattggaatccactctaggacctcactcttacagctgacccaaaaacaagagacttttcgggagatgcagcagcagatgatcggggaggaacccctggaccatctactggggatgcgggccacagatctccaaatcctttccactcaagtggagcagagattgaatgaaaacctgaccctgtcacatagagatgaaaagccggctttttctttagatgtctcaatgccttctgaacttaaatcctccctgaaacctcctacagtttctgaagaatctgaagtggccatcaagcccagcaaaggccaaagacgaggccaagcaggggtcaaaaagcatagccaaaaatggttgcggggtctcaagaagacgaaagagagagactctaaacagatgagcacagagccaggcctcttagaggatgaaagtgggactgaggccgcaccaattgagatggaggaagcatccgtctattcccaatggtcttcaagcaccagtgtaataaagctctcaaaagatgttgattctcaagagaaagatatctcgaaggatcacattgcattgaccctgaagaggctgcagaaaatacgtgacaaaagagacaagaaagcaacagctcagaaactcaaaaagaagcacaaaaagaagggaaaagaagccaaagttataaatgaggaaactacacctcctgtaatggaacagccagttactaaaaaggttaaaatccaagggcggggagcctctggaatatctggccgcaggtcaaccgctggagatggctcatcatggagggacgatctatgtcgtcttatggccctgaggatatctggttcccaaacaaaaatgtcagaaaacctaaacgctgagctagtgacatttgctcaggagatgctggtagataggcaccccagctgggaactctttcaggagatctgccccctattgaagaaagaaagtaaggttctgcttgaggaccttgattgggatgtagtcccgccagagaagaaaccaatttttatccaggaaggagcaattagagaggacatgatacaaggtgtgacccaagaggtgatcagacacaaggaagtgatgccaagggaagaagaacaagcacaaaagaaagcaagagacatgctgggcttggaggaaacccaagtgattttgaaaaagggcaagaaagttatttttttagaaccaggtaatgtaaccatgggaaaagaaatatcaaagaaagaagagaagaaaacctttcagaagtcacctaagcaagggaggaaagctgtccagaaggaaagaaaagtaggaaaaataaagagggaaatgaccaaagaagagagggatatgagtgaggaagtggaggaaatggccacactagaggagaaagtggtcaaacaagaaggaaaactggttatgattgagaggacaccatcttggcaggactggaaaaaggcctgggatgagtggaaacaggtccatggtgagacaaggaaatcctggaaggcatggaaggaagaatgggagaagaggcttcttcaggaagaggagaaactacatcaggctggagagaagctatccccggaggaggaaatgcttcaggaggacaagaagctgaaatgggaggagtggaaacaagtctgggaaaatatgttatcatctaagtccaaggagcaacagtacaaggatgaggaagaagtgactttggaggaagaagtgtctcgggagggggaagaaaaagaacagcaggtcacagaagagcagagacacatccaagaagaacacaaatgggccagaatacacaggaaacgagcccgagctgaaaaaaaacgagcccaagaagagaggaaattagcacaagaagaagagaaacttgcacaagaagagagacagttggcccaggaagagagaaaactggcccaggcatacgtgaaaataacccaggatgacagggaaatggcccaggcagagggtaagtttgcccagaaagaggaaacactggcccaaagaggggagaagctaagccaggaggcggagaaattggcccagaaaaggaagaaactggccaagaaatgggagaaagtggctagagaagaagagaaactagcaaagaaaggagggaaactggctgaggtgaaaaacatattggcccagaaagtggaagaactgccccagagggaacaaaatctggactggcaagaaaaggagctggcccaggaattggaggaactggaatgggacatggaagaactgtcttggaaagaagaggaactgaatcaggaagaggggaaactggttgaggaaaagaagaaactggctgaggaagaggaggcattggcctggcaaagggagaaactgtctgaagaagagacaaaactggcccaggaagaagagttgctgatccaggaaaaggagaaactggcccagcacaaggaaaaaatgcctgaggaagaggaaagactgggacggaaaagggagcaattgattgagaagaagatgaaactggcccaaaaaagggaaagatggatcaacagcatggaagaactcacaaagaacaagatgatactgtaccagaagaagaatctggctcaggaaaagaagaatctggcccaggagaaggaaaaattggctcagaggaaagagaacctactctataataaagaaagactcacccacagcaaaaagcaattagtgcaagtaaagaacaaattgggaatgttcaacaagatactggctcaggtagaggagaagctgacacaggaaaaggagactgtgatcaagaagaaggagaaactggctgaaacagagaaaaaattggtccaagtagaggatagtttggccaaaaaacaggagaaattggcccaggaaaaaatgaaattagctctggagaaggcaatggtccaaggaaagaaacggctcagaggagagttggatattgctaaggaagaaaaggcattgaacctggaaatgaaaagactggctgaggagaagatgagactggttgagggaaaagaaacactgtctaagggagagactccagaaacttctagacaaaggaaaatgactcaagttgaacaagaactatttgagagaaaattgtcactagaggagaagatactgctacatgaagacaggatattggccatggaggaaagcgaaattgccaaaggaaaactggaatttactagaggacagagaatatttgtccaggggcaaagaaagttagccaaggcttcaaggaagttgattaaaaaaagggagagcctttccaaggaaccagcaaaactgaacaaaatcttaaaggcacttcaaaaactaaccagggatgaaaggaaactaacacaggaagaaataaaaatgacaaagatgaagagggcactctttgttaaggagcgcaggttgagtatagaacagagtaagctggatatcaaagagtgggatttttctgaaaaacgatcagaactgactaaagatgagaagaaactggctcggaagcagagaaaactggccaacaaaatgagaagaatgataaacaaagaagaaaaaatgactgaggaagagagcaaattggccagaaagcattcagaagtcatactggatgatgaagaggaaggaggaatagaagaagaagaggtaatcccattccttaaacgaaggtggagaaagaggaaagaggccaagagaggtgacaaaccaaaagaaaagttttccagtcaagtggatgaagtggaaagtgaagagcatttttctgaagaaatggaaagcctgttagatgaactagaaaagcaagagagtttgtcttctgaggaggaggaggaaagggaggaagaagaggaaagggaggaggaggaggaaagggaggaggaggaggaaaggaaggaggaggaggaaggggaggagaagcaagtggagaaagaagaggaggagaagaagaagaagaaaaaggaaaagaagaaggaggaggttcaggagaaggaagaagtgtttgaggagaaagaagaaattatgagtgaggaagagacagaaagtttgagtgacgaggaagaggaagaggagagctgctcattggaagaagaggtggacagggaaaaagagatcttaaaaaaagaaaaacaatttaagttacaagaacaaagaagaaagagcctaagaggaagggaaagagtcctttccattttaagaggagttcctcatggcaaaggcagggctataagactaggagttctaaaaagccctttgaagaaactgatgtcaacagctctggagatgaaagagaaaacaccagtgccagtgccggagaaacaaatatcctgggaagataaaaaggccacagtagttgaaatacccaggaaattcttagggacaatggataaagaaagagaagtgatgggaaaatatgaacccatacctccacatgttttgggtacagttttggagtcccaagcacaggacttaaagaccccatttatgtcccacatattaaggaggaccgtggaagctgaggaactccaacacaaaccactaggtgcctggtggaagtggtttttgcagcatccacctctgatgggacagactgaggtacagttacctctctcccaaatcccagctaaggaacaacatgcagacgtaagcctctcagatgtagagtggatccgccatgtcctagaacgaatggaagcgggagaacagctttccagggatggtttccatagactgtgccagctgctcaaagaccttgcctcaaagggaaacttagaatggctgcatctggccaaacatgaagccattgtgtaccgtcacagacaggccctggagtcacaagacacaaggatctcaagtagacagtccatgagtccaaaatacctgaaagtgattcctcctataaaagcaaaggaaaaggagagctggccaaaacctttggctgtccccacacaaaagtccccattagctaccaagaggattccagacccaagggctaaaaattggcatcttctaggagaaccttacagaagtgagagggcacagcagatatccattgctcacaaggagatggaaatgcaatacttttatcctgccaccagagacatttttccaagtgcccatgcctctgtggaaaaacaaaccctggcactgatgtttcaaaaggacttctgggattttaaggataaacgcaggtttcctaaactgcccaagttagagaagaagacacagcccatttctaaaaaaaaggaagagttgcctttgtgggagacatttgtggcactgtaccatgttttgcggatgctgcagcagcgatatccaaaagacagcactgcttggatggaacagttctaccagctcatggacctgtaccaacttaagtcccccagaatccagaagctgcttcaggagctgctaatgagagaggaacctcaaccccaagagatcatctacgaagaggccctaaaagccacagagctagttcccggggaacggctgttctgctgcctgttttgtggcagttctcatactcctagaagtcctcaggagttccagggtgcggtacccctcccatggcagaactgtgtgcgcaccatccttcccgtgggcattgcccggtatgggatcttagaacttgcctggaagagcctgcctgaagctgatcttcatctcaccaaggcactgacacacaccgttgctcccactctctaa

SEQ ID NO: 200027 - DNA, 9009 bp, Homo sapiens
  Payload ID: 19456
  Gene Name: WD repeat domain 87
  ENST ID: ENST00000447313
  CDS Start-End: 162-8900
gtgggcggagtcctctcgcaacatccgccaggtagcttcttagttgctgcccctagctctaggagctcctgagtgcacacgccgtacccgtcccttgtcgggaatcctgtcgcaggtttttaagcaacagtcctcaggagggccaagggagtctgacggtgatgtcttcccccaggctcattcccctgtggaaagatttaaaactcctcctaaatgacaccataaataaaagcaagcaaccttcggaagacccaaagaactgcctgattgtgctgagtgaccggtcccaggtactgttcaaagagtctcgctatcctcaaaatatgccgtgtgtatgctattacttcagtgatgcccacttcttcgcctccctctcttgggtgacatcaaacacaaaagaaatacaagctgtagcatggatgaagagcaaaactgaggacatggttgagaaaagaacattctccatgactgaacgattgccacccatccagtccatggtccatgcaggctcctttcatatcctcgtggtctactgtggtgacctgatcctgcgactctttggggaccactttcgggcattcaaacccctgggtaaagtgccctgccgcttcaacatcagctgcctctgctatgacccggaaatgaagatgcttctgtctggcatcctgggggcagtggtgacctgggtcattgagctaggtggcacgggcctccaaatagcccacatggtctccatgccaggtgatgagcttgtccaggacatcgtgctgaatggtcccagtggctccctcctggccctgtgtgagacggtggtgagggtccttatgcaccagggcaagggccagctgggagaggtaaagaggttcacgtccaccagcagcggctcctccatcacctgctgcttcacctgttttgatcagggctttctctatgctggaaaccaagctggggaaatccaagtttggagcctccagcagggccatccactccacagtttccaggcccatcaatcaggagtgatctgtatccgcagccgaccagaggcccacaccctgctaacagctggtagtgacagcctaatcaaggagtggaacctgacttcagggagcctgcttcggcggctagagcttggtgaggagctataccggctccagtttattgacagcattactttcttctgccaaactgcccatagtttttccttgcaccgcctgccctgcttctacagcctcttcaatgtctgtggctctgctccccagcagttgcgtcgggtctgctgtggaaataactggttccggatcctgtgtaccactgaggatggcttgttgcgctttgtgtccccagtaacaggggaccttctggttatcacctggcccttctcaatcctggaccaggctgtggattgggcctacgacccaggtaaagaggagctctttgtagcaacaggcagctcagaggttctggtatttgacacaacccgctgcccttgcccagccaagtatctcttaggcacctcaccaaattctcaggactttgtacaatgcctggcttatgggcatttcaacttggggcggggtctagagggactgatattctctgggcaccagagtggtgtgataagagtgctctcccagcacagctgtgctcgattagaaaaattcatgcactttggcgctgtactggcactctccacgctgtctggagggatttttggtggccaaggaaactctctgctctgttcctatggaatggatgactatgtgcacctgtcagaagctgtgcttgatggggtcaaagtacaactgcggcctctcgccagcattctcagcagctgtcacctaacacatctgatactcttgcccaagtctgtgggtgccatcacagagacaaactgcctgcgtctctggaagttccatgattttctgtcctctgggtcacagaatggcttgaaattcatagaaacactgcctctgcacctgtgtgccatcacatcctttgatgtctgcctctccttgagtctttttgtcacaggttctgccgatggctctgttcggatctgggacttccatggcagactcataggcattctggactcatcactgcactttggcccagtctgttttgcaaatgaccggggtgacctgcttgtgacttttaaccagagtctttacctagtgtcctgtttaaaattgcttcccccagccctgctgactcgcctttcctttatgagcatatcagatgaagtactggaagtccctaagcctttcataccaagcttcttcttctcctttgagaccatgtttgtgcccaagtacatctaccctggacaagcgcaacagaaattagtgggtctggagaaacttgtcaacaaccgggccattgcctttgaccattctgtgccacatgtgatagaagaagatgaggaagggagcccagtgttactgcgttcctccatgcattattctttgcaggacatggaagattggatgcaggtgagcaaacgttaccaatgccattatgtgcttcctccccagctacaactgactagctgggatggactcaacccctatcagatattgcgatactactttggtcatgggcgggaatggctttttgcccctgactgctatatccccaattcagtgattcgtgcccgtctttggccagagggcaccccaatatacctacagtgcaacctgcatgcaccccagcgggagctggaatgggacaggtctcaagaattctttttctggcacagcagggtaagagctataagtaatacagaatatccaaagaataaggaggaggatgaacacttcctagaaatgagactttccaaggatgtaacctacagtgtccttacagatggagcaaaccgaagttggctgggaagaaagatgagtgaaataaccattaatagcatgattgagacaatgctcaatattatggtccatgcttccttgctgaagtaccagtgctgtgttggtgcactagggcaaatctttgcctcttaccaggtgtccccagccctacgctctgagacagcccgtcggctactgaatgatacaaccaattccaacccgctgatccgagaactagcttgggaagggctgaagcgtctaggaatgattactcatctttttgccatgcctctggctcaaggattaatggacaaggatgaaagagtgaggatcaagaccctaagcctcatggctgagattggaatccactctaggacctcactcttacagctgacccaaaaacaagagacttttcgggagatgcagcagcagatgatcggggaggaacccctggaccatctactggggatgcgggccacagatctccaaatcctttccactcaagtggagcagagattgaatgaaaacctgaccctgtcacatagagatgaaaagccggctttttctttagatgtctcaatgccttctgaacttaaatcctccctgaaacctcctacagtttctgaagaatctgaagtggccatcaagcccagcaaaggccaaagacgaggccaagcaggggtcaaaaagcatagccaaaaatggttgcggggtctcaagaagacgaaagagagagactctaaacagatgagcacagagccaggcctcttagaggatgaaagtgggactgaggccgcaccaattgagatggaggaagcatccgtctattcccaatggtcttcaagcaccagtgtaataaagctctcaaaagatgttgattctcaagagaaagatatctcgaaggatcacattgcattgaccctgaagaggctgcagaaaatacgtgacaaaagagacaagaaagcaacagctcagaaactcaaaaagaagcacaaaaagaagggaaaagaagccaaagttataaatgaggaaactacacctcctgtaatggaacagccagttactaaaaaggttaaaatccaagggcggggagcctctggaatatctggccgcaggtcaaccgctggagatggctcatcatggagggacgatctatgtcgtcttatggccctgaggatatctggttcccaaacaaaaatgtcagaaaacctaaacgctgagctagtgacatttgctcaggagatgctggtagataggcaccccagctgggaactctttcaggagatctgccccctattgaagaaagaaagtaaggttctgcttgaggaccttgattgggatgtagtcccgccagagaagaaaccaatttttatccaggaaggagcaattagagaggacatgatacaaggtgtgacccaagaggtgatcagacacaaggaagtgatgccaagggaagaagaacaagcacaaaagaaagcaagagacatgctgggcttggaggaaacccaagtgattttgaaaaagggcaagaaagttatttttttagaaccaggtaatgtaaccatgggaaaagaaatatcaaagaaagaagagaagaaaacctttcagaagtcacctaagcaagggaggaaagctgtccagaaggaaagaaaagtaggaaaaataaagagggaaatgaccaaagaagagagggatatgagtgaggaagtggaggaaatggccacactagaggagaaagtggtcaaacaagaaggaaaactggttatgattgagaggacaccatcttggcaggactggaaaaaggcctgggatgagtggaaacaggtccatggtgagacaaggaaatcctggaaggcatggaaggaagaatgggagaagaggcttcttcaggaagaggagaaactacatcaggctggagagaagctatccccggaggaggaaatgcttcaggaggacaagaagctgaaatgggaggagtggaaacaagtctgggaaaatatgttatcatctaagtccaaggagcaacagtacaaggatgaggaagaagtgactttggaggaagaagtgtctcgggagggggaagaaaaagaacagcaggtcacagaagagcagagacacatccaagaagaacacaaatgggccagaatacacaggaaacgagcccgagctgaaaaaaaacgagcccaagaagagaggaaattagcacaagaagaagagaaacttgcacaagaagagagacagttggcccaggaagagagaaaactggcccaggcatacgtgaaaataacccaggatgacagggaaatggcccaggcagagggtaagtttgcccagaaagaggaaacactggcccaaagaggggagaagctaagccaggaggcggagaaattggcccagaaaaggaagaaactggccaagaaatgggagaaagtggctagagaagaagagaaactagcaaagaaaggagggaaactggctgaggtgaaaaacatattggcccagaaagtggaagaactgccccagagggaacaaaatctggactggcaagaaaaggagctggcccaggaattggaggaactggaatgggacatggaagaactgtcttggaaagaagaggaactgaatcaggaagaggggaaactggttgaggaaaagaagaaactggctgaggaagaggaggcattggcctggcaaagggagaaactgtctgaagaagagacaaaactggcccaggaagaagagttgctgatccaggaaaaggagaaactggcccagcacaaggaaaaaatgcctgaggaagaggaaagactgggacggaaaagggagcaattgattgagaagaagatgaaactggcccaaaaaagggaaagatggatcaacagcatggaagaactcacaaagaacaagatgatactgtaccagaagaagaatctggctcaggaaaagaagaatctggcccaggagaaggaaaaattggctcagaggaaagagaacctactctataataaagaaagactcacccacagcaaaaagcaattagtgcaagtaaagaacaaattgggaatgttcaacaagatactggctcaggtagaggagaagctgacacaggaaaaggagactgtgatcaagaagaaggagaaactggctgaaacagagaaaaaattggtccaagtagaggatagtttggccaaaaaacaggagaaattggcccaggaaaaaatgaaattagctctggagaaggcaatggtccaaggaaagaaacggctcagaggagagttggatattgctaaggaagaaaaggcattgaacctggaaatgaaaagactggctgaggagaagatgagactggttgagggaaaagaaacactgtctaagggagagactccagaaacttctagacaaaggaaaatgactcaagttgaacaagaactatttgagagaaaattgtcactagaggagaagatactgctacatgaagacaggatattggccatggaggaaagcgaaattgccaaaggaaaactggaatttactagaggacagagaatatttgtccaggggcaaagaaagttagccaaggcttcaaggaagttgattaaaaaaagggagagcctttccaaggaaccagcaaaactgaacaaaatcttaaaggcacttcaaaaactaaccagggatgaaaggaaactaacacaggaagaaataaaaatgacaaagatgaagagggcactctttgttaaggagcgcaggttgagtatagaacagagtaagctggatatcaaagagtgggatttttctgaaaaacgatcagaactgactaaagatgagaagaaactggctcggaagcagagaaaactggccaacaaaatgagaagaatgataaacaaagaagaaaaaatgactgaggaagagagcaaattggccagaaagcattcagaagtcatactggatgatgaagaggaaggaggaatagaagaagaagaggtaatcccattccttaaacgaaggtggagaaagaggaaagaggccaagagaggtgacaaaccaaaagaaaagttttccagtcaagtggatgaagtggaaagtgaagagcatttttctgaagaaatggaaagcctgttagatgaactagaaaagcaagagagtttgtcttctgaggaggaggaggaaagggaggaagaagaggaaagggaggaggaggaggaaagggaggaggaggaggaaaggaaggaggaggaggaaggggaggagaagcaagtggagaaagaagaggaggagaagaagaagaagaaaaaggaaaagaagaaggaggaggttcaggagaaggaagaagtgtttgaggagaaagaagaaattatgagtgaggaagagacagaaagtttgagtgacgaggaagaggaagaggagagctgctcattggaagaagaggtggacagggaaaaagagatcttaaaaaaagaaaaacaatttaagttacaagaacaaagaagaaagagcctaagaggaagggaaagagtcctttccattttaagaggagttcctcatggcaaaggcagggctataagactaggagttctaaaaagccctttgaagaaactgatgtcaacagctctggagatgaaagagaaaacaccagtgccagtgccggagaaacaaatatcctgggaagataaaaaggccacagtagttgaaatacccaggaaattcttagggacaatggataaagaaagagaagtgatgggaaaatatgaacccatacctccacatgttttgggtacagttttggagtcccaagcacaggacttaaagaccccatttatgtcccacatattaaggaggaccgtggaagctgaggaactccaacacaaaccactaggtgcctggtggaagtggtttttgcagcatccacctctgatgggacagactgaggtacagttacctctctcccaaatcccagctaaggaacaacatgcagacgtaagcctctcagatgtagagtggatccgccatgtcctagaacgaatggaagcgggagaacagctttccagggatggtttccatagactgtgccagctgctcaaagaccttgcctcaaagggaaacttagaatggctgcatctggccaaacatgaagccattgtgtaccgtcacagacaggccctggagtcacaagacacaaggatctcaagtagacagtccatgagtccaaaatacctgaaagtgattcctcctataaaagcaaaggaaaaggagagctggccaaaacctttggctgtccccacacaaaagtccccattagctaccaagaggattccagacccaagggctaaaaattggcatcttctaggagaaccttacagaagtgagagggcacagcagatatccattgctcacaaggagatggaaatgcaatacttttatcctgccaccagagacatttttccaagtgcccatgcctctgtggaaaaacaaaccctggcactgatgtttcaaaaggacttctgggattttaaggataaacgcaggtttcctaaactgcccaagttagagaagaagacacagcccatttctaaaaaaaaggaagagttgcctttgtgggagacatttgtggcactgtaccatgttttgcggatgctgcagcagcgatatccaaaagacagcactgcttggatggaacagttctaccagctcatggacctgtaccaacttaagtcccccagaatccagaagctgcttcaggagctgctaatgagagaggaacctcaaccccaagagatcatctacgaagaggccctaaaagccacagagctagttcccggggaacggctgttctgctgcctgttttgtggcagttctcatactcctagaagtcctcaggagttccagggtgcggtacccctcccatggcagaactgtgtgcgcaccatccttcccgtgggcattgcccggtatgggatcttagaacttgcctggaagagcctgcctgaagctgatcttcatctcaccaaggcactgacacacaccgttgctcccactctctaatttgggactgactggaggctgggacttttcattgccaactggagaaaggcctaattaccaggatctagaccttcatctctctctctctcttttttttttttttgagacg

SEQ ID NO: 200028 - DNA, 3788 bp, Homo sapiens
  Payload ID: 19456
  Gene Name: WD repeat domain 87
  ENST ID: ENST00000620076
  CDS Start-End: 726-2765
gtgggcggagtcctctcgcaacatccgccaggtagcttcttagttgctgcccctagctctaggagctcctgagtgcacacgccgtacccgtcccttgtcgggaatcctgtcgcaggtttttaagcaacagtcctcaggagggccaagggagtctgacggtgatgtcttcccccaggctcattcccctgtggaaagatttaaaactcctcctaaatgacaccataaataaaagcaagcaaccttcggaagacccaaagaactgcctgattgtgctgagtgaccggtcccaggtactgttcaaagagtctcgctatcctcaaaatatgccgtgtgtatgctattacttcagtgatgcccacttcttcgcctccctctcttgggtgacatcaaacacaaaagaaatacaagctgtagcatggatgaagagcaaaactgaggacatggttgagaaaagaacattctccatgactgaacgattgccacccatccagtccatggtccatgcaggctcctttcatatcctcgtggtctactgtggtgacctgatcctgcgactctttggggaccactttcgggcattcaaacccctgggtaaagtgccctgccgcttcaacatcagctgcctctgctatgacccggaaatgaagatgcttctgtctggcatcctgggggcagtggtgacctgggtcattgagctaggtggcacgggcctccaaatagcccacatggtctccatgccaggtgatgagcttgtccaggacatcgtgctgaatggtcccagtggctccctcctggccctgtgtgagacggtggtgagggtccttatgcaccagggcaagggccagctgggagaggtaaagaggttcacgtccaccagcagcggctcctccatcacctgctgcttcacctgttttgatcagggctttctctatgctggaaaccaagctggggaaatccaagtttggagcctccagcagggccatccactccacagtttccaggcccatcaatcaggagtgatctgtatccgcagccgaccagaggcccacaccctgctaacagctggtagtgacagcctaatcaaggagtggaacctgacttcagggagcctgcttcggcggctagagcttggtgaggagctataccggctccagtttattgacagcattactttcttctgccaaactgcccatagtttttccttgcaccgcctgccctgcttctacagcctcttcaatgtctgtggctctgctccccagcagttgcgtcgggtctgctgtggaaataactggttccggatcctgtgtaccactgaggatggcttgttgcgctttgtgtccccagtaacaggggaccttctggttatcacctggcccttctcaatcctggaccaggctgtggattgggcctacgacccaggtaaagaggagctctttgtagcaacaggcagctcagaggttctggtatttgacacaacccgctgcccttgcccagccaagtatctcttaggcacctcaccaaattctcaggactttgtacaatgcctggcttatgggcatttcaacttggggcggggtctagagggactgatattctctgggcaccagagtggtgtgataagagtgctctcccagcacagctgtgctcgattagaaaaattcatgcactttggcgctgtactggcactctccacgctgtctggagggatttttggtggccaaggaaactctctgctctgttcctatggaatggatgactatgtgcacctgtcagaagctgtgcttgatggggtcaaagtacaactgcggcctctcgccagcattctcagcagctgtcacctaacacatctgatactcttgcccaagtctgtgggtgccatcacagagacaaactgcctgcgtctctggaagttccatgattttctgtcctctgggtcacagaatggcttgaaattcatagaaacactgcctctgcacctgtgtgccatcacatcctttgatgtctgcctctccttgagtctttttgtcacaggttctgccgatggctctgttcggatctgggacttccatggcagactcataggcattctggactcatcactgcactttggcccagtctgttttgcaaatgaccggggtgacctgcttgtgacttttaaccagagtctttacctagtgtcctgtttaaaattgcttcccccagccctgctgactcgcctttcctttatgagcatatcagatgaagtactggaagtccctaagcctttcataccaagcttcttcttctcctttgagaccatgtttgtgcccaagtacatctaccctggacaagcgcaacagaaattagtgggtctggagaaacttgtcaacaaccgggccattgcctttgaccattctgtgccacatgtgatagaagaagatgaggaagggagcccagtgttactgcgttcctccatgcattattctttgcaggacatggaagattggatgcaggtgagcaaacgttaccaatgccattatgtgcttcctccccagctacaactgactagctgggatggactcaacccctatcagatattgcgatactactttggtcatgggcgggaatggctttttgcccctgactgctatatccccaattcagtgattcgtgcccgtctttggccagagggcaccccaatatacctacagtgcaacctgcatgcaccccagcgggagctggaatgggacaggtctcaaaattctttttctggcacagcagggtaagagctataagtaatacagaatatccaaagaataaggaggaggatgaacacttcctagaaatgagactttccaaggatgtaacctacagtgtccttacagatggagcaaaccgaagttggctgggaagaaagatgagtgaaataaccattaatagcatgattgagacaatgctcaatattatggtccatgcttccttgctgaagtaccagtgctgtgttggtgcactagggcaaatctttgcctcttaccaggtgtccccagccctacgctctgagacagcccgtcggctactgaatgatacaaccaattccaacccgctgatccgagaactagcttgggaagggctgaagcgtctaggaatgattactcatctttttgccatgcctctggctcaaggattaatggacaaggatgaaagagtgaggatcaagaccctaagcctcatggctgagattggaatccactctaggacctcactcttacagctgacccaaaaacaagagacttttcgggagatgcagcagcagatgatcggggaggaacccctggaccatctactggggatgcgggccacagatctccaaatcctttccactcaagtggagcagagattgaatgaaaacctgaccctgtcacatagagatgaaaagccggctttttctttagatgtctcaatgccttctgaacttaaatcctccctgaaacctcctacagtttctgaagaatctgaagtggccatcaagcccagcaaaggccaaagacgaggccaagcaggggtcaaaaagcatagccaaaaatggttgcggggtctcaagaagacgaaagagagagactctaaacagatgagcacagagccaggcctcttagaggatgaaagtgggactgaggccgcaccaattgagatggaggaagcatccgtctattcccaatggtcttcaagcaccagtgtaataaagctctcaaaagatgttgattctcaagagaaagatatctcgaaggatcacattgcattgaccctgaaga

SEQ ID NO: 200029 - DNA, 1718 bp, Homo sapiens
  Payload ID: 19457
  Gene Name: WD repeat domain 88
  Uniprot ID: Q6ZMY6
  ENST ID: ENST00000355868
  CDS Start-End: 77-1495
gggcgcgggcgcgggcgcgcggcgccaccgttcccatccaggcttgtcggcggccaccggcggaccgggcttcgagatggcctccccgccgcggtgctccccgacagcccatgacagggaatgcaagttgccgccaccctccgcccccgccagcgagtattgtcccggcaagctgtcctgggggaccatggcgagggccttaggccgcttcaagctgtcgatcccgcacacgcacctgctggccaccctcgaccccctggccttggacagggaaccaccaccgcatctgttgcctgagaagcaccaggtgccggagaaattgatctggggcgaccaggaccctctctccaagatcccatttaaaattctgagtgggcacgagcacgctgtgagcacctgccacttctgtgtggatgacacaaagctcctcagtggctcctatgactgcactgtgaagctgtgggatccggtggacggttctgtggttcgcgattttgagcacaggcccaaagctcctgttgtagagtgcagcatcaccggcgacagcagcagagtcattgccgcatcctatgataagacagtgagggcctgggacctggagacaggcaagctgctgtggaaggtcaggtatgataccttcatcgtctcctgtaagttttctcctgatggtaaatacgtggtctcaggcttcgacgtggatcatggaatctgcataatggacgccgagaacatcaccaccgtttccgtcatcaaagatcatcacacaaggtccatcacgtcatgctgctttgaccccgacagccagagggtggcttctgtctcattggacaggtgcatcaagatctgggatgttacatcccaggccacgctgctcaccatcactaaggcacattccaatgcaatctcaaactgctgttttaccttcagtggccatttcctgtgtacaagctcctgggataaaaacttaaaaatatggaacgtccacacaggggagtttcgaaactgtggagcctgtgtgactctgatgcagggccatgaaggttctgtcagttcctgtcactttgccagagacagctcttttctcatttctggagggtttgataggactgtggctatttgggatgtagcagaaggctaccggaagctctctttgaagggccataatgactgggtgatggatgttgccattagcaacaacaagaaatggatcctgtctgcttccaaggataggaccatgagactgtggaatattgaagaaattgatgaaattcctttggtaatcaagtacaaaaaggccgtgggcttaaagttgaaacagtgcgaaagatgtgacaggcctttctccatcttcaagagtgacacctcttctgaaatgttcacccaatgcgtgttctgccggatagatacaaggggcttgccagcagatacttcatcgtcatcatcatcatcggaaagggagaactcaccgccgccaaggggaagcaaggatgactgacagccacaggcccctttgagtgactccagcacaggctacctagcatgtaggtttcggggctttgcaggggctttctcttgggcccctcccaggctcagcaggcctgtcagactggggcaggacccaagccctggctggactcagcacagtgccacctcctcagctctcagcttggggagtgaacactttccgttttcatgcagaataaatctaattcctttgg

SEQ ID NO: 200030 - DNA, 1835 bp, Homo sapiens
  Payload ID: 19457
  Gene Name: WD repeat domain 88
  Uniprot ID: Q6ZMY6
  ENST ID: ENST00000361680
  CDS Start-End: 79-1359
gcgggcgcgggcgcgggcgcgcggcgccaccgttcccatccaggcttgtcggcggccaccggcggaccgggcttcgagatggcctccccgccgcggtgctccccgacagcccatgacagggaatgcaagttgccgccaccctccgcccccgccagcgagtattgtcccggcaagctgtcctgggggaccatggcgagggccttaggccgcttcaagctgtcgatcccgcacacgcacctgctggccaccctcgaccccctggccttggacagggaaccaccaccgcatctgttgcctgagaagcaccaggtgccggagaaattgatctggggcgaccaggaccctctctccaagatcccatttaaaattctgagtgggcacgagcacgctgtgagcacctgccacttctgtgtggatgacacaaagctcctcagtggctcctatgactgcactgtgaagctgtgggatccggtggacggttctgtggttcgcgattttgagcacaggcccaaagctcctgttgtagagtgcagcatcaccggcgacagcagcagagtcattgccgcatcctatgataagacagtgagggcctgggacctggagacaggcaagctgctgtggaaggtcaggtatgataccttcatcgtctcctgtaagttttctcctgatggtaaatacgtggtctcaggcttcgacgtggatcatggaatctgcataatggacgccgagaacatcaccaccgtttccgtcatcaaagatcatcacacaaggtccatcacgtcatgctgctttgaccccgacagccagagggtggcttctgtctcattggacaggtgcatcaagatctgggatgttacatcccaggccacgctgctcaccatcactaaggcacattccaatgcaatctcaaactgctgttttaccttcagtggccatttcctgtgtacaagctcctgggataaaaacttaaaaatatggaacgtccacacaggggagtttcgaaactgtggagcctgtgtgactctgatgcagggccatgaaggttctgtcagttcctgtcactttgccagagacagctcttttctcatttctggagggtttgataggactgtggctatttgggatgtagcagaaggctaccggaagctctctttgaagggccataatgactgggtgatggatgttgccattagcaacaacaagaaatggatcctgtctgcttccaaggataggaccatgagactgtggaatattgaagaaattgatgaaattcctttggtaatcaagtacaaaaaggccgtgggcttaaagttgaaacaggaaaagaaagaggcctacctgaagctgaagcaaggatgagcctgctgcatttgacttgctctgaatcaatcaacatgagaagcctgaggccaggcttccccgaggcctgccccagtgcgaaagatgtgacaggcctttctccatcttcaagagtgacacctcttctgaaatgttcacccaatgcgtgttctgccggatagatacaaggggcttgccagcagatacttcatcgtcatcatcatcatcggaaagggagaactcaccgccgccaaggggaagcaaggatgactgacagccacaggcccctttgagtgactccagcacaggctacctagcatgtaggtttcggggctttgcaggggctttctcttgggcccctcccaggctcagcaggcctgtcagactggggcaggacccaagccctggctggactcagcacagtgccacctcctcagctctcagcttggggagtgaacactttccgttttcatgcagaataaatctaattcctttgg

SEQ ID NO: 200031 - DNA, 651 bp, Homo sapiens
  Payload ID: 19457
  Gene Name: WD repeat domain 88
  ENST ID: ENST00000592765
  CDS Start-End: 81-575
gtgcgggcgcgggcgcgggcgcgcggcgccaccgttcccatccaggcttgtcggcggccaccggcggaccgggcttcgagatggcctccccgccgcggtgctccccgacagcccatgacagggaatgcaagttgccgccaccctccgcccccgccagcgagtattgtcccggcaagctgtcctgggggaccatggcgagggccttaggccgcttcaagctgtcgatcccgcacacgcacctgctggccaccctcgaccccctggccttggacagggaaccaccaccgcatctgttgcctgagaagcaccaggtgccggagaaattgatctggggcgaccaggaccctctctccaagatcccatttaaaattctgagtgggcacgagcacgctgtgagcacctgccacttctgtgtggatgacacaaagctcctcagtggctcctatgactgcactgtgaagctgtgggatccggtggacggttctgtggttcgcgattttgagcacaggcccaaagctcctgttgtagagtgcagcatcaccggcgacagcagcagtcattgccgcatcctatgataagacagtgagggcctgggacctggagacaggcaagctgctgtggaaggtcaggtatgataccttcatcgtctcc

SEQ ID NO: 200032 - DNA, 1687 bp, Homo sapiens
  Payload ID: 19458
  Gene Name: WD repeat domain 89
  Uniprot ID: Q96FK6
  ENST ID: ENST00000267522
  CDS Start-End: 247-1410
gccagaaagcagattttcacttgggaagagacgacccgtagtatgggatgtggtatgataccagcaactggtctattatatcatttaaaccacatggctatctaaagaggtatttggctattataaataaaatagtgatgaacacgtgtacaggtgtttgtacggacataagttgtcatttctcttgagtaaatacctaaaagtgggcttgctggagttttactacccttggatgctgctgttgacatggaaaagattgaggaacaatttgctaatctgcacattgttaaatgttccttaggaaccaaagagcccacttaccttcttggtatagacacatcaaagactgtccaagcaggaaaggaaaacttggttgctgttttatgttctaatggatcaatcagaatatatgataaagaaaggttaaatgtactacgagaatttagtggatatcctggacttcttaatggagtcagatttgcaaattcctgtgacagtgtatattcagcatgtactgatggcactgtgaaatgctgggatgctcgagtagccagagaaaaacctgttcagctcttcaagggttacccttccaatatttttatcagttttgatattaattgtaatgatcatattatttgtgctggtacagaaaaagttgatgatgatgcattgttggtgttttgggatgcaaggatgaattctcagaatttatctacaactaaagactcacttggtgcatattcagagacacatagtgatgatgtcactcaagtacgtttccatcccagcaatcccaacatggtagtctcaggttcatctgatggcctggtaaatgtatttgatattaatattgataatgaggaggatgcactggttacaacctgtaactcaatttcatcagtaagctgtattggttggtctgggaaaggttataaacagatttactgcatgacacatgatgaaggattttattggtgggatcttaatcatctggacactgatgaaccagttacacgtttgaacatccaggatgtcagagaagtagttaacatgaaagaagatgctttggactatttgattggtggcctatatcatgaaaagacagacacattgcatgttattggaggaacaaacaaaggaaggattcatttgatgaactgcagcatgtcaggactgacccatgtgactagccttcagggagggcatgctgctacagtccgttctttctgttggaatgtgcaagatgattctttgttgactggaggagaagatgcacagttgttactttggaaacctggagctatagagaagacctttacaaagaaagagagtatgaaaatagcatcctctgtgcaccaacgagtacgagttcatagtaatgattcttataaaagaaggaaaaagcagtgataatgcatttggcactttgtttggtaggttttatagtttcaaatagtccttcttgtttactacccatggtagacatgtttaaagctttatgtaaaaacaagccagttagcaaacagtcctggaaaaatatggtgagaatggtttaattccggtcttcacatattctaaaaaattttaaagcctctaagtataaaatcagtgagttgaaagtaaaatttcttatttaaagaacccatctgttaatgtagtaaatgttggctttaaagaaatagctccg

SEQ ID NO: 200033 - DNA, 2993 bp, Homo sapiens
  Payload ID: 19458
  Gene Name: WD repeat domain 89
  Uniprot ID: Q96FK6
  ENST ID: ENST00000394942
  CDS Start-End: 90-1253
accgctctaagccgccgcgcagcctgcgttttctccggtacaggttgaggctactaagagttttactacccttggatgctgctgttgacatggaaaagattgaggaacaatttgctaatctgcacattgttaaatgttccttaggaaccaaagagcccacttaccttcttggtatagacacatcaaagactgtccaagcaggaaaggaaaacttggttgctgttttatgttctaatggatcaatcagaatatatgataaagaaaggttaaatgtactacgagaatttagtggatatcctggacttcttaatggagtcagatttgcaaattcctgtgacagtgtatattcagcatgtactgatggcactgtgaaatgctgggatgctcgagtagccagagaaaaacctgttcagctcttcaagggttacccttccaatatttttatcagttttgatattaattgtaatgatcatattatttgtgctggtacagaaaaagttgatgatgatgcattgttggtgttttgggatgcaaggatgaattctcagaatttatctacaactaaagactcacttggtgcatattcagagacacatagtgatgatgtcactcaagtacgtttccatcccagcaatcccaacatggtagtctcaggttcatctgatggcctggtaaatgtatttgatattaatattgataatgaggaggatgcactggttacaacctgtaactcaatttcatcagtaagctgtattggttggtctgggaaaggttataaacagatttactgcatgacacatgatgaaggattttattggtgggatcttaatcatctggacactgatgaaccagttacacgtttgaacatccaggatgtcagagaagtagttaacatgaaagaagatgctttggactatttgattggtggcctatatcatgaaaagacagacacattgcatgttattggaggaacaaacaaaggaaggattcatttgatgaactgcagcatgtcaggactgacccatgtgactagccttcagggagggcatgctgctacagtccgttctttctgttggaatgtgcaagatgattctttgttgactggaggagaagatgcacagttgttactttggaaacctggagctatagagaagacctttacaaagaaagagagtatgaaaatagcatcctctgtgcaccaacgagtacgagttcatagtaatgattcttataaaagaaggaaaaagcagtgataatgcatttggcactttgtttggtaggttttatagtttcaaatagtccttcttgtttactacccatggtagacatgtttaaagctttatgtaaaaacaagccagttagcaaacagtcctggaaaaatatggtgagaatggtttaattccggtcttcacatattctaaaaaattttaaagcctctaagtataaaatcagtgagttgaaagtaaaatttcttatttaaagaacccatctgttaatgtagtaaatgttggctttaaagaaatagctccgataaggactttttagaaggaaatacttggtaaaacttaataaaacaggtggttggctgcattttttaagcccagttttttacattttaaattgtctttattgtgtataaaaccagattagactatattcttcatctgaggagcatctatatgtttaatacacctaatgtattatgctggagtatttaaatgtaagtattttaatgagtaaatagaattaaccttttttacaaatgaaatgataggcatctatgtaaagtgagaaaaatatgtttcgtaaatatttgcatctttaatattgttagtaagtagtaaacaggtgttttgctgattgaaaggaagttatcttggtaaattgagactcaaagtgaaatacaaaaatgaaaatatttataataggactcgacttggagaaattgctattcttcctgttgtccaaaccataaatctgaggataacctgggcttttctctttcctcttctcctaaccagtttttcaccaagtcctgtgccatttcacctcctaacgtctgtcagctatccttttgcctttacctcaccactattaccctagagaagactttcattatttctcatctggattaccagctcgatctctaatctgcttcagttcatccttcttgctacttctaggctaaacatcaaaaacagatctggtaggggcggggaaatgagggggaagaaacaaaaacgtgatggtgcctcatgctgcttaaaatcttcagtacattgatgttttgatggcggactacataagcgttaaaaattgtgtttttcagaatctttaaaatataagacagtgctatctagtgaataaaaaaattagtttgaaagatatctggagaaatcgcattcataaaacaattggaagtgaaactattaaaacaatagggctttttaaaattaaaaatatttaaaattcaaaagtaattaatagtgttggaagatgtaggtgagaaaatattcctgaaagtagaactgaaagagacaaagagaaaagatgaaagccacagaagataaatacaggggtcaaaaccagactaacagttttagaaagtgaaaaaagttaaaaaagaaatgggggcagtgggttattagaaataacataaatggctggtatggtttgtctgtgtcctcacccaaatttcatctcgaattgtaatccccataatccccatgtgtctagggagagacctggtgggaggtgattggatcatgggggtggtttcccctacgatgttctcctgatagtgggtgagttctcacaagatctgatggttttataaagggctctgcccctttaactcctcactctttctcctgaagccttgtgaagaaggtgctttgcttcccctttgcgttcccccatgattgtaagtttcttgaggcctccctggccatgctgaactcttcagtcaattaaacactttcctttataaatta

SEQ ID NO: 200034 - DNA, 976 bp, Homo sapiens
  Payload ID: 19458
  Gene Name: WD repeat domain 89
  ENST ID: ENST00000554717
  CDS Start-End: 297-976
aagccgccgcgcagcctgcgttttctccggtacaggttgaggctactaaggccagaaagcagattttcacttgggaagagacgacccgtagtatgggatgtggtatgataccagcaactggtctattatatcatttaaaccacatggctatctaaagaggtatttggctattataaataaaatagtgatgaacacgtgtacaggtgtttgtacggacataagttgtcatttctcttgagtaaatacctaaaagtgggcttgctggagttttactacccttggatgctgctgttgacatggaaaagattgaggaacaatttgctaatctgcacattgttaaatgttccttaggaaccaaagagcccacttaccttcttggtatagacacatcaaagactgtccaagcaggaaaggaaaacttggttgctgttttatgttctaatggatcaatcagaatatatgataaagaaaggttaaatgtactacgagaatttagtggatatcctggacttcttaatggagtcagatttgcaaattcctgtgacagtgtatattcagcatgtactgatggcactgtgaaatgctgggatgctcgagtagccagagaaaaacctgttcagctcttcaagggttacccttccaatatttttatcagttttgatattaattgtaatgatcatattatttgtgctggtacagaaaaagttgatgatgatgcattgttggtgttttgggatgcaaggatgaattctcagaatttatctacaactaaagactcacttggtgcatattcagagacacatagtgatgatgtcactcaagtacgtttccatcccagcaatcccaacatggtagtctcaggttcatctgatggcctggtaaatgtatttgatattaatattgataatgaggaggatgcactggttacaacctgtaactcaatttcatcagtaagctgtattggttggtctgggaa

SEQ ID NO: 200035 - DNA, 2935 bp, Homo sapiens
  Payload ID: 19458
  Gene Name: WD repeat domain 89
  Uniprot ID: Q96FK6
  ENST ID: ENST00000620954
  CDS Start-End: 33-1196
gagttttactacccttggatgctgctgttgacatggaaaagattgaggaacaatttgctaatctgcacattgttaaatgttccttaggaaccaaagagcccacttaccttcttggtatagacacatcaaagactgtccaagcaggaaaggaaaacttggttgctgttttatgttctaatggatcaatcagaatatatgataaagaaaggttaaatgtactacgagaatttagtggatatcctggacttcttaatggagtcagatttgcaaattcctgtgacagtgtatattcagcatgtactgatggcactgtgaaatgctgggatgctcgagtagccagagaaaaacctgttcagctcttcaagggttacccttccaatatttttatcagttttgatattaattgtaatgatcatattatttgtgctggtacagaaaaagttgatgatgatgcattgttggtgttttgggatgcaaggatgaattctcagaatttatctacaactaaagactcacttggtgcatattcagagacacatagtgatgatgtcactcaagtacgtttccatcccagcaatcccaacatggtagtctcaggttcatctgatggcctggtaaatgtatttgatattaatattgataatgaggaggatgcactggttacaacctgtaactcaatttcatcagtaagctgtattggttggtctgggaaaggttataaacagatttactgcatgacacatgatgaaggattttattggtgggatcttaatcatctggacactgatgaaccagttacacgtttgaacatccaggatgtcagagaagtagttaacatgaaagaagatgctttggactatttgattggtggcctatatcatgaaaagacagacacattgcatgttattggaggaacaaacaaaggaaggattcatttgatgaactgcagcatgtcaggactgacccatgtgactagccttcagggagggcatgctgctacagtccgttctttctgttggaatgtgcaagatgattctttgttgactggaggagaagatgcacagttgttactttggaaacctggagctatagagaagacctttacaaagaaagagagtatgaaaatagcatcctctgtgcaccaacgagtacgagttcatagtaatgattcttataaaagaaggaaaaagcagtgataatgcatttggcactttgtttggtaggttttatagtttcaaatagtccttcttgtttactacccatggtagacatgtttaaagctttatgtaaaaacaagccagttagcaaacagtcctggaaaaatatggtgagaatggtttaattccggtcttcacatattctaaaaaattttaaagcctctaagtataaaatcagtgagttgaaagtaaaatttcttatttaaagaacccatctgttaatgtagtaaatgttggctttaaagaaatagctccgataaggactttttagaaggaaatacttggtaaaacttaataaaacaggtggttggctgcattttttaagcccagttttttacattttaaattgtctttattgtgtataaaaccagattagactatattcttcatctgaggagcatctatatgtttaatacacctaatgtattatgctggagtatttaaatgtaagtattttaatgagtaaatagaattaaccttttttacaaatgaaatgataggcatctatgtaaagtgagaaaaatatgtttcgtaaatatttgcatctttaatattgttagtaagtagtaaacaggtgttttgctgattgaaaggaagttatcttggtaaattgagactcaaagtgaaatacaaaaatgaaaatatttataataggactcgacttggagaaattgctattcttcctgttgtccaaaccataaatctgaggataacctgggcttttctctttcctcttctcctaaccagtttttcaccaagtcctgtgccatttcacctcctaacgtctgtcagctatccttttgcctttacctcaccactattaccctagagaagactttcattatttctcatctggattaccagctcgatctctaatctgcttcagttcatccttcttgctacttctaggctaaacatcaaaaacagatctggtaggggcggggaaatgagggggaagaaacaaaaacgtgatggtgcctcatgctgcttaaaatcttcagtacattgatgttttgatggcggactacataagcgttaaaaattgtgtttttcagaatctttaaaatataagacagtgctatctagtgaataaaaaaattagtttgaaagatatctggagaaatcgcattcataaaacaattggaagtgaaactattaaaacaatagggctttttaaaattaaaaatatttaaaattcaaaagtaattaatagtgttggaagatgtaggtgagaaaatattcctgaaagtagaactgaaagagacaaagagaaaagatgaaagccacagaagataaatacaggggtcaaaaccagactaacagttttagaaagtgaaaaaagttaaaaaagaaatgggggcagtgggttattagaaataacataaatggctggtatggtttgtctgtgtcctcacccaaatttcatctcgaattgtaatccccataatccccatgtgtctagggagagacctggtgggaggtgattggatcatgggggtggtttcccctacgatgttctcctgatagtgggtgagttctcacaagatctgatggttttataaagggctctgcccctttaactcctcactctttctcctgaagccttgtgaagaaggtgctttgcttcccctttgcgttcccccatgattgtaagtttcttgaggcctccctggccatgctgaactcttcagtcaattaaacactttcctttataaatt

SEQ ID NO: 200036 - DNA, 5488 bp, Homo sapiens
  Payload ID: 19459
  Gene Name: WD repeat domain 90
  Uniprot ID: Q96KV7
  ENST ID: ENST00000293879
  CDS Start-End: 1-5247
atggcccgagcgtggcagcacccgttcctcaacgtcttcagacacttccgggtggacgagtggaagcgctccgccaagcagggggacgtggccgtggtcacggacaagaccctgaagggcgccgtgtatcgcattcggggctcagtctctgccgccaactacatccagctccctaagagcagcacccagtctctggggctgacgggacgatacctgtatgtgctctttcggcccctgcccagcaagcacttcgtcatccacctcgatgtgtcctccaaggacaaccaagtcatccgtgtgtctttctccaacctcttcaaggagtttaagtctacggccacgtggctccagtttcccttggtcctggaggccaggacacctcagagagatctggtgggtttggccccctccggagcccgctggacctgcctgcagctcgatctgcaggacgttctcctggtctacctgaaccggtgctacggccatctcaagagcatcaggctgtgcgccagcctgctggtcaggaacctgtacaccagtgacctgtgctttgagcctgccatctctggggcccagtgggcaaagctgcccgtgactcctatgcctcgggaaatggcattccctgtgcccaagggagagagctggcatgaccgctacatccacgtccggtttccaagtgagagcttgaaagtgccttccaagccgattgagaagagctgttcccctcctgaggcagtcctcctggggccggggccacagcctctcccttgcccggtggcctccagcaaacctgtgcggttcagtgtgtctccagtggtccagacgcccagccccacagcctccggccgggccgccttggcacccaggcccttcccggaggtcagcctgtcccaagagcgctcagacgcctccaacgcggatggccccggtttccatagccttgagccctgggcccagctggaggcctctgacatccacacggctgctgccggcacccacgtgttgactcacgagtcggctgaggtgcccgtggcccgcaccggctcctgcgaaggcttcctcccagacccagtcctgaggctcaagggcgtcatcggctttgggggccacggcaccagacaggccctgtggaccccagacggggcggctgtcgtgtacccctgccatgcggtcatcgtcgtcctgctcgtggacacgggggagcagcgcttcttccttggccacacagacaaggtctccgccctggcgctggatggcagcagctcactattggcctcggcccaggcaagggcccctagtgtgatgcggctctgggacttccagaccgggcggtgcttgtgcctgttccggagcccaatgcacgttgtctgctctctcagcttctctgacagcggggcccttctctgcggggttggcaaggaccaccacgggaggacgatggtggtggcctggggcaccggccaggtgggcctcggtggcgaggtggtcgttctggcaaaggcgcacactgactttgacgtccaggccttccgggtcaccttttttgatgaaaccaggatggcgtcgtgcgggcagggcagtgtgcggctctggcggctgcgtggcggggtgctgcgttcctgccccgtggacttaggggagcaccacgcgctgcagttcaccgacctggccttcaagcaggcccgggacggctgcccggagccctcggctgccatgctcttcgtgtgcagccgcagtggccacatcttggagattgactgtcagcgcatggtcgtgcggcatgcccgccgcctgctccccacacggactccaggcggtccccacccacagaagcagaccttcagctcaggccccggcattgccatcagcagcctcagcgtctccccggccatgtgtgctgtgggctctgaggacggcttcttgcggctctggcccctggacttctcctcggtgctcctggaggcagagcacgagggccccgtcagctcagtctgtgtcagccccgatggcctccgtgtgctgtctgccacctcctcgggccacctgggcttcctggacacgctgtcccgggtgtaccacatgctggctcgctcccacaccgccccggtgttggccctcgccatggagcagaggcggggacagctggccaccgtgtcccaggaccgtaccgtccgcatctgggacctggccaccctgcagcagctatacgacttcacatcatcagaggacgccccgtgcgctgtcaccttccaccccacaaggccaacctttttctgtggctttagcagtggggccgtgcgctccttcagcctggaggccgctgaggtcctggtggaacacacgtgccaccgaggagctgtcaccggcctgaccgccacccctgacggccgcctgctcttcagctcctgctcccagggctccctggcccagtacagctgtgcggacccccagtggcatgtcctccgagtggcagcggacatggtatgcccggatgcccccgcgagccccagcgccctggcagtcagcagggatggccgcctgctggcctttgtgggaccctccaggtgcacagtgacagtcatgggctcggcctcccttgatgagctgctgcgagttgacatcggcactctggacctggccagcagccgcctggactcagccatggctgtgtgctttggccctgcagctctgggccacctgctggtgtccacctcgtccaacagagtcgtggtgctggatgctgtgtcgggccgcatcatccgggagctgcccggtgtccaccctgagccctgcccctccttgacgctcagtgaggacgcccgcttcctgctgattgccgccggccggaccatcaaggtgtgggactacgccacacaggccagcccaggcccccaggtgtacatcggccactcggaacccgtgcaggctgtggccttctctcctgaccagcagcaggtcctcagcgcaggggacgccgtcttcctctgggatgtcctggcccctactgagagcgaccaaagcttccccggggcccccccagcctgcaagacaggcccgggcgcaggaccgctggaggacgcagcgtccagggccagcgagctcccccggcagcaggtccccaagccatgtcaggcatctccaccacggctgggcgtctgtgccaggcctcccgaaggtggcgatggcgccagggacaccaggaattcgggggccccacgcaccacctacctggcttcctgcaaggccttcacgcctgccagggtcagctgcagcccccactctgccaagggcacttgcccgcctcccgccagcggtgggtggctgcgtctgaaggctgtcgtcggttacagcgggaatgggcgggccaacatggtctggaggccggacacaggcttctttgcctacacgtgcggccgcctggtggtggtggaggacctgcactctggcgcccagcagcactggtccggccactctgcggagatctccacgctggccctcagccacagtgcccaggtcctggcctctgcctcgggccgaagcagcacgaccgcccattgtcagatccgcgtctgggacgtgtctggcggcctctgccagcatctcattttcccccatagcaccaccgtgctggccctggccttctcaccagatgacaggcttcttgtcacactgggggaccacgatggccgcaccctcgccctgtggggcacggccacctatgacctcgtgtcctccacccgcctcccggagccggtgcatggtgtggccttcaacccctgggacgccggcgagctcacctgtgtgggccagggcactgtcaccttctggctccttcagcagcgtggggcagacatcagccttcaggtgcgtcgagagccagtcccagaggcagtgggggctggagagctgacctcgctctgctacggggcacctcccctgctctattgtggcaccagctctggccaggtctgtgtctgggacacgcgtgccggccgctgcttcttgtcctgggaggcggatgacggtggcattgggctgttgctgttctcgggttctcgattggtcagcggcagcagcacggggcggctgcgcctgtgggccgtgggggctgtgtcggagctgaggtgcaagggctcaggcgccagttctgtgttcatggaacacgagctggtgctggacggggctgtggtgagtgccagcttcgatgacagcgtggacatgggcgtcgtgggcaccacggcgggcacgctgtggtttgtcagctgggccgagggcaccagcacacgtctcatcagtggccacaggagcaaggtgaacgaggtggtcttcagccccggggagtcccactgcgccacatgcagtgaggatgggagtgtgcgggtgtgggccttggccagcatggagcttgtgatccagttccaggtgctgaaccagagctgcctctgcctggcatggagccccccgtgctgtggccgccctgagcagcagcggctagcggctggctacggtgacggctccctgcgcatcttcagcgtctcccgcacggccatggagctcaagatgcacccccacccggtggcgctgaccactgttgccttctccaccgatggtcagactgtcctctctggagacaaggatgggctcgtggctgtgagccacccctgcacagggacaaccttccgtgtgctgagtgaccaccagggcgccccaatctctaccatctgtgtcacgtgcaaagagtgtgaagacttaggggtggagggcacagacctatggctggctgccagtggggaccagcgggtcagcgtctgggcctccgactggctgcggaaccactgtgagcttgtggactggttgagtttcccaatgcctgccaccacggagactcagggccacctgccaccctccctcgctgccttctgcccttgggatggggcgctcctgatgtacgtgggccccggtgtttacaaggaggtgatcatctacaacctctgccagaagcaggtggtggagaagataccactgcccttttttgccatgtccctgagcctgtcccccgggacccacctcctggctgttggctttgctgagtgcatgctgaggctggtagactgtgccatggggactgcccaagactttgccggccacgacaacgcagtgcacctgtgcaggtttacaccgtccgccaggctgctcttcacggccgcccgcaacgagatccttgtgtgggaggtccccggcctctgagatgcagcagggactgtggtggtgggcatcacgcctggtcatgccaggcacctggacacaggcttggcagaggcgccaggttgtcaatggcctcatgctgggacaggccaggattcacgtaaatcgcctggagcaagctgttgtaaatttggcgccctgtgaatactttcatacctgttgcccttttgcctaagaaatctttaatgtttctatcttgtaataaacatgggcatttattgca

SEQ ID NO: 200037 - DNA, 1454 bp, Homo sapiens
  Payload ID: 19459
  Gene Name: WD repeat domain 90
  Uniprot ID: Q96KV7
  ENST ID: ENST00000315764
  CDS Start-End: 314-1213
ctttcagcctcagtctgcagcctgctagggacgcacggccacactcctgtctttcagcctcagtctgcagcctgctagggacgcacggccacactcctgtctttcagcctcagtctgtagcctgctagggatgcacggccacgctcctgtctttgaggtgctgtcagaacagctttctcctcggtatcccgccgggtttgactggctagtgggcttgctttggtttggactcacccagatctagtgcagggacacacacgggggccggcattgctcctttccgccatgtggagttggccggggccagaggcacatgctctggtttggacagcccggccctgggggctggaataggaaatgcctgcgtccctttaccctgcccaggggccaacacccccagcctagctacggcttcccccaggtgaacgaggtggtcttcagccccggggagtcccactgcgccacatgcagtgaggatgggagtgtgcgggtgtgggccttggccagcatggagcttgtgatccagttccaggtgctgaaccagagctgcctctgcctggcatggagccccccgtgctgtggccgccctgagcagcagcggctagcggctggctacggtgacggctccctgcgcatcttcagcgtctcccgcacggccatggagctcaagatgcacccccacccggtggcgctgaccactgttgccttctccaccgatggtcagactgtcctctctggagacaaggatgggctcgtggctgtgagccacccctgcacagggacaaccttccgtgtgctgagtgaccaccagggcgccccaatctctaccatctgtgtcacgtgcaaagagactcagggccacctgccaccctccctcgctgccttctgcccttgggatggggcgctcctgatgtacgtgggccccggtgtttacaaggaggtgatcatctacaacctctgccagaagcaggtggtggagaagataccactgcccttttttgccatgtccctgagcctgtcccccgggacccacctcctggctgttggctttgctgagtgcatgctgaggctggtagactgtgccatggggactgcccaagactttgccggccacgacaacgcagtgcacctgtgcaggtttacaccgtccgccaggctgctcttcacggccgcccgcaacgagatccttgtgtgggaggtccccggcctctgagatgcagcagggactgtggtggtgggcatcacgcctggtcatgccaggcacctggacacaggcttggcagaggcgccaggttgtcaatggcctcatgctgggacaggccaggattcacgtaaatcgcctggagcaagctgttgtaaatttggcgccctgtgaatactttcatacctgttgcccttttgcctaagaaatctttaatgtttctatcttgtaataaacatgggcatttattgca

SEQ ID NO: 200038 - DNA, 399 bp, Homo sapiens
  Payload ID: 19459
  Gene Name: WD repeat domain 90
  ENST ID: ENST00000550739
  CDS Start-End: 1-399
gcccgggcgcaggaccgctggaggacgcagcgtccagggccagcgagctcccccggcagcaggtccccaagccatgtcaggcatctccaccacggctgggcgtctgtgccaggcctcccgaaggtggcgatggcgccagggacaccaggaattcgggggccccacgcaccacctacctggcttcctgcaaggccttcacgcctgccagggtcagctgcagcccccactctgccaaggctttggggcacaggtggccatgctgggccccagcagcatccgggtctccttcctcgcagggcacttgcccgcctcccgccagcggtgggtggctgcgtctgaaggctgtcgtcggttacagcgggaatgggcgggccaacatggtctggaggccggacacag

SEQ ID NO: 200039 - DNA, 396 bp, Homo sapiens
  Payload ID: 19459
  Gene Name: WD repeat domain 90
  ENST ID: ENST00000546896
  CDS Start-End: 1-348
gagaagataccactgcccttttttgccatgtccctgagcctgtcccccgggacccacctcctggctgttggctttgctggtttacaccgtccgccaggctgctcttcacggccgcccgcaacgagatccttgtgtgggaggtccccggcctctgagatgcagcagggactgtggtggtgggcatcacgcctggtcatgccaggcacctggacacaggcttggcagaggcgccaggttgtcaatggcctcatgctgggacaggccaggattcacgtaaatcgcctggagcaagctgttgtaaatttggcgccctgtgaatactttcatacctgttgcccttttgcctaagaaatctttaatgtttctatcttgtaataaacatgggcatttattgca

SEQ ID NO: 200040 - DNA, 5589 bp, Homo sapiens
  Payload ID: 19459
  Gene Name: WD repeat domain 90
  ENST ID: ENST00000549091
  CDS Start-End: 93-5345
caccgttgccaggcagccgttgcctggcgtcgcggggcgtactctgcgctgggcgcgcggaggcctaggcgggaagctcgagcggcggcgccatggcccgagcgtggcagcacccgttcctcaacgtcttcagacacttccgggtggacgagtggaagcgctccgccaagcagggggacgtggccgtggtcacggacaagaccctgaagggcgccgtgtatcgcattcggggctcagtctctgccgccaactacatccagctccctaagagcagcacccagtctctggggctgacgggacgatacctgtatgtgctctttcggcccctgcccagcaagcacttcgtcatccacctcgatgtgtcctccaaggacaaccaagtcatccgtgtgtctttctccaacctcttcaaggagtttaagtctacggccacgtggctccagtttcccttggtcctggaggccaggacacctcagagagatctggtgggtttggccccctccggagcccgctggacctgcctgcagctcgatctgcaggacgttctcctggtctacctgaaccggtgctacggccatctcaagagcatcaggctgtgcgccagcctgctggtcaggaacctgtacaccagtgacctgtgctttgagcctgccatctctggggcccagtgggcaaagctgcccgtgactcctatgcctcgggaaatggcattccctgtgcccaagggagagagctggcatgaccgctacatccacgtccggtttccaagtgagagcttgaaagtgccttccaagccgattgagaagagctgttcccctcctgaggcagtcctcctggggccggggccacagcctctcccttgcccggtggcctccagcaaacctgtgcggttcagtgtgtctccagtggtccagacgcccagccccacagcctccggccgggccgccttggcacccaggcccttcccggaggtcagcctgtcccaagagcgctcagacgcctccaacgcggatggccccggtttccatagccttgagccctgggcccagctggaggcctctgacatccacacggctgctgccggcacccacgtgttgactcacgagtcggctgaggtgcccgtggcccgcaccggctcctgcgaaggcttcctcccagacccagtcctgaggctcaagggcgtcatcggctttgggggccacggcaccagacaggccctgtggaccccagacggggcggctgtcgtgtacccctgccatgcggtcatcgtcgtcctgctcgtggacacgggggagcagcgcttcttccttggccacacagacaaggtctccgccctggcgctggatggcagcagctcactattggcctcggcccaggcaagggcccctagtgtgatgcggctctgggacttccagaccgggcggtgcttgtgcctgttccggagcccaatgcacgttgtctgctctctcagcttctctgacagcggggcccttctctgcggggttggcaaggaccaccacgggaggacgatggtggtggcctggggcaccggccaggtgggcctcggtggcgaggtggtcgttctggcaaaggcgcacactgactttgacgtccaggccttccgggtcaccttttttgatgaaaccaggatggcgtcgtgcgggcagggcagtgtgcggctctggcggctgcgtggcggggtgctgcgttcctgccccgtggacttaggggagcaccacgcgctgcagttcaccgacctggccttcaagcaggcccgggacggctgcccggagccctcggctgccatgctcttcgtgtgcagccgcagtggccacatcttggagattgactgtcagcgcatggtcgtgcggcatgcccgccgcctgctccccacacggactccaggcggtccccacccacagaagcagaccttcagctcaggccccggcattgccatcagcagcctcagcgtctccccggccatgtgtgctgtgggctctgaggacggcttcttgcggctctggcccctggacttctcctcggtgctcctggaggcagagcacgagggccccgtcagctcagtctgtgtcagccccgatggcctccgtgtgctgtctgccacctcctcgggccacctgggcttcctggacacgctgtcccgggtgtaccacatgctggctcgctcccacaccgccccggtgttggccctcgccatggagcagaggcggggacagctggccaccgtgtcccaggaccgtaccgtccgcatctgggacctggccaccctgcagcagctatacgacttcacatcatcagaggacgccccgtgcgctgtcaccttccaccccacaaggccaacctttttctgtggctttagcagtggggccgtgcgctccttcagcctggaggccgctgaggtcctggtggaacacacgtgccaccgaggagctgtcaccggcctgaccgccacccctgacggccgcctgctcttcagctcctgctcccagggctccctggcccagtacagctgtgcggacccccagtggcatgtcctccgagtggcagcggacatggtatgcccggatgcccccgcgagccccagcgccctggcagtcagcagggatggccgcctgctggcctttgtgggaccctccaggtgcacagtgacagtcatgggctcggcctcccttgatgagctgctgcgagttgacatcggcactctggacctggccagcagccgcctggactcagccatggctgtgtgctttggccctgcagctctgggccacctgctggtgtccacctcgtccaacagagtcgtggtgctggatgctgtgtcgggccgcatcatccgggagctgcccggtgtccaccctgagccctgcccctccttgacgctcagtgaggacgcccgcttcctgctgattgccgccggccggaccatcaaggtgtgggactacgccacacaggccagcccaggcccccaggtgtacatcggccactcggaacccgtgcaggctgtggccttctctcctgaccagcagcaggtcctcagcgcaggggacgccgtcttcctctgggatgtcctggcccctactgagagcgaccaaagcttccccggggcccccccagcctgcaagacaggcccgggcgcaggaccgctggaggacgcagcgtccagggccagcgagctcccccggcagcaggtccccaagccatgtcaggcatctccaccacggctgggcgtctgtgccaggcctcccgaaggtggcgatggcgccagggacaccaggaattcgggggccccacgcaccacctacctggcttcctgcaaggccttcacgcctgccagggtcagctgcagcccccactctgccaagggcacttgcccgcctcccgccagcggtgggtggctgcgtctgaaggctgtcgtcggttacagcgggaatgggcgggccaacatggtctggaggccggacacaggcttctttgcctacacgtgcggccgcctggtggtggtggaggacctgcactctggcgcccagcagcactggtccggccactctgcggagatctccacgctggccctcagccacagtgcccaggtcctggcctctgcctcgggccgaagcagcacgaccgcccattgtcagatccgcgtctgggacgtgtctggcggcctctgccagcatctcattttcccccatagcaccaccgtgctggccctggccttctcaccagatgacaggcttcttgtcacactgggggaccacgatggccgcaccctcgccctgtggggcacggccacctatgacctcgtgtcctccacccgcctcccggagccggtgcatggtgtggccttcaacccctgggacgccggcgagctcacctgtgtgggccagggcactgtcaccttctggctccttcagcagcgtggggcagacatcagccttcaggtgcgtcgagagccagtcccagaggcagtgggggctggagagctgacctcgctctgctacggggcacctcccctgctctattgtggcaccagctctggccaggtctgtgtctgggacacgcgtgccggccgctgcttcttgtcctgggaggcggatgacggtggcattgggctgttgctgttctcgggttctcgattggtcagcggcagcagcacggggcggctgcgcctgtgggccgtgggggctgtgtcggagctgaggtgcaagggctcaggcgccaggtccagttctgtgttcatggaacacgagctggtgctggacggggctgtggtgagtgccagcttcgatgacagcgtggacatgggcgtcgtgggcaccacggcgggcacgctgtggtttgtcagctgggccgagggcaccagcacacgtctcatcagtggccacaggagcaaggtgaacgaggtggtcttcagccccggggagtcccactgcgccacatgcagtgaggatgggagtgtgcgggtgtgggccttggccagcatggagcttgtgatccagttccaggtgctgaaccagagctgcctctgcctggcatggagccccccgtgctgtggccgccctgagcagcagcggctagcggctggctacggtgacggctccctgcgcatcttcagcgtctcccgcacggccatggagctcaagatgcacccccacccggtggcgctgaccactgttgccttctccaccgatggtcagactgtcctctctggagacaaggatgggctcgtggctgtgagccacccctgcacagggacaaccttccgtgtgctgagtgaccaccagggcgccccaatctctaccatctgtgtcacgtgcaaagagtgtgaagacttaggggtggagggcacagacctatggctggctgccagtggggaccagcgggtcagcgtctgggcctccgactggctgcggaaccactgtgagcttgtggactggttgagtttcccaatgcctgccaccacggagactcagggccacctgccaccctccctcgctgccttctgcccttgggatggggcgctcctgatgtacgtgggccccggtgtttacaaggaggtgatcatctacaacctctgccagaagcaggtggtggagaagataccactgcccttttttgccatgtccctgagcctgtcccccgggacccacctcctggctgttggctttgctgagtgcatgctgaggctggtagactgtgccatggggactgcccaagactttgccggccacgacaacgcagtgcacctgtgcaggtttacaccgtccgccaggctgctcttcacggccgcccgcaacgagatccttgtgtgggaggtccccggcctctgagatgcagcagggactgtggtggtgggcatcacgcctggtcatgccaggcacctggacacaggcttggcagaggcgccaggttgtcaatggcctcatgctgggacaggccaggattcacgtaaatcgcctggagcaagctgttgtaaatttggcgccctgtgaatactttcatacctgttgcccttttgcctaagaaatctttaatgtttctatcttgtaataaacatgggcatttattgcatta

SEQ ID NO: 200041 - DNA, 3133 bp, Homo sapiens
  Payload ID: 19459
  Gene Name: WD repeat domain 90
  ENST ID: ENST00000552728
  CDS Start-End: 1-1428
gctcgctcccacaccgccccggtgttggccctcgccatggagcagaggcggggacagctggccaccgtgtcccaggaccgtaccgtccgcatctgggacctggccaccctgcagcagctatacgacttcacatcatcagaggacgccccgtgcgctgtcaccttccaccccacaaggccaacctttttctgtggctttagcagtggggccgtgcgctccttcagcctggaggccgctgaggtcctggtggaacacacgtgccaccgaggagctgtcaccggcctgaccgccacccctgacggccgcctgctcttcagctcctgctcccagggctccctggcccagtacagctgtgcggacccccagtggcatgtcctccgagtggcagcggacatggtatgcccggatgcccccgcgagccccagcgccctggcagtcagcagggatggccgcctgctggcctttgtgggaccctccaggtgcacagtgacagtcatgggctcggcctcccttgatgagctgctgcgagttgacatcggcactctggacctggccagcagccgcctggactcagccatggctgtgtgctttggccctgcagctctgggccacctgctggtgtccacctcgtccaacagagtcgtggtgctggatgctgtgtcgggccgcatcatccgggagctgcccggtgtccaccctgagccctgcccctccttgacgctcagtgaggacgcccgcttcctgctgattgccgccggccggaccatcaaggtgtgggactacgccacacaggccagcccaggcccccaggtgtacatcggccactcggaacccgtgcaggctgtggccttctctcctgaccagcagcaggtcctcagcgcaggggacgccgtcttcctctgggatgtcctggcccctactgagagcgaccaaagcttccccggggcccccccagcctgcaagacaggcccgggcgcaggaccgctggaggacgcagcgtccagggccagcgagctcccccggcagcaggtccccaagccatgtcaggcatctccaccacggctgggcgtctgtgccaggcctcccgaaggtggcgatgggcacttgcccgcctcccgccagcggtgggtggctgcgtctgaaggctgtcgtcggttacagcgggaatgggcgggccaacatggtctggaggccggacacaggcttctttgcctacacgtgcggccgcctggtggtggtggaggacctgcactctggcgcccagcagcactggtccggccactctgcggagatctccacgctggccctcagccacagtgcccaggtcctggcctctgcctcgggccgaagcagcacgaccgcccattgtcagatccgcgtctgggacgtgtctggcggcctctgccagcatctcattttcccccatagcaccaccgtgctggccctggccttctcaccagatgacaggcttcttgtcacactgggggaccacgatggccgcaccctcgccctgtggggcacggccacctatgacctcgtgtcctccacccgcctcccggagccggtgcatggtgtggccttcaacccctgggacgccggcgagctcacctgtgtgggccagggcactgtcaccttctggctccttcagcagcgtggggcagacatcagccttcaggtgcgtcgagagccagtcccagaggcagtgggggctggagagctgacctcgctctgctacggggcacctcccctgctctattgtggcaccagctctggccaggtctgtgtctgggacacgcgtgccggccgctgcttcttgtcctgggaggcggatgacggtggcattgggctgttgctgttctcgggttctcgattggtcagcggcagcagcacggggcggctgcgcctgtgggccgtgggggctgtgtcggagctgaggtgcaagggctcaggcgccaggtgaacgaggtggtcttcagccccggggagtcccactgcgccacatgcagtgaggatgggagtgtgcgggtgtgggccttggccagcatggagcttgtgatccagttccaggtgctgaaccagagctgcctctgcctggcatggagccccccgtgctgtggccgccctgagcagcagcggctagcggctggctacggtgacggctccctgcgcatcttcagcgtctcccgcacggccatggagctcaagatgcacccccacccggtggcgctgaccactgttgccttctccaccgatggtcagactgtcctctctggagacaaggatgggctcgtggctgtgagccacccctgcacagggacaaccttccgtgtgctgagtgaccaccagggcgccccaatctctaccatctgtgtcacgtgcaaagagtgtgaagacttaggggtggagggcacagacctatggctggctgccagtggggaccagcgggtcagcgtctgggcctccgactggctgcggaaccactgtgagcttgtggactggttgagtttcccaatgcctgccaccacggagactcagggccacctgccaccctccctcgctgccttctgcccttgggatggggcgctcctgatgtacgtgggccccggtgtttacaaggaggtgatcatctacaacctctgccagaagcaggtggtggagaagataccactgcccttttttgccatgtccctgagcctgtcccccgggacccacctcctggctgttggctttgctgagtgcatgctgaggctggtagactgtgccatggggactgcccaagactttgccggccacgacaacgcagtgcacctgtgcaggtttacaccgtccgccaggctgctcttcacggccgcccgcaacgagatccttgtgtgggaggtccccggcctctgagatgcagcagggactgtggtggtgggcatcacgcctggtcatgccaggcacctggacacaggcttggcagaggcgccaggttgtcaatggcctcatgctgggacaggccaggattcacgtaaatcgcctggagcaagctgttgtaaatttggcgccctgtgaatactttcatacctgttgcccttttgcctaagaaatctttaatgtttctatcttgtaataaacatgggcatttattgca

SEQ ID NO: 200042 - DNA, 1672 bp, Homo sapiens
  Payload ID: 19459
  Gene Name: WD repeat domain 90
  ENST ID: ENST00000547944
  CDS Start-End: 388-1431
ggaatgcgactgcatggcgcgctcgctgcaacctcagtctgcagcctgctagggacgcacggccacactcctgtctttcagcctcagtctgcagcctgctagggacgcacggccacactcctgtctttcagcctcagtctgcagcctgctagggacgcacggccacactcctgtctttcagcctcagtctgtagcctgctagggatgcacggccacgctcctgtctttgaggtgctgtcagaacagctttctcctcggtatcccgccgggtttgactggctagtgggcttgctttggtttggactcacccagatctagtgcagggacacacacgggggccggcattgctcctttccgccatgtggagttggccggggccagaggcacatgctctggtttggacagcccggccctgggggctggaataggaaatgcctgcgtccctttaccctgcccaggggccaacacccccagcctagctacggcttcccccaggtgaacgaggtggtcttcagccccggggagtcccactgcgccacatgcagtgaggatgggagtgtgcgggtgtgggccttggccagcatggagcttgtgatccagttccaggtgctgaaccagagctgcctctgcctggcatggagccccccgtgctgtggccgccctgagcagcagcggctagcggctggctacggtgacggctccctgcgcatcttcagcgtctcccgcacggccatggagctcaagatgcacccccacccggtggcgctgaccactgttgccttctccaccgatggtcagactgtcctctctggagacaaggatgggctcgtggctgtgagccacccctgcacagggacaaccttccgtgtgctgagtgaccaccagggcgccccaatctctaccatctgtgtcacgtgcaaagagtgtgaagacttaggggtggagggcacagacctatggctggctgccagtggggaccagcgggtcagcgtctgggcctccgactggctgcggaaccactgtgagcttgtggactggttgagtttcccaatgcctgccaccacggagactcagggccacctgccaccctccctcgctgccttctgcccttgggatggggcgctcctgatgtacgtgggccccggtgtttacaaggaggtgatcatctacaacctctgccagaagcaggtggtggagaagataccactgcccttttttgccatgtccctgagcctgtcccccgggacccacctcctggctgttggctttgctgagtgcatgctgaggctggtagactgtgccatggggactgcccaagactttgccggccacgacaacgcagtgcacctgtgcaggtttacaccgtccgccaggctgctcttcacggccgcccgcaacgagatccttgtgtgggaggtccccggcctctgagatgcagcagggactgtggtggtgggcatcacgcctggtcatgccaggcacctggacacaggcttggcagaggcgccaggttgtcaatggcctcatgctgggacaggccaggattcacgtaaatcgcctggagcaagctgttgtaaatttggcgccctgtgaatactttcatacctgttgcccttttgcctaagaaatctttaatgtttctatcttgtaataaacatgggcatttattgca

SEQ ID NO: 200043 - DNA, 623 bp, Homo sapiens
  Payload ID: 19459
  Gene Name: WD repeat domain 90
  ENST ID: ENST00000551100
  CDS Start-End: 1-235
tgccagtggggaccagcgggtcagcgtctgggcctccgactggctgcggaaccactgtgagcttgtggactggttgagtttcccaatgcctgccaccacggagactcagggccacctgccaccctccctcgctgccttctgcccttgggatggggcgctcctgatgtacgtgggccccggtgtttacaaggaggtgatcatctacaacctctgccagaagcagagtgcatgctgaggctggtagactgtgccatggggactgcccaagactttgccggccacgacaacgcagtgcacctgtgcaggtttacaccgtccgccaggctgctcttcacggccgcccgcaacgagatccttgtgtgggaggtccccggcctctgagatgcagcagggactgtggtggtgggcatcacgcctggtcatgccaggcacctggacacaggcttggcagaggcgccaggttgtcaatggcctcatgctgggacaggccaggattcacgtaaatcgcctggagcaagctgttgtaaatttggcgccctgtgaatactttcatacctgttgcccttttgcctaagaaatctttaatgtttctatcttgtaataaacatgggcatttattgcat

SEQ ID NO: 200044 - DNA, 2340 bp, Homo sapiens
  Payload ID: 19459
  Gene Name: WD repeat domain 90
  ENST ID: ENST00000615333
  CDS Start-End: 65-2251
gtcgcggggcgtactctgcgctgggcgcgcggaggcctaggcgggaagctcgagcggcggcgccatggcccgagcgtggcagcacccgttcctcaacgtcttcagacacttccgggtggacgagtggaagcgctccgccaagcagggggacgtggccgtggtcacggacaagaccctgaagggcgccgtgtatcgcattcggggctcagtctctgccgccaactacatccagctccctaagagcagcacccagtctctggggctgacgggacgatacctgtatgtgctctttcggcccctgcccagcaagcacttcgtcatccacctcgatgtgtcctccaaggacaaccaagtcatccgtgtgtctttctccaacctcttcaaggagtttaagtctacggccacgtggctccagtttcccttggtcctggaggccaggacacctcagagagatctggtgggtttggccccctccggagcccgctggacctgcctgcagctcgatctgcaggacgttctcctggtctacctgaaccggtgctacggccatctcaagagcatcaggctgtgcgccagcctgctggtcaggaacctgtacaccagtgacctgtgctttgagcctgccatctctggggcccagtgggcaaagctgcccgtgactcctatgcctcgggaaatggcattccctgtgcccaagggagagagctggcatgaccgctacatccacgtccggtttccaagtgagagcttgaaagtgccttccaagccgattgagaagagctgttcccctcctgaggcagtcctcctggggccggggccacagcctctcccttgcccggtggcctccagcaaacctgtgcggttcagtgtgtctccagtggtccagacgcccagccccacagcctccggccgggccgccttggcacccaggcccttcccggaggtcagcctgtcccaagagcgctcagacgcctccaacgcggatggccccggtttccatagccttgagccctgggcccagctggaggcctctgacatccacacggctgctgccggcacccacgtgttgactcacgagtcggctgaggtgcccgtggcccgcaccggctcctgcgaaggcttcctcccagacccagtcctgaggctcaagggcgtcatcggctttgggggccacggcaccagacaggccctgtggaccccagacggggcggctgtcgtgtacccctgccatgcggtcatcgtcgtcctgctcgtggacacgggggagcagcgcttcttccttggccacacagacaaggtctccgccctggcgctggatggcagcagctcactattggcctcggcccaggcaagggcccctagtgtgatgcggctctgggacttccagaccgggcggtgcttgtgcctgttccggagcccaatgcacgttgtctgctctctcagcttctctgacagcggggcccttctctgcggggttggcaaggaccaccacgggaggacgatggtggtggcctggggcaccggccaggtgggcctcggtggcgaggtggtcgttctggcaaaggcgcacactgactttgacgtccaggccttccgggtcaccttttttgatgaaaccaggatggcgtcgtgcgggcagggcagtgtgcggctctggcggctgcgtggcggggtgctgcgttcctgccccgtggacttaggggagcaccacgcgctgcagttcaccgacctggccttcaagcaggcccgggacggctgcccggagccctcggctgccatgctcttcgtgtgcagccgcagtggccacatcttggagattgactgtcagcgcatggtcgtgcggcatgcccgccgcctgctccccacacggactccaggcggtccccacccacagaagcagaccttcagctcaggccccggcattgccatcagcagcctcagcgtctccccggccatgtgtgctgtgggctctgaggacggcttcttgcggctctggcccctggacttctcctcggtgctcctggaggcaggtgatgctgtgggcacgctctcccaactccgggagagcctcgcctggatgctggggcggggaaggcccagtccccggggctctgctgtcagccgccctggctcctggctgcacagggtgccacggccaagtggcatatccagagccctggggcggctgatgccagggcggcccgcggggcagcctcacggaagggcccggtgggacgtgggtagtgtgtgaagcccctcagcctgggtcccgcctagcctaagagtggtggcctcgagggagctgcatcttgcagccgtgtggagcctgggactttgagc

SEQ ID NO: 200045 - DNA, 4588 bp, Homo sapiens
  Payload ID: 19460
  Gene Name: WD repeat domain 91
  Uniprot ID: A4D1P6
  ENST ID: ENST00000354475
  CDS Start-End: 33-2276
accgcaccacccctaaagacgctagcgctgcgatggcggaggccgtggagcgcactgacgagctggtccgggagtacctgctcttccgcgggttcacgcacacactgcggcagctggacgccgagatcaaggcggacaaggagaaggggttccgggtggataagattgtggaccagctgcagcagttaatgcaggtgtatgacttggctgcccttcgggattattggagctacttggagcgtcggctcttcagccgcttggaggatatatacagacccacaatccacaagctgaaaaccagcctgtttcgattttatcttgtctacacaatccagacaaacagaaatgacaaggctcaggagttctttgcaaagcaggccacggaactccagaaccaggctgagtggaaggattggtttgtcctgcccttcctgccatccccggacaccaaccccacctttgctacctacttttctcgacagtgggctgacaccttcattgtgtccctgcacaacttcctgagcgtcctgtttcagtgcatgccagtccctgtgatcctgaactttgatgcggagtgtcagaggactaaccaggttcaagaagaaaatgaagttctgcgtcagaagctttttgcattgcaagctgaaatccaccgactgaagaaagaggagcaacagccagaagaggaagaggccttggtccaacacaaattgcctccttatgtctccaacatggaccgcctgggggactcggaacttgccatggtgtgcagccaaaggaatgcctccctctcccagtcacctcgtgtgggcttcctgtcctcgctgctgcctcagagtaagaagagcccctcaaggttgtcgcctgctcagggccctcctcaacctcagagctcggccaagaaagagtccttcggtggtcagggcaccaagggaaaggacccgacgtccggagccaaggatgggaagagcctcctcagcgggctggccactggggagtccggttggtcacagcaccggcagcggcgcctgcaggaccatggcaaggagaggaaggagcttttctccacaaccacttcccagtgtgcagagaagaaaccagaagccagtggcccagaggctgagccctgcccagagctccacacggagccagtggagccactgactcgggcatcctcggcaggccctgagggtggaggagtccgccccgagcagccctttattgtgctgggacaggaggagtacggggaacaccactcatccatcatgcactgcagagtggactgctctgggaggagagtcgccagcttagacgtagatggggtcatcaaagtgtggtccttcaaccccatcatgcagaccaaagcatcctccatttccaaatcaccgctgctgtctttggaatgggccaccaaacgggacagactgctcttgctgggcagtggtgtgggaacagtgcgtctctatgacacggaagccaagaagaatctctgtgaaatcaatatcaacgacaacatgcccagaatcctgtctcttgcgtgcagccccaacggggcctctttcgtctgttcggcagcagctccgagcctcacttcccaggtggacttctcagcaccagacatcggcagcaagggcatgaaccaggttcctggcaggctgctgctgtgggacacgaaaaccatgaagcagcagctccagttctccctggatccagaacccattgctatcaactgtacagccttcaatcacaacgggaacctgctggtcacaggggcagctgatggcgtcatccggctgtttgacatgcagcagcatgagtgcgcgatgagctggagggcccactacggggaggtctactctgtggagttcagctatgatgagaacaccgtgtacagcatcggcgaggacgggaagttcatccagtggaacatccacaagagtggcctcaaggtatccgagtacagcctcccctcagatgccacgggcccctttgtgctgtctggatacagcggctacaagcaggttcaagtccccaggggccgactcttcgcttttgactcggagggaaattacatgctgacatgttctgccacaggcggcgtcatctacaagctgggtggcgatgagaaggttctggagagctgcttgagcctaggtggccaccgagcccctgtggtcaccgtggactggagcactgccatggactgtgggacctgcctcaccgcctccatggatggcaagatcaagctgaccaccctcctggcccataaagcctgatgacttgccccaagggccacccgaggaagcagtattatctgcggtggggggaggagatataggacaggaaaaccacgtgctccactccagctccctgccagtgcagtgactctgcagggaaagactggcaaggaggctcaggtgcttccatctgtggtgactggaatgggacccacgtggagtaggtgacatatgcttcccagagactggtattgtggctgtgccaggagtacatgtgagactatgggaggaaagctccggaagaaggagaaacattgcagtggctactgtgttggcccagtagaaattgacagtattttgtatatatgtgcccatttatctttttcttttttaaaaaaagagaatactcttgtggtcccctgatgtctctttctaggatgtgtgtcactttgcttcagtgacagccctcccacccagcctggctctgctggccctgaactgaacctctccaggctctcctgttgctttgccatggagccaggtcagctctctgtctgttctgctgggtaacaaggtttggcagttcctgtttctctgggcttaagtcaaggccacagaattctttttcttccctgaaagctggcagcttttgttacagaagattctcaggatgaaggcaggggctgaggcctctgctactggctgcccctttccatccagtggctgctgtttcccaagacaggctaagcgtttcttatctgaaatgcttgggacaggagtgttacagattttggattttttcagactttggaatatttgcatatatacataatgaggtatcttggtaggtctcatgtctaaacatgaaattcattcatgttttatatataccttatacatgtagcctgaaggtaactctatacagtattttaaataattttgtacatgaaacaaagtattgattgtggtcaggtgtggtattttccacttgtggtgtcatgttggtgctcacagttttggggctgggcacggtggctcacgtctgtaatcccagcactttgggaggccaaggtgggtggatcacttaaggtcaggagcttgagaccagcctggccaacatggtgaaaccccatctctactaaaaataccaaaattagccaggcatggtggcaggtgcctataatcccagctactctggaggctggggcaggagaatcacttgagcccaggaggcggaggttgcagtgagccgagatcacgccactgggagaacccaactcaaaaaaaaaaaaagttttgggttatggagcatttttgattttggatctttgggttaaggacgctcaacctgtacctttttcatttggtggctcctctcattcctccaactgaacatctttgtggaaagatgatggctgcctgcacccactgctggcgaatggtgagaaggtagagcaagggggccaagttgctgctggtgggcacctggggttcaggccggcccaactgtggctgagccgatctgtagctgagctgagtgtcaaccagctgtgtccacaccctgcctgaggcctgccctctcctccctggctggggtgggaccttgaagaggcatatcttcccactaggtgaggaggaacaagagcctcactccccttctccctcttgcctttcacagctgaggcagagcttatgggaggagtcactatgggagtgatggacctgggctttggtctccagtgtttggcaggggcgaccttatcactgagctggggaaggcagctgccatgagtcattttaagtctctgagctccagcccagttctaggggcacaaggctggagtagggatactcctagttacctgcttgaggaaaagcacgaagaaattggtaccaaagtcttggctttgttctgggagttgagggaaaagtagggaggtatttaagtggcttgattatgagaaaacaccagagacagtagtaaatagttatttaccgatttttacccatttctaccctggtaatcctccctgcaaatgaagaaaaccaagacttctttatttattatctttccccatctgtattgaaacagtgatcttacttatctcacccagtgattctgtaggacatttaaaaagtggtcatgggtttcattggagtgagaatggtattaacgtttcctcttgtcatctcaaagttttctctccccttaataccatctctacagcttgctgagatgctttaaggatcacagagacacaaagaaaatttgaaccctacgcttctcccatcccacttcttactccatcccgggtgagcgctcgtcctcaaataaagcatgttggaacttc

SEQ ID NO: 200046 - DNA, 4500 bp, Homo sapiens
  Payload ID: 19460
  Gene Name: WD repeat domain 91
  ENST ID: ENST00000423565
  CDS Start-End: 50-2188
ggaagacctcatggcacattagagaaacccaaacttcccctgctctaaaatgattttccattgcgaggtggataagattgtggaccagctgcagcagttaatgcaggtgtatgacttggctgcccttcgggattattggagctacttggagcgtcggctcttcagccgcttggaggatatatacagacccacaatccacaagctgaaaaccagcctgtttcgattttatcttgtctacacaatccagacaaacagaaatgacaaggctcaggagttctttgcaaagcaggccacggaactccagaaccaggctgagtggaaggattggtttgtcctgcccttcctgccatccccggacaccaaccccacctttgctacctacttttctcgacagtgggctgacaccttcattgtgtccctgcacaacttcctgagcgtcctgtttcagtgcatgccagtccctgtgatcctgaactttgatgcggagtgtcagaggactaaccaggttcaagaagaaaatgaagttctgcgtcagaagctttttgcattgcaagctgaaatccaccgactgaagaaagaggagcaacagccagaagaggaagaggccttggtccaacacaaattgcctccttatgtctccaacatggaccgcctgggggactcggaacttgccatggtgtgcagccaaaggaatgcctccctctcccagtcacctcgtgtgggcttcctgtcctcgctgctgcctcagagtaagaagagcccctcaaggttgtcgcctgctcagggccctcctcaacctcagagctcggccaagaaagagtccttcggtggtcagggcaccaagggaaaggacccgacgtccggagccaaggatgggaagagcctcctcagcgggctggccactggggagtccggttggtcacagcaccggcagcggcgcctgcaggaccatggcaaggagaggaaggagcttttctccacaaccacttcccagtgtgcagagaagaaaccagaagccagtggcccagaggctgagccctgcccagagctccacacggagccagtggagccactgactcgggcatcctcggcaggccctgagggtggaggagtccgccccgagcagccctttattgtgctgggacaggaggagtacggggaacaccactcatccatcatgcactgcagagtggactgctctgggaggagagtcgccagcttagacgtagatggggtcatcaaagtgtggtccttcaaccccatcatgcagaccaaagcatcctccatttccaaatcaccgctgctgtctttggaatgggccaccaaacgggacagactgctcttgctgggcagtggtgtgggaacagtgcgtctctatgacacggaagccaagaagaatctctgtgaaatcaatatcaacgacaacatgcccagaatcctgtctcttgcgtgcagccccaacggggcctctttcgtctgttcggcagcagctccgagcctcacttcccaggtggacttctcagcaccagacatcggcagcaagggcatgaaccaggttcctggcaggctgctgctgtgggacacgaaaaccatgaagcagcagctccagttctccctggatccagaacccattgctatcaactgtacagccttcaatcacaacgggaacctgctggtcacaggggcagctgatggcgtcatccggctgtttgacatgcagcagcatgagtgcgcgatgagctggagggcccactacggggaggtctactctgtggagttcagctatgatgagaacaccgtgtacagcatcggcgaggacgggaagttcatccagtggaacatccacaagagtggcctcaaggtatccgagtacagcctcccctcagatgccacgggcccctttgtgctgtctggatacagcggctacaagcaggttcaagtccccaggggccgactcttcgcttttgactcggagggaaattacatgctgacatgttctgccacaggcggcgtcatctacaagctgggtggcgatgagaaggttctggagagctgcttgagcctaggtggccaccgagcccctgtggtcaccgtggactggagcactgccatggactgtgggacctgcctcaccgcctccatggatggcaagatcaagctgaccaccctcctggcccataaagcctgatgacttgccccaagggccacccgaggaagcagtattatctgcggtggggggaggagatataggacaggaaaaccacgtgctccactccagctccctgccagtgcagtgactctgcagggaaagactggcaaggaggctcaggtgcttccatctgtggtgactggaatgggacccacgtggagtaggtgacatatgcttcccagagactggtattgtggctgtgccaggagtacatgtgagactatgggaggaaagctccggaagaaggagaaacattgcagtggctactgtgttggcccagtagaaattgacagtattttgtatatatgtgcccatttatctttttcttttttaaaaaaagagaatactcttgtggtcccctgatgtctctttctaggatgtgtgtcactttgcttcagtgacagccctcccacccagcctggctctgctggccctgaactgaacctctccaggctctcctgttgctttgccatggagccaggtcagctctctgtctgttctgctgggtaacaaggtttggcagttcctgtttctctgggcttaagtcaaggccacagaattctttttcttccctgaaagctggcagcttttgttacagaagattctcaggatgaaggcaggggctgaggcctctgctactggctgcccctttccatccagtggctgctgtttcccaagacaggctaagcgtttcttatctgaaatgcttgggacaggagtgttacagattttggattttttcagactttggaatatttgcatatatacataatgaggtatcttggtaggtctcatgtctaaacatgaaattcattcatgttttatatataccttatacatgtagcctgaaggtaactctatacagtattttaaataattttgtacatgaaacaaagtattgattgtggtcaggtgtggtattttccacttgtggtgtcatgttggtgctcacagttttggggctgggcacggtggctcacgtctgtaatcccagcactttgggaggccaaggtgggtggatcacttaaggtcaggagcttgagaccagcctggccaacatggtgaaaccccatctctactaaaaataccaaaattagccaggcatggtggcaggtgcctataatcccagctactctggaggctggggcaggagaatcacttgagcccaggaggcggaggttgcagtgagccgagatcacgccactgggagaacccaactcaaaaaaaaaaaaagttttgggttatggagcatttttgattttggatctttgggttaaggacgctcaacctgtacctttttcatttggtggctcctctcattcctccaactgaacatctttgtggaaagatgatggctgcctgcacccactgctggcgaatggtgagaaggtagagcaagggggccaagttgctgctggtgggcacctggggttcaggccggcccaactgtggctgagccgatctgtagctgagctgagtgtcaaccagctgtgtccacaccctgcctgaggcctgccctctcctccctggctggggtgggaccttgaagaggcatatcttcccactaggtgaggaggaacaagagcctcactccccttctccctcttgcctttcacagctgaggcagagcttatgggaggagtcactatgggagtgatggacctgggctttggtctccagtgtttggcaggggcgaccttatcactgagctggggaaggcagctgccatgagtcattttaagtctctgagctccagcccagttctaggggcacaaggctggagtagggatactcctagttacctgcttgaggaaaagcacgaagaaattggtaccaaagtcttggctttgttctgggagttgagggaaaagtagggaggtatttaagtggcttgattatgagaaaacaccagagacagtagtaaatagttatttaccgatttttacccatttctaccctggtaatcctccctgcaaatgaagaaaaccaagacttctttatttattatctttccccatctgtattgaaacagtgatcttacttatctcacccagtgattctgtaggacatttaaaaagtggtcatgggtttcattggagtgagaatggtattaacgtttcctcttgtcatctcaaagttttctctccccttaataccatctctacagcttgctgagatgctttaaggatcacagagacacaaagaaaatttgaaccctacgcttctcccatcccacttcttactccatcccgggtgagcgctcgtcctcaaataaagcatgttggaacttc

SEQ ID NO: 200047 - DNA, 2626 bp, Homo sapiens
  Payload ID: 19461
  Gene Name: WD repeat domain 92
  Uniprot ID: Q96MX6
  ENST ID: ENST00000295121
  CDS Start-End: 118-1191
ggggcagaatacggaaagcgggagggacaaattgccaatgtttggagtctggtttccaggttgccgtttttgggggctctgggtgtggcggttgccgtagctgaaattggctgcaccatgtcggccttcgagaagcctcagatcatcgcccatatccagaagggcttcaactacacggtgtttgactgtaagtgggtgccctgcagcgccaaatttgtgaccatgggcaacttcgcacggggcaccggcgtcattcagctgtacgagatccagcacggggacctgaagctgcttcgggagattgaaaaggccaaacctattaaatgtggaacatttggtgcaacatctttacagcagagatatttagctactggagattttggtggaaaccttcatatatggaatttagaagctccagagatgccagtatattctgtaaagggccataaagaaattataaatgccatagatggcataggtggactaggaattggagaaggagcacctgaaattgtgactggcagccgagatggaactgtgaaggtgtgggacccaaggcaaaaagatgatcctgttgctaatatggaacctgtacaaggagaaaacaagagagactgttggactgtggcatttggcaatgcttataatcaagaagaacgtgttgtttgtgctggctatgacaatggggatatcaaactatttgatctcagaaatatggcattacggtgggagacaaacatcaaaaatggggtgtgtagcttggagtttgacagaaaagacataagtatgaataagttagtagccacatctctggaaggaaagttccatgtttttgacatgagaacacagcatccaaccaaaggttttgcctctgtttcagaaaaggctcataaatctactgtgtggcaggtccgacacctgccgcagaacagggagctctttctgacagctggaggcgccggcggccttcacctctggaagtatgaataccctattcagcggtcaaagaaagattctgagggaatagaaatgggagtcgcaggttctgtaagccttctgcagaatgttacgttgtccacccagcccatttcaagtttggattggagtccagataaaaggggtctctgcgtctgtagttcatttgaccaaacggtgagagtactgatcgttacaaagctcaataaaatttgacttcaagactttggacttgaggctgggcacggtggctcactcctgtaatcccagcactttgggaggccgaggcgggtggatcagaaggtcaggagatcgagaccatcctggctaacatggtgaaaccccgtctctactaaaaatataaaaaaaaatttgctgggtgtcatggcgggcatctgtagtcctagctacttgggaggctgaggcaggagaatggcgtgaacccgggaggcggaggttgcagtgagccgagattgtgccactgcactccagcctgggcaactgagcaagactgtctcaaaaaaaaaaaaaaaaaaaaagactttggacttgaaaccttccagaggaacactcacacaatttaagataggttctggagtcctctgaccctcattgaacaaagctggatttggctgatgataaaagaccccagccacaagcctctgggccagcctccagcctctctcggggcttgtttgctgacttgctgctgcacgtgggtatcagaagcaccaagtaaactatctccagggccagttcttttctctcccttccatttctaagtcaatagttgtctataattaaacatatttcagatttgttctgtgtccctgaagttccatattttatctttatgcttgtgttatgttttagtgtctataatgttgtggtgggaatcatttcatttggtttaaaagagtttgccttggaaaaactgaattaaccttcataaatacattttgagagatttcagtgtgagtaattttctggacataatattattgtataaaatatcaaaatggtgggccaggcgtggtagctcacgcctgtaattccagcactttgggaggctgaggcgggtgaatcacgaggtcaggaattcgagaccagcctggccaacatggtcaaaacccgtctctactaaaaatacaaaaaattagctgggcttagtggcgggcgcctgtaatcacagctacttgggaggctgaggcaggagaatcacttgaacccaggaggtggagattgcagtgagctgagattgcgccactgcactccagccctggcgacagagtgagactccgtctcaaaaaaaaaaaaaacaaatatatatatatatatctctctctctcaaaacggcacggttggtctagatttgggtagctattttctgcaatttaattcataaaacaaaatgctttgattttaaagagctcttttttacttaaaatacaggaactgaattggtgagacttttggtttttgactgtggtaagtgatggtgaaatgtacaagattgtaggggttttgtagtcttatttttggtcatactttaaaaatgcattttatgaataaacttctgtttttgagatctacagaagctttgattctgttaccttaacagtagtaataaagttaacattgtcacatcatt

SEQ ID NO: 200048 - DNA, 1401 bp, Homo sapiens
  Payload ID: 19461
  Gene Name: WD repeat domain 92
  ENST ID: ENST00000406245
  CDS Start-End: 221-784
gcggttgccgtagctgaaattggctgcaccatgtcggccttcgagaagcctcagatcatcgcccatatccagaagggcttcaactacacggtgtttgactattgaaaaggccaaacctattaaatgtggaacatttggtgcaacatctttacagcagagatatttagctactggagattttggtggaaaccttcatatatggaatttagaagctccagagatgccagtatattctgtaaagggccataaagaaattataaatgccatagatggcataggtggactaggaattggagaaggagcacctgaaattgtgactggcagccgagatggaactgtgaaggtgtgggacccaaggcaaaaagatgatcctgttgctaatatggaacctgtacaaggagaaaacaagagagactgttggactgtggcatttggcaatgcttataatcaagaagaacgtgttgtttgtgctggctatgacaatggggatatcaaactatttgatctcagaaatatggcattacggtgggagacaaacatcaaaaatggggtgtgtagcttggagtttgacagaaaagacataagtatgaataagttagtagccacatctctggaaggaaagttccatgtttttgacatgagaacacagcatccaaccaaaggttttgcctctgtttcagaaaaggctcataaatctactgtgtggcaggtccgacacctgccgcagaacagggagctctttctgacagctggaggcgccggcggccttcacctctggaagtagtaagtctgccagtgcacactgctccttttaaagttacctgtgggtgtaaagtaggattagattgaacttttttttcttttttttcctgctttgacttagttcattttgatatgatttaaaatttcatggtgttacataacttgttttctaagcattttgtatgaatatactttacacttagtagagtgtacactaatcttcttttgatacattttagtatatcattttagttgtgtcttctaagtatgaaaaagttggcccaagacttttatcagatactatcttgaagtgattagaacactcactgcctctaaaagatggggaaagggttccttgcctaaatttagataacatcattgtgatagaccccaacagagcctgaggctgctgattggtctccaggaaagatcttatcactgaatttgctttctgcatatctaggcagggtgagttacaatgaaagcttttactatgcacaccactttctgaatcccaagggcgctaacatcacagatactagatcatttaaaaggtctgatatcattgctcagggttggcctgtgaaaaggaaacaaaacaaaacaaaacaaaaattaaaggtctgataaaaattgtga

SEQ ID NO: 200049 - DNA, 1517 bp, Homo sapiens
  Payload ID: 19461
  Gene Name: WD repeat domain 92
  Uniprot ID: Q96MX6
  ENST ID: ENST00000409164
  CDS Start-End: 40-906
ctgggtgtggcggttgccgtagctgaaattggctgcaccatgtcggccttcgagaagcctcagatcatcgcccatatccagaagggcttcaactacacggtgtttgactgtaagtgggtgccctgcagcgccaaatttgtgaccatgggcaacttcgcacggggcaccggcgtcattcagctgtacgagatccagcacggggacctgaagctgcttcgggagattgaaaaggccaaacctattaaatgtggaacatttggtgcaacatctttacagcagagatatttagctactggagattttggtggaaaccttcatatatggaatttagaagctccagagatgccagtatattctgtaaagggccataaagaaattataaatgccatagatggcataggtggactaggaattggagaaggagcacctgaaattgtgactggcagccgagatggaactgtgaaggtgtgggacccaaggcaaaaagatgatcctgttgctaatatggaacctgtacaaggagaaaacaagagagactgttggactgtggcatttggcaatgcttataatcaagaagaacgtgttgtttgtgctggctatgacaatggggatatcaaactatttgatctcagaaatatggcattacggtgggagacaaacatcaaaaatggggtgtgtagcttggagtttgacagaaaagacataagtatgaataagttagtagccacatctctggaaggaaagttccatgtttttgacatgagaacacagcatccaaccaaaggttttgcctctgtttcagaaaaggctcataaatctactgtgtggcaggtccgacacctgccgcagaacagggagctctttctgacagctggaggcgccggcggccttcacctctggaagtagtaagtctgccagtgcacactgctccttttaaagttacctgtgggtgtaaagtaggattagattgaacttttttttcttttttttcctgctttgacttagttcattttgatatgatttaaaatttcatggtgttacataacttgttttctaagcattttgtatgaatatactttacacttagtagagtgtacactaatcttcttttgatacattttagtatatcattttagttgtgtcttctaagtatgaaaaagttggcccaagacttttatcagatactatcttgaagtgattagaacactcactgcctctaaaagatggggaaagggttccttgcctaaatttagataacatcattgtgatagaccccaacagagcctgaggctgctgattggtctccaggaaagatcttatcactgaatttgctttctgcatatctaggcagggtgagttacaatgaaagcttttactatgcacaccactttctgaatcccaagggcgctaacatcacagatactagatcatttaaaaggtctgatatcattgctcagggttggcctgtgaaaaggaaacaaaacaaaacaaaacaaaaattaaaggtctgataaaaa

SEQ ID NO: 200050 - DNA, 523 bp, Homo sapiens
  Payload ID: 19461
  Gene Name: WD repeat domain 92
  ENST ID: ENST00000457114
  CDS Start-End: 1-278
tcagaaatatggcattacggtgggagacaaacatcaaaaatggggtgtgtagcttggagtttgacagaaaagacataagtatgaataagttagtagccacatctctggaaggaaagttccatgtttttgacatgagaacacagcatccaaccaaaggttttgcctctgtttcagaaaaggctcataaatctactgtgtggcaggtccgacacctgccgcagaacagggagctctttctgacagctggaggcgccggcggccttcacctctggaagtagtctaacatctccaccctgtgacgccttcccatagaaatggtacacaaaaggtccttaggcttgggtccgtgtaatggagctcgagggttagaagctggcatcagtttttcattctggaagtgtttagatgaagttctgcaaatgttacttacagccattgcctttgcacattgtttgcctgtgatatccagcaatctatatctggagaaaaattacaataaataaaagattgccaaaagcaccaa

SEQ ID NO: 200051 - DNA, 2409 bp, Homo sapiens
  Payload ID: 19462
  Gene Name: WD repeat domain 93
  Uniprot ID: Q6P2C0
  ENST ID: ENST00000268130
  CDS Start-End: 102-2162
cggacttccggttcaagccggaagttgtggttaccaaggcgacgcaacgccgcccggccagcttttcagtttcatagaggttcccagtgccaccttctgtgatgtcattcccaagaggaagtcagacccagaaaataaagcaccccattggtacacgaaagggaccattggaggtgccacccccaacagagaaggactggcctaaagacgatgaacaggatcatgtcctcgtggatccagatgaggagctggattccttgcctcagccttatcgaatgatcaacaagctggtgaaccttctgtttgaccagtcttgggaaattattgaagagagaaacgcactgagggaagctgagagcagccagatccagcccaccgtctaccctccacttggagaaatccagctcaacaaaatgccaaattgtatggctgtttcccaagactatgtgtttattggaggagccaaaggattctcaatttataatctgtacagtgctaaacaaatatatgcgtgggagaagcttaaggttgatgtcacttccatctgggccacagatttagggaatgaaatactcattgctcctgtggatgaaatgggtatcattagactcttttatttttataaggaaggactttacctagtcaaagccatcaatgaagtggatgataccagcaagcaaactacctgtataaagatggagatctctcaaggaggggactttgcagccttcctcctacaaggagccggagatatttggctggatgtgtataaattgcccaaggagacttggctcaagaaactagagcacccccaactcacttcaaatccaaagaaaaaagtcagacagccgcaactgaactcccttggtcccatttctgcagatcctttagaaatggatgcaaatgttagttttaaaggagacattaaattgagtcttccagtttacataatgaagatcaaaccacctaagcctgttacaggcaccacattcaaaagccccctggaagtctttgcaaagatcaaggactgctacggactgggctccgggcagaatcatttcatcaaggacagtcagtgggagcagcaagctgagatcttcaacgcttcctacaagaagtacctagatagggagtgggaggaagagccactcagtacggccaccttctatttccttcttcctagctgcctatttgcaatgccaccggaagtcaagggcccctcaggaatggcctgtgtccttggtatacactggaccagaagtcacaatttcttcctgtattcactaaaccgaactctaaaggataaagctgaccccgagggtgtgtggccctgtgctgcgcccattgcagtctctcagctcagctgctcctcctcctacctggtgctggcctgcgaggatggtgtgctcacgctgtgggacctggccaaaggattccctcttggggtcgctgctcttcctcagggatgtttctgccaaagcattcacttcctaaaatatttctcggtccacaaaggacagaatatgtatcctgaaggtcaagtgaaatcccaaatgaaatgtgtggtgctgtgcacagacgcctccctccatctggtggaggctagcgggacccaaggacccaccatcagtgtgcttgttgagaggcctgtaaagcacctggataaaaccatctgtgccgtggccccagtcccagccttacctggcatggtgctcatcttttccaagaatggctctgtgtgccttatggatgtggccaagcgtgaaatcatctgtgcctttgcccctccgggagcctttcctctggaggtcccctggaagccagtgtttgctgtgtctccagaccatccatgtttcctgctccgaggagactattcacatgaaactgcgtccaccgacgatgctggaatccaatattctgttttctattttaattttgaggcctgcccactcctggaaaatatctcaaaaaattgtaccattcctcaaagggacttggataacatggccttcccccaagcactgccactggagaagagatgtgagcgtttcctccagaagagctatcggaagctggagaagaacccagagaaggaggaggagcactgggcccggcttcagaggtactccttgtcgctccagagagagaacttcaagaagtgaggctgccaccgccctgggatctctgaaaaggaggtttcagccacgaggcagctgctcccaggacactgaggccaagagaaatgtaacagagccacagctccacaggcctgcactcggagtctggggcctctgcagagccagcaaggggaaaagtataatctgggggaccttcaaccactaagcctcttgtcagagccctcaggcaggcagatgtgtcacccaaataaacagtgatattgtctccaga

SEQ ID NO: 200052 - DNA, 1886 bp, Homo sapiens
  Payload ID: 19462
  Gene Name: WD repeat domain 93
  ENST ID: ENST00000558000
  CDS Start-End: 55-576
cgccgcccggccagcttttcagtttcatagaggttcccagtgccaccttctgtgatgtcattcccaagaggaagtcagacccagaaaataaagcaccccattggtacacgaaagggaccattggaggtgccacccccaacagagaaggactggcctaaagacgatgaacaggatcatgtcctcgtggatccagatgaggagctggattccttgcctcagccttatcgaatgatcaacaagctggtgaaccttctgtttgaccagtcttgggaaattattgaagagagaaacgcactgagggaagctgagagcagccagatccagcccaccgtctaccctccacttggagaaatccagctcaacaaaatgccaaattgtatggctgtttcccaagactatgtgtttattggaggagccaaaggattctcaatttataatctgtacagtgctaaacaaatatatgcgtgggagaagcttaaggttgatgtcacttccatctgggccacagatttagggaatgaaatactcattgctcctgtggatgaaatgggtattgttcttcatcttcctttttagcctcatttacaggtacctgtagactgttgtcaatttaatctccttttgaggtattggtggggccaggcatggagacttctccctggtcatgtaatagtaactatatgtacagaacaggtatggtgggtcagatactgttctaccatttcacatgtgctagcccatttaatcctcatggcagccttaggggggaagtaaaattttttattcctgttcagaagaggcaactgacttatggaagctaaataacttatttgaggtaacatggaaagtcaggcttcaaaccaggcagtatggccctggagtccacacccttccagcactcagcagtcctctcatacaaaccagagcttgctctttttccctcagcctgaggatgaaccaggcctccatgaggagtatggtatcgaaaactgtagacagtgtcctagataggtgagctgttactcttggttgccccccaaaagctaggctccctctagcctgtccttatgtttgggtgaaacagactgttacctctggatttgaggagctttcctactttgtggaggatgagaaggcaaatgtcagcattggctggaagtgagtgaggtggctgtgtcatattgtggcaggcagagcggaaagtgcctgctcacttggagatcatctgtgaaggcatgcatctctctagacctcaggctctgctcaaccagcacaggcacactgaagaactttctgcaggagagtgacctgaccagactggcatttaagaagggcactctagcaggagtttgaaaaaggcaaaatgagaggcagaaaaactatgcagtcattaaggagagaaaattctgaacatctgaaccaagacaggggctgttaaaatgaaaagaaaggccaggtgtggtggctcatgcctgtaatcccagcactttgggaagcccaggcaggtggatcacttgaggtcaggagtttgacaccagcctggccaacatggtgaaaccccgtctttacgaaaaatacaaaaaaaaaaaaaaaaaaattagccaggcgtggtgggcacccaggtgctcgggaggctgaggaaggagaattgcttgaacccaggaggcggagattacagtgagctgagatcgcaccattgcactccagcatgggtgacagaatgagactccatctcaaaaaaaaagaaaagaaaaagtgtactatggttatgtaagatgttaacattaggggaagcaagacaagggatacaaagaaactctgtactatttttgtaacttttttataagtctaaaattagttcaaaataaaaagcttaaaaaatgaaa

SEQ ID NO: 200053 - DNA, 2293 bp, Homo sapiens
  Payload ID: 19462
  Gene Name: WD repeat domain 93
  Uniprot ID: Q6P2C0
  ENST ID: ENST00000560294
  CDS Start-End: 70-2046
accaaggcgacgcaacgccgcccggccagcttttcagtttcatagaggttcccagtgccaccttctgtgatgtcattcccaagaggaagtcagacccagaaaataaagcaccccattggtacacgaaagggaccattggaggtgccacccccaacagagaaggactggcctaaagacgatgaacaggatcatgtcctcgtggatccagatgaggagctggattccttgcctcagccttatcgaatgatcaacaagctggtgaaccttctgtttgaccagtcttgggaaattattgaagagagaaacgcactgagggaagctgagagcagccagatccagcccaccgtctaccctccacttggagaaatccagctcaacaaaatgccaaattgtatggctgtttcccaagactatgtgtttattggaggagccaaaggattctcaatttataatctgtacagtgctaaacaaatatatgcgtgggagaagcttaaggttgatgtcacttccatctgggccacagatttagggaatgaaatactcattgctcctgtggatgaaatgggtatcattagactcttttatttttataaggaaggactttacctagtcaaagccatcaatgaagtggatgataccagcaagcaaactacctgtataaagatggagatctctcaaggaggggactttgcagccttcctcctacaaggagccggagatatttggctggatgtgtataaattgcccaaggagacttggctcaagaaactagagcacccccaactcacttcaaatccaaagaaaaaagtcagacagccgcaactgaactcccttggtcccatttctgcagatcctttagaaatggatgcaaatgttagttttaaaggagacattaaattgagtcttccagtttacataatgaagatcaaaccacctaagcctgttacaggcaccacattcaaaagccccctggaagtctttgcaaagatcaaggactgctacggactgggctccgggcagaatcatttcatcaaggacagtcagtgggagcagcaagctgagatcttcaacgcttcctacaagaagtacctagatagggagtgggaggaagagccactcagtacggccaccttctatttccttcttcctagctgcctatttgcaatgccaccggaagtcaagggcccctcaggaatggcctgtgtccttggtatacactggaccagaagtcacaatttcttcctgtattcactaaaccgaactctaaaggataaagctgaccccgagggtgtgtggccctgtgctgcgcccattgcagtctctcagctcagctgctcctcctcctacctggtgctggcctgcgaggatggtgtgctcacgctgtgggacctggccaaaggacagaatatgtatcctgaaggtcaagtgaaatcccaaatgaaatgtgtggtgctgtgcacagacgcctccctccatctggtggaggctagcgggacccaaggacccaccatcagtgtgcttgttgagaggcctgtaaagcacctggataaaaccatctgtgccgtggccccagtcccagccttacctggcatggtgctcatcttttccaagaatggctctgtgtgccttatggatgtggccaagcgtgaaatcatctgtgcctttgcccctccgggagcctttcctctggaggtcccctggaagccagtgtttgctgtgtctccagaccatccatgtttcctgctccgaggagactattcacatgaaactgcgtccaccgacgatgctggaatccaatattctgttttctattttaattttgaggcctgcccactcctggaaaatatctcaaaaaattgtaccattcctcaaagggacttggataacatggccttcccccaagcactgccactggagaagagatgtgagcgtttcctccagaagagctatcggaagctggagaagaacccagagaaggaggaggagcactgggcccggcttcagaggtactccttgtcgctccagagagagaacttcaagaagtgaggctgccaccgccctgggatctctgaaaaggaggtttcagccacgaggcagctgctcccaggacactgaggccaagagaaatgtaacagagccacagctccacaggcctgcactcggagtctggggcctctgcagagccagcaaggggaaaagtataatctgggggaccttcaaccactaagcctcttgtcagagccctcaggcaggcagatgtgtcacccaaataaacagtgatattgtctccaga

SEQ ID NO: 200054 - DNA, 6916 bp, Homo sapiens
  Payload ID: 19463
  Gene Name: WD repeat domain 97
  Uniprot ID: A6NE52
  ENST ID: ENST00000323662
  CDS Start-End: 26-4894
gggctctgggaccgcagttgctgaaatggaggcagaggtgtgggaggcagaaggctacaacctagttctggactcggacctgtatgatgcggatggctatgatgtcccagaccctgggctgctcaccgaaaagaatgagttgactttcacggagccgtcgcaggtcctgccctttttgaccagcagccaacagtggcaaagcctgaccccgcgcgcccgcgcccgccggctgtggctgcttctgcgcaccagcctccacgaagtcgtggaaaaggagaagagagccgagctgcgcgcggcgcgcctgacgcatgggctggaaccactgcgccgcctggaggtggcagccgggctgcgctcggtggcgcaggacccggtgggtggacgcttcgtggtgctggacggcgcgggccgcctgcacctgcacaaggaagacggctgggcacaggagacgctgctggcgcctgtccggcttacggggctggtgaccgtgctgggcccgctgggtgccgtgggccgttttgtaggctggggccccgcggggctggcaattctgaggcccaacctcagcctgctgtggctgagcgagcagggggtgggcagggccccgggttgggcgcccacctgctgcctgccggttcccgacctcaggctgctgctcgttgcggagatgaacagcagcctggcgctctggcagttccgttcaggtggtcgccgcctggtgctgcgagggtcagcactgcacccgcccccgagcccaacaggcaggctcatgcgtctggctgtggcgccggttcctccccaccacgtcctgcgctgcttcgcggcctatggctcggccgtgctcaccttcgatctgcatgcctggactctcgtagatgtgcgccgggatttgcacaaaaccaccatctcggacctggcttactgcgaggaagtagaggcaatggtgacagcttcccgggacagcaccgtgaaggtgtgggaggctgactggcagatccggatggtgttcgtgggccacacaggcccggtgacggctatgactgtgctcccgaacacgaccctggtgttgtcggcctcgcaggacgggacgctacgcacctgggacctgcaggcggcggcgcaggtgggcgaggtagcgctgggcttctggggccaggacaagctgtcccggcgcgtgggccgtctgctggcgccggtgcgcccgggctggccggtgctgtccctgtgcgcgagcagcatgcagctgtggcgcgtacgcgagctctactcgccgttggcgcaactgcccgccaaggtgctccacgtgcaggtggcgcccgcgttgcccgcgcctgcgcaccagtcgctgcctacgcgcctcgtgtgcgcgtgcgccgacggctcggtctacctcctgtcggcggccaccgggcgcatagtgagctcactgctgctggagccggaggactgcgcggcagccgtggcctactgcctgccgcgcgaggcgctgtggctgctgaccagggctgggcacctggtccgcgccaacgcggcgcgctgccccatgagcgtgctgcaccgcgtgtgcccgccgccgccccctgcgccgcagccttgctgtctgcacctgtacagccacctcacggatctcgaaggcgccttctcctcctgggagatcgtgcgccagcactggggcgagttgcgctgcagctctgtggcctgcgcctggaagaacaagaaccggtacctgccagtggtggggcacacggacggcacgctgtcggtgctggagtggctctcgtcgaagactgtcttccaaacggaggcgcacagcccgggcccggttgtcgccatcgcatccacctggaacagcattgtgtcttcgggtggggacctgacggtgaagatgtggcgcgtcttcccctatgccgaagagagcctgagcctgctgcgcaccttctcctgctgctacccggccgtggcgctctgtgcgctaggcagacgcgtcaccgcgggctttgaggacccagacagcgctacctacggcctggtgcagtttggcctgggcgacagtccgcgattagaccaccggccccaggacgaccccacggaccacatcactggcctgtgctgctgccccacgctcaaactgtatgcctgctccagcctggactgcaccgttcgcatctggactgctgagaaccgcctcctgcggctcctgcagctgaatggtgcccctcaggccctggctttctgcagcaacagtggagacctggtgctggcgctgggatcccgcctctgcctggtgtcccacaggctctacctgcctacatcctacctagttaagaagatgtgccggaaggccccagacgtggtggacgaccctccgctgccactgatgagccaggagtcactgacttccgcccaactgcagaggctcaccaacctccatggggcagccagcctcagcgaggccttgtctctcatccatcgtcggagggcaacatctcagcacctggtgccgaaggaggacttggacgccatagtggcccgggaccgagaccttcagcagttgaggctggggctagtggtcccagcagcccagcccccaccctcctggcagcagcgccaggaaggctttgacaattacctccgtctgatctacggctctggcctgctgggcatgcagtctggaagggggtcccagcagtggagtgccgggaccctcagagtggagagagagacccgggatgtgtgtgctgtaccccaagctgcccactgtcttgcccgggctgaggtcagcactgcagcccaaacagtgccaacagccctgtccccacaggacctgggagccctgggccagcacttctcccagtctccccgagtcacagtgccgatcccacccacccaccgtagggtgcacagcaaggcatcccagcttctggcccgctcctcactgagccactacctgggcatcagtctggatctgcagctgcagttggagcagctccgagggaggacgaccatggccctggacctgccatcctcccacttgcagtgcaggatcccactgctgccaaagagatgggacaaggaacctctctctagcctcaggggcttctttcctgccaccgtgcagccccacaagcactgcctgaggcccatctgcttccccggctatgtgcccaactccgcggtgctacagcagatgtggctaaatgcggagccaggggcaagccaggatgccctgtggttgtggcgccccaggccatcccaaacccagtggcagaggaagctgctccaatggatgggggagaagcctggggaggagggggaggaagacaagaaggaagaggaggaggagaaggaagacgaggagctggactgggccttggcttccctgagcccgcactccaaccagcagctggattcctgggaactggaggatcagagtgctgtggactggacccaggagccccggcggcgcagctgcaaggttgccaggacccaccctcatccctggcaccgtcatgggagtttgctcttggatgagcattacgggcatctgcccaagtttctgcatttcttcatctaccagacctggttcaaaaagttgttccccatcttcagcctgcaggcatacccggaggcgggcacgatcgagggcctggcctcgctgttggtggccctgctggagaagaccacgtgggtcgaccgtgtgcacatcctgcaggtgctactgagactgctgcccaacatgagcagtgatctccaaggccagctgcagggcctgctcgtacacttgctcaacctggaccagccccccagcctccaggaccagacacagaagaagttcgtgatactggcgctgcagctgctcctggcctgctccctggagtcccgggatgtggtgctggagctcatgtcctacttcctctactctcccgtgcactgccggccagagctcaagaagctgctgcacgggctgggccttcaggacccagagggcttcctattcaaggagatgatgacctgggtccagggcccagacctggactccaaggccggcctgcgcacttgctgccaccagaaactggaggacatgatccaggagcttcaggagaccccatcgcagacgtcagtggtctctggggcacccacacgcgcctccgtgataccctcgggcacctcctggtcggcctccggcatcttcgggaggctctcgcaggtctcagaggtgcctttgatggtggtctcacctgcggagccgcactctttagccccggagctccaggcccagcggatgctggcacccaagcgcagctgggggacccctcagctccgtctcagagtgctctccgagacgctgaagagcttctgcctggagcccgaggcccgcctgcaccctgccgggcctgctcagctgcccggagagccgccgccgctggaggagaccgactggtcgcactcgcagctgctggacttgggccccatcgacgcgctcaacttcttctgtgagcagctgcgggcgcagcagcggagttcgctccaggagaaggctgcgcacccacacccgccagagccctacacggtggcgccggtgcccgacatggtggtgccacctccgcgggagcactggtaccaccccatcctccggctgcaggaggccaagccgcagaggtccgcgaggtccgcgatgagactgaggggccccatgcggtcccggctctgtgcgggccgcaccctggacggccccatccggacgctgaagctgccgttgccgcgtgtggagccgcagcctttccccctggactggcctatgcccccgcgcccgctgcccccgcggctcctgcagccggccctgcagcgctactttctgccagcggacgcggaccctgacacctacagctgaccggactggtggcctcagcccgcctggctctggggcctgtcattggtatttggccaaggcctgcatcgggaataaagtccagagaatttctttctgcaggatgccgcctgctttggagggccccggggtgcgcacggcgtgtgggcgtgcggcctgaacccacagtggcggcggaaggcaggagccggaggcctggcggaggtggccatcgtgggcaccagcgttcccggaggggtggccggcctagggcagaggagacccatagcggggtaccatccgctgggcactgagcaaacgttttctgctcaagtactaggtgttgagatgcgggctgaccttagagaacgtgtcctgggccagcccacagcctggtgtggaggggagtccgggagggcctgggcggtcccaggatgagccttccgggtcgatgcaggtgagaccaggagtttgcagaccttgctttcgttacttttattctggcaaagagaagaattgacaaaggcaccaggagcttttttctgagcggcaacgcagagcatcctctgacccctttagcctgaaagtccctaggggaggggcttggtccggaagggctcggcctctgggccgggcccctctgccctgtgtggcctggcagggcgcaagacctgtgcacagagttcttggggcagctctggggggaatccccggcttttacacctgtcttttgtgttgtctgagcagtgatttccctcctgtatctgtagcctctgactttactagtttcttcttgatggctctggttagaatcgcttctccacaccttccctgtcaccccaaactgtgcggtggctcttgttatggggccaccaaatggctgctctttcccaggccggtgcttgacacagtggtgccaccatcccaagagcatgggtgcgcaggaccgtgcgggacagccaagttgctgggcccagctgaacctgcctcttcacctccaggcactaccgcatcctcccactgcagaaggccaaggttcacaggtgtgcgatgagactgaggactgagtctgtcactagaggacttgacactttttataaaaaaaatgagtaaacctagatacctcgatcagtgtctagcgatgtcaaggcccccagtttgggttcaagcctgctgggacagtcctgcagctgctgggtcacagagtggccaaggccctctgatttttggtcaggacacagaaagatagcagggggcagggggggatctgagggaccccacatgacttacaatcagacaaggtaggtcagaggatttctttatggctatctgttttgttttgttttgttttgttttgttttttgagatggagtttcagtcttgttgcccaggctggagtgcaatggcgtgatctcggctcactgcaacctctgcctcccggattcaagcaattctccttcctcagcctcctgagtagctgggattacaggcatgtgccaccacgcccagctaattttgtatttttagtagagatggggtttcatcacgttgaccaggctggtctcgaactcctgacctcaggtgatccgcctgcctcagcctctcaaagtgctgggattacaagcatgagccactgtgcccagccttctttatggctatctccaagacagcaaaggcaggggaaagtcctgccttggggagaaaaaggagggtgggaaaaggtcaaagagaaagatgctgttgtctgagtcttgcctctgaggcctaagttccccaacattataacaagggatatgggagttataagccaggaactgtggatggaaaccaatgacagatatcataatatcacacccacacatcaggcaagagacttgttccttaaaaattatctagtttagccgagcgtggtggctcacacctgtaatcccagctacttgggaggctgaggcaggagaatcacttgaacccaggaggtggaggttgcagcaagcagagatcacaccactgcactacagcctcggcaatagagcgagactctgtgtc

SEQ ID NO: 200055 - DNA, 7119 bp, Homo sapiens
  Payload ID: 19463
  Gene Name: WD repeat domain 97
  ENST ID: ENST00000534167
  CDS Start-End: 26-2539
gggctctgggaccgcagttgctgaaatggaggcagaggtgtgggaggcagaaggctacaacctagttctggactcggacctgtatgatgcggatggctatgatgtcccagaccctgggctgctcaccgaaaagaatgagttgactttcacggagccgtcgcaggtcctgccctttttgaccagcagccaacagtggcaaagcctgaccccgcgcgcccgcgcccgccggctgtggctgcttctgcgcaccagcctccacgaagtcgtggaaaaggagaagagagccgagctgcgcgcggcgcgcctgacgcatgggctggaaccactgcgccgcctggaggtggcagccgggctgcgctcggtggcgcaggacccggtgggtggacgcttcgtggtgctggacggcgcgggccgcctgcacctgcacaaggaagacggctgggcacaggagacgctgctggcgcctgtccggcttacggggctggtgaccgtgctgggcccgctgggtgccgtgggccgttttgtaggctggggccccgcggggctggcaattctgaggcccaacctcagcctgctgtggctgagcgagcagggggtgggcagggccccgggttgggcgcccacctgctgcctgccggttcccgacctcaggctgctgctcgttgcggagatgaacagcagcctggcgctctggcagttccgttcaggtggtcgccgcctggtgctgcgagggtcagcactgcacccgcccccgagcccaacaggcaggctcatgcgtctggctgtggcgccggttcctccccaccacgtcctgcgctgcttcgcggcctatggctcggccgtgctcaccttcgatctgcatgcctggactctcgtagatgtgcgccgggatttgcacaaaaccaccatctcggacctggcttactgcgaggaagtagaggcaatggtgacagcttcccgggacagcaccgtgaaggtgtgggaggctgactggcagatccggatggtgttcgtgggccacacaggcccggtgacggctatgactgtgctcccgaacacgaccctggtgttgtcggcctcgcaggacgggacgctacgcacctgggacctgcaggcggcggcgcaggtgggcgaggtagcgctgggcttctggggccaggacaagctgtcccggcgcgtgggccgtctgctggcgccggtgcgcccgggctggccggtgctgtccctgtgcgcgagcagcatgcagctgtggcgcgtacgcgagctctactcgccgttggcgcaactgcccgccaaggtgctccacgtgcaggtggcgcccgcgttgcccgcgcctgcgcaccagtcgctgcctacgcgcctcgtgtgcgcgtgcgccgacggctcggtctacctcctgtcggcggccaccgggcgcatagtgagctcactgctgctggagccggaggactgcgcggcagccgtggcctactgcctgccgcgcgaggcgctgtggctgctgaccagggctgggcacctggtccgcgccaacgcggcgcgctgccccatgagcgtgctgcaccgcgtgtgcccgccgccgccccctgcgccgcagccttgctgtctgcacctgtacagccacctcacggatctcgaaggcgccttctcctcctgggagatcgtgcgccagcactggggcgagttgcgctgcagctctgtggcctgcgcctggaagaacaagaaccggtacctgccagtggtggggcacacggacggcacgctgtcggtgctggagtggctctcgtcgaagactgtcttccaaacggaggcgcacagcccgggcccggttgtcgccatcgcatccacctggaacagcattgtgtcttcgggtggggacctgacggtgaagatgtggcgcgtcttcccctatgccgaagagagcctgagcctgctgcgcaccttctcctgctgctacccggccgtggcgctctgtgcgctaggcagacgcgtcaccgcgggctttgaggacccagacagcgctacctacggcctggtgcagtttggcctgggcgacagtccgcgattagaccaccggccccaggacgaccccacggaccacatcactggcctgtgctgctgccccacgctcaaactgtatgcctgctccagcctggactgcaccgttcgcatctggactgctgagaaccgcctcctgcggctcctgcagctgaatggtgcccctcaggccctggctttctgcagcaacagtggagacctggtgctggcgctgggatcccgcctctgcctggtgtcccacaggctctacctgcctacatcctacctagttaagaagatgtgccggaaggccccagacgtggtggacgaccctccgctgccactgatgagccaggagtcactgacttccgcccaactgcagaggctcaccaacctccatggggcagccagcctcaggtcccatgcaggcctgctcagccctcctggaggccctcctttcccactctgggtgggggcctggcggtgtggggccctctggagttgatacaagcctgcctgagccctggcacacccgtttggggttggtccttgtcccagcctctgccccagcccactggcatgccacccagcatcccacctgtgcctgtccctgtttgcagcgaggccttgtctctcatccatcgtcggagggcaacatctcagcacctggtgccgaaggaggacttggacgccatagtggcccgggaccgagaccttcagcagttgaggctggggctagtggtcccagcagcccagcccccaccctcctggcagcagcgccaggaaggctttgacaattacctccgtctgatctacggctctggcctgctgggcatgcagtctggaagggggtcccagcagtggagtgccgggaccctcagagtggagagagagacccgggatgtgtgtgctgtaccccaagctgcccactgtcttgcccgggctgaggtcagcactgcagcccaaacagtgccaacagccctgtccccacaggacctgggagccctgggccagcacttctcccagtctccccgagtcacagtgccgatcccacccacccaccgtagggtgcacagcaaggcatcccagcttctggcccgctcctcactgagccactacctgggcatcagtctggatctgcagctgcagttggagcagctccgagggaggacgaccatggccctggacctgccatcctcccacttgcagtgcaggatcccactgctgccaaagagatgggacaaggaacctctctctagcctcaggggcttctttcctgccaccgtgcagccccacaagcactgcctgaggcccatctgcttccccggctatgtgcccaactccgcggtgctacagcagatgtggctaaatgcggagccaggggcaagccaggatgccctgtggttgtggcgccccaggccatcccaaacccagtggcagaggaagctgctccaatggatgggggagaagcctggggaggagggggaggaagacaagaaggaagaggaggaggagaaggaagacgaggagctggactgggccttggcttccctgagcccgcactccaaccagcagctggattcctgggaactggaggatcagagtgctgtggactggacccaggagccccggcggcgcagctgcaaggttgccaggacccaccctcatccctggcaccgtcatgggagtttgctcttggatgagcattacgggcatctgcccaagtttctgcatttcttcatctaccagacctggttcaaaaagttgttccccatcttcagcctgcaggcatacccggaggcgggcacgatcgagggcctggcctcgctgttggtggccctgctggagaagaccacgtgggtcgaccgtgtgcacatcctgcaggtgctactgagactgctgcccaacatgagcagtgatctccaaggccagctgcagggcctgctcgtacacttgctcaacctggaccagccccccagcctccaggaccagacacagaagaagttcgtgatactggcgctgcagctgctcctggcctgctccctggagtcccgggatgtggtgctggagctcatgtcctacttcctctactctcccgtgcactgccggccagagctcaagaagctgctgcacgggctgggccttcaggacccagagggcttcctattcaaggagatgatgacctgggtccagggcccagacctggactccaaggccggcctgcgcacttgctgccaccagaaactggaggacatgatccaggagcttcaggagaccccatcgcagacgtcagtggtctctggggcacccacacgcgcctccgtgataccctcgggcacctcctggtcggcctccggcatcttcgggaggctctcgcaggtctcagaggtgcctttgatggtggtctcacctgcggagccgcactctttagccccggagctccaggcccagcggatgctggcacccaagcgcagctgggggacccctcagctccgtctcagagtgctctccgagacgctgaagagcttctgcctggagcccgaggcccgcctgcaccctgccgggcctgctcagctgcccggagagccgccgccgctggaggagaccgactggtcgcactcgcagctgctggacttgggccccatcgacgcgctcaacttcttctgtgagcagctgcgggcgcagcagcggagttcgctccaggagaaggctgcgcacccacacccgccagagccctacacggtggcgccggtgcccgacatggtggtgccacctccgcgggagcactggtaccaccccatcctccggctgcaggaggccaagccgcagaggtccgcgaggtccgcgatgagactgaggggccccatgcggtcccggctctgtgcgggccgcaccctggacggccccatccggacgctgaagctgccgttgccgcgtgtggagccgcagcctttccccctggactggcctatgcccccgcgcccgctgcccccgcggctcctgcagccggccctgcagcgctactttctgccagcggacgcggaccctgacacctacagctgaccggactggtggcctcagcccgcctggctctggggcctgtcattggtatttggccaaggcctgcatcgggaataaagtccagagaatttctttctgcaggatgccgcctgctttggagggccccggggtgcgcacggcgtgtgggcgtgcggcctgaacccacagtggcggcggaaggcaggagccggaggcctggcggaggtggccatcgtgggcaccagcgttcccggaggggtggccggcctagggcagaggagacccatagcggggtaccatccgctgggcactgagcaaacgttttctgctcaagtactaggtgttgagatgcgggctgaccttagagaacgtgtcctgggccagcccacagcctggtgtggaggggagtccgggagggcctgggcggtcccaggatgagccttccgggtcgatgcaggtgagaccaggagtttgcagaccttgctttcgttacttttattctggcaaagagaagaattgacaaaggcaccaggagcttttttctgagcggcaacgcagagcatcctctgacccctttagcctgaaagtccctaggggaggggcttggtccggaagggctcggcctctgggccgggcccctctgccctgtgtggcctggcagggcgcaagacctgtgcacagagttcttggggcagctctggggggaatccccggcttttacacctgtcttttgtgttgtctgagcagtgatttccctcctgtatctgtagcctctgactttactagtttcttcttgatggctctggttagaatcgcttctccacaccttccctgtcaccccaaactgtgcggtggctcttgttatggggccaccaaatggctgctctttcccaggccggtgcttgacacagtggtgccaccatcccaagagcatgggtgcgcaggaccgtgcgggacagccaagttgctgggcccagctgaacctgcctcttcacctccaggcactaccgcatcctcccactgcagaaggccaaggttcacaggtgtgcgatgagactgaggactgagtctgtcactagaggacttgacactttttataaaaaaaatgagtaaacctagatacctcgatcagtgtctagcgatgtcaaggcccccagtttgggttcaagcctgctgggacagtcctgcagctgctgggtcacagagtggccaaggccctctgatttttggtcaggacacagaaagatagcagggggcagggggggatctgagggaccccacatgacttacaatcagacaaggtaggtcagaggatttctttatggctatctgttttgttttgttttgttttgttttgttttttgagatggagtttcagtcttgttgcccaggctggagtgcaatggcgtgatctcggctcactgcaacctctgcctcccggattcaagcaattctccttcctcagcctcctgagtagctgggattacaggcatgtgccaccacgcccagctaattttgtatttttagtagagatggggtttcatcacgttgaccaggctggtctcgaactcctgacctcaggtgatccgcctgcctcagcctctcaaagtgctgggattacaagcatgagccactgtgcccagccttctttatggctatctccaagacagcaaaggcaggggaaagtcctgccttggggagaaaaaggagggtgggaaaaggtcaaagagaaagatgctgttgtctgagtcttgcctctgaggcctaagttccccaacattataacaagggatatgggagttataagccaggaactgtggatggaaaccaatgacagatatcataatatcacacccacacatcaggcaagagacttgttccttaaaaattatctagtttagccgagcgtggtggctcacacctgtaatcccagctacttgggaggctgaggcaggagaatcacttgaacccaggaggtggaggttgcagcaagcagagatcacaccactgcactacagcctcggcaatagagcgagactctgtgtc

SEQ ID NO: 200056 - DNA, 1832 bp, Homo sapiens
  Payload ID: 19464
  Gene Name: WD repeat domain, phosphoinositide interacting 1
  Uniprot ID: Q5MNZ9
  ENST ID: ENST00000262139
  CDS Start-End: 1-1341
atggaggccgaggccgcggacgctcccccgggcggggttgagtcggcgctcagctgcttctctttcaaccaggactgcacatccctagcaactggaactaaagccgggtataagctgttttctctgagttctgtggagcagctggatcaagtccacggaagcaatgaaatcccggacgtctacatcgtggagcgcctcttctccagcagcctggtggtggtagtcagtcacacaaaaccacggcagatgaacgtgtatcacttcaagaaaggcacagagatctgtaattacagctactccagcaacatcttgtccataaggctgaaccggcaaaggctgctggtttgcctagaagagtccatttatattcacaacattaaagacatgaagctgttgaagaccctcctggatattcctgcaaacccaacaggtctatgtgctctctctatcaaccattccaattcttacctggcctatcctggaagcctgacttcaggggagattgtgctttatgatggaaactccctgaaaacagtctgcactattgctgcccatgagggaacactagctgccatcaccttcaatgcctcaggctccaaactagcaagtgcgtctgaaaaaggcacagtcatccgggtgttctctgtccctgatgggcaaaagctctatgagttccggagagggatgaaaaggtatgtgacaatcagctctctagtgttcagtatggattcacaattcctctgcgcctccagtaacaccgagacggtacacatcttcaagctggaacaggtcaccaacagtcgaccagaagagccttcgacctggagtggctacatgggaaagatgtttatggctgctaccaactacctccctacccaggtgtcagacatgatgcatcaggacagggcttttgccactgcacgcttgaacttctccggacagaggaacatctgtaccctctcaacgatccagaagttgccacggctgctagttgcgtcatccagtggacacctttatatgtacaatttggatcctcaggatggaggagagtgtgtcttaatcaaaacccacagcttgcttggctcaggaacaacagaagagaataaagaaaatgacctcagaccttccttacctcagtcttatgcagcgaccgtagccagaccaagtgcatcttcagcctccacggtgccaggttattctgaggacggcggggcgctgcgaggagaagttattcctgaacatgagtttgcgacgggaccagtgtgtcttgatgatgagaatgagtttcctcctataatcttgtgccgtggaaatcagaagggcaaaacgaagcagtcatgatgagaagcacacctcagaaatcaggacatcccccctatcaggtggttttggagaaaacaaggaaggcggaagaatggagtgcaattgtgtgagcagaaaggggggcaggaatcccgggtgctccactgcttaaaccacaggacctggttaactcctcaccaagcttcccacgaccctggttgccaatgggcgcgggagacattgtatacacatcatgctatttaaaatacgttcaaactatagtgtaaatgctaattaaccatattggtatataaccggaattttatattaaaaggggcctcctttttaaatatatgccgtgtaaaaaatgtacttataggaacatctctttgaattgtatttcttgtatattacatacttagagagagactcttttagccaggcaaagtcttttttggctgtggctggaataaatcatttattacttgggagtcccattttggacactaataataaaatcatggcaatgc

SEQ ID NO: 200057 - DNA, 1575 bp, Homo sapiens
  Payload ID: 19464
  Gene Name: WD repeat domain, phosphoinositide interacting 1
  ENST ID: ENST00000546360
  CDS Start-End: 222-1316
gggctgctgaggtggctgtcgccggctccgagctgcggcttcccgggccgagcccccgatggaggccgaggccgcggacgctcccccgggcggggttgagtcggcgctcagctgcttctctttcaaccaggactgcacatgaaatcccggacgtctacatcgtggagcgcctcttctccagcagcctggtggtggtagtcagtcacacaaaaccacggcagatgaacgtgtatcacttcaagaaaggcacagagatctgtaattacagctactccagcaacatcttgtccataaggctgaaccggcaaaggctgctggtttgcctagaagagtccatttatattcacaacattaaagacatgaagctgttgaagaccctcctggatattcctgcaaacccaacaggtctatgtgctctctctatcaaccattccaattcttacctggcctatcctggaagcctgacttcaggggagattgtgctttatgatggaaactccctgaaaacagtctgcactattgctgcccatgagggaacactagctgccatcaccttcaatgcctcaggctccaaactagcaagtgcgtctgaaaaaggcacagtcatccgggtgttctctgtccctgatgggcaaaagctctatgagttccggagagggatgaaaaggtatgtgacaatcagctctctagtgttcagtatggattcacaattcctctgcgcctccagtaacaccgagacggtacacatcttcaagctggaacaggtcaccaacagtcgaccagaagagccttcgacctggagtggctacatgggaaagatgtttatggctgctaccaactacctccctacccaggtgtcagacatgatgcatcaggacagggcttttgccactgcacgcttgaacttctccggacagaggaacatctgtaccctctcaacgatccagaagttgccacggctgctagttgcgtcatccagtggacacctttatatgtacaatttggatcctcaggatggaggagagtgtgtcttaatcaaaacccacagcttgcttggctcaggaacaacagaagagaataaagaaaatgacctcagaccttccttacctcagtcttatgcagcgaccgtagccagaccaagtgcatcttcagcctccacggtgccaggttattctgaggacggcggggcgctgcgaggagaagttattcctgaacatgagtttgcgacgggaccagtgtgtcttgatgatgagaatgagtttcctcctataatcttgtgccgtggaaatcagaagggcaaaacgaagcagtcatgatgagaagcacacctcagaaatcaggacatcccccctatcaggtggttttggagaaaacaaggaaggcggaagaatggagtgcaattgtgtgagcagaaaggggggcaggaatcccgggtgctccactgcttaaaccacaggacctggttaactcctcaccaagcttcccacgaccctggttgccaatgggcgcgggagacattgtatacacatcatgctatttaaaatacgttcaaactatagtgtaaatgctaattaa

SEQ ID NO: 200058 - DNA, 1886 bp, Homo sapiens
  Payload ID: 19464
  Gene Name: WD repeat domain, phosphoinositide interacting 1
  ENST ID: ENST00000589316
  CDS Start-End: 79-1188
cccgtggagccggcgcgggcgggctgctgaggtggctgtcgccggctccgagctgcggcttcccgggccgagcccccgatggaggccgaggccgcggacgctcccccgggcggggttgagtcggcgctcagctgcttctctttcaaccaggactgcacatccctagcaactggaactaaagccgggtataagctgttttctctgagttctgtggagcagctggatcaagtccacggaagcaatgaaatcccggacgtctacatcgtggagcgcctcttctccagcagcctggtggtggtagtcagtcacacaaaaccacggcagatgaacgtgtatcacttcaagaaaggcacagagatctgtaattacagctactccagcaacatcttgtccataaggctgaaccggcaaaggctgctggtttgcctagaagagtccatttatattcacaacattaaagacatgaagctgttgaagaccctcctggatattcctgcaaacccaacaggtctatgtgctctctctatcaaccattccaattcttacctggcctatcctggaagcctgacttcaggggagattgtgctttatgatggaaactccctgaaaacagtctgcactattgctgcccatgagggaacactagctgccatcaccttcaatgcctcaggctccaaactagcaagtgcgtctgaaaaaggcacagtcatccgggtgttctctgtccctgatgggcaaaagctctatgagttccggagagggatgaaaaggtatgtgacaatcagctctctagtgttcagtatggattcacaattcctctgcgcctccagtaacaccgagacggtacacatcttcaagctggaacaggtcaccaacaggcaatcgaccagaagagccttcgacctggagtggctacatgggaaagatgtttatggctgctaccaactacctccctacccaggtgtcagacatgatgcatcaggacagggcttttgccactgcacgcttgaacttctccggacagaggaacatctgtaccctctcaacgatccagaagttgccacggctgctagttgcgtcatccagtggacacctttatatgtacaatttggatcctcaggatggaggagagtgtgtcttaatcaaaacccacagcttgcttggctcaggaacaacagaagagaataaagaaaatgacctcagaccttccttacctcagtcttatgcagcgaccgtagccagaccaagtgcatcttcagcctccacggtgccaggttattctgaggacggcggggcgctgcgaggagaagttattcctgaacatgagtttgcgacgggaccagtgtgtcttgatgatgagaatgagtttcctcctataatcttgtgccgtggaaatcagaagggcaaaacgaagcagtcatgatgagaagcacacctcagaaatcaggacatcccccctatcaggtggttttggagaaaacaaggaaggcggaagaatggagtgcaattgtgtgagcagaaaggggggcaggaatcccgggtgctccactgcttaaaccacaggacctggttaactcctcaccaagcttcccacgaccctggttgccaatgggcgcgggagacattgtatacacatcatgctatttaaaatacgttcaaactatagtgtaaatgctaattaaccatattggtatataaccggaattttatattaaaaggggcctcctttttaaatatatgccgtgtaaaaaatgtacttataggaacatctctttgaattgtatttcttgtatattacatacttagagagagactcttttagccaggcaaagtcttttttggctgtggctggaataaatcatttattacttgggagtcccattttg

SEQ ID NO: 200059 - DNA, 494 bp, Homo sapiens
  Payload ID: 19464
  Gene Name: WD repeat domain, phosphoinositide interacting 1
  ENST ID: ENST00000585393
  CDS Start-End: 1-163
cgtagccagaccaagtgcatcttcagcctccacggtgccaggttattctgaggacggcggggcgctgcgaggagaagttattcctgaacatgagtttgcgacgggaccagtgtgtcttgatgatgagaatgagtttcctcctgtgagcattaggaacccataatcttgtgccgtggaaatcagaagggcaaaacgaagcagtcatgatgagaagcacacctcagaaatcaggacatcccccctatcaggtggttttggagaaaacaaggaaggcggaagaatggagtgcaattgtgtgagcagaaaggggggcaggaatcccgggtgctccactgcttaaaccacaggacctggttaactcctcaccaagcttcccacgaccctggttgccaatgggcgcgggagacattgtatacacatcatgctatttaaaatacgttcaaactatagtgtaaatgctaattaaccatattggtatataaccggaattttat

SEQ ID NO: 200060 - DNA, 624 bp, Homo sapiens
  Payload ID: 19464
  Gene Name: WD repeat domain, phosphoinositide interacting 1
  ENST ID: ENST00000592645
  CDS Start-End: 1-247
agaagagaataaagaaaatgacctcagaccttccttacctcagtcttatgcagcgaccgtagccagaccaagtgcatcttcagcctccacggtgccaggttattctgaggacggcggggcgctgcgaggagaagttattcctgaacatgagtttgcgacgggaccagtgtgtcttgatgatgagaatgagtttcctcctataatcttgtgccgtggaaatcagaagggcaaaacgaagcagtcatgatgagaagcacacctcagaaatcaggacatcccccctatcaggtggttttggagaaaacaaggaaggcggaagaatggagtgcaattgtgggacaggaggaactctttaacttcttttaaatgcagtcatttcacccttaaaaggagaggaaggggattgggccacagacttatccatggactcgtctgctctgagatctggaaaacgacctaactttggtctaaatctgtgctcctcaaggcattgtttgatagaaatgtaggatttcaggatctactcgagccctactgagacggaatccggattctcacaagatcccaggtgatttgtttgcatattaaagatggagaccagtgagtacactggtttgtggaagg

SEQ ID NO: 200061 - DNA, 742 bp, Homo sapiens
  Payload ID: 19464
  Gene Name: WD repeat domain, phosphoinositide interacting 1
  ENST ID: ENST00000591744
  CDS Start-End: 1-618
gtgacaatcagctctctagtgttcagtatggattcacaattcctctgcgcctccagtaacaccgagacggtacacatcttcaagctggaacaggtcaccaacagtcgaccagaagagccttcgacctggagtggctacatgggaaagatgtttatggctgctaccaactacctccctacccaggtgtcagacatgatgcatcaggacagggcttttgccactgcacgcttgaacttctccggacagaggaacatctgtaccctctcaacgatccagaagttgccacggctgctagttgcgtcatccagtggacacctttatatgtacaatttggatcctcaggatggaggagagtgtgtcttaatcaaaacccacagcttgcttggctcaggaacaacagaagagaataaagaaaatgacctcagaccttccttacctcagtcttatgcagcgaccgtagccagaccaagtgcatcttcagcctccacggtgccaggttattctgaggacggcggggcgctgcgaggagaagttattcctgaacatgagtttgcgacgggaccagtgtgtcttgatgatgagaatgagtttcctcctgtgagcattaggaacccgtaactgggcggctcagtctgtgtgcttagaaggaaaccttcgcctcatacgagaggcagagtccctttccctgttttctaatctataacaactaattctctgctctagtatttggaaagccatagga

SEQ ID NO: 200062 - DNA, 4476 bp, Homo sapiens
  Payload ID: 19465
  Gene Name: WD repeat domain, phosphoinositide interacting 2
  Uniprot ID: Q9Y4P8
  ENST ID: ENST00000288828
  CDS Start-End: 233-1597
tgcgccgctcgaggccgtgcgtcgcgggggcggggccgcgcaggcgtaccgggtgccccggctctggagcataaacaagagcggggacgggatgaggcggcggttgatcccagggtggcgagtggcggcgaccgaggcggcgagcggggcccggcgccgaccctgagtgcagcctgacccgccctcgcgcgcgcgccctccccggccgggcccactcgccgcgcgcccagccatgaacctggcgagccagagcggggaggccggcgccggccagctgctcttcgccaacttcaaccaggacaacacagaagtgaaaggggcatcaagagcagctggtcttggccgtcgcgctgttgtctggtccctagctgttggtagtaagtccggttataaatttttctccctttcttctgtggataagctggaacagatctatgaatgcaccgatacggaagatgtgtgcattgtagagagattgttctccagcagcctagtggccatcgtcagccttaaagcaccaaggaagctaaaggtttgccactttaagaagggaactgagatctgcaactacagctactccaacacgattctggctgtgaagctcaacaggcagaggctgatagtatgcctggaggagtccctgtacatccacaacattcgggacatgaaggtgctgcatacgatcagggagacgcctccaaaccctgcaggcctgtgtgcgctgtcaatcaacaacgacaactgctacttggcgtacccagggagcgcgaccatcggagaggtgcaggtcttcgataccattaatttgagagctgcaaacatgattccggctcacgacagtcctttagcggcactggcctttgacgcaagtggaactaaacttgccacggcttcggagaaggggaccgtgattagggtattttccattccagaaggacaaaaactctttgagtttcggagaggagtaaagaggtgcgtgagcatctgctccctggccttcagcatggacggcatgttcctctccgcctccagcaacactgagaccgtgcacatcttcaaactcgagactgtgaaagaaaaacccccagaggagcccaccacctggaccgggtacttcgggaaagtgctcatggcctccaccagctacctgccttcccaagtgacagaaatgttcaaccagggcagagccttcgccacggtccgcctgccattctgcggccacaaaaacatctgctcgctagccacaattcagaagatcccgcggttgttggtgggtgccgccgacgggtacctgtacatgtacaacctggacccccaggagggcggcgagtgtgccctgatgaagcagcaccggctggacggcagtctggaaacgaccaatgagatcttggactctgcctctcacgactgccccttagtcactcagacatacggcgcagctgcaggaaaaggtacttacgtgccttcatccccaacgagacttgcctacacagacgacctgggtgctgtgggtggcgcctgcctggaggacgaggccagcgccctgcgcctggatgaggacagcgagcacccgcccatgattcttcggactgactgaacttgacctgtgacctctgacccggggagcagagaacactggcttcacagaggactttgtgcattgctgctatgaactttgacctgagtcgggggagaggatggcagagactttattaaaaaaaaaaaaagattgtagtggtagtctaactccataacgctgaggaaatacatcattttcacttcagtggcttttaaatcctgcttatgaattttagctttttgtttgtttgttttctctttttgccaaaattaactgtttggtgaagcccgcaaaacctcctcgctttgcatgcatgaacgtgccaagccagcataggggagctagaagccactttccagccacctgccgttgggttttttcatatctgtacataatgccgagtgcgtaaggaaaccgtggcgtcgcgcacagtgggtctgcttgtcaaggccagttctgcagtgacaggcccaggggctgcccaccaggtgtgctgggcagacttcagctgggacagaagtccgatctccctagggccccacctggaccattttccctccgttttattttgttaattaaattctttccaaattggatcgctctgggatttcttccatggtggacttttgtttctgatcttgttttccctgtggatattggaggacagcgaggttctttctgatactaaaaacctttctttcaggcagcaaatgaacttgaaaggttgcctggactcgctggagcaaaggaaagcgattttgtttgtataattaaatgatctgttcttctacttcactcttcctgttgaaaaactgtgtgatttttttttttttttaagtaaagtttgtagctcctcccatgcccaggaaagcacagaactcaagtgtggtggccgtctgagctgtcctttcgctggccccgctgtccgcaggggcttcctacctgtgtgagaggtcgtagcgggagacagcaacagagagtaggcggctgggccacgtccttcacagggcgtcatgtgcctttctattttcatcttagaaaatttcctcagcaaaccgatgagagattgtggttgcaagcttcagtatttgcctcgcttcccttcccttttcatatttacagaattaaaacaacctcaagtacctcagactctgcattccaaaccaaggcacccagcagccaaagtgtcgagggcatttaagtggcattaatggcaggagagatggttttagaatctatggagtggtggaagttacggatagaagggaaaaggcaaaaactatttaccctgcctttgcaggctggggtttttgaaccgaggaaggctgggacgcctgtttccagatggttgtcatggtcacgctgggcgaagagctggaggggagttgtcccctcagctgagcggctgcggtgaaatgccccagtgttcctgggttggctttacggcaaactaaatgcaggggacgctggagtccgactcacctacaccggcttcctcccagccgctggtgtgcggcacacacaacatctgcattaggcagaggtgcaagtgggctgattgaacttttccttcaaaacctgcttgtctgtcctggacctttgatgaaatgggatcccggtcacgcaggctgagacagtggggaccgccgaggccagagtgggctatgcttgagcagggatgagaagggccgcggcagcacgcagccttgacccacgcctgcgtcttgtggtgcaaggccagagggctctctctagaacctgaccgtgcactccatctcctgggagccacttttggcaagagtgagtgtggggggaaaaagtgtgcacaagagatacggaaccctgagctagggtttcctgtcaccaaagagtgagctgcatttccagttctgcgttaaagtatcgtttgttctggtgcctgcctgtggtggtgatttggagactcaaatttcctttgccaggtctcttttgtctttctttgggattggtagtatagaagatgctgggaattgtcttcctcgctcagcctcggcttcccgcactgtaagatgaggcagttgcagaggaggcctcggacgtcctgtgaccctcggcccacactcccccttgggtggccctggcagggctggctaggtgcgttccctgcagaccacgggaagccctgtgcttgcctgggtcagggctaagctgtgcgccctagaggagggaggaggactgcagattcttggtcgagaagaatgaagaggatttctgtgtttgctgagcagccattgtggagggttacccgcctccactttcccgttgcccatttcactgccaccagctcctcttcctctgctcgaacctatgagtcccagcctcactggcggcctcagacatgctcaggagtgacggggacagagggaggccgctgagttgcccgttagaactcttactgctgcgccagtgacccaggtggagagggaccctgaaccaaacagaacgtgtgctaattttccgaactccaaactgtacactcatattcatttttaaattgtatttttccaaacttcaaaaaggacgatgagcgtgggggataggaaacaaaacctgtaaacgttgtgaatgggctcagtggactctgggaccaaaccttctgtaatctctaaaacaatgggaccaagagctggatggaacctggagtcaaaaagaactgcttcagtccccgctgtaccgcctgcctagctgtgggagcaggcagggcgcctgggagcctgcgttttctggaccgttccatgggactcatccctacctcacagggctgttgtgaggtgttgtgtgactgcgtgtcctgcaaacgcccagctcggtgcccagccagcggtgggcacccaataaacgctacaacataaatgtgt

SEQ ID NO: 200063 - DNA, 1948 bp, Homo sapiens
  Payload ID: 19465
  Gene Name: WD repeat domain, phosphoinositide interacting 2
  Uniprot ID: Q9Y4P8
  ENST ID: ENST00000382384
  CDS Start-End: 148-1425
gacgggatgaggcggcggttgatcccagggtggcgagtggcggcgaccgaggcggcgagcggggcccggcgccgaccctgagtgcagcctgacccgccctcgcgcgcgcgccctccccggccgggcccactcgccgcgcgcccagccatgaacctggcgagccagagcggggaggccggcgccggccagctgctcttcgccaacttcaaccaggacaacacgtccctagctgttggtagtaagtccggttataaatttttctccctttcttctgtggataagctggaacagatctatgaatgcaccgatacggaagatgtgtgcattgtagagagattgttctccagcagcctagtggccatcgtcagccttaaagcaccaaggaagctaaaggtttgccactttaagaagggaactgagatctgcaactacagctactccaacacgattctggctgtgaagctcaacaggcagaggctgatagtatgcctggaggagtccctgtacatccacaacattcgggacatgaaggtgctgcatacgatcagggagacgcctccaaaccctgcaggcctgtgtgcgctgtcaatcaacaacgacaactgctacttggcgtacccagggagcgcgaccatcggagaggtgcaggtcttcgataccattaatttgagagctgcaaacatgattccggctcacgacagtcctttagcggcactggcctttgacgcaagtggaactaaacttgccacggcttcggagaaggggaccgtgattagggtattttccattccagaaggacaaaaactctttgagtttcggagaggagtaaagaggtgcgtgagcatctgctccctggccttcagcatggacggcatgttcctctccgcctccagcaacactgagaccgtgcacatcttcaaactcgagactgtgaaagaaaaacccccagaggagcccaccacctggaccgggtacttcgggaaagtgctcatggcctccaccagctacctgccttcccaagtgacagaaatgttcaaccagggcagagccttcgccacggtccgcctgccattctgcggccacaaaaacatctgctcgctagccacaattcagaagatcccgcggttgttggtgggtgccgccgacgggtacctgtacatgtacaacctggacccccaggagggcggcgagtgtgccctgatgaagcagcaccggctggacggcagtctggaaacgaccaatgagatcttggactctgcctctcacgactgccccttagtcactcagacatacggcgcagctgcaggaaaagcctacacagacgacctgggtgctgtgggtggcgcctgcctggaggacgaggccagcgccctgcgcctggatgaggacagcgagcacccgcccatgattcttcggactgactgaacttgacctgtgacctctgacccggggagcagagaacactggcttcacagaggactttgtgcattgctgctatgaactttgacctgagtcgggggagaggatggcagagactttattaaaaaaaaaaaaagattgtagtggtagtctaactccataacgctgaggaaatacatcattttcacttcagtggcttttaaatcctgcttatgaattttagctttttgtttgtttgttttctctttttgccaaaattaactgtttggtgaagcccgcaaaacctcctcgctttgcatgcatgaacgtgccaagccagcataggggagctagaagccactttccagccacctgccgttgggttttttcatatctgtacataatgccgagtgcgtaaggaaaccgtggcgtcgcgcacagtgggtctgcttgtcaaggccagttctgcagtgacaggcccaggggctgcccaccaggtgtgctgggcagacttcagctgggacagaagtccgatctccctagggcccca

SEQ ID NO: 200064 - DNA, 2112 bp, Homo sapiens
  Payload ID: 19465
  Gene Name: WD repeat domain, phosphoinositide interacting 2
  Uniprot ID: Q9Y4P8
  ENST ID: ENST00000401525
  CDS Start-End: 225-1535
tcgaggccgtgcgtcgcgggggcggggccgcgcaggcgtaccgggtgccccggctctggagcataaacaagagcggggacgggatgaggcggcggttgatcccagggtggcgagtggcggcgaccgaggcggcgagcggggcccggcgccgaccctgagtgcagcctgacccgccctcgcgcgcgcgccctccccggccgggcccactcgccgcgcgcccagccatgaacctggcgagccagagcggggaggccggcgccggccagctgctcttcgccaacttcaaccaggacaacacgtccctagctgttggtagtaagtccggttataaatttttctccctttcttctgtggataagctggaacagatctatgaatgcaccgatacggaagatgtgtgcattgtagagagattgttctccagcagcctagtggccatcgtcagccttaaagcaccaaggaagctaaaggtttgccactttaagaagggaactgagatctgcaactacagctactccaacacgattctggctgtgaagctcaacaggcagaggctgatagtatgcctggaggagtccctgtacatccacaacattcgggacatgaaggtgctgcatacgatcagggagacgcctccaaaccctgcaggcctgtgtgcgctgtcaatcaacaacgacaactgctacttggcgtacccagggagcgcgaccatcggagaggtgcaggtcttcgataccattaatttgagagctgcaaacatgattccggctcacgacagtcctttagcggcactggcctttgacgcaagtggaactaaacttgccacggcttcggagaaggggaccgtgattagggtattttccattccagaaggacaaaaactctttgagtttcggagaggagtaaagaggtgcgtgagcatctgctccctggccttcagcatggacggcatgttcctctccgcctccagcaacactgagaccgtgcacatcttcaaactcgagactgtgaaagaaaaacccccagaggagcccaccacctggaccgggtacttcgggaaagtgctcatggcctccaccagctacctgccttcccaagtgacagaaatgttcaaccagggcagagccttcgccacggtccgcctgccattctgcggccacaaaaacatctgctcgctagccacaattcagaagatcccgcggttgttggtgggtgccgccgacgggtacctgtacatgtacaacctggacccccaggagggcggcgagtgtgccctgatgaagcagcaccggctggacggcagtctggaaacgaccaatgagatcttggactctgcctctcacgactgccccttagtcactcagacatacggcgcagctgcaggaaaaggtacttacgtgccttcatccccaacgagacttgcctacacagacgacctgggtgctgtgggtggcgcctgcctggaggacgaggccagcgccctgcgcctggatgaggacagcgagcacccgcccatgattcttcggactgactgaacttgacctgtgacctctgacccggggagcagagaacactggcttcacagaggactttgtgcattgctgctatgaactttgacctgagtcgggggagaggatggcagagactttattaaaaaaaaaaaaagattgtagtggtagtctaactccataacgctgaggaaatacatcattttcacttcagtggcttttaaatcctgcttatgaattttagctttttgtttgtttgttttctctttttgccaaaattaactgtttggtgaagcccgcaaaacctcctcgctttgcatgcatgaacgtgccaagccagcataggggagctagaagccactttccagccacctgccgttgggttttttcatatctgtacataatgccgagtgcgtaaggaaaccgtggcgtcgcgcacagtgggtctgcttgtcaaggccagttctgcagtgacaggcccaggggctgcccaccaggtgtgctgggcagacttcagctgggacagaagtccgatctccctagggccccacctggaccattttccctccgttttattttgttaattaaattctttccaaattgg

SEQ ID NO: 200065 - DNA, 1663 bp, Homo sapiens
  Payload ID: 19465
  Gene Name: WD repeat domain, phosphoinositide interacting 2
  Uniprot ID: Q9Y4P8
  ENST ID: ENST00000404704
  CDS Start-End: 175-1506
cggctctggagcataaacaagagcggggacgggatgaggcggcggttgatcccagggtggcgagtggcggcgaccgaggcggcgagcggggcccggcgccgaccctgagtgcagcctgacccgccctcgcgcgcgcgccctccccggccgggcccactcgccgcgcgcccagccatgaacctggcgagccagagcggggaggccggcgccggccagctgctcttcgccaacttcaaccaggacaacacagaagtgaaaggggcatcaagagcagctggtcttggccgtcgcgctgttgtctggtccctagctgttggtagtaagtccggttataaatttttctccctttcttctgtggataagctggaacagatctatgaatgcaccgatacggaagatgtgtgcattgtagagagattgttctccagcagcctagtggccatcgtcagccttaaagcaccaaggaagctaaaggtttgccactttaagaagggaactgagatctgcaactacagctactccaacacgattctggctgtgaagctcaacaggcagaggctgatagtatgcctggaggagtccctgtacatccacaacattcgggacatgaaggtgctgcatacgatcagggagacgcctccaaaccctgcaggcctgtgtgcgctgtcaatcaacaacgacaactgctacttggcgtacccagggagcgcgaccatcggagaggtgcaggtcttcgataccattaatttgagagctgcaaacatgattccggctcacgacagtcctttagcggcactggcctttgacgcaagtggaactaaacttgccacggcttcggagaaggggaccgtgattagggtattttccattccagaaggacaaaaactctttgagtttcggagaggagtaaagaggtgcgtgagcatctgctccctggccttcagcatggacggcatgttcctctccgcctccagcaacactgagaccgtgcacatcttcaaactcgagactgtgaaagaaaaacccccagaggagcccaccacctggaccgggtacttcgggaaagtgctcatggcctccaccagctacctgccttcccaagtgacagaaatgttcaaccagggcagagccttcgccacggtccgcctgccattctgcggccacaaaaacatctgctcgctagccacaattcagaagatcccgcggttgttggtgggtgccgccgacgggtacctgtacatgtacaacctggacccccaggagggcggcgagtgtgccctgatgaagcagcaccggctggacggcagtctggaaacgaccaatgagatcttggactctgcctctcacgactgccccttagtcactcagacatacggcgcagctgcaggaaaagcctacacagacgacctgggtgctgtgggtggcgcctgcctggaggacgaggccagcgccctgcgcctggatgaggacagcgagcacccgcccatgattcttcggactgactgaacttgacctgtgacctctgacccggggagcagagaacactggcttcacagaggactttgtgcattgctgctatgaactttgacctgagtcgggggagaggatggcagagactttattaaaaaaaaaaaaagattgtagtggtagtctaactccataa

SEQ ID NO: 200066 - DNA, 1504 bp, Homo sapiens
  Payload ID: 19465
  Gene Name: WD repeat domain, phosphoinositide interacting 2
  Uniprot ID: Q9Y4P8
  ENST ID: ENST00000484262
  CDS Start-End: 233-1387
acagaactgactgaaaggaacctttgtctttcgtgtgaatgctcgtgaggggccatccttagagtggaaatgctcctgaggctccagcgaatcaagaccctcagacccccgggctgtccccaccccatgaccacatgttccgcaggcaccctcagcgctgtgccctgcgtgtcgcccaggcaggtgtttgtttttgagcgcagattctgcctgtggccatagccatgtggagatgttcacgcatgtacttccctttgtgatttcagccgatacggaagatgtgtgcattgtagagagattgttctccagcagcctagtggccatcgtcagccttaaagcaccaaggaagctaaaggtttgccactttaagaagggaactgagatctgcaactacagctactccaacacgattctggctgtgaagctcaacaggcagaggctgatagtatgcctggaggagtccctgtacatccacaacattcgggacatgaaggtgctgcatacgatcagggagacgcctccaaaccctgcaggcctgtgtgcgctgtcaatcaacaacgacaactgctacttggcgtacccagggagcgcgaccatcggagaggtgcaggtcttcgataccattaatttgagagctgcaaacatgattccggctcacgacagtcctttagcggcactggcctttgacgcaagtggaactaaacttgccacggcttcggagaaggggaccgtgattagggtattttccattccagaaggacaaaaactctttgagtttcggagaggagtaaagaggtgcgtgagcatctgctccctggccttcagcatggacggcatgttcctctccgcctccagcaacactgagaccgtgcacatcttcaaactcgagactgtgaaagaaaaacccccagaggagcccaccacctggaccgggtacttcgggaaagtgctcatggcctccaccagctacctgccttcccaagtgacagaaatgttcaaccagggcagagccttcgccacggtccgcctgccattctgcggccacaaaaacatctgctcgctagccacaattcagaagatcccgcggttgttggtgggtgccgccgacgggtacctgtacatgtacaacctggacccccaggagggcggcgagtgtgccctgatgaagcagcaccggctggacggcagtctggaaacgaccaatgagatcttggactctgcctctcacgactgccccttagtcactcagacatacggcgcagctgcaggaaaagcctacacagacgacctgggtgctgtgggtggcgcctgcctggaggacgaggccagcgccctgcgcctggatgaggacagcgagcacccgcccatgattcttcggactgactgaacttgacctgtgacctctgacccggggagcagagaacactggcttcacagaggactttgtgcattgctgctatgaactttgacctgagtcgggggagaggatggcagagactttatt

SEQ ID NO: 200067 - DNA, 1535 bp, Homo sapiens
  Payload ID: 19466
  Gene Name: WD repeat, sterile alpha motif and U-box domain containing 1
  Uniprot ID: Q8N9V3
  ENST ID: ENST00000358147
  CDS Start-End: 146-1300
ctgttccctctgctctgggtctccgccggcgcccgccccgccagcctcacctgcgcggcacgtgacccgcaccgcccgtgggcaccttgaaggcggatcccgcgcgcccccgctcctgcaggctgtttttcttcaaataaagaacatggtgaaactgattcacacattagctgatcatggtgacgatgtcaactgctgtgccttctccttttccctcttggctacttgctccttggacaaaacaattcgcctgtactcgttacgtgactttactgaactgccacattctccattgaagtttcatacctatgctgtccactgctgctgtttctccccttcaggacatattttggcatcgtgttcaacagatggtaccactgtcctatggaatactgaaaatggacagatgctggcagtgatggaacagcctagtggcagccctgtgagggtttgccagttttccccagactccacgtgtttggcatcaggggcagctgatggaactgtggttttgtggaatgcacagtcatacaaattatatagatgtggtagtgttaaagatggctccttggcggcatgtgcattttctcctaatggaagcttctttgtcactggctcctcatgtggtgatttaacagtgtgggatgataaaatgaggtgtctgcatagtgaaaaagcacatgatcttggaattacctgctgcgatttttcttcacagccagtttctgatggagaacaaggtcttcagttttttcgactggcatcatgtggtcaggattgccaagtcaaaatttggattgtttcttttacccatatcttagcaaggcgcacagaacatcagctgaagcaatttaccgaagattggtcagaggaggatgtctcaacatggctttgtgcacaagatttaaaagatcttgttggtattttcaagatgaataacattgatggaaaagaactgttgaatcttacaaaagaaagtctggctgatgatttgaaaattgaatctctaggactgcgtagtaaagtgctgaggaaaattgaagagctcaggaccaaggttaaatccctttcttcaggaattcctgatgaatttatatgtccaataactagagaacttatgaaagatccggtcatcgcatcagatggctattcatatgaaaaggaagcaatggaaaattggatcagcaaaaagaaacgtacaagtcccatgacaaatcttgttcttccttcagcggtacttacaccaaataggactctgaaaatggccatcaatagatggctggagacacaccaaaagtaaaattgttgatattgtattatttatattttcagtgatctcatttgaatgatttataggtaaatactaatcagacattattaaaagcaaaacaggaaaaaggtaaacttcttaaatttagttacctataaaaattgtcaattttcattctttaaaaaacacatggacttactataaaagcctttttgtactagtgaaaagaatcttcagctatatagaaataaagttatactttaaa

SEQ ID NO: 200068 - DNA, 1912 bp, Homo sapiens
  Payload ID: 19466
  Gene Name: WD repeat, sterile alpha motif and U-box domain containing 1
  Uniprot ID: Q8N9V3
  ENST ID: ENST00000359774
  CDS Start-End: 242-1672
ggggcctactccctccgctctgggtcacagcgggcgttcggggggcggggcctgttccctccgctctgggtccccgcgggcgttcgggggcggggcctgttccctctgctctgggtctccgccggcgcccgccccgccagcctcacctgcgcggcacgtgacccgcaccgcccgtgggcaccttgaaggcggatcccgcgcgcccccgctcctgcaggctgtttttcttcaaataaagaacatggtgaaactgattcacacattagctgatcatggtgacgatgtcaactgctgtgccttctccttttccctcttggctacttgctccttggacaaaacaattcgcctgtactcgttacgtgactttactgaactgccacattctccattgaagtttcatacctatgctgtccactgctgctgtttctccccttcaggacatattttggcatcgtgttcaacagatggtaccactgtcctatggaatactgaaaatggacagatgctggcagtgatggaacagcctagtggcagccctgtgagggtttgccagttttccccagactccacgtgtttggcatcaggggcagctgatggaactgtggttttgtggaatgcacagtcatacaaattatatagatgtggtagtgttaaagatggctccttggcggcatgtgcattttctcctaatggaagcttctttgtcactggctcctcatgtggtgatttaacagtgtgggatgataaaatgaggtgtctgcatagtgaaaaagcacatgatcttggaattacctgctgcgatttttcttcacagccagtttctgatggagaacaaggtcttcagttttttcgactggcatcatgtggtcaggattgccaagtcaaaatttggattgtttcttttacccatatcttaggttttgaattaaaatataaaagtacactgagtgggcactgtgctcctgttctggcttgtgctttttcccatgatgggcagatgctagtctcagggtcagtggataagtctgtcatagtatatgatactaatactgagaatatacttcacacattgactcagcacaccaggtatgtcacaacttgtgcttttgcacctaatacccttttacttgctactggttcaatggacaaaacagtgaacatctggcaatttgacctggaaacactttgccaagcaaggcgcacagaacatcagctgaagcaatttaccgaagattggtcagaggaggatgtctcaacatggctttgtgcacaagatttaaaagatcttgttggtattttcaagatgaataacattgatggaaaagaactgttgaatcttacaaaagaaagtctggctgatgatttgaaaattgaatctctaggactgcgtagtaaagtgctgaggaaaattgaagagctcaggaccaaggttaaatccctttcttcaggaattcctgatgaatttatatgtccaataactagagaacttatgaaagatccggtcatcgcatcagatggctattcatatgaaaaggaagcaatggaaaattggatcagcaaaaagaaacgtacaagtcccatgacaaatcttgttcttccttcagcggtacttacaccaaataggactctgaaaatggccatcaatagatggctggagacacaccaaaagtaaaattgttgatattgtattatttatattttcagtgatctcatttgaatgatttataggtaaatactaatcagacattattaaaagcaaaacaggaaaaaggtaaacttcttaaatttagttacctataaaaattgtcaattttcattctttaaaaaacacatggacttactataaaagcctttttgtactagtgaaaagaatcttcagctatatagaaataaagttatactttaaattgca

SEQ ID NO: 200069 - DNA, 1812 bp, Homo sapiens
  Payload ID: 19466
  Gene Name: WD repeat, sterile alpha motif and U-box domain containing 1
  Uniprot ID: Q8N9V3
  ENST ID: ENST00000392796
  CDS Start-End: 150-1580
agcggcggtggcggcaggtggggaagcgcggctgggcctgctcgcgcggggcgtctgagccctccatttcccggttctaaccgcgcagcagggcccaaccgggaccttgagtgcggcgaggcgtggctgtttttcttcaaataaagaacatggtgaaactgattcacacattagctgatcatggtgacgatgtcaactgctgtgccttctccttttccctcttggctacttgctccttggacaaaacaattcgcctgtactcgttacgtgactttactgaactgccacattctccattgaagtttcatacctatgctgtccactgctgctgtttctccccttcaggacatattttggcatcgtgttcaacagatggtaccactgtcctatggaatactgaaaatggacagatgctggcagtgatggaacagcctagtggcagccctgtgagggtttgccagttttccccagactccacgtgtttggcatcaggggcagctgatggaactgtggttttgtggaatgcacagtcatacaaattatatagatgtggtagtgttaaagatggctccttggcggcatgtgcattttctcctaatggaagcttctttgtcactggctcctcatgtggtgatttaacagtgtgggatgataaaatgaggtgtctgcatagtgaaaaagcacatgatcttggaattacctgctgcgatttttcttcacagccagtttctgatggagaacaaggtcttcagttttttcgactggcatcatgtggtcaggattgccaagtcaaaatttggattgtttcttttacccatatcttaggttttgaattaaaatataaaagtacactgagtgggcactgtgctcctgttctggcttgtgctttttcccatgatgggcagatgctagtctcagggtcagtggataagtctgtcatagtatatgatactaatactgagaatatacttcacacattgactcagcacaccaggtatgtcacaacttgtgcttttgcacctaatacccttttacttgctactggttcaatggacaaaacagtgaacatctggcaatttgacctggaaacactttgccaagcaaggcgcacagaacatcagctgaagcaatttaccgaagattggtcagaggaggatgtctcaacatggctttgtgcacaagatttaaaagatcttgttggtattttcaagatgaataacattgatggaaaagaactgttgaatcttacaaaagaaagtctggctgatgatttgaaaattgaatctctaggactgcgtagtaaagtgctgaggaaaattgaagagctcaggaccaaggttaaatccctttcttcaggaattcctgatgaatttatatgtccaataactagagaacttatgaaagatccggtcatcgcatcagatggctattcatatgaaaaggaagcaatggaaaattggatcagcaaaaagaaacgtacaagtcccatgacaaatcttgttcttccttcagcggtacttacaccaaataggactctgaaaatggccatcaatagatggctggagacacaccaaaagtaaaattgttgatattgtattatttatattttcagtgatctcatttgaatgatttataggtaaatactaatcagacattattaaaagcaaaacaggaaaaaggtaaacttcttaaatttagttacctataaaaattgtcaattttcattctttaaaaaacacatggacttactataaaagcctttttgtactagtgaaaagaatcttcagctatatagaaataaagttatacttt

SEQ ID NO: 200070 - DNA, 1600 bp, Homo sapiens
  Payload ID: 19466
  Gene Name: WD repeat, sterile alpha motif and U-box domain containing 1
  ENST ID: ENST00000409124
  CDS Start-End: 112-1401
gccccgccagcctcacctgcgcggcacgtgacccgcaccgcccgtgggcaccttgaaggcggatcccgcgcgcccccgctcctgcaggctgtttttcttcaaataaagaacatggtgaaactgattcacacattagctgatcatggtgacgatgtcaactgctgtgccttctccttttccctcttggctacttgctccttggacaaaacaattcgcctgtactcgttacgtgactttactgaactgccacattctccattgaagtttcatacctatgctgtccactgctgctgtttctccccttcaggacatattttggcatcgtgttcaacagatggtaccactgtcctatggaatactgaaaatggacagatgctggcagtgatggaacagcctagtggcagccctgtgagggtttgccagttttccccagactccacgtgtttggcatcaggggcagctgatggaactgtggttttgtggaatgcacagtcatacaaattatatagatgtggtagtgttaaagatggctccttggcggcatgtgcattttctcctaatggaagcttctttgtcactggctcctcatgtggtgatttaacagtgtgggatgataaaatgaggtgtctgcatagtgaaaaagcacatgatcttggaattacctgctgcgatttttcttcacagccagtttctgatggagaacaaggtcttcagttttttcgactggcatcatgtggtcaggattgccaagtcaaaatttggattgtttcttttacccatatcttaggttttgaattaaaatataaaagtacactgagtgggcactgtgctcctgttctggcttgtgctttttcccatgatgggcagatgctagtctcagggtcagtggataagtctgtcatagtatatgatactaatactgagaatatacttcacacattgactcagcacaccaggtatgtcacaacttgtgcttttgcacctaatacccttttacttgctactggttcaatggacaaaacagtgaacatctggcaatttgacctggaaacactttgccaagcaaggcgcacagaacatcagctgaagcaatttaccgaagattggtcagaggaggatgtctcaacatggctttgtgcacaagatttaaaagatcttgttggtattttcaagatgaataacattgatggaaaagaactgttgaatcttacaaaagaaagtctggctgatgatttgaaaattgatggctattcatatgaaaaggaagcaatggaaaattggatcagcaaaaagaaacgtacaagtcccatgacaaatcttgttcttccttcagcggtacttacaccaaataggactctgaaaatggccatcaatagatggctggagacacaccaaaagtaaaattgttgatattgtattatttatattttcagtgatctcatttgaatgatttataggtaaatactaatcagacattattaaaagcaaaacaggaaaaaggtaaacttcttaaatttagttacctataaaaattgtcaattttcattctttaaaaaacacatggacttactataaaagcctttttgtactagtgaaaaga

SEQ ID NO: 200071 - DNA, 1920 bp, Homo sapiens
  Payload ID: 19466
  Gene Name: WD repeat, sterile alpha motif and U-box domain containing 1
  Uniprot ID: Q8N9V3
  ENST ID: ENST00000409990
  CDS Start-End: 258-1688
gctcctgcaggtgagagcggccgcgcccacgggccggctcagcggcggtggcggcaggtggggaagcgcggctgggcctgctcgcgcggggcgtctgagccctccatttcccggttctaaccgcgcagcagggcccaaccgggaccttgagtgcggcgaggcgtggttcgtgcacccttggcccggggctagggcgggcgtgtcggcgtcgggtggaaggaagccccttgcgggctgtttttcttcaaataaagaacatggtgaaactgattcacacattagctgatcatggtgacgatgtcaactgctgtgccttctccttttccctcttggctacttgctccttggacaaaacaattcgcctgtactcgttacgtgactttactgaactgccacattctccattgaagtttcatacctatgctgtccactgctgctgtttctccccttcaggacatattttggcatcgtgttcaacagatggtaccactgtcctatggaatactgaaaatggacagatgctggcagtgatggaacagcctagtggcagccctgtgagggtttgccagttttccccagactccacgtgtttggcatcaggggcagctgatggaactgtggttttgtggaatgcacagtcatacaaattatatagatgtggtagtgttaaagatggctccttggcggcatgtgcattttctcctaatggaagcttctttgtcactggctcctcatgtggtgatttaacagtgtgggatgataaaatgaggtgtctgcatagtgaaaaagcacatgatcttggaattacctgctgcgatttttcttcacagccagtttctgatggagaacaaggtcttcagttttttcgactggcatcatgtggtcaggattgccaagtcaaaatttggattgtttcttttacccatatcttaggttttgaattaaaatataaaagtacactgagtgggcactgtgctcctgttctggcttgtgctttttcccatgatgggcagatgctagtctcagggtcagtggataagtctgtcatagtatatgatactaatactgagaatatacttcacacattgactcagcacaccaggtatgtcacaacttgtgcttttgcacctaatacccttttacttgctactggttcaatggacaaaacagtgaacatctggcaatttgacctggaaacactttgccaagcaaggcgcacagaacatcagctgaagcaatttaccgaagattggtcagaggaggatgtctcaacatggctttgtgcacaagatttaaaagatcttgttggtattttcaagatgaataacattgatggaaaagaactgttgaatcttacaaaagaaagtctggctgatgatttgaaaattgaatctctaggactgcgtagtaaagtgctgaggaaaattgaagagctcaggaccaaggttaaatccctttcttcaggaattcctgatgaatttatatgtccaataactagagaacttatgaaagatccggtcatcgcatcagatggctattcatatgaaaaggaagcaatggaaaattggatcagcaaaaagaaacgtacaagtcccatgacaaatcttgttcttccttcagcggtacttacaccaaataggactctgaaaatggccatcaatagatggctggagacacaccaaaagtaaaattgttgatattgtattatttatattttcagtgatctcatttgaatgatttataggtaaatactaatcagacattattaaaagcaaaacaggaaaaaggtaaacttcttaaatttagttacctataaaaattgtcaattttcattctttaaaaaacacatggacttactataaaagcctttttgtactagtgaaaagaatcttcagctatatagaaataaagttatacttt

SEQ ID NO: 200072 - DNA, 4196 bp, Homo sapiens
  Payload ID: 19467
  Gene Name: WDFY family member 4
  ENST ID: ENST00000265453
  CDS Start-End: 1-3815
agcgagacttccagtccgaggtcctgctttctgctatggaactattccacatgacaagtggaggtgatgcagcgatgttcagagacggcaaagagcctcagccaagtgcagaagctgctgctgccccttctcttgccaacatctcctgcttcacccagaagctggtggagaagctgtacagtgggatgttctcggcagaccccaggcatatcctcctcttcatcctggagcacatcatggtggtcattgagactgcctcttctcaaagggacactgtcctcagcactttatacagcagtttaaataaagtcattctttattgcctatccaagccccagcagtccctctccgaatgcctcggccttctcagcatcctgggctttctgcaggagcactgggatgttgtctttgccacctacaattccaacatcagcttcctcctgtgtctcatgcattgccttttgctactcaatgagagaagttacccagaaggatttggattggagcccaagcctagaatgtctacttatcatcaagtcttcctttccccaaatgaagacgtgaaagaaaaaagagaagacttaccaagtttgagtgatgtccaacacaacatccagaagacagtgcagactctctggcagcagctggtggcacaaaggcagcagaccctggaggatgccttcaagatcgatctctctgtgaaacctggagagagggaagtgaagattgaagaggtcacaccgctctgggaggagacgatgctcaaggcctggcagcattacttagcatctgagaagaagtcactggcaagtcgttcaaatgttgcacaccacagcaaagtcactttgtggagtggaagcctgtcctcagccatgaagctgatgcccgggcggcaggccaaggaccctgagtgcaagacagaggattttgtgtcatgtatagagaactacagaagaagaggacaagagctatatgcatctttatacaaagaccatgtgcaaaggcgaaaatgtggcaacatcaaggcagccaacgcctgggccaggatccaggagcagctttttggggagctgggcttgtggagccagggggaagaaaccaagccctgttccccatgggaactcgactggagagaaggaccagctcgaatgaggaaacgcatcaaacgcttgtctcctttggaggccctgagctcaggaaggcacaaggaaagccaagacaaaaatgatcatatttctcaaacaaatgctgaaaaccaagatgaactgacactgagggaggctgagggcgagccggacgaggtgggggtggactgcacccagctgaccttcttcccagccttacacgaaagtctgcactcagaagacttcttggaactgtgtcgggaaagacaagttattttacaagagcttcttgataaagaaaaggtgacgcagaagttctccctggtgattgtgcagggccacctggtgtcagaaggggtcctgctttttggccaccaacacttctacatctgcgagaacttcacactgtctcccacgggtgatgtctactgtacccgtcactgcttatccaacatcagcgatccgttcattttcaacctgtgcagcaaagacaggtccactgaccattactcgtgccagtgccacagctacgctgacatgcgggagctacggcaggctcgcttcctcctgcaggacatcgccctggagatcttcttccacaatggatattccaagtttcttgtcttctacaacaatgatcggagtaaggcctttaaaagcttctgctctttccaacccagcctgaaggggaaagccacctcggaggacaccctcagtctaaggagataccccggctctgacaggatcatgctgcagaagtggcagaaaagggacatcagcaattttgagtatctcatgtacctcaacaccgcggctgggagaacctgcaatgactacatgcagtacccagtgttcccctgggtcctcgcagactacacctcagagacattgaacttggcaaatccgaagattttccgggatctttcaaagcccatgggggctcagaccaaggaaaggaagctgaaatttatccagaggtttaaagaagttgagaaaactgaaggagacatgactgtccagtgccactactacacccactactcctcggccatcatcgtggcctcctacctggtccggatgccacccttcacccaggccttctgcgctctgcagggcggaagcttcgacgtggcagacagaatgttccacagtgtgaagagcacgtgggagtcggcctccagagagaacatgagtgacgtcagggagctgaccccagagttcttctacctgcctgagttcttaaccaactgcaacggggtagagttcggctgcatgcaggacgggactgtgctaggagacgtgcagctccctccctgggctgatggggaccctcggaaattcatcagcctgcacagaaaggccctggaaagtgactttgtcagtgccaacctccaccattggatagaccttatttttgggtacaagcagcaggggccagccgcagtggatgctgttaatatcttccacccctacttctacggtgacagaatggacctcagcagcatcactgaccccctcatcaaaagcaccatcctggggtttgtcagcaactttggacaggtgcccaaacagctctttaccaaacctcacccagccaggactgcagcagggaagcctctgcctggaaaggatgtctccacccccgtgagcctgcctggccacccacagccctttttctacagcctgcagtcgctgaggccctcccaggtcacggtcaaagatatgtacctcttttctctaggctcagagtcccccaaaggggccattggccacattgtctctactgagaagaccattctggctgtagagaggaacaaagtgctgctgcctcctctctggaacaggaccttcagctggggctttgatgacttcagctgctgcttggggagctacggctccgacaaggtcctgatgacattcgagaacctggctgcctggggccgctgtctgtgcgccgtgtgcccatccccaacaacgattgtcacctctgggaccagcactgtggtgtgtgtgtgggagctcagcatgaccaaaggccgcccgaggggcttgcgcctccggcaggccttgtatggacacacacaggctgtcacgtgcctggcagcgtcagtcaccttcagcctcctggtgagcggctcccaggactgcacctgtatcctgtgggatctggaccacctcacccacgtgacccgcctgcccgcccatcgggaaggcatctcagccatcaccatcagtgacgtctcaggcaccattgtctcctgtgcgggagcacacttgtccctgtggaatgtcaatggacagcccctggccagcatcaccacagcctggggcccagaaggagccataacctgctgctgcctgatggagggcccagcatgggacacaagccagatcatcatcaccgggagtcaagacggcatggtccgggtttggaagactgaggatgtgaagatgtctgttcctggacggccagcaggagaggagcccccggctcagcctccaagcccaagaggccacaagtgggagaagaacctggccttgagtcgagagctggacgttagcattgctttgacagggaagcccagcaaaaccagccccgcagtgactgctctggccgtgtccagaaaccacaccaaactcctggttggtgatgagagggggagaatattctgctggtctgcagatgggtaggaagagagaggcagcagaggctctggcacaacagtgccaggctgagggtggcagaggtgactggggcctgagctctgcctacagaagaaacccccagggcctccttccccacagttctcaaggaagggcctctggcaatcacagctctgcagcccaaccctctccatggccgatgggacttctatgaaaaggatgagcacacacactcggagggctgagcagcacgctggaaactgtgacttggtgatgcccagctgcacacgaaattacacatgactcaccttattaagggctattgcactgaaaaaaaaaaagatgggtcgcttactggaaattattgtattgtctttattttattaaagcaactatgttttaaatgca

SEQ ID NO: 200073 - DNA, 9962 bp, Homo sapiens
  Payload ID: 19467
  Gene Name: WDFY family member 4
  Uniprot ID: Q6ZS81
  ENST ID: ENST00000325239
  CDS Start-End: 28-9582
ctgaattcagatctgctttgccacggcatggaggcagaagatctttcaaaggctgaagacagaaatgaagacccaggttccaaaaatgaagggcagcttgctgctgtgcagcctgatgtcccacatggagggcagtcctccagccccacagctctctgggacatgctggaaaggaagtttctggaataccagcagttgactcacaagagccccattgagcgtcagaagagcctgttgagtcttctccccctattcctaaaggcctgggaacactccgtggggatcatctgctttcccagtctccaaaggctggctgaagacgtgtctgaccagcttgcccagcaactccagaaggcccttgtggggaagcctgcggagcaagctcggttggcagctggacagttgctgtggtggaagggggacgtggatcaggatggctacttgctcctgaagtcagtgtacgtgctcacggggacagactcggagacgctgggcagggttgctgagtctgggcttccagccctgctcctacagtgcctttacctcttctttgtctttcctctggacaaagatgagcttcttgagagtgatcttcaagttcaaaagatgttcgtgcagatgttgctcaatatttgcagtgactctcagggcctggagggactcctctcaggaagtgagctgcagtctctgctgattgccacgacctgccttcgggagcacagctgctgcttctggaaggaacccaccttctgcgtgctaagggcaatctccaaggcccagaacctcagcatcatccagtacctgcaggccacagactgtgtcaggctctccctccagaacctctccaggctcacggacactctccctgcccctgaagtgagcgaggctgtaagcctgatcttgggattcgtgaaggactcctaccccgtctcctcggctctgttcctggagtttgagaattcagagggctatcctctgctgctcaaagtgttacttcggtatgatgggctgacccagagcgaagtggacccgcatctggaggagctccttgggctggtggtgtggctgacaacctgtgggaggtcagagctgaaggtgtttgacagcatcacttaccctcagcttgaaggcttcaagttccatcatgaggcatctggggtgactgttaagaatcttcaggccttccaggtcctacagaatgttttccacaaagccagtgactctgtcctctgcatacaagtcttgtcagtcatcaggaccatgtgggcctggaatgctcgaaacttcttcctgctggagtggaccctgcagcccatctcgcagtttgtagagatcatgcccctgaagccggccccagtgcaggaacacttcttccagcttctagaggccctggtgttcgagctgcactacgtgcctcatgagatcctgcgaaaggtacagcatctgatcaaggagagccctgggccatcctgcaccctcatggccctgcagagcatcctcagcatcgctggtggggaccccctcttcaccgacatcttccgggactcagggctcctgggcctgctactggcacagcttcggaagcaagccaagatcatgaggaagtcaggaaacaaagtgtccactcctggtgttcaggatccagaaagagaactcacctgtgtgatgctgaggattgtagtcacacttctgaaaggctcggtgaggaatgcagttgtcctgaaggaccacggcatggtgcccttcatcaagatcttcctggatgacgagtgctaccgggaggcctcgctcagcatcttggagcagctctcagccatcaacgccgaggagtacatgagcatcattgtgggtgctctatgctcatccactcaaggggagctgcagctgaaactggatctcctgaagtctctgctccggatcctggtgacccccaagggtcgtgctgccttcagagtctccagcgggttcaacgggctgctgtctctgctctctgacctggaaggctccctccaggagcccccgctgcaggcatggggagcagtatcccccagacagaccctggagctggttttgtacactctctgtgctgtgtccgcagcgctgcactgggaccctgtcaatggctacttcttcaggaggaatgggctctttgagaagctggccgaggacctctgcctgctgggctgttttggagccctggaggaagagggcaacctgctgcgctcttgggtggacacaaaggccaggccatttgcagatttgctgggcactgccttttcctccagcggctcactcccaccccggatacagagctgcctccagatccttggctttctggacagcatggccagcggcaccctccacttgcgtggggacctgaaggagtccctgaggaccaagcaggggccggttgtggatgttcagaagggagaaactggcagtgacccccaacgcaacttcaagcagtggccagacctggaggagaggatggatgagggagatgctgcaatcatgcatcccggggtcgtgtgcatcatggtgaggctgctgcctcggttgtaccatgaagatcacccacagctttccgaggagatccagtgctccctggccagtcatatccagtccctggtgaagtcggagaagaaccgccaggtcatgtgcgaagcaggcttgcttgggaccctcatggcctcctgccacagggccctggtcaccagtggcagccccctccactcacgcctcatcaggatctttgagaagctcgcttcccaggccattgaaccggatgtgctaagacagtttctaggtcttggaattccctcatctctgtcggccacaacaaaaatccttgattcatctcacacacacagaggcaaccctgggtgctcagggtcacagactgcacagggcttggctgaggggccctggccagctgccccagatgctgggctgcaccctggagtcacacaggccccgcagcccttgggggaatcccaggattcaactactgctcttcagacggcgctgagcctcatctccatgacctccccacgcaacctgcagcctcagagggcagccctggccccatcgtttgtggaatttgacatgtccgtggaaggttatggctgtttgtttattccaaccctgtccacagttatgggaaccagcactgagtactctgtctctggaggaattgggacaggtgccaccagaccgttccctcctcctggaggtctgaccttctcctgctggttcctgatcagccggcatggagctgccactgagggccacccgctgcgcttcctgacgttggtgcgccacctggccaggactgagcaaccctttgtttgcttctccgtcagcctctgcccagacgacctctccttggttgtttctacagaagagaaggagtttcagcctctggatgtcatggaacctgaggatgactccgagccttctgcaggatgccagcttcaggtcaggtgtggccagctcctggcttgtggtcagtggcatcacttggctgtggttgtcactaaggaaatgaaaaggcattgtacagtttccacctgtctggatggacaggtcattggctctgccaagatgttatacatccaggctctaccagggcctttcctttctatggatccatccgcatttgtggatgtttatggatatattgctactcctcgagtctggaaacaaaagtcttcattaatctggcgtcttggccccacatacctctttgaagaagccatttcaatggaaactctggaagttattaacaaacttggcccaagatattgtggtaacttccaagctgtgcatgtccaaggggaggacctggacagtgaagccacgccctttgttgcagaagaaagagtttcttttggacttcacatagccagctcctctatcaccagtgtagcggacatcagaaatgcttacaatgaggtggacagccgcctgatcgccaaagagatgaacatttcatcccgtgacaatgccatgcccgtgttcttgctgaggaattgtgctggccacctgtcagggtctctgcggaccattggagctgttgctgtgggtcaattaggggtgagggtattccactccagccctgctgccagcagcctggacttcattggcgggcctgccatcctcctgggcctcatctccttagcgacagatgaccataccatgtatgcggctgtgaaagttctgcactcggtcctgaccagtaatgccatgtgtgacttcctgatgcaacacatctgtgggtaccagataatggcgtttctcctgaggaagaaggcctctctcctgaaccatcgaatttttcagctgatcctctcagtggctggcactgtggagctgggcttcaggtcatctgctatcaccaacactggtgtcttccagcacatcctctgcaatttcgagctctggatgaatactgcagacaatctggagctcagcctcttttcccatcttttggaaatccttcaatcaccaagggaaggacccaggaatgctgaagctgcccaccaggcacagcttatacccaagctcatcttcctattcaatgagccgagcctcatcccctccaagatctccaccatcattggcatcctggcctgtcagctgaggggccacttcagcacccaggacttgctcaggattgggctgtttgttgtgtacaccctcaagccttcgtcggtgaatgagaggcagatctgcatggacggagccctggacccttccctgcctgctggaagccaaacatctggaaagacaatctggctcagaaaccagttgctggagatgctgctcagtgtaatatcttccccccagcttcatctgtcctctgagtcaaaggaagagatgtttctgaaactggggcctgactggttcctgctgctcctgcagggccacctgcatgccagcaccactgtgctggcattgaagctgctgctgtactttctggcaagcccctccctccgcacacggtttagagatggcctgtgtgcaggatcctgggtggaacgcagcactgagggcgtggatattgtaatggacaacctgaagagccagtcaccactgcctgagcaaagcccatgcctgcttcctgggttccgtgtcttgaatgactttctggcccaccacgtccacattccagaggtctacctcatcgtctccaccttcttcctgcagacaccactcacagagctgatggacgggcccaaagacagccttgatgccatgcttcagtggctcctgcagaggcaccaccaggaagaagtcctccaggctgggctgtgcacagaaggtgccttgctcctcctggaaatgctgaaggccaccatgagccagcccctggcaggttctgaggatggtgcctgggcacagaccttcccggccagcgtgctgcagttcctcagcctcgtccaccgcacctacccccaggacccagcgtggcgagccccggagttcctccagaccttggccatagccgccttccccctgggagcccaaaagggggttggggctgagtccacccggaacaccagcagtcctgaggccgcagctgaaggcgacagcacagtggagggtctccaggctcccaccaaggcacatcccgcccggaggaagctgagggagttcacgcagctcctcttgagggagctcctgcttggagcctccagccccaagcagtggctgcccctggaggtgctcctggaggcttctccagaccacgccaccagccaacagaagcgagacttccagtccgaggtcctgctttctgctatggaactattccacatgacaagtggaggtgatgcagcgatgttcagagacggcaaagagcctcagccaagtgcagaagctgctgctgccccttctcttgccaacatctcctgcttcacccagaagctggtggagaagctgtacagtgggatgttctcggcagaccccaggcatatcctcctcttcatcctggagcacatcatggtggtcattgagactgcctcttctcaaagggacactgtcctcagcactttatacagcagtttaaataaagtcattctttattgcctatccaagccccagcagtccctctccgaatgcctcggccttctcagcatcctgggctttctgcaggagcactgggatgttgtctttgccacctacaattccaacatcagcttcctcctgtgtctcatgcattgccttttgctactcaatgagagaagttacccagaaggatttggattggagcccaagcctagaatgtctacttatcatcaagtcttcctttccccaaatgaagacgtgaaagaaaaaagagaagacttaccaagtttgagtgatgtccaacacaacatccagaagacagtgcagactctctggcagcagctggtggcacaaaggcagcagaccctggaggatgccttcaagatcgatctctctgtgaaacctggagagagggaagtgaagattgaagaggtcacaccgctctgggaggagacgatgctcaaggcctggcagcattacttagcatctgagaagaagtcactggcaagtcgttcaaatgttgcacaccacagcaaagtcactttgtggagtggaagcctgtcctcagccatgaagctgatgcccgggcggcaggccaaggaccctgagtgcaagacagaggattttgtgtcatgtatagagaactacagaagaagaggacaagagctatatgcatctttatacaaagaccatgtgcaaaggcgaaaatgtggcaacatcaaggcagccaacgcctgggccaggatccaggagcagctttttggggagctgggcttgtggagccagggggaagaaaccaagccctgttccccatgggaactcgactggagagaaggaccagctcgaatgaggaaacgcatcaaacgcttgtctcctttggaggccctgagctcaggaaggcacaaggaaagccaagacaaaaatgatcatatttctcaaacaaatgctgaaaaccaagatgaactgacactgagggaggctgagggcgagccggacgaggtgggggtggactgcacccagctgaccttcttcccagccttacacgaaagtctgcactcagaagacttcttggaactgtgtcgggaaagacaagttattttacaagagcttcttgataaagaaaaggtgacgcagaagttctccctggtgattgtgcagggccacctggtgtcagaaggggtcctgctttttggccaccaacacttctacatctgcgagaacttcacactgtctcccacgggtgatgtctactgtacccgtcactgcttatccaacatcagcgatccgttcattttcaacctgtgcagcaaagacaggtccactgaccattactcgtgccagtgccacagctacgctgacatgcgggagctacggcaggctcgcttcctcctgcaggacatcgccctggagatcttcttccacaatggatattccaagtttcttgtcttctacaacaatgatcggagtaaggcctttaaaagcttctgctctttccaacccagcctgaaggggaaagccacctcggaggacaccctcagtctaaggagataccccggctctgacaggatcatgctgcagaagtggcagaaaagggacatcagcaattttgagtatctcatgtacctcaacaccgcggctgggagaacctgcaatgactacatgcagtacccagtgttcccctgggtcctcgcagactacacctcagagacattgaacttggcaaatccgaagattttccgggatctttcaaagcccatgggggctcagaccaaggaaaggaagctgaaatttatccagaggtttaaagaagttgagaaaactgaaggagacatgactgtccagtgccactactacacccactactcctcggccatcatcgtggcctcctacctggtccggatgccacccttcacccaggccttctgcgctctgcagggcggaagcttcgacgtggcagacagaatgttccacagtgtgaagagcacgtgggagtcggcctccagagagaacatgagtgacgtcagggagctgaccccagagttcttctacctgcctgagttcttaaccaactgcaacggggtagagttcggctgcatgcaggacgggactgtgctaggagacgtgcagctccctccctgggctgatggggaccctcggaaattcatcagcctgcacagaaaggccctggaaagtgactttgtcagtgccaacctccaccattggatagaccttatttttgggtacaagcagcaggggccagccgcagtggatgctgttaatatcttccacccctacttctacggtgacagaatggacctcagcagcatcactgaccccctcatcaaaagcaccatcctggggtttgtcagcaactttggacaggtgcccaaacagctctttaccaaacctcacccagccaggactgcagcagggaagcctctgcctggaaaggatgtctccacccccgtgagcctgcctggccacccacagccctttttctacagcctgcagtcgctgaggccctcccaggtcacggtcaaagatatgtacctcttttctctaggctcagagtcccccaaaggggccattggccacattgtctctactgagaagaccattctggctgtagagaggaacaaagtgctgctgcctcctctctggaacaggaccttcagctggggctttgatgacttcagctgctgcttggggagctacggctccgacaaggtcctgatgacattcgagaacctggctgcctggggccgctgtctgtgcgccgtgtgcccatccccaacaacgattgtcacctctgggaccagcactgtggtgtgtgtgtgggagctcagcatgaccaaaggccgcccgaggggcttgcgcctccggcaggccttgtatggacacacacaggctgtcacgtgcctggcagcgtcagtcaccttcagcctcctggtgagcggctcccaggactgcacctgtatcctgtgggatctggaccacctcacccacgtgacccgcctgcccgcccatcgggaaggcatctcagccatcaccatcagtgacgtctcaggcaccattgtctcctgtgcgggagcacacttgtccctgtggaatgtcaatggacagcccctggccagcatcaccacagcctggggcccagaaggagccataacctgctgctgcctgatggagggcccagcatgggacacaagccagatcatcatcaccgggagtcaagacggcatggtccgggtttggaagactgaggatgtgaagatgtctgttcctggacggccagcaggagaggagcccccggctcagcctccaagcccaagaggccacaagtgggagaagaacctggccttgagtcgagagctggacgttagcattgctttgacagggaagcccagcaaaaccagccccgcagtgactgctctggccgtgtccagaaaccacaccaaactcctggttggtgatgagagggggagaatattctgctggtctgcagatgggtaggaagagagaggcagcagaggctctggcacaacagtgccaggctgagggtggcagaggtgactggggcctgagctctgcctacagaagaaacccccagggcctccttccccacagttctcaaggaagggcctctggcaatcacagctctgcagcccaaccctctccatggccgatgggacttctatgaaaaggatgagcacacacactcggagggctgagcagcacgctggaaactgtgacttggtgatgcccagctgcacacgaaattacacatgactcaccttattaagggctattgcactgaaaaaaaaaaagatgggtcgcttactggaaattattgtattgtctttattttattaaagcaactatgttttaaatgc

SEQ ID NO: 200074 - DNA, 2193 bp, Homo sapiens
  Payload ID: 19467
  Gene Name: WDFY family member 4
  Uniprot ID: Q6ZS81
  ENST ID: ENST00000360890
  CDS Start-End: 144-2108
gtgaaacggcgctgaggactgacgatgtggggccgggtcctcttcccccgagcctgaggggctgcagctggggatagggggcccatgccttctgatgtctacaggcgctgacggccacccctccagatctgctttgccacggcatggaggcagaagatctttcaaaggctgaagacagaaatgaagacccaggttccaaaaatgaagggcagcttgctgctgtgcagcctgatgtcccacatggagggcagtcctccagccccacagctctctgggacatgctggaaaggaagtttctggaataccagcagttgactcacaagagccccattgagcgtcagaagagcctgttgagtcttctccccctattcctaaaggcctgggaacactccgtggggatcatctgctttcccagtctccaaaggctggctgaagacgtgtctgaccagcttgcccagcaactccagaaggcccttgtggggaagcctgcggagcaagctcggttggcagctggacagttgctgtggtggaagggggacgtggatcaggatggctacttgctcctgaagtcagtgtacgtgctcacggggacagactcggagacgctgggcagggttgctgagtctgggcttccagccctgctcctacagtgcctttacctcttctttgtctttcctctggacaaagatgagcttcttgagagtgatcttcaagttcaaaagatgttcgtgcagatgttgctcaatatttgcagtgactctcagggcctggagggactcctctcaggaagtgagctgcagtctctgctgattgccacgacctgccttcgggagcacagctgctgcttctggaaggaacccaccttctgcgtgctaagggcaatctccaaggcccagaacctcagcatcatccagtacctgcaggccacagactgtgtcaggctctccctccagaacctctccaggctcacggacactctccctgcccctgaagtgagcgaggctgtaagcctgatcttgggattcgtgaaggactcctaccccgtctcctcggctctgttcctggagtttgagaattcagagggctatcctctgctgctcaaagtgttacttcggtatgatgggctgacccagagcgaagtggacccgcatctggaggagctccttgggctggtggtgtggctgacaacctgtgggaggtcagagctgaaggtgtttgacagcatcacttaccctcagcttgaaggcttcaagttccatcatgaggcatctggggtgactgttaagaatcttcaggccttccaggtcctacagaatgttttccacaaagccagtgactctgtcctctgcatacaagtcttgtcagtcatcaggaccatgtgggcctggaatgctcgaaacttcttcctgctggagtggaccctgcagcccatctcgcagtttgtagagatcatgcccctgaagccggccccagtgcaggaacacttcttccagcttctagaggccctggtgttcgagctgcactacgtgcctcatgagatcctgcgaaaggtacagcatctgatcaaggagagccctgggccatcctgcaccctcatggccctgcagagcatcctcagcatcgctggtggggaccccctcttcaccgacatcttccgggactcagggctcctgggcctgctactggcacagcttcggaagcaagccaagatcatgaggaagtcaggaaacaaagtgtccactcctggtgttcaggatccagaaagagaactcacctgtgtgatgctgaggattgtagtcacacttctgaaaggctcggtgaggaatgcagttgtcctgaaggaccacggcatggtgcccttcatcaagatcttcctggatgacgagtgctaccgggaggcctcgctcagcatcttggagcagctctcagccatcaacgccgaggagtacatgagcatcattgtgggtgctctatgctcatccactcaaggggagctgcagctgaaactggatctcctgaaggtgatttcaagtcctcctttgagattggcttccctgtggatatgcaccaagcgatccacatttgctcaggcatttgtattcatgtaattcagttagccactgtatgtggcaggcagtaccctgtattaggtagcgtcaggtgctgtaacaaataaatcccatatcctcagta

SEQ ID NO: 200075 - DNA, 2609 bp, Homo sapiens
  Payload ID: 19467
  Gene Name: WDFY family member 4
  ENST ID: ENST00000374161
  CDS Start-End: 1-1657
agatgacactgtggtttgggctgaagaatgtgttgcctgcgcaaattggctctggatgaatactgcagacaatctggagctcagcctcttttcccatcttttggaaatccttcaatcaccaagggaaggacccaggaatgctgaagctgcccaccaggcacagcttatacccaagctcatcttcctattcaatgagccgagcctcatcccctccaagatctccaccatcattggcatcctggcctgtcagctgaggggccacttcagcacccaggacttgctcaggattgggctgtttgttgtgtacaccctcaagccttcgtcggtgaatgagaggcagatctgcatggacggagccctggacccttccctgcctgctggaagccaaacatctggaaagacaatctggctcagaaaccagttgctggagatgctgctcagtgtaatatcttccccccagcttcatctgtcctctgagtcaaaggaagagatgtttctgaaactggggcctgactggttcctgctgctcctgcagggccacctgcatgccagcaccactgtgctggcattgaagctgctgctgtactttctggcaagcccctccctccgcacacggtttagagatggcctgtgtgcaggatcctgggtggaacgcagcactgagggcgtggatattgtaatggacaacctgaagagccagtcaccactgcctgagcaaagcccatgcctgcttcctgggttccgtgtcttgaatgactttctggcccaccacgtccacattccagaggtctacctcatcgtctccaccttcttcctgcagacaccactcacagagctgatggacgggcccaaagacagccttgatgccatgcttcagtggctcctgcagaggcaccaccaggaagaagtcctccaggctgggctgtgcacagaaggtgccttgctcctcctggaaatgctgaaggccaccatgagccagcccctggcaggttctgaggatggtgcctgggcacagaccttcccggccagcgtgctgcagttcctcagcctcgtccaccgcacctacccccaggacccagcgtggcgagccccggagttcctccagaccttggccatagccgccttccccctgggagcccaaaagggggttggggctgagtccacccggaacaccagcagtcctgaggccgcagctgaaggcgacagcacagtggagggtctccaggctcccaccaaggcacatcccgcccggaggaagctgagggagttcacgcagctcctcttgagggagctcctgcttggagcctccagccccaagcagtggctgcccctggaggtgctcctggaggcttctccagaccacgccaccagccaacagaagcgagacttccagtccgaggtcctgctttctgctatggaactattccacatgacaagtggaggtgatgcagcgatgttcagagacggcaaagagcctcagccaagtgcagaagctgctgctgccccttctcttgccaacatctcctgcttcacccagaagctggtggagaagctgtacagtgggatgttctcggcagaccccaggcatatcctcctcttcatcctggagcacatcatggtgatctcagccccattacaagctagagacttttcctgacaagcctccaggaaacctttgctcaaaccctccctgtgatggggaaccccctaaaattcaagttgtcccacccagggggatgtctgtgattcttggaaagaactttctgttatcaagctgggatctacctccagcaactcctgccagcagtcctggttatgccctctgcagcagaattaggaggaccactctccttcctcttcacatctcatagagagtgaaattggctcccagcacccttctgactgcagagtcacccacagacctcaggactgggcctcttcacagtttctagagccatcttcacttgtctgatgagcaggtccaagcaaacctggaaagacttgaattcaaaggcttcttcaggaacaactccaagagaggagaaatagcccttgtcagctctgtgagggttaaaatcagattcctggcaagttgtgttgtaaatggaaagaagctgctgagctccctatggctaaagcatggactcccagctaatatcccaaacataggtgccagtgggggccaccgtgctttcagggggaccaggcctgagggctcggctccccacatatccaccagcctcctctcttgcttgctgtctgtgatgcctgcccctcttaacctctgtttgagacccatctgaggagcaggagaggaacatgataaagaaatgaatcccaaaccccaacaggtttaaacagaccttcacttcatgagtagaaacattgcgttacctgtgaaattctaagggagtagcctataacaaattcattttctatcggactgaaaaactttgtgcatactctttgtattatggattcttttcatggaagccaaacagatgtttggagatgtatggaccagtccatgctaaggctacaaatcagggtcttctacttctccctctaagtttcttttgaattaaaatcttctggactccgtctccagt

SEQ ID NO: 200076 - DNA, 1349 bp, Homo sapiens
  Payload ID: 19468
  Gene Name: WDYHV motif containing 1
  Uniprot ID: Q96HA8
  ENST ID: ENST00000287387
  CDS Start-End: 126-743
cctctccccccgggctccgcccaccccacgccgggaacccacgcgggccactacaagcccgccctttcctacgtctggtccagtcggtcttcctccggcccgggccctggcccagctagccggccatggaaggtaatggccccgctgctgtccactaccagccggccagccccccgcgggacgcctgcgtctacagcagctgctactgtgaagaaaatatttggaagctctgtgaatacatcaaaaaccatgaccagtatcctttagaagaatgttatgctgtcttcatatctaatgagaggaagatgatacctatctggaaacaacaggcgagacctggagatggacctgtgatctgggattaccatgttgttttgcttcatgtttcaagtggaggacagaacttcatttatgatctcgatactgtcttgccatttccctgcctctttgacacttatgtagaagatgcctttaagtctgatgatgacattcacccacagtttaggaggaaatttagagtgatccgtgcagattcatatttgaagaactttgcttctgaccgatctcacatgaaagactccagtgggaattggagagagcctccgccgccatatccctgcattgagactggagattccaaaatgaacctgaacgatttcatcagtatggatcccaaggtaggatggggcgccgtctacacactatccgaatttacacatcggtttggcagtaaaaactgctgaacttggtctcaagatgtggaactgtggagaaattctaggacatgaacaagctatcctttcatcgaggacagcaaacattatggtacagttggcttggaattatgtctttctcttttaatttgattgagtggaaatctgagtgaatacaaatataaatgaacaacataaaaacttttgttttgacatgtcaaattgaaacttgataaagtgcgtacttgctaagatattcctgtggctcatgcgttacaacacgaggacttaagccagtaatcgtttttgttcagatagaggtgtggaggtagagccagcccctcatgtctgttttggatgttttgtgtctctccagctacattgtaagttccttgagggcagggccatggcccattgctctgtgaatctcaaatgcccataaaaggtgcccataaaatgttttcttgaacatttgaatgtgctgttgtctggaaaggggtaatattgtgagctgaatcagcaataagtattagtctttttggactatggtattgttaaaaagactgcagccctctcagacttgagcgttaattggcttatttatttatggctttaaataaaatcgatttaacgtta

SEQ ID NO: 200077 - DNA, 869 bp, Homo sapiens
  Payload ID: 19468
  Gene Name: WDYHV motif containing 1
  ENST ID: ENST00000523356
  CDS Start-End: 38-628
cttcctccggcccgggccctggcccagctagccggccatggaaggtaatggccccgctgctgtccactaccagccggccagccccccgcgggacgcctgcgtctacagcagctgctactgtgaagaaaatatttggaagctctgtgaatacatcaaaaaccatgaccagtatcctttagaagaatgttatgctgtcttcatatctaatgagaggaagatgatacctatctggaaacaacaggcgagacctggagatggacctgtgatctgggattaccatgttgttttgcttcatgtttcaagtggaggacagaacttcatttatgatctcgatactgtcttgccatttccctgcctctttgacacttatgtagaagatgcctttaagtctgatgatgacattcacccacagtttaggaggaaatttagagtgatccgtgcagattcatatttgaagaactttgcttctgaccgatctcacatgaaagactccagtgggaattggagagagcctccgccgccatatccctgcattgagactggaggcatcaatccagttgataatttcctgacatttaagaagataaagggtccttcaccctattactattgtttggcattcatatgagtttgaagtattatttacgtttattccaaaatgaacctgaacgatttcatcagtatggatcccaaggtaggatggggcgccgtctacacactatccgaatttacacatcggtttggcagtaaaaactgctgaacttggtctcaagatgtggaactgtggagaaattctaggacatgaacaagctatcctttcatcgaggacagcaaacattatggtacagttggcttggaattatgtcttt

SEQ ID NO: 200078 - DNA, 880 bp, Homo sapiens
  Payload ID: 19468
  Gene Name: WDYHV motif containing 1
  ENST ID: ENST00000518125
  CDS Start-End: 101-274
aaacaacaggcgagacctggagatggacctgtgatctgggaaatttagagtgatccgtgcagattcatatttgaagaactttgcttctgaccgatctcacatgaaagactccagtgggaattggagagagcctccgccgccatatccctgcattgagactggagattccaaaatgaacctgaacgatttcatcagtatggatcccaaggtaggatggggcgccgtctacacactatccgaatttacacatcggtttggcagtaaaaactgctgaacttggtctcaagatgtggaactgtggagaaattctaggacatgaacaagctatcctttcatcgaggacagcaaacattatggtacagttggcttggaattatgtctttctcttttaatttgattgagtggaaatctgagtgaatacaaatataaatgaacaacataaaaacttttgttttgacatgtcaaattgaaacttgataaagtgcgtacttgctaagatattcctgtggctcatgcgttacaacacgaggacttaagccagtaatcgtttttgttcagatagaggtgtggaggtagagccagcccctcatgtctgttttggatgttttgtgtctctccagctacattgtaagttccttgagggcagggccatggcccattgctctgtgaatctcaaatgcccataaaaggtgcccataaaatgttttcttgaacatttgaatgtgctgttgtctggaaaggggtaatattgtgagctgaatcagcaataagtattagtctttttggactatggtattgttaaaaagactgcagccctctcagacttgagcgttaattggcttatttatttatggctttaaataaaatcgatttaacgtta

SEQ ID NO: 200079 - DNA, 949 bp, Homo sapiens
  Payload ID: 19468
  Gene Name: WDYHV motif containing 1
  ENST ID: ENST00000519199
  CDS Start-End: 1-191
ggtccagtcggtcttcctccggcccgggccctggcccagctagccggccatggaaggtaatggccccgctgctgtccactaccagccggccagccccccgcgggacgcctgcgtctacagcagctgctactgtgaagaaaatatttggaagctctgtgaatacatcaaaaaccatgaccagtatcctttagaagaatgttatgctgtcttcatatctaatgagaggaagatgatacctatctggaaacaacaggcgagacctggagatggacctgtgatctgggctgacccccagaagcctcctttgttactagtttggagcagatccttgcagacgttttcctctgcattcacatgcatgcaaatgtacttctgaatgcgcacgattaccatgttgttttgcttcatgtttcaagtggaggacagaacttcatttatgatctcgatactgtcttgccatttccctgcctctttgacacttatgtagaagatgcctttaagtctgatgatgacattcacccacagtttaggaggaaatttagagtgatccgtgcagattcatatttgaagaactttgcttctgaccgatctcacatgaaagactccagtgggaattggagagagcctccgccgccatatccctgcattgagactggagattccaaaatgaacctgaacgatttcatcagtatggatcccaaggtaggatggggcgccgtctacacactatccgaatttacacatcggtttggcagtaaaaactgctgaacttggtctcaagatgtggaactgtggagaaattctaggacatgaacaagctatcctttcatcgaggacagcaaacattatggtacagttggcttggaattatgtctttctcttttaatttgattgagtggaaatctgagtgaatacaaatataaatgaacaacataaaaacttttgtttt

SEQ ID NO: 200080 - DNA, 1491 bp, Homo sapiens
  Payload ID: 19468
  Gene Name: WDYHV motif containing 1
  Uniprot ID: Q96HA8
  ENST ID: ENST00000523984
  CDS Start-End: 229-666
ctctccccccgggctccgcccaccccacgccgggaacccacgcgggccactacaagcccgccctttcctacgtctggtccagtcggtcttcctccggcccgggccctggcccagctagccggccatggaagtgaagaaaatatttggaagctctgtgaatacatcaaaaaccatgaccagtatcctttagaagaatgttatgctgtcttcatatctaatgagaggaagatgatacctatctggaaacaacaggcgagacctggagatggacctgtgatctgggattaccatgttgttttgcttcatgtttcaagtggaggacagaacttcatttatgatctcgatactgtcttgccatttccctgcctctttgacacttatgtagaagatgcctttaagtctgatgatgacattcacccacagtttaggaggaaatttagagtgatccgtgcagattcatatttgaagaactttgcttctgaccgatctcacatgaaagactccagtgggaattggagagagcctccgccgccatatccctgcattgagactggagattccaaaatgaacctgaacgatttcatcagtatggatcccaaggtaggatggggcgccgtctacacactatccgaatttacacatcggtttggcagtaaaaactgctgaacttggtctcaagatgtggaactgtggagaaattctaggacatgaacaagctatcctttcatcgaggacagcaaacattatggtacagttggcttggaattatgtctttctcttttaatttgattgagtggaaatctgagtgaatacaaatataaatgaacaacataaaaacttttgttttgacatgtcaaattgaaacttgataaagtgcgtacttgctaagatattcctgtggctcatgcgttacaacacgaggacttaagccagtaatcgtttttgttcagatagaggtgtggaggtagagccagcccctcatgtctgttttggatgttttgtgtctctccagctacattgtaagttccttgagggcagggccatggcccattgctctgtgaatctcaaatgcccataaaaggtgcccataaaatgttttcttgaacatttgaatgtgctgttgtctggaaaggggtaatattgtgagctgaatcagcaataagtattagtctttttggactatggtattgttaaaaagactgcagccctctcagacttgagcgttaattggcttatttatttatggctttaaataaaatcgatttaacgttagttttgttttgaagatttttgtgtcacccttgatgatctgaaatacctaaatatgcctcaattgtagatgagaaccagggctttaaaaaatatttattacatgtgccttctggaagacatcttggttatttggctttaatcatatcattccaaatgaaagatatttggcattacattggcatatagtaccagctctcatgttttcatgattctacttta

SEQ ID NO: 200081 - DNA, 341 bp, Homo sapiens
  Payload ID: 19468
  Gene Name: WDYHV motif containing 1
  ENST ID: ENST00000522194
  CDS Start-End: 80-341
gccactacaagcccgccctttcctacgtctggtccagtcggtcttcctccggcccgggccctggcccagctagccggccatggaaggtaatggccccgctgctgtccactaccagccggccagccccccgcgggacgcctgcgtctacagcagctgctactgtgaagaaaatatttggaagctctgtgaatacatcaaaaaccatgaccagtatcctttagaagaatgttatgctgtcttcatatctaatgagaggaagatgatacctatctggaaacaacaggcgagacctggagatggacctgtgatctgggtaagacagttaatacagagagtattga

SEQ ID NO: 200082 - DNA, 3436 bp, Homo sapiens
  Payload ID: 19469
  Gene Name: WEE1 G2 checkpoint kinase
  Uniprot ID: P30291
  ENST ID: ENST00000299613
  CDS Start-End: 756-2054
atgtaactgaacaatgggcctcgtctggaacttcatcttacaaaggggccgatcggcccgtccgggtggccaaggatttgccgcccgttgagtccgggccgccccgagcgtgtcagccccgagtgcggcaccgataacgcggttcgcgaggatgctggagggtgccggcccggccacctgacactcccgagccataggatgccttttaaacgcggcgatcgggcctgtaatttgggcggcgcgggcagaaggagtttaaagaaaaataattgtcccgccctgatcgtgtcgtgtcgtgtggcgtggatgggggaaaggtctggggcatgcagggagactacgcttggacttgggagtaaaggctggccttccaagcatttacagtcctacagactcatcctaagtccaggcagtactgaggcctgtttctggacaaggtcttggcccagcatttgtttttatcgtgggtttgcggtgcccagagtttggccggcctccgtgtgattaggaacatcctaccgtagataaggtatcttaaagaaggaggtgttcagcacctgtgttttgaaaggccttcgagtactgcgcagatgaccacttttaaaactgcagattttaaagctgatacttccagagattaagacaagcctcgcatttgtaaggttaacagggaagatgcaccttttaaaagtttgctctccaaagctcggggaattgattccagctctgttaaactccggggtagttctctcttcatggatacagaaaaatcaggaaaaagggaatttgatgtgcgacagactcctcaagtgaatattaatccttttactccggattctttgttgcttcattcctcaggacagtgtcgtcgtagaaagagaacgtattggaatgattcctgtggtgaagacatggaagccagtgattatgagcttgaagatgaaacaagacctgctaagagaattacaattactgaaagcaatatgaagtcccggtatacaacagaatttcatgagctagagaaaatcggctctggagaatttggttctgtatttaagtgtgtgaagaggctggatggatgcatttatgccattaagcgatcaaaaaagccattggcgggctctgttgatgagcagaacgctttgagagaagtatatgctcatgcagtgcttggacagcattctcatgtagttcgatatttctctgcgtgggcagaagatgatcatatgcttatacagaatgaatattgtaatggtggaagtttagctgatgctataagtgaaaactacagaatcatgagttactttaaagaagcagagttgaaggatctccttttgcaagttggccgaggcttgaggtatattcattcaatgtctttggttcacatggatataaaacctagtaatattttcatatctcgaacctcaatcccaaatgctgcctctgaagaaggagacgaagatgattgggcatccaacaaagttatgtttaaaataggtgatcttgggcatgtaacaaggatctccagtccacaagttgaagagggcgatagtcgttttcttgcaaatgaagttttacaggagaattatacccatctaccaaaagcagatatttttgcgcttgccctcacagtggtatgtgctgctggtgctgaacctcttccgagaaatggagatcaatggcatgaaatcagacagggtagattacctcggataccacaagtgctttcccaagaatttacagagttgctaaaagttatgattcatccagatccagagagaagaccttcagcaatggcactggtaaagcattcagtattgctgtccgcttctagaaagagtgcagaacaattacgaatagaattgaatgccgaaaagttcaaaaattcacttttacaaaaagaactcaagaaagcacagatggcaaaagctgcagctgaggaaagagcactcttcactgaccggatggccactaggtccaccacccagagtaatagaacatctcgacttattggaaagaaaatgaaccgctctgtcagccttactatatactgagctactcctttcccacctccccctgaacactgtgacaagaggaagctaggttgaaatcactgatagaatccagtttgcaattactttctcgattggtgtcagtagttttactgattaggacttttattgtgaattacagttgaaagctgtattttgatgattgctatgtcaggctttcatctaatcttaccagtctgtcttctgtaggatgtgtcactgttggatgttacaccagcctttccagggttaaccactgtggtggtgtgctgcttatagtttgctgttgcattgtaataaaaggtgtctttccctgtagtgacctgtaaaaagtactcaagggctttattacagacataccctccctttgaaaagggacatgctaaaagactcattactactcagccttcaatgtacctgtgtgtccatcttatatttcttttttttttaattgtgaattagacttgtatatcccactgggagcactttgtaggcattgcatgaaccatgggatgatgattctgtggaggtattgccttgtgaatttgctgctattttagttttgtctttgctgtaaacttgtagcattaaacaatcattgttgttaataggtcttctttttgaaacaattatgtgaaatgtatagctgcttttgatgaaaagcagctatttgcctttttttttttttcctttgaactttgaagctagtgcattggaaaaatgcaccctttccctcctttggaatgctgtattaatgtagtataataattactggttttgtaacttgttctggtaatgtccttcccggactctttttaaatgtctccccctaagttttatacttgattgtattattagtctgtttttaaatgttttgcccggtttttctcttcaatatttgtgtatataaaccgatcttcgtgatactgtacatagctgtttgaaatgccagaatgacttctgacattccaagtttttcacaaaatatattttatctgtgattagccatttgactaataatactggctaacagatgttgaaaaaaattgtctgtttgttttctcattaattttggtctaaaacatgtttgcacttgtctttgacttgtgttttattaacattgattggcatattaaaagtcactctgagcttaccttaattgtctaaatccttgtgatgcctgttttctaatattttatctctattattgctatactataaaatgtatagtgtgtataatgtactattataaaagcagagggcacattttgattgaatatgaatatcacattgcatgttatgcatgtgacttgctagaaatgtagcatgatgtaatttaaaatatcttcaaattattaagtgaatataatatgattcataacttt

SEQ ID NO: 200083 - DNA, 2799 bp, Homo sapiens
  Payload ID: 19469
  Gene Name: WEE1 G2 checkpoint kinase
  Uniprot ID: P30291
  ENST ID: ENST00000450114
  CDS Start-End: 254-2194
ctgagactggacctgaggagacctcagcctcggtgctcgggccgccccgcctctgccggaaagtccgcgccgccgctgccgccaccgtccgcagcccgagcgccccggagccgcaggccgccgccgcgcagagacgccgcggctgcgactaggcgcgcccagccgcacgtggcggacccgcccccaggcccgcagtgtcctggaccccgcaggcctccgctctcctgtcctcggccccgtccccagggccgcgatgagcttcctgagccgacagcagccgccgccaccccgccgcgccggggcggcctgcaccttgcggcagaagctgatcttctcgccctgcagcgactgtgaggaggaggaagaagaggaggaggaggagggcagcggccacagcaccggggaggactcggcctttcaagagcccgactcgccgctgccgcccgcgcggagccccacggagcccgggcccgagcgccgccgctcgcccgggccggcccccggcagccccggcgagctggaggaggacctgttgctgcccggcgcctgcccgggcgcggacgaggcgggcggtggggcggagggcgactcgtgggaggaggagggcttcggctcctcgtcgccggtcaagtcgccggcggccccctacttcctgggtagctctttctcgccggtgcgctgcggcggcccaggagatgcgtcgccgcggggttgcggggcgcgccgggcgggcgaaggccgccgctcgccgcggccggaccacccgggcaccccgccacacaagaccttccgcaagctgcgactcttcgacaccccgcacacgcccaagagtttgctctccaaagctcggggaattgattccagctctgttaaactccggggtagttctctcttcatggatacagaaaaatcaggaaaaagggaatttgatgtgcgacagactcctcaagtgaatattaatccttttactccggattctttgttgcttcattcctcaggacagtgtcgtcgtagaaagagaacgtattggaatgattcctgtggtgaagacatggaagccagtgattatgagcttgaagatgaaacaagacctgctaagagaattacaattactgaaagcaatatgaagtcccggtatacaacagaatttcatgagctagagaaaatcggctctggagaatttggttctgtatttaagtgtgtgaagaggctggatggatgcatttatgccattaagcgatcaaaaaagccattggcgggctctgttgatgagcagaacgctttgagagaagtatatgctcatgcagtgcttggacagcattctcatgtagttcgatatttctctgcgtgggcagaagatgatcatatgcttatacagaatgaatattgtaatggtggaagtttagctgatgctataagtgaaaactacagaatcatgagttactttaaagaagcagagttgaaggatctccttttgcaagttggccgaggcttgaggtatattcattcaatgtctttggttcacatggatataaaacctagtaatattttcatatctcgaacctcaatcccaaatgctgcctctgaagaaggagacgaagatgattgggcatccaacaaagttatgtttaaaataggtgatcttgggcatgtaacaaggatctccagtccacaagttgaagagggcgatagtcgttttcttgcaaatgaagttttacaggagaattatacccatctaccaaaagcagatatttttgcgcttgccctcacagtggtatgtgctgctggtgctgaacctcttccgagaaatggagatcaatggcatgaaatcagacagggtagattacctcggataccacaagtgctttcccaagaatttacagagttgctaaaagttatgattcatccagatccagagagaagaccttcagcaatggcactggtaaagcattcagtattgctgtccgcttctagaaagagtgcagaacaattacgaatagaattgaatgccgaaaagttcaaaaattcacttttacaaaaagaactcaagaaagcacagatggcaaaagctgcagctgaggaaagagcactcttcactgaccggatggccactaggtccaccacccagagtaatagaacatctcgacttattggaaagaaaatgaaccgctctgtcagccttactatatactgagctactcctttcccacctccccctgaacactgtgacaagaggaagctaggttgaaatcactgatagaatccagtttgcaattactttctcgattggtgtcagtagttttactgattaggacttttattgtgaattacagttgaaagctgtattttgatgattgctatgtcaggctttcatctaatcttaccagtctgtcttctgtaggatgtgtcactgttggatgttacaccagcctttccagggttaaccactgtggtggtgtgctgcttatagtttgctgttgcattgtaataaaaggtgtctttccctgtagtgacctgtaaaaagtactcaagggctttattacagacataccctccctttgaaaagggacatgctaaaagactcattactactcagccttcaatgtacctgtgtgtccatcttatatttcttttttttttaattgtgaattagacttgtatatcccactgggagcactttgtaggcattgcatgaaccatgggatgatgattctgtggaggtattgccttgtgaatttgctgctattttagttttgtctttgctgtaaacttgtagcattaaacaatcattgttgttaa

SEQ ID NO: 200084 - DNA, 465 bp, Homo sapiens
  Payload ID: 19469
  Gene Name: WEE1 G2 checkpoint kinase
  ENST ID: ENST00000527848
  CDS Start-End: 1-300
atgattcatccagatccagagagaagaccttcagcaatggcactggtaaagcattcagtattgctgtccgcttctagaaagagtgcagaacaattacgaatagaattgaatgccgaaaagttcaaaaattcacttttacaaaaagaactcaagaaagcacagatggcaaaagctgcagctgaggaaagagcactcttcactgaccggatggccactaggtccaccacccagaatgaccctaattttcagtgcaaattcaaaggtctctggagtaaggaaaaatatctatgtatgccctaggaagattcaccaggaaaagatggcatgttgtgtccaaacttcattaaactaagagtcaaagaaacttcggccagtccagcccatgaagaaaaatacctcaaaggaacatttacatcacagttcacattgtttagttttatatggttaataaacattttgaagagc

SEQ ID NO: 200085 - DNA, 990 bp, Homo sapiens
  Payload ID: 19469
  Gene Name: WEE1 G2 checkpoint kinase
  ENST ID: ENST00000530712
  CDS Start-End: 347-990
aaaaacaaaaacaaacaaaaaaaaagccaacctgataatactggtttactctgagaaagaaacaggtggattgctgaggtgtatgattgagagagagactttacattttattttgtacccatgcaaatgtattacctattgaaaaaacaataaaattttgatttcacaagcaggttgaagggagaaggtcctataaaataacactttcttggttgagattggttggttgagactcatttggtaaagatggaagaaagaaaatatttcagaaagaagaaaatgctaatattttctatctttgttaggtggaagtttagctgatgctataagtgaaaactacagaatcatgagttactttaaagaagcagagttgaaggatctccttttgcaagttggccgaggcttgaggtatattcattcaatgtctttggttcacatggatataaaacctagtaatattttcatatctcgaacctcaatcccaaatgctgcctctgaagaaggagacgaagatgattgggcatccaacaaagttatgtttaaaataggtgatcttgggcatgtaacaaggatctccagtccacaagttgaagagggcgatagtcgttttcttgcaaatgaagttttacaggagaattatacccatctaccaaaagcagatatttttgcgcttgccctcacagtggtatgtgctgctggtgctgaacctcttccgagaaatggagatcaatggcatgaaatcagacagggtagattacctcggataccacaagtgctttcccaagaatttacagagttgctaaaagttatgattcatccagatccagagagaagaccttcagcaatggcactggtaaagcattcagtattgctgtccgcttctagaaagagtgcagaacaattacgaatagaattgaatgccgaaaagttcaaaaattcacttttacaaaaagaactcaagaaagcacagatggcaaaagctgcagctga

SEQ ID NO: 200086 - DNA, 573 bp, Homo sapiens
  Payload ID: 19469
  Gene Name: WEE1 G2 checkpoint kinase
  ENST ID: ENST00000524612
  CDS Start-End: 87-573
acattcttttagttctctagcttgtcgtctctccctcctctcccctaaggatgaaacaaaacaggcatgtatagattcaagtttggatgtcttgtatagctttcagtttcggtggaagtttagctgatgctataagtgaaaactacagaatcatgagttactttaaagaagcagagttgaaggatctccttttgcaagttggccgaggcttgaggtatattcattcaatgtctttggttcacatggatataaaacctagtaatattttcatatctcgaacctcaatcccaaatgctgcctctgaagaaggagacgaagatgattgggcatccaacaaagttatgtttaaaataggtgatcttgggcatgtaacaaggatctccagtccacaagttgaagagggcgatagtcgttttcttgcaaatgaagttttacaggagaattatacccatctaccaaaagcagatatttttgcgcttgccctcacagtggtatgtgctgctggtgctgaacctcttccgagaaatggagatcaatggcatgaaatcagacagggtagattacctcggatac

SEQ ID NO: 200087 - DNA, 838 bp, Homo sapiens
  Payload ID: 19469
  Gene Name: WEE1 G2 checkpoint kinase
  ENST ID: ENST00000530175
  CDS Start-End: 1-437
ctgatgctataagtgaaaactacagaatcatgagttactttaaagaagcagagttgaaggatctccttttgcaagttggccgaggcttgaggtatattcattcaatgtctttggttcacatggatataaaacctagtaatattttcatatctcgaacctcaatcccaaatgctgcctctgaagaaggagacgaagatgattgggcatccaacaaagttatgtttaaaataggtgatcttgggcatgtaacaaggatctccagtccacaagttgaagagggcgatagtcgttttcttgcaaatgaagttttacaggagtggtatgtgctgctggtgctgaacctcttccgagaaatggagatcaatggcatgaaatcagacagggtagattacctcggataccacaagtgctttcccaagaatttacagagttgctaaaagttatgattcatccagatccagagagaagaccttcagcaatggcactggtaaagcattcagtattgctgtccgcttctagaaagagtgcagaacaattacgaatagaattgaatgccgaaaagttcaaaaattcacttttacaaaaagaactcaagaaagcacagatggcaaaagctgcagctgaggaaagagcactcttcactgaccggatggccactaggtccaccacccagagtaatagaacatctcgacttattggaaagaaaatgaaccgctctgtcagccttactatatactgagctactcctttcccacctccccctgaacactgtgacaagaggaagctaggttgaaatcactgatagaatccagtttgcaattactttctcgattggtgt

SEQ ID NO: 200088 - DNA, 3061 bp, Homo sapiens
  Payload ID: 19470
  Gene Name: WEE1 homolog 2 (S. pombe)
  Uniprot ID: P0C1S8
  ENST ID: ENST00000397541
  CDS Start-End: 407-2110
aatttcttttcaatattagcttattcccaaattggctaatgggtatttttaaagccatgctaaattaaaggaattcaattttctcactagtatttggtaacacatgggagactatgtgtcatatccagaagagttctgtacatgaactgcatttaattgctccgagagtcactggagctttctttaatcagaatggaaatcaggataagctgaggtcttatagattggtggtacttaaggcagaaaattaacaccgtgttttgtagctgttagttggtagagggaaattcaggctaccgtcgcgaaacctgcaggttaagttattttctcctccctgcttctgtaggttcacagcgttcccttctgatagagctttttgtctgtgttgtaaagctctttggctgagatggatgacaaagatattgacaaagaactaaggcagaaattaaacttttcctattgtgaggagactgagattgaagggcagaagaaagtagaagaaagcagggaggcttcgagccaaaccccagagaagggtgaagtgcaggattcagaggcaaagggtacaccaccttggactccccttagcaacgtgcatgagctcgacacatcttcggaaaaagacaaagaaagtccagatcagattttgaggactccagtgtcacaccctctcaaatgtcctgagacaccagcccaaccagacagcaggagcaagctgctgcccagtgacagcccctctactcccaaaaccatgctgagccggttggtgatttctccaacagggaagcttccttccagaggccctaagcatttgaagctcacacctgctcccctcaaggatgagatgacctcattggctctggtcaatattaatcccttcactccagagtcctataaaaaattatttcttcaatctggtggcaagaggaaaataagaggagatcttgaggaagctggtccagaggaaggcaagggagggctgcctgccaagagatgtgttttacgagaaaccaacatggcttcccgctatgaaaaagaattcttggaggttgaaaaaattggggttggcgaatttggtacagtctacaagtgcattaagaggctggatggatgtgtttatgcaataaagcgctctatgaaaacttttacagaattatcaaatgagaattcggctttgcatgaagtttatgctcacgcagtgcttgggcatcacccccatgtggtacgttactattcctcatgggcagaagatgaccacatgatcattcagaatgaatactgcaatggtgggagtttgcaagctgctatatctgaaaacactaagtctggcaatcattttgaagagccaaaactcaaggacatccttctacagatttcccttggccttaattacatccacaactctagcatggtacacctggacatcaaacctagtaatatattcatttgtcacaagatgcaaagtgaatcctctggagtcatagaagaagttgaaaatgaagctgattggtttctctctgccaatgtgatgtataaaattggtgacctgggccacgcaacatcaataaacaaacccaaagtggaagaaggagatagtcgcttcctggctaatgagattttgcaagaggattaccggcaccttcccaaagcagacatatttgccttgggattaacaattgcagtggctgcaggagcagagtcattgcccaccaatggtgctgcatggcaccatatccgcaagggtaactttccggacgttcctcaggagctctcagaaagcttttccagtctgctcaagaacatgatccaacctgatgccgaacagagaccttctgcagcagctctggccagaaatacagttctccggccttccctgggaaaaacagaagagctccaacagcagctgaatttggaaaagttcaagactgccacactggaaagggaactgagagaagcccagcaggcccagtcaccccagggatatacccatcatggtgacactggggtctctgggacccacacaggatcaagaagcacaaaacgcctggtgggaggaaagagtgcaaggtcttcaagctttacctcaggagagcgtgagcctctgcattaaaggaagaaaaggaaaacagcccttggtttggcctatggattacgaggttgctgttgctgattccccaccaaagatcccagggactcgttgtacatagaaaggaatagaatttagtttagagttgaagtcacagcttacagaaaatgtgcctggatttccacagcgcttcccaggttatatgatgctgttcctaagagagaattcccagcttctttgaggaagtgggtctcctaatgtataccctttctgatattgtatttattaaataaatggtttcaccattatgtgaggtgggtaaaagttagactgcatgcaacttggacatctctgagctggttgttaacttgcagaacaaaaatgctgtggggagaggcttcagggaaaacttgatgtgcctgtggttgttctccatctatttgccctgcctctcttgctgttctggttggtttgatattctgggtctcaccaatttctcttgatttttgtgagaatttggctttgtttcctgttttttaaaatcatattttatctaaatcctttttctgtacacatttttaaaggaagagaatactgtatttttaaataaaggtttttatcttgtccaaagcctaattacaggtaaaatatcctttgtaaaatgtaactaacaaagaatgagaaatttatgtcggagaacattttatgaataaaagggtaagagaattgagtgggtcagtagtaacaggtcttggtggcaagtctcagcttcacagttccaacagttaatgatggtcaggatctgctagaaaattatgttggtcataaaggtatttgataagctctgtttgtgtcatcttagtgaatgcaacctgttaatgataatggctttttcgctgcttgattttcttcttttcctcatttttaaaagctaattaagtttttttaattgaataaaccctaatactattcttt

SEQ ID NO: 200089 - DNA, 610 bp, Homo sapiens
  Payload ID: 19470
  Gene Name: WEE1 homolog 2 (S. pombe)
  ENST ID: ENST00000493845
  CDS Start-End: 1-610
gtctacaagtgcattaagaggctggatggatgtgtttatgcaataaagcgctctatgaaaacttttacagaattatcaaatgagaattcggctttgcatgaagtttatgctcacgcagtgcttgggcatcacccccatgtggtacgttactattcctcatgggcagaagatgaccacatgatcattcagaatgaatactgcaatggtgggagtttgcaagctgctatatctgaaaacactaagtctggcaatcattttgaagagccaaaactcaaggacatccttctacagatttcccttggccttaattacatccacaactctagcatggtacacctggacatcaaacctagtaatatattcatttgtcacaagatgcaaagtgaatcctctggagtcatagaagaagttgaaaatgaagctgattggtttctctctgccaatgtgatgtataaaattggtgacctgggccacgcaacatcaataaacaaacccaaagtggaagaaggagatagtcgcttcctggctaatgagattttgcaagagaacatgatccaacctgatgccgaacagagaccttctgcagcagctctggccagaaatacagttc

SEQ ID NO: 200090 - DNA, 610 bp, Homo sapiens; identical to SEQ ID NO: 200089
  Payload ID: 19470
  Gene Name: WEE1 homolog 2 (S. pombe)
  ENST ID: ENST00000576319
  CDS Start-End: 1-610

SEQ ID NO: 200091 - DNA, 3061 bp, Homo sapiens; identical to SEQ ID NO: 200088
  Payload ID: 19470
  Gene Name: WEE1 homolog 2 (S. pombe)
  Uniprot ID: P0C1S8
  ENST ID: ENST00000574659
  CDS Start-End: 407-2110

SEQ ID NO: 200092 - DNA, 1557 bp, Homo sapiens
  Payload ID: 19471
  Gene Name: Werner helicase interacting protein 1
  Uniprot ID: Q96S55
  ENST ID: ENST00000380764
  CDS Start-End: 249-1094
caaatgatgtgcgagatgtcataaaacaagctcaaaatgaaaagagctttttcaaaaggaaaaccatcctttttattgatgagattcatcggttcaataaatctcagcaggacactttccttcctcacgtggaatgtgggacgatcactctgattggggcaaccactgaaaacccttccttccaggtcaacgctgctcttctgagccgctgtcgagtgattgttcttgagaagcttccagtagaggcaatggtgactattttaatgcgagcgatcaactccctgggaatccacgtcctagactctagccgtcccactgaccctctgagccacagcagcaacagcagctcagagcccgccatgttcatagaggataaagcagtagacaccctggcttacctcagtgacggtgacgcccgagctgggttgaacggactgcagctggcggtgctggctaggttaagctctaggaagatgttctgtaagaagagtgggcaatcctattctcccagtagagttctgatcacagagaatgacgtgaaggagggcctacagcgatcccacattttatatgaccgggcaggtgaggagcattacaactgcatctccgccctgcacaagtccatgcggggctcagaccagaacgcctccctctactggctggctcgcatgctcgagggaggagaggacccactctacgtggcacggaggcttgtcaggtttgccagcgaggacataggtctggcagacccgtctgcgttaacacaagcggttgctgcctaccaaggctgtcattttataggcatgcctgaatgtgaggtgcttctggcccagtgtgtggtctactttgccagagccccaaagtccattgaggtgtacagcgcctacaacaacgtcaaagcctgcctgaggaaccaccaggggccactgccccccgtgcccctgcacctgaggaacgcgcccactaggctgatgaaggatttgggctatggcaaaggctacaagtacaaccccatgtacagcgagcctgtggatcaggagtacctgcctgaagagttgaggggggtagatttcttcaagcagaggaggtgctgactcctcagggcacgacagcagaaggatgttgcttttttaagggagggccagaaagaaagttagtggattgcaaagttggttgcctggtggaagttagaacagaccaacattttgtgccagaaatttaagagttccataggtggaggcgcagttctttcgaataaatgtgtaactttgaaattgtgttcatttgcactcggtgcagcggttatgcttatgaaaatacctggcagctttgtgcaatgaattaatgttataaggaattatctattttgtcatagtatttaagtcataatgtcatttcagaattcagttctgtaggattttcttttctttaaaaaatgtatattctgggtagttttaattggtaaaaaaatgtaattgtgatttaatactgcatagtgttttgggtattttttttatatgcaaaggtcttacgagccaataaaactatttcaaagta

SEQ ID NO: 200093 - DNA, 3239 bp, Homo sapiens
  Payload ID: 19471
  Gene Name: Werner helicase interacting protein 1
  Uniprot ID: Q96S55
  ENST ID: ENST00000380769
  CDS Start-End: 232-1569
gcggccgccgccgcggcggggagcgcgtctccgcgcagctgggacgaggcggaggcgcaggaggaggaggaggccgtgggcgacggcgatggcgacggggacgcggacgcggacggcgaggacgacccggggcactgggacgcggacgctgccgaagccgccaccgccttcggggccagtggcgggggccgcccgcacccccgggcgctggctgccgaggagatccgacagatgctacagggcaagccgctggccgacacgatgcgtcctgacacgctgcaggattacttcgggcagagcaaggccgtgggccaggataccctgctgcgctcgctcctggagaccaacgaaatcccctcgcttatcctgtgggggccgccgggctgcggcaagaccactctggctcacatcatagccagcaacagcaagaaacatagcataaggtttgtgacattatctgcaacaaatgccaagacaaatgatgtgcgagatgtcataaaacaagctcaaaatgaaaagagctttttcaaaaggaaaaccatcctttttattgatgagattcatcggttcaataaatctcagcaggacactttccttcctcacgtggaatgtgggacgatcactctgattggggcaaccactgaaaacccttccttccaggtcaacgctgctcttctgagccgctgtcgagtgattgttcttgagaagcttccagtagaggcaatggtgactattttaatgcgagcgatcaactccctgggaatccacgtcctagactctagccgtcccactgaccctctgagccacagcagcaacagcagctcagagcccgccatgttcatagaggataaagcagtagacaccctggcttacctcagtgacggtgacgcccgagctgggttgaacggactgcagctggcggtgctggctaggttaagctctaggaagatgttctgtaagaagagtgggcaatcctattctcccagtagagttctgatcacagagaatgacgtgaaggagggcctacagcgatcccacattttatatgaccgggcaggtgaggagcattacaactgcatctccgccctgcacaagtccatgcggggctcagaccagaacgcctccctctactggctggctcgcatgctcgagggaggagaggacccactctacgtggcacggaggcttgtcaggtttgccagcgaggacataggtctggcagacccgtctgcgttaacacaagcggttgctgcctaccaaggctgtcattttataggcatgcctgaatgtgaggtgcttctggcccagtgtgtggtctactttgccagagccccaaagtccattgaggtgtacagcgcctacaacaacgtcaaagcctgcctgaggaaccaccaggggccactgccccccgtgcccctgcacctgaggaacgcgcccactaggctgatgaaggatttgggctatggcaaaggctacaagtacaaccccatgtacagcgagcctgtggatcaggagtacctgcctgaagagttgaggggggtagatttcttcaagcagaggaggtgctgactcctcagggcacgacagcagaaggatgttgcttttttaagggagggccagaaagaaagttagtggattgcaaagttggttgcctggtggaagttagaacagaccaacattttgtgccagaaatttaagagttccataggtggaggcgcagttctttcgaataaatgtgtaactttgaaattgtgttcatttgcactcggtgcagcggttatgcttatgaaaatacctggcagctttgtgcaatgaattaatgttataaggaattatctattttgtcatagtatttaagtcataatgtcatttcagaattcagttctgtaggattttcttttctttaaaaaatgtatattctgggtagttttaattggtaaaaaaatgtaattgtgatttaatactgcatagtgttttgggtattttttttatatgcaaaggtcttacgagccaataaaactatttcaaagtactcttcgattctgtcatggttttcctgcctggatgctaggtaccagcgttgtcaccattgcatttggtgggtggatactgggaaggagaaatcaccccagatgggaagagtggggagcttaagttaagaagtcagtgttatcttgttgaaagttaactctgatctctttaaaggaatacataaaggaattctttaaatggcttgtggaagactccagtagtcccatgcccattttttcccacttgtcctggtttcttcttgcagctccatatttctaaacagtcgtttttcttttactttatgtgtgtcctgaacacaaaatacgccactccttctgctcagttaagagttatttgtccctactgctacttcctctccctctccttagttgcatgtcgtgcatatgcccacaaggatggccccttcaggtagtcggttctcctcctgctgttgcgtgatccctcctggggtcctcctgccatgtctggaaggctgccggctgttggcctgggacgtcctctgcctttattctgagtgagatgcccattttctggatgctccatcccgccttactggtttattccgctatttcagtgcaacccatcctctagtagttttatcaggctggagggactgtatgttgcagaggcttggcccgactggcctccctccttctgtctggagtggttgcactgcagtgtgcagttgccatccccagaatctcccttcatcatcaccctggagctttcctctgcttctccctgcaccccatctgatgacaggactgactgctttctggcacaggtggcatgtaccctctagtagctttatggagcaggggtgtgtggaggaaaagtatttttagacctcaggagactcaaaatgcttttattgtaccttcagacgtgtctgagggtttggctagtaataaattgtaggtaagaaattacttgtgcattgttttacactttcccacattgttgtcaagtttgaaggcatcctgatgtgtgtggtcttttgtttgtaacctctatcaacttgtagactcttctgtctttgctccccgtgttttaaaagtctgcactgggtacttgttgggcctttcaatctggaaactcctttcagttctagggaagtttctttttttattcaataaatttatttatttatgagaccaactcttgctctttttcccaggctggagggc

SEQ ID NO: 200094 - DNA, 2595 bp, Homo sapiens
  Payload ID: 19471
  Gene Name: Werner helicase interacting protein 1
  Uniprot ID: Q96S55
  ENST ID: ENST00000380771
  CDS Start-End: 210-2132
gaggcgctgccagcggccggccgagggcgggcggacgcgggagctgcggacgtgaggcatgagcggcgccctcctccggcccgcgagcgtcctgctggttccccgagcgagggtctcgcggcgcggggcctagcggagggcatcgaaggcctccgcgtgcgcacgggttgctgcggccgcgccgggcgccggggagggcggcggccgccatggaggtgagcgggccggaagacgaccccttcctttcgcagctgcaccaggtgcagtgccccgtgtgccagcagatgatgcccgccgcgcacatcaactcgcacctggaccgctgtctgctgctccacccggcggggcacgcggagcccgcggccgggtcgcaccgcgccggggagcgggccaaggggccctcgccgcccggcgccaagaggcggcggctgtcggagagctcggcgctgaagcagccagccaccccgacggcagccgagagcagcgagggcgagggtgaggagggcgacgacggcggcgagaccgagagccgcgagagctacgacgcgccgcccacacccagcggcgcccgccttatccccgacttcccggtggcccgctccagcagccccgggaggaaggggtcggggaagaggccggcggccgccgccgcggcggggagcgcgtctccgcgcagctgggacgaggcggaggcgcaggaggaggaggaggccgtgggcgacggcgatggcgacggggacgcggacgcggacggcgaggacgacccggggcactgggacgcggacgctgccgaagccgccaccgccttcggggccagtggcgggggccgcccgcacccccgggcgctggctgccgaggagatccgacagatgctacagggcaagccgctggccgacacgatgcgtcctgacacgctgcaggattacttcgggcagagcaaggccgtgggccaggataccctgctgcgctcgctcctggagaccaacgaaatcccctcgcttatcctgtgggggccgccgggctgcggcaagaccactctggctcacatcatagccagcaacagcaagaaacatagcataaggtttgtgacattatctgcaacaaatgccaagacaaatgatgtgcgagatgtcataaaacaagctcaaaatgaaaagagctttttcaaaaggaaaaccatcctttttattgatgagattcatcggttcaataaatctcagcaggtcaacgctgctcttctgagccgctgtcgagtgattgttcttgagaagcttccagtagaggcaatggtgactattttaatgcgagcgatcaactccctgggaatccacgtcctagactctagccgtcccactgaccctctgagccacagcagcaacagcagctcagagcccgccatgttcatagaggataaagcagtagacaccctggcttacctcagtgacggtgacgcccgagctgggttgaacggactgcagctggcggtgctggctaggttaagctctaggaagatgttctgtaagaagagtgggcaatcctattctcccagtagagttctgatcacagagaatgacgtgaaggagggcctacagcgatcccacattttatatgaccgggcaggtgaggagcattacaactgcatctccgccctgcacaagtccatgcggggctcagaccagaacgcctccctctactggctggctcgcatgctcgagggaggagaggacccactctacgtggcacggaggcttgtcaggtttgccagcgaggacataggtctggcagacccgtctgcgttaacacaagcggttgctgcctaccaaggctgtcattttataggcatgcctgaatgtgaggtgcttctggcccagtgtgtggtctactttgccagagccccaaagtccattgaggtgtacagcgcctacaacaacgtcaaagcctgcctgaggaaccaccaggggccactgccccccgtgcccctgcacctgaggaacgcgcccactaggctgatgaaggatttgggctatggcaaaggctacaagtacaaccccatgtacagcgagcctgtggatcaggagtacctgcctgaagagttgaggggggtagatttcttcaagcagaggaggtgctgactcctcagggcacgacagcagaaggatgttgcttttttaagggagggccagaaagaaagttagtggattgcaaagttggttgcctggtggaagttagaacagaccaacattttgtgccagaaatttaagagttccataggtggaggcgcagttctttcgaataaatgtgtaactttgaaattgtgttcatttgcactcggtgcagcggttatgcttatgaaaatacctggcagctttgtgcaatgaattaatgttataaggaattatctattttgtcatagtatttaagtcataatgtcatttcagaattcagttctgtaggattttcttttctttaaaaaatgtatattctgggtagttttaattggtaaaaaaatgtaattgtgatttaatactgcatagtgttttgggtattttttttatatgcaaaggtcttacgagccaataaaactatttcaaagta

SEQ ID NO: 200095 - DNA, 2670 bp, Homo sapiens
  Payload ID: 19471
  Gene Name: Werner helicase interacting protein 1
  Uniprot ID: Q96S55
  ENST ID: ENST00000380773
  CDS Start-End: 210-2207
gaggcgctgccagcggccggccgagggcgggcggacgcgggagctgcggacgtgaggcatgagcggcgccctcctccggcccgcgagcgtcctgctggttccccgagcgagggtctcgcggcgcggggcctagcggagggcatcgaaggcctccgcgtgcgcacgggttgctgcggccgcgccgggcgccggggagggcggcggccgccatggaggtgagcgggccggaagacgaccccttcctttcgcagctgcaccaggtgcagtgccccgtgtgccagcagatgatgcccgccgcgcacatcaactcgcacctggaccgctgtctgctgctccacccggcggggcacgcggagcccgcggccgggtcgcaccgcgccggggagcgggccaaggggccctcgccgcccggcgccaagaggcggcggctgtcggagagctcggcgctgaagcagccagccaccccgacggcagccgagagcagcgagggcgagggtgaggagggcgacgacggcggcgagaccgagagccgcgagagctacgacgcgccgcccacacccagcggcgcccgccttatccccgacttcccggtggcccgctccagcagccccgggaggaaggggtcggggaagaggccggcggccgccgccgcggcggggagcgcgtctccgcgcagctgggacgaggcggaggcgcaggaggaggaggaggccgtgggcgacggcgatggcgacggggacgcggacgcggacggcgaggacgacccggggcactgggacgcggacgctgccgaagccgccaccgccttcggggccagtggcgggggccgcccgcacccccgggcgctggctgccgaggagatccgacagatgctacagggcaagccgctggccgacacgatgcgtcctgacacgctgcaggattacttcgggcagagcaaggccgtgggccaggataccctgctgcgctcgctcctggagaccaacgaaatcccctcgcttatcctgtgggggccgccgggctgcggcaagaccactctggctcacatcatagccagcaacagcaagaaacatagcataaggtttgtgacattatctgcaacaaatgccaagacaaatgatgtgcgagatgtcataaaacaagctcaaaatgaaaagagctttttcaaaaggaaaaccatcctttttattgatgagattcatcggttcaataaatctcagcaggacactttccttcctcacgtggaatgtgggacgatcactctgattggggcaaccactgaaaacccttccttccaggtcaacgctgctcttctgagccgctgtcgagtgattgttcttgagaagcttccagtagaggcaatggtgactattttaatgcgagcgatcaactccctgggaatccacgtcctagactctagccgtcccactgaccctctgagccacagcagcaacagcagctcagagcccgccatgttcatagaggataaagcagtagacaccctggcttacctcagtgacggtgacgcccgagctgggttgaacggactgcagctggcggtgctggctaggttaagctctaggaagatgttctgtaagaagagtgggcaatcctattctcccagtagagttctgatcacagagaatgacgtgaaggagggcctacagcgatcccacattttatatgaccgggcaggtgaggagcattacaactgcatctccgccctgcacaagtccatgcggggctcagaccagaacgcctccctctactggctggctcgcatgctcgagggaggagaggacccactctacgtggcacggaggcttgtcaggtttgccagcgaggacataggtctggcagacccgtctgcgttaacacaagcggttgctgcctaccaaggctgtcattttataggcatgcctgaatgtgaggtgcttctggcccagtgtgtggtctactttgccagagccccaaagtccattgaggtgtacagcgcctacaacaacgtcaaagcctgcctgaggaaccaccaggggccactgccccccgtgcccctgcacctgaggaacgcgcccactaggctgatgaaggatttgggctatggcaaaggctacaagtacaaccccatgtacagcgagcctgtggatcaggagtacctgcctgaagagttgaggggggtagatttcttcaagcagaggaggtgctgactcctcagggcacgacagcagaaggatgttgcttttttaagggagggccagaaagaaagttagtggattgcaaagttggttgcctggtggaagttagaacagaccaacattttgtgccagaaatttaagagttccataggtggaggcgcagttctttcgaataaatgtgtaactttgaaattgtgttcatttgcactcggtgcagcggttatgcttatgaaaatacctggcagctttgtgcaatgaattaatgttataaggaattatctattttgtcatagtatttaagtcataatgtcatttcagaattcagttctgtaggattttcttttctttaaaaaatgtatattctgggtagttttaattggtaaaaaaatgtaattgtgatttaatactgcatagtgttttgggtattttttttatatgcaaaggtcttacgagccaataaaactatttcaaagta

SEQ ID NO: 200096 - DNA, 2651 bp, Homo sapiens
  Payload ID: 19471
  Gene Name: Werner helicase interacting protein 1
  Uniprot ID: Q96S55
  ENST ID: ENST00000618555
  CDS Start-End: 192-2189
ggccgagggcgggcggacgcgggagctgcggacgtgaggcatgagcggcgccctcctccggcccgcgagcgtcctgctggttccccgagcgagggtctcgcggcgcggggcctagcggagggcatcgaaggcctccgcgtgcgcacgggttgctgcggccgcgccgggcgccggggagggcggcggccgccatggaggtgagcgggccggaagacgaccccttcctttcgcagctgcaccaggtgcagtgccccgtgtgccagcagatgatgcccgccgcgcacatcaactcgcacctggaccgctgtctgctgctccacccggcggggcacgcggagcccgcggccgggtcgcaccgcgccggggagcgggccaaggggccctcgccgcccggcgccaagaggcggcggctgtcggagagctcggcgctgaagcagccagccaccccgacggcagccgagagcagcgagggcgagggtgaggagggcgacgacggcggcgagaccgagagccgcgagagctacgacgcgccgcccacacccagcggcgcccgccttatccccgacttcccggtggcccgctccagcagccccgggaggaaggggtcggggaagaggccggcggccgccgccgcggcggggagcgcgtctccgcgcagctgggacgaggcggaggcgcaggaggaggaggaggccgtgggcgacggcgatggcgacggggacgcggacgcggacggcgaggacgacccggggcactgggacgcggacgctgccgaagccgccaccgccttcggggccagtggcgggggccgcccgcacccccgggcgctggctgccgaggagatccgacagatgctacagggcaagccgctggccgacacgatgcgtcctgacacgctgcaggattacttcgggcagagcaaggccgtgggccaggataccctgctgcgctcgctcctggagaccaacgaaatcccctcgcttatcctgtgggggccgccgggctgcggcaagaccactctggctcacatcatagccagcaacagcaagaaacatagcataaggtttgtgacattatctgcaacaaatgccaagacaaatgatgtgcgagatgtcataaaacaagctcaaaatgaaaagagctttttcaaaaggaaaaccatcctttttattgatgagattcatcggttcaataaatctcagcaggacactttccttcctcacgtggaatgtgggacgatcactctgattggggcaaccactgaaaacccttccttccaggtcaacgctgctcttctgagccgctgtcgagtgattgttcttgagaagcttccagtagaggcaatggtgactattttaatgcgagcgatcaactccctgggaatccacgtcctagactctagccgtcccactgaccctctgagccacagcagcaacagcagctcagagcccgccatgttcatagaggataaagcagtagacaccctggcttacctcagtgacggtgacgcccgagctgggttgaacggactgcagctggcggtgctggctaggttaagctctaggaagatgttctgtaagaagagtgggcaatcctattctcccagtagagttctgatcacagagaatgacgtgaaggagggcctacagcgatcccacattttatatgaccgggcaggtgaggagcattacaactgcatctccgccctgcacaagtccatgcggggctcagaccagaacgcctccctctactggctggctcgcatgctcgagggaggagaggacccactctacgtggcacggaggcttgtcaggtttgccagcgaggacataggtctggcagacccgtctgcgttaacacaagcggttgctgcctaccaaggctgtcattttataggcatgcctgaatgtgaggtgcttctggcccagtgtgtggtctactttgccagagccccaaagtccattgaggtgtacagcgcctacaacaacgtcaaagcctgcctgaggaaccaccaggggccactgccccccgtgcccctgcacctgaggaacgcgcccactaggctgatgaaggatttgggctatggcaaaggctacaagtacaaccccatgtacagcgagcctgtggatcaggagtacctgcctgaagagttgaggggggtagatttcttcaagcagaggaggtgctgactcctcagggcacgacagcagaaggatgttgcttttttaagggagggccagaaagaaagttagtggattgcaaagttggttgcctggtggaagttagaacagaccaacattttgtgccagaaatttaagagttccataggtggaggcgcagttctttcgaataaatgtgtaactttgaaattgtgttcatttgcactcggtgcagcggttatgcttatgaaaatacctggcagctttgtgcaatgaattaatgttataaggaattatctattttgtcatagtatttaagtcataatgtcatttcagaattcagttctgtaggattttcttttctttaaaaaatgtatattctgggtagttttaattggtaaaaaaatgtaattgtgatttaatactgcatagtgttttgggtattttttttatatgcaaaggtcttacgagccaataaaactatttcaaagt

SEQ ID NO: 200097 - DNA, 5215 bp, Homo sapiens
  Payload ID: 19472
  Gene Name: Werner syndrome, RecQ helicase-like
  Uniprot ID: Q14191
  ENST ID: ENST00000298139
  CDS Start-End: 250-4548
ggagctgatgtgtactgtgtgcgccggggaggcgccggcttgtactcggcagcgcgggaataaagtttgctgatttggtgtctagcctggatgcctgggttgcaggccctgcttgtggtggcgctccacagtcatccggctgaagaagacctgttggactggatcttctcgggttttctttcagatattgttttgtatttacccatgaagacattgttttttggactctgcaaataggacatttcaaagatgagtgaaaaaaaattggaaacaactgcacagcagcggaaatgtcctgaatggatgaatgtgcagaataaaagatgtgctgtagaagaaagaaaggcatgtgttcggaagagtgtttttgaagatgacctccccttcttagaattcactggatccattgtgtatagttacgatgctagtgattgctctttcctgtcagaagatattagcatgagtctatcagatggggatgtggtgggatttgacatggagtggccaccattatacaatagagggaaacttggcaaagttgcactaattcagttgtgtgtttctgagagcaaatgttacttgttccacgtttcttccatgtcagtttttccccagggattaaaaatgttgcttgaaaataaagcagttaaaaaggcaggtgtaggaattgaaggagatcagtggaaacttctacgtgactttgatatcaaattgaagaattttgtggagttgacagatgttgccaataaaaagctgaaatgcacagagacctggagccttaacagtctggttaaacacctcttaggtaaacagctcctgaaagacaagtctatccgctgtagcaattggagtaaatttcctctcactgaggaccagaaactgtatgcagccactgatgcttatgctggttttattatttaccgaaatttagagattttggatgatactgtgcaaaggtttgctataaataaagaggaagaaatcctacttagcgacatgaacaaacagttgacttcaatctctgaggaagtgatggatctggctaagcatcttcctcatgctttcagtaaattggaaaacccacggagggtttctatcttactaaaggatatttcagaaaatctatattcactgaggaggatgataattgggtctactaacattgagactgaactgaggcccagcaataatttaaacttattatcctttgaagattcaactactgggggagtacaacagaaacaaattagagaacatgaagttttaattcacgttgaagatgaaacatgggacccaacacttgatcatttagctaaacatgatggagaagatgtacttggaaataaagtggaacgaaaagaagatggatttgaagatggagtagaagacaacaaattgaaagagaatatggaaagagcttgtttgatgtcgttagatattacagaacatgaactccaaattttggaacagcagtctcaggaagaatatcttagtgatattgcttataaatctactgagcatttatctcccaatgataatgaaaacgatacgtcctatgtaattgagagtgatgaagatttagaaatggagatgcttaagcatttatctcccaatgataatgaaaacgatacgtcctatgtaattgagagtgatgaagatttagaaatggagatgcttaagtctttagaaaacctcaatagtggcacggtagaaccaactcattctaaatgcttaaaaatggaaagaaatctgggtcttcctactaaagaagaagaagaagatgatgaaaatgaagctaatgaaggggaagaagatgatgataaggactttttgtggccagcacccaatgaagagcaagttacttgcctcaagatgtactttggccattccagttttaaaccagttcagtggaaagtgattcattcagtattagaagaaagaagagataatgttgctgtcatggcaactggatatggaaagagtttgtgcttccagtatccacctgtttatgtaggcaagattggccttgttatctctccccttatttctctgatggaagaccaagtgctacagcttaaaatgtccaacatcccagcttgcttccttggatcagcacagtcagaaaatgttctaacagatattaaattaggtaaataccggattgtatacgtaactccagaatactgttcaggtaacatgggcctgctccagcaacttgaggctgatattggtatcacgctcattgctgtggatgaggctcactgtatttctgagtgggggcatgattttagggattcattcaggaagttgggctccctaaagacagcactgccaatggttccaatcgttgcacttactgctactgcaagttcttcaatccgggaagacattgtacgttgcttaaatctgagaaatcctcagatcacctgtactggttttgatcgaccaaacctgtatttagaagttaggcgaaaaacagggaatatccttcaggatctgcagccatttcttgtcaaaacaagttcccactgggaatttgaaggtccaacaatcatctactgtccttctagaaaaatgacacaacaagttacaggtgaacttaggaaactgaatctatcctgtggaacataccatgcgggcatgagttttagcacaaggaaagacattcatcataggtttgtaagagatgaaattcagtgtgtcatagctaccatagcttttggaatgggcattaataaagctgacattcgccaagtcattcattacggtgctcctaaggacatggaatcatattatcaggagattggtagagctggtcgtgatggacttcaaagttcttgtcacgtcctctgggctcctgcagacattaacttaaataggcaccttcttactgagatacgtaatgagaagtttcgattatacaaattaaagatgatggcaaagatggaaaaatatcttcattctagcagatgtaggagacaaatcatcttgtctcattttgaggacaaacaagtacaaaaagcctccttgggaattatgggaactgaaaaatgctgtgataattgcaggtccagattggatcattgctattccatggatgactcagaggatacatcctgggactttggtccacaagcatttaagcttttgtctgctgtggacatcttaggcgaaaaatttggaattgggcttccaattttatttctccgaggatctaattctcagcgtcttgccgatcaatatcgcaggcacagtttatttggcactggcaaggatcaaacagagagttggtggaaggctttttcccgtcagctgatcactgagggattcttggtagaagtttctcggtataacaaatttatgaagatttgcgcccttacgaaaaagggtagaaattggcttcataaagctaatacagaatctcagagcctcatccttcaagctaatgaagaattgtgtccaaagaagttgcttctgcctagttcgaaaactgtatcttcgggcaccaaagagcattgttataatcaagtaccagttgaattaagtacagagaagaagtctaacttggagaagttatattcttataaaccatgtgataagatttcttctgggagtaacatttctaaaaaaagtatcatggtacagtcaccagaaaaagcttacagttcctcacagcctgttatttcggcacaagagcaggagactcagattgtgttatatggcaaattggtagaagctaggcagaaacatgccaataaaatggatgttcccccagctattctggcaacaaacaagatactggtggatatggccaaaatgagaccaactacggttgaaaacgtaaaaaggattgatggtgtttctgaaggcaaagctgccatgttggcccctctgttggaagtcatcaaacatttctgccaaacaaatagtgttcagacagacctcttttcaagtacaaaacctcaagaagaacagaagacgagtctggtagcaaaaaataaaatatgcacactttcacagtctatggccatcacatactctttattccaagaaaagaagatgcctttgaagagcatagctgagagcaggattctgcctctcatgacaattggcatgcacttatcccaagcggtgaaagctggctgcccccttgatttggagcgagcaggcctgactccagaggttcagaagattattgctgatgttatccgaaaccctcccgtcaactcagatatgagtaaaattagcctaatcagaatgttagttcctgaaaacattgacacgtaccttatccacatggcaattgagatccttaaacatggtcctgacagcggacttcaaccttcatgtgatgtcaacaaaaggagatgttttcccggttctgaagagatctgttcaagttctaagagaagcaaggaagaagtaggcatcaatactgagacttcatctgcagagagaaagagacgattacctgtgtggtttgccaaaggaagtgataccagcaagaaattaatggacaaaacgaaaaggggaggtctttttagttaagctggcaattaccagaacaattatgtttcttgctgtattataagaggatagctatattttatttctgaagagtaaggagtagtattttggcttaaaaatcattctaattacaaagttcactgtttattgaagaactggcatcttaaatcagccttccgcaattcatgtagtttctgggtcttctgggagcctacgtgagtacatcacctaacagaatattaaattagacttcctgtaagattgctttaagaaactgttactgtcctgttttctaatctctttattaaaacagtgtatttggaaaatgttatgtgctctgatttgatatagataacagattagtagttacatggtaattatgtgatataaaatattcatatattatcaaaattctgttttgtaaatgtaagaaagcatagttattttacaaattgtttttactgtcttttgaagaagttcttaaatacgttgttaaatggtattagttgaccagggcagtgaaaatgaaaccgcattttgggtgccattaaatagggaaaaaacatgtaaaaaatgtaaaatggagaccaattgcactaggcaagtgtatattttgtattttatatacaatttctattatttttcaagtaataaaacaatgtttttcatactgaatattatatatata

SEQ ID NO: 200098 - DNA, 5695 bp, Homo sapiens
  Payload ID: 19473
  Gene Name: widely interspaced zinc finger motifs
  Uniprot ID: O95785
  ENST ID: ENST00000263381
  CDS Start-End: 215-2599
aaagggacaatgtcccccgagcggtggaggcggcggcggctgcggaggccgcggcaccggcaccgggagcggcagcggcggtagcggcagcgacggccgcaccaaggaggggagctccgagccccggcacctggccggcggcgccgcctccccggcccacaatgccccgctgagccggtgcagcagctgagtggatccaagcagagaaaatccgatggaggggtctctggcaggcagcctggctgcaccagatcgtccccaaggcccagagagactgcctggcccggcgccaagggagaacatcgagggtggggccgaagctgctgagggggaaggtggcatcttccggtccacccgttacctgcctgtcaccaaggagggcccccgagacattctggatggcagaggtggcatctctgtggccaactttgacccaggcaccttcagcctgatgcgctgtgacttctgcggggctggcttcgacacacgggccggcctctccagccacgcccgggcccacctacgtgacttcggtatcaccaactgggagctcactgtctcacccatcaacatcctgcaggagctgctggccacctctgctgctgagcagccccccagccccctgggccgagagcctgggggtccgcctggcagcttcctgacctcccgtcggccccgcttacctctcacggtgccctttccacccacctgggctgaggaccctgggccagcctatggagatgcctcaggcccagagccagcacgagacatccgctgcgagttctgtggtgagttcttcgagaaccgcaagggcctctcgagccacgcgcgctcccatctgcggcaaatgggcgtgaccgagtggtacgtcaatggctcgcccatcgacacgctgcgggagatcctgaagagacggacccagtctcggcctggtggacctcccaacccaccagggccaagcccaaaagccctggccaagatgatgggcggcgcaggtcctggcagctcactggaagcccgcagcccctcggaccttcacatctcacccttggccaagaagttgccaccaccaccgggcagccccctgggccactcaccaactgcctctcctcctcctacggcccgaaagatgttcccaggcctggctgcaccctccttgcccaagaagctgaagcctgaacaaatacgggtggagatcaagcgggagatgctgccgggggcccttcatggggaactgcacccatctgagggtccctggggggcaccacgggaagacatgacacccctgaacctgtcgtcccgggcagagccggtgcgcgacatccgctgtgagttctgcggcgagttcttcgagaaccgcaagggcctgtcgagtcacgcgcgctcacacctgcggcagatgggtgtgaccgagtggtccgtcaatggttcgcccatcgacacactgcgagagatcctcaagaagaagtccaagccgtgcctcatcaagaaggagccaccggctggagacctggcccctgccctggctgaggacgggcctcccaccgtggcccctgggcccgtgcagtccccactgccgctgtcgcccctggctggccggccaggcaaaccaggtgcagggccggcccaggttcctcgtgagctcagcctgacgcccatcactggggccaagccctcagccactggctacctgggctcagtggcagccaagcggcccctgcaggaggaccgcctcctcccagcagaggtcaaggccaagacctacatccagactgaactgcccttcaaggcaaagacccttcatgagaagacctcccactcctccaccgaggcctgctgcgagctgtgtggcctttactttgaaaaccgcaaggccctggccagccacgcacgggcacacctgcggcagttcggcgtgaccgagtggtgcgtcaatggctcgcccatcgagacactgagcgagtggatcaaacaccggccccagaaggtgggcgcctaccgcagctacatccagggcggccgccccttcaccaagaagttccgcagtgccggccatggccgtgacagtgacaagcggccgtccctggggctggcacccgggggcctggccgtggtcggccgcagtgccggaggggagccagggcccgaggctggccgggcagccgacggtggtgagcggcctctggcagccagcccgccaggcaccgtgaaggctgaggagcaccagcggcagaacatcaacaaatttgaacgccgacaagcccgccctccagatgcctccgcagcccggggaggcgaggacaccaatgacctacagcagaagctggaggaggtgcggcaacccccaccccgagtccggccagtcccctccctggtgccccggcccccccagacatcacttgtcaagttcgtgggcaacatctacaccctcaaatgcaggttctgtgaggtggaattccagggccccctctccatccaggaagagtgggtgcggcacttacagcggcacatcctggagatgaacttctccaaagcggaccccccacctgaggagtcccaggccccgcaggcacagacagcggcggcagaggctccctaacacaaaagcattccagatcccctctcgtgccacctctgtctcctcttcttcctcctctgtgtccttgtccctcttcctctttctttccgtttccaaaggagcaagccaaaacctcaaaccggcgccccttgggggccgggcacactacagccagggcgccgggagccagctagctgcccttcccccagcccgaggactctggggccacagggtgtcttccttcagcccatgcccacctggtccagcaggggcagcagccaggtctctgatggcagccggtctggtcacaggggaggacagcactcccccgtctagcagccaggcagggcgatgtctgccatccgtggccatttgcaaagaccccaaagacccctgttctggttccctctctcccccatgaatatcctctcacacacatgtacatgcgaacacacacaacacgcacctcgtgagacccgggacctgccccggacccccagttcctgggttgaacgaccacatcatgccacggtgcttgctcaggggaagccacgctccctctgtggggcctgctggggcctgggagccccccactgagcccacaatgccacggaaatccttgttggctgcccccgagaggggccttcccagctgggaagagctcagagctgacagctgcctcctgccatgtcaaggccccccaaagagcctcaggggctctggggccctggagggtggggttggggggtgggactctcctcccccactcctgctccctctcccttttcactgttgctttctatgtatagctccctagacctttcacttttttaaaaacgcgttttgtgtagagaataaggaacgtggatctttttattttgcaatcctgggccagctagaagccaggagctgattgaccttttaacttttttcagtggccacattttggttatcgatgtacctagaagtatgtaaattagattaaatttctcttctggaaacaccctggggcaggcggccagcgtgtgtttttctgtcaagtggacaggctggcattggctggcagccggggctgggatcggggcctcctctgtccagagcgccatggaggccctgggttttccagttggccgccaagccgaccagacgcagctggggatgagcccaagttcccagctgttggctctttaggccatggctgggagggggtctctggctggctggcaaagcggctccagtgagcagatgaaccagggttctgggcagcctgtctgggaagggagccaggatcaagaagcagttgaggctagaggagcttatcaaaggcaggagctaccagcgagggtgtcagggacccgttgggagcatttgggtgggggccagtggggttgtagagagctggaactcacctgcttttaatacatgtgacttctagtgagacacatgcacccctgacccaaggaacatgcggggaaaagaggagccactggctcctttgcgatgttatttattttctcgctctgcaaatgtttattgaacatttctgagattttaagagattttgttggctgctccttcttgtttattgcatgtggtttttcagctcatcgtttttactaaacggtcaagtgctggagagtgggaacgacctcatggcgtgtggacagaaggggccacctctacccccagccctgctttctgggccctcccaccataccccttcctgggaaggagggattaacaggctgcaataacgcccacaagggtggtcttggcccacacgtctgctcctgtggggtcaggacgcacatctcgcctggtggcagaaggccgcaaccacttctctccatcctgtgctgtgggtgggtggatgtatccaggacttaggaagcagggagagcatcttgtgagctgactcaaaggtgtttcttcctctttcaacttttcataagtcagtttttatttttttattttattttttgagacagggtctcattttgttgcccaagctggagtgcagtgtagggacctcggctcgctgcagtctctgcctcctgggttcaagtgattctcctgcctcagccatccaggtagctgggatcacaggcatgcaccaccacccctggcttatatctgtaatttttgtagagacgggggtttcaccatgttgcccgggctggtcttgaactcctgagctcaagtgatcagcctcccaaagtgctgggattacaggcgtgagccactatgcccggcccgtaagtcagtttttgaaatataaaagtggtataggctagatgtgacaaaaaacagtcaaatgatacaagagcttataaagtcatatggcaagttcctccccaccaatcatgcagtgaagtgagggtcatgtgtgtccttggaagagtcacctccagttcttgcagggggatgttttcctaaaactttctgagcattgctcttctctgctcaagccacttcaatacacctcaggcagcaaagtctcagcttttgagccgtggtctctgagggtgttggatgtgaacgaaatcaaatcggtacaatgatgactgtggcaagtgcgatgaaggaacgaacctgcagggcgcagaagacgtgtcctggggccctgccttggtttggaagacaggcaggcatccctgaggctgatggggagatgaaccccgaagccagagtgcttatccgtcagatctctgcttcatgtttggagtttgctcacttaacacatcagaagtggctttgttccgtatggcagcaagttctgcagaagcctcatttgggtggggggagttttattaaaacagtttatcatggagaattccaactatacaaaagtagagcaaacagtaaaatggactctcatctatccatcaccaacccatgaccaatgtcttcagctgtcagagatttatcttatagctccttgcttcctcctcctctctctacctgtctgaattgtgtgaagcacatcctggccataagatcagttaacttcttagtatttcagtatgtttctctcaacgttgtaaatgccactattacacctaaagaaatcaacaatatcaaaaagaaacagcataccttaaaaaaagttttaaaaca

SEQ ID NO: 200099 - DNA, 4067 bp, Homo sapiens
  Payload ID: 19473
  Gene Name: widely interspaced zinc finger motifs
  ENST ID: ENST00000389282
  CDS Start-End: 1-2499
atggacttgggctctccctcgctccctaagaagagcctgcctgtccctggggccctggagcaggtggccagtcggctgagcagcaaagtggctgcagaggttcctcatggcagcaaacaggagctgcaggacctcaaggcccagagcctgaccacctgcgaggtctgcggtgcctgctttgagacccgaaagggcctgtccagccacgcgcgctcccacctgcggcagctgggagtggcagagtcggaaagcagcggcgcacccatcgacctcctctacgagcttgtgaagcagaagggtctgcctgacgcccaccttgggctgcccccaggcctggctaagaagtccagctcactgaaggaggtggtcgccggggccccccggcccggcttgctcagcctggccaagcccttggatgcccctgctgtcaacaaagccatcaagtcgcctcccggcttctcggccaagggcctgggccacccgcccagctctccactcctcaaaaagacaccactggccctggcgggctcccctacccctaagaatcctgaggacaagagcccccagctgtccctgagcccccggccggcctccccaaaggcacagtggcctcagtctgaggatgaggggcccttgaacctcacctcaggcccagagccagcacgagacatccgctgcgagttctgtggtgagttcttcgagaaccgcaagggcctctcgagccacgcgcgctcccatctgcggcaaatgggcgtgaccgagtggtacgtcaatggctcgcccatcgacacgctgcgggagatcctgaagagacggacccagtctcggcctggtggacctcccaacccaccagggccaagcccaaaagccctggccaagatgatgggcggcgcaggtcctggcagctcactggaagcccgcagcccctcggaccttcacatctcacccttggccaagaagttgccaccaccaccgggcagccccctgggccactcaccaactgcctctcctcctcctacggcccgaaagatgttcccaggcctggctgcaccctccttgcccaagaagctgaagcctgaacaaatacgggtggagatcaagcgggagatgctgccgggggcccttcatggggaactgcacccatctgagggtccctggggggcaccacgggaagacatgacacccctgaacctgtcgtcccgggcagagccggtgcgcgacatccgctgtgagttctgcggcgagttcttcgagaaccgcaagggcctgtcgagtcacgcgcgctcacacctgcggcagatgggtgtgaccgagtggtccgtcaatggttcgcccatcgacacactgcgagagatcctcaagaagaagtccaagccgtgcctcatcaagaaggagccaccggctggagacctggcccctgccctggctgaggacgggcctcccaccgtggcccctgggcccgtgcagtccccactgccgctgtcgcccctggctggccggccaggcaaaccaggtgcagggccggcccaggttcctcgtgagctcagcctgacgcccatcactggggccaagccctcagccactggctacctgggctcagtggcagccaagcggcccctgcaggaggaccgcctcctcccagcagaggtcaaggccaagacctacatccagactgaactgcccttcaaggcaaagacccttcatgagaagacctcccactcctccaccgaggcctgctgcgagctgtgtggcctttactttgaaaaccgcaaggccctggccagccacgcacgggcacacctgcggcagttcggcgtgaccgagtggtgcgtcaatggctcgcccatcgagacactgagcgagtggatcaaacaccggccccagaaggtgggcgcctaccgcagctacatccagggcggccgccccttcaccaagaagttccgcagtgccggccatggccgtgacagtgacaagcggccgtccctggggctggcacccgggggcctggccgtggtcggccgcagtgccggaggggagccagggcccgaggctggccgggcagccgacggtggtgagcggcctctggcagccagcccgccaggcaccgtgaaggctgaggagcaccagcggcagaacatcaacaaatttgaacgccgacaagcccgccctccagatgcctccgcagcccggggaggcgaggacaccaatgacctacagcagaagctggaggaggtgcggcaacccccaccccgagtccggccagtcccctccctggtgccccggcccccccagacatcacttgtcaagttcgtgggcaacatctacaccctcaaatgcaggttctgtgaggtggaattccagggccccctctccatccaggaagagtgggtgcggcacttacagcggcacatcctggagatgaacttctccaaagcggaccccccacctgaggagtcccaggccccgcaggcacagacagcggcggcagaggctccctaacacaaaagcattccagatcccctctcgtgccacctctgtctcctcttcttcctcctctgtgtccttgtccctcttcctctttctttccgtttccaaaggagcaagccaaaacctcaaaccggcgccccttgggggccgggcacactacagccagggcgccgggagccagctagctgcccttcccccagcccgaggactctggggccacagggtgtcttccttcagcccatgcccacctggtccagcaggggcagcagccaggtctctgatggcagccggtctggtcacaggggaggacagcactcccccgtctagcagccaggcagggcgatgtctgccatccgtggccatttgcaaagaccccaaagacccctgttctggttccctctctcccccatgaatatcctctcacacacatgtacatgcgaacacacacaacacgcacctcgtgagacccgggacctgccccggacccccagttcctgggttgaacgaccacatcatgccacggtgcttgctcaggggaagccacgctccctctgtggggcctgctggggcctgggagccccccactgagcccacaatgccacggaaatccttgttggctgcccccgagaggggccttcccagctgggaagagctcagagctgacagctgcctcctgccatgtcaaggccccccaaagagcctcaggggctctggggccctggagggtggggttggggggtgggactctcctcccccactcctgctccctctcccttttcactgttgctttctatgtatagctccctagacctttcacttttttaaaaacgcgttttgtgtagagaataaggaacgtggatctttttattttgcaatcctgggccagctagaagccaggagctgattgaccttttaacttttttcagtggccacattttggttatcgatgtacctagaagtatgtaaattagattaaatttctcttctggaaacaccctggggcaggcggccagcgtgtgtttttctgtcaagtggacaggctggcattggctggcagccggggctgggatcggggcctcctctgtccagagcgccatggaggccctgggttttccagttggccgccaagccgaccagacgcagctggggatgagcccaagttcccagctgttggctctttaggccatggctgggagggggtctctggctggctggcaaagcggctccagtgagcagatgaaccagggttctgggcagcctgtctgggaagggagccaggatcaagaagcagttgaggctagaggagcttatcaaaggcaggagctaccagcgagggtgtcagggacccgttgggagcatttgggtgggggccagtggggttgtagagagctggaactcacctgcttttaatacatgtgacttctagtgagacacatgcacccctgacccaaggaacatgcggggaaaagaggagccactggctcctttgcgatgttatttattttctcgctctgcaaatgtttattgaacatttctgagattttaagagattttgttggctgctccttcttgtttattgc

SEQ ID NO: 200100 - DNA, 4466 bp, Homo sapiens
  Payload ID: 19473
  Gene Name: widely interspaced zinc finger motifs
  Uniprot ID: O95785
  ENST ID: ENST00000545156
  CDS Start-End: 1-2898
atggacttgggctctccctcgctccctaagaagagcctgcctgtccctggggccctggagcaggtggccagtcggctgagcagcaaagtggctgcagaggttcctcatggcagcaaacaggagctgcaggacctcaaggcccagagcctgaccacctgcgaggtctgcggtgcctgctttgagacccgaaagggcctgtccagccacgcgcgctcccacctgcggcagctgggagtggcagagtcggaaagcagcggcgcacccatcgacctcctctacgagcttgtgaagcagaagggtctgcctgacgcccaccttgggctgcccccaggcctggctaagaagtccagctcactgaaggaggtggtcgccggggccccccggcccggcttgctcagcctggccaagcccttggatgcccctgctgtcaacaaagccatcaagtcgcctcccggcttctcggccaagggcctgggccacccgcccagctctccactcctcaaaaagacaccactggccctggcgggctcccctacccctaagaatcctgaggacaagagcccccagctgtccctgagcccccggccggcctccccaaaggcacagtggcctcagtctgaggatgaggggcccttgaacctcactttagatagtgacgggggcagagagctggactgccagctgtgcggtgcctggtttgagacccgcaagggcctgtctagccacgcccgtgcccacctgcgccacctgggcgtcagcgatccggacgccaagggatcccccatagacgtgctccacgggctcatcaggagggacggcgtccagatccgcctcccacccaggcgcggcgccctggcccacccggggcggccgcctcccacctccgcggccctctccttgcttccccccccaccgccggccaagaaggccaagctgaaggccgcgggtatggccagcccctgggggaagcaggacctctcggccgccgcagccgccggcattttctgggcctctgatgtggagccgtctcctctcaacctctcctcaggcccagagccagcacgagacatccgctgcgagttctgtggtgagttcttcgagaaccgcaagggcctctcgagccacgcgcgctcccatctgcggcaaatgggcgtgaccgagtggtacgtcaatggctcgcccatcgacacgctgcgggagatcctgaagagacggacccagtctcggcctggtggacctcccaacccaccagggccaagcccaaaagccctggccaagatgatgggcggcgcaggtcctggcagctcactggaagcccgcagcccctcggaccttcacatctcacccttggccaagaagttgccaccaccaccgggcagccccctgggccactcaccaactgcctctcctcctcctacggcccgaaagatgttcccaggcctggctgcaccctccttgcccaagaagctgaagcctgaacaaatacgggtggagatcaagcgggagatgctgccgggggcccttcatggggaactgcacccatctgagggtccctggggggcaccacgggaagacatgacacccctgaacctgtcgtcccgggcagagccggtgcgcgacatccgctgtgagttctgcggcgagttcttcgagaaccgcaagggcctgtcgagtcacgcgcgctcacacctgcggcagatgggtgtgaccgagtggtccgtcaatggttcgcccatcgacacactgcgagagatcctcaagaagaagtccaagccgtgcctcatcaagaaggagccaccggctggagacctggcccctgccctggctgaggacgggcctcccaccgtggcccctgggcccgtgcagtccccactgccgctgtcgcccctggctggccggccaggcaaaccaggtgcagggccggcccaggttcctcgtgagctcagcctgacgcccatcactggggccaagccctcagccactggctacctgggctcagtggcagccaagcggcccctgcaggaggaccgcctcctcccagcagaggtcaaggccaagacctacatccagactgaactgcccttcaaggcaaagacccttcatgagaagacctcccactcctccaccgaggcctgctgcgagctgtgtggcctttactttgaaaaccgcaaggccctggccagccacgcacgggcacacctgcggcagttcggcgtgaccgagtggtgcgtcaatggctcgcccatcgagacactgagcgagtggatcaaacaccggccccagaaggtgggcgcctaccgcagctacatccagggcggccgccccttcaccaagaagttccgcagtgccggccatggccgtgacagtgacaagcggccgtccctggggctggcacccgggggcctggccgtggtcggccgcagtgccggaggggagccagggcccgaggctggccgggcagccgacggtggtgagcggcctctggcagccagcccgccaggcaccgtgaaggctgaggagcaccagcggcagaacatcaacaaatttgaacgccgacaagcccgccctccagatgcctccgcagcccggggaggcgaggacaccaatgacctacagcagaagctggaggaggtgcggcaacccccaccccgagtccggccagtcccctccctggtgccccggcccccccagacatcacttgtcaagttcgtgggcaacatctacaccctcaaatgcaggttctgtgaggtggaattccagggccccctctccatccaggaagagtgggtgcggcacttacagcggcacatcctggagatgaacttctccaaagcggaccccccacctgaggagtcccaggccccgcaggcacagacagcggcggcagaggctccctaacacaaaagcattccagatcccctctcgtgccacctctgtctcctcttcttcctcctctgtgtccttgtccctcttcctctttctttccgtttccaaaggagcaagccaaaacctcaaaccggcgccccttgggggccgggcacactacagccagggcgccgggagccagctagctgcccttcccccagcccgaggactctggggccacagggtgtcttccttcagcccatgcccacctggtccagcaggggcagcagccaggtctctgatggcagccggtctggtcacaggggaggacagcactcccccgtctagcagccaggcagggcgatgtctgccatccgtggccatttgcaaagaccccaaagacccctgttctggttccctctctcccccatgaatatcctctcacacacatgtacatgcgaacacacacaacacgcacctcgtgagacccgggacctgccccggacccccagttcctgggttgaacgaccacatcatgccacggtgcttgctcaggggaagccacgctccctctgtggggcctgctggggcctgggagccccccactgagcccacaatgccacggaaatccttgttggctgcccccgagaggggccttcccagctgggaagagctcagagctgacagctgcctcctgccatgtcaaggccccccaaagagcctcaggggctctggggccctggagggtggggttggggggtgggactctcctcccccactcctgctccctctcccttttcactgttgctttctatgtatagctccctagacctttcacttttttaaaaacgcgttttgtgtagagaataaggaacgtggatctttttattttgcaatcctgggccagctagaagccaggagctgattgaccttttaacttttttcagtggccacattttggttatcgatgtacctagaagtatgtaaattagattaaatttctcttctggaaacaccctggggcaggcggccagcgtgtgtttttctgtcaagtggacaggctggcattggctggcagccggggctgggatcggggcctcctctgtccagagcgccatggaggccctgggttttccagttggccgccaagccgaccagacgcagctggggatgagcccaagttcccagctgttggctctttaggccatggctgggagggggtctctggctggctggcaaagcggctccagtgagcagatgaaccagggttctgggcagcctgtctgggaagggagccaggatcaagaagcagttgaggctagaggagcttatcaaaggcaggagctaccagcgagggtgtcagggacccgttgggagcatttgggtgggggccagtggggttgtagagagctggaactcacctgcttttaatacatgtgacttctagtgagacacatgcacccctgacccaaggaacatgcggggaaaagaggagccactggctcctttgcgatgttatttattttctcgctctgcaaatgtttattgaacatttctgagattttaagagattttgttggctgctccttcttgtttattgc

SEQ ID NO: 200101 - DNA, 4609 bp, Homo sapiens
  Payload ID: 19473
  Gene Name: widely interspaced zinc finger motifs
  ENST ID: ENST00000599910
  CDS Start-End: 150-3056
agaagcaggcggtgattgaaatgtgttgccggccttgtggggttccctaggtctgcggaacggcaccgtcgggggacggttggataacaggatgatactggagggattcttgtggttggagatcaggcctgggttctgaggaaaacgcaatggtggccatggacttgggctctccctcgctccctaagaagagcctgcctgtccctggggccctggagcaggtggccagtcggctgagcagcaaagtggctgcagaggttcctcatggcagcaaacaggagctgcaggacctcaaggcccagagcctgaccacctgcgaggtctgcggtgcctgctttgagacccgaaagggcctgtccagccacgcgcgctcccacctgcggcagctgggagtggcagagtcggaaagcagcggcgcacccatcgacctcctctacgagcttgtgaagcagaagggtctgcctgacgcccaccttgggctgcccccaggcctggctaagaagtccagctcactgaaggaggtggtcgccggggccccccggcccggcttgctcagcctggccaagcccttggatgcccctgctgtcaacaaagccatcaagtcgcctcccggcttctcggccaagggcctgggccacccgcccagctctccactcctcaaaaagacaccactggccctggcgggctcccctacccctaagaatcctgaggacaagagcccccagctgtccctgagcccccggccggcctccccaaaggcacagtggcctcagtctgaggatgaggggcccttgaacctcactttagatagtgacgggggcagagagctggactgccagctgtgcggtgcctggtttgagacccgcaagggcctgtctagccacgcccgtgcccacctgcgccacctgggcgtcagcgatccggacgccaagggatcccccatagacgtgctccacgggctcatcaggagggacggcgtccagatccgcctcccacccaggcgcggcgccctggcccacccggggcggccgcctcccacctccgcggccctctccttgcttccccccccaccgccggccaagaaggccaagctgaaggccgcgggtatggccagcccctgggggaagcaggacctctcggccgccgcagccgccggcattttctgggcctctgatgtggagccgtctcctctcaacctctcctcaggcccagagccagcacgagacatccgctgcgagttctgtggtgagttcttcgagaaccgcaagggcctctcgagccacgcgcgctcccatctgcggcaaatgggcgtgaccgagtggtacgtcaatggctcgcccatcgacacgctgcgggagatcctgaagagacggacccagtctcggcctggtggacctcccaacccaccagggccaagcccaaaagccctggccaagatgatgggcggcgcaggtcctggcagctcactggaagcccgcagcccctcggaccttcacatctcacccttggccaagaagttgccaccaccaccgggcagccccctgggccactcaccaactgcctctcctcctcctacggcccgaaagatgttcccaggcctggctgcaccctccttgcccaagaagctgaagcctgaacaaatacgggtggagatcaagcgggagatgctgccgggggcccttcatggggaactgcacccatctgagggtccctggggggcaccacgggaagacatgacacccctgaacctgtcgtcccgggcagagccggtgcgcgacatccgctgtgagttctgcggcgagttcttcgagaaccgcaagggcctgtcgagtcacgcgcgctcacacctgcggcagatgggtgtgaccgagtggtccgtcaatggttcgcccatcgacacactgcgagagatcctcaagaagaagtccaagccgtgcctcatcaagaaggagccaccggctggagacctggcccctgccctggctgaggacgggcctcccaccgtggcccctgggcccgtgcagtccccactgccgctgtcgcccctggctggccggccaggcaaaccaggtgcagggccggcccaggttcctcgtgagctcagcctgacgcccatcactggggccaagccctcagccactggctacctgggctcagtggcagccaagcggcccctgcaggaggaccgcctcctcccagcagaggtcaaggccaagacctacatccagactgaactgcccttcaaggcaaagacccttcatgagaagacctcccactcctccaccgaggcctgctgcgagctgtgtggcctttactttgaaaaccgcaaggccctggccagccacgcacgggcacacctgcggcagttcggcgtgaccgagtggtgcgtcaatggctcgcccatcgagacactgagcgagtggatcaaacaccggccccagaaggtgggcgcctaccgcagctacatccagggcggccgccccttcaccaagaagttccgcagtgccggccatggccgtgacagtgacaagcggccgtccctggggctggcacccgggggcctggccgtggtcggccgcagtgccggaggggagccagggcccgaggctggccgggcagccgacggtggtgagcggcctctggcagccagcccgccaggcaccgtgaaggctgaggagcaccagcggcagaacatcaacaaatttgaacgccgacaagcccgccctccagatgcctccgcagcccggggaggcgaggacaccaatgacctacagcagaagctggaggaggtgcggcaacccccaccccgagtccggccagtcccctccctggtgccccggcccccccagacatcacttgtcaagttcgtgggcaacatctacaccctcaaatgcaggttctgtgaggtggaattccagggccccctctccatccaggaagagtgggtgcggcacttacagcggcacatcctggagatgaacttctccaaagcggaccccccacctgaggagtcccaggccccgcaggcacagacagcggcggcagaggctccctaacacaaaagcattccagatcccctctcgtgccacctctgtctcctcttcttcctcctctgtgtccttgtccctcttcctctttctttccgtttccaaaggagcaagccaaaacctcaaaccggcgccccttgggggccgggcacactacagccagggcgccgggagccagctagctgcccttcccccagcccgaggactctggggccacagggtgtcttccttcagcccatgcccacctggtccagcaggggcagcagccaggtctctgatggcagccggtctggtcacaggggaggacagcactcccccgtctagcagccaggcagggcgatgtctgccatccgtggccatttgcaaagaccccaaagacccctgttctggttccctctctcccccatgaatatcctctcacacacatgtacatgcgaacacacacaacacgcacctcgtgagacccgggacctgccccggacccccagttcctgggttgaacgaccacatcatgccacggtgcttgctcaggggaagccacgctccctctgtggggcctgctggggcctgggagccccccactgagcccacaatgccacggaaatccttgttggctgcccccgagaggggccttcccagctgggaagagctcagagctgacagctgcctcctgccatgtcaaggccccccaaagagcctcaggggctctggggccctggagggtggggttggggggtgggactctcctcccccactcctgctccctctcccttttcactgttgctttctatgtatagctccctagacctttcacttttttaaaaacgcgttttgtgtagagaataaggaacgtggatctttttattttgcaatcctgggccagctagaagccaggagctgattgaccttttaacttttttcagtggccacattttggttatcgatgtacctagaagtatgtaaattagattaaatttctcttctggaaacaccctggggcaggcggccagcgtgtgtttttctgtcaagtggacaggctggcattggctggcagccggggctgggatcggggcctcctctgtccagagcgccatggaggccctgggttttccagttggccgccaagccgaccagacgcagctggggatgagcccaagttcccagctgttggctctttaggccatggctgggagggggtctctggctggctggcaaagcggctccagtgagcagatgaaccagggttctgggcagcctgtctgggaagggagccaggatcaagaagcagttgaggctagaggagcttatcaaaggcaggagctaccagcgagggtgtcagggacccgttgggagcatttgggtgggggccagtggggttgtagagagctggaactcacctgcttttaatacatgtgacttctagtgagacacatgcacccctgacccaaggaacatgcggggaaaagaggagccactggctcctttgcgatgttatttattttctcgctctgcaaatgtttattgaacatttctgagattttaagagattttgttggctgctc

SEQ ID NO: 200102 - DNA, 603 bp, Homo sapiens
  Payload ID: 19473
  Gene Name: widely interspaced zinc finger motifs
  ENST ID: ENST00000596159
  CDS Start-End: 203-603
gtcccccctacctcggcgcgtcccgcggggtctcctgccccggggtgcacgggcggagggctcatcccccggaccctggacccccgaggagtgggcccgcgcggcgcagcccccacctctgcgacccctggggggcgtccgggcccacaatgccccgctgagccggtgcagcagctgagtggatccaagcagagaaaatccgatggaggggtctctggcaggcagcctggctgcaccagatcgtccccaaggcccagagagactgcctggcccggcgccaagggagaacatcgagggtggggccgaagctgctgagggggaaggtggcatcttccggtccacccgttacctgcctgtcaccaaggagggcccccgagacattctggatggcagaggtggcatctctgtggccaactttgacccaggcaccttcagcctgatgcgctgtgacttctgcggggctggcttcgacacacgggccggcctctccagccacgcccgggcccacctacgtgacttcggtatcaccaactgggagctcactgtctcacccatcaacatcctgcaggagctgctggccacctctgctgctgagcagccccc

SEQ ID NO: 200103 - DNA, 3644 bp, Homo sapiens
  Payload ID: 19473
  Gene Name: widely interspaced zinc finger motifs
  Uniprot ID: O95785
  ENST ID: ENST00000599686
  CDS Start-End: 148-2655
ccgccgccgccgcccccacccccgccgccgccgccaccaccaccgccaccgccaccgccgccgcgggacgggcccaaggccgagccggagccggggcccgggcccgcgtccgctcccgcgcccggcctgggttctgaggaaaacgcaatggtggccatggacttgggctctccctcgctccctaagaagagcctgcctgtccctggggccctggagcaggtggccagtcggctgagcagcaaagtggctgcagaggttcctcatggcagcaaacaggagctgcaggacctcaaggcccagagcctgaccacctgcgaggtctgcggtgcctgctttgagacccgaaagggcctgtccagccacgcgcgctcccacctgcggcagctgggagtggcagagtcggaaagcagcggcgcacccatcgacctcctctacgagcttgtgaagcagaagggtctgcctgacgcccaccttgggctgcccccaggcctggctaagaagtccagctcactgaaggaggtggtcgccggggccccccggcccggcttgctcagcctggccaagcccttggatgcccctgctgtcaacaaagccatcaagtcgcctcccggcttctcggccaagggcctgggccacccgcccagctctccactcctcaaaaagacaccactggccctggcgggctcccctacccctaagaatcctgaggacaagagcccccagctgtccctgagcccccggccggcctccccaaaggcacagtggcctcagtctgaggatgaggggcccttgaacctcacctcaggcccagagccagcacgagacatccgctgcgagttctgtggtgagttcttcgagaaccgcaagggcctctcgagccacgcgcgctcccatctgcggcaaatgggcgtgaccgagtggtacgtcaatggctcgcccatcgacacgctgcgggagatcctgaagagacggacccagtctcggcctggtggacctcccaacccaccagggccaagcccaaaagccctggccaagatgatgggcggcgcaggtcctggcagctcactggaagcccgcagcccctcggaccttcacatctcacccttggccaagaagttgccaccaccaccgggcagccccctgggccactcaccaactgcctctcctcctcctacggcccgaaagatgttcccaggcctggctgcaccctccttgcccaagaagctgaagcctgaacaaatacgggtggagatcaagcgggagatgctgccgggggcccttcatggggaactgcacccatctgagggtccctggggggcaccacgggaagacatgacacccctgaacctgtcgtcccgggcagagccggtgcgcgacatccgctgtgagttctgcggcgagttcttcgagaaccgcaagggcctgtcgagtcacgcgcgctcacacctgcggcagatgggtgtgaccgagtggtccgtcaatggttcgcccatcgacacactgcgagagatcctcaagaagaagtccaagccgtgcctcatcaagaaggagccaccggctggagacctggcccctgccctggctgaggacgggcctcccaccgtggcccctgggcccgtgcagtccccactgccgctgtcgcccctggctggccggccaggcaaaccaggtgcagggccggcccaggttcctcgtgagctcagcctgacgcccatcactggggccaagccctcagccactggctacctgggctcagtggcagccaagcggcccctgcaggaggaccgcctcctcccagcagaggtcaaggccaagacctacatccagactgaactgcccttcaaggcaaagacccttcatgagaagacctcccactcctccaccgaggcctgctgcgagctgtgtggcctttactttgaaaaccgcaaggccctggccagccacgcacgggcacacctgcggcagttcggcgtgaccgagtggtgcgtcaatggctcgcccatcgagacactgagcgagtggatcaaacaccggccccagaaggtgggcgcctaccgcagctacatccagggcggccgccccttcaccaagaagttccgcagtgccggccatggccgtgacagtgacaagcggccgtccctggggctggcacccgggggcctggccgtggtcggccgcagtgccggaggggagccagggcccgaggctggccgggcagccgacggtggtgagcggcctctggcagccagcccgccaggcaccgtgaaggctgaggagcaccagcggcagaacatcaacaaatttgaacgccgacaagcccgccctccagatgcctccgcagcccggggaggcgaggacaccaatgacctacagcagaagctggaggaggtgcggcaacccccaccccgagtccggccagtcccctccctggtgccccggcccccccagacatcacttgtcaagttcgtgggcaacatctacaccctcaaatgcaggttctgtgaggtggaattccagggccccctctccatccaggaagagtgggtgcggcacttacagcggcacatcctggagatgaacttctccaaagcggaccccccacctgaggagtcccaggccccgcaggcacagacagcggcggcagaggctccctaacacaaaagcattccagatcccctctcgtgccacctctgtctcctcttcttcctcctctgtgtccttgtccctcttcctctttctttccgtttccaaaggagcaagccaaaacctcaaaccggcgccccttgggggccgggcacactacagccagggcgccgggagccagctagctgcccttcccccagcccgaggactctggggccacagggtgtcttccttcagcccatgcccacctggtccagcaggggcagcagccaggtctctgatggcagccggtctggtcacaggggaggacagcactcccccgtctagcagccaggcagggcgatgtctgccatccgtggccatttgcaaagaccccaaagacccctgttctggttccctctctcccccatgaatatcctctcacacacatgtacatgcgaacacacacaacacgcacctcgtgagacccgggacctgccccggacccccagttcctgggttgaacgaccacatcatgccacggtgcttgctcaggggaagccacgctccctctgtggggcctgctggggcctgggagccccccactgagcccacaatgccacggaaatccttgttggctgcccccgagaggggccttcccagctgggaagagctcagagctgacagctgcctcctgccatgtcaaggccccccaaagagcctcaggggctctggggccctggagggtggggttggggggtgggactctcctcccccactcctgctccctctcccttttcactgttgctttctatgtatagctccctagacctttcacttttttaaaaacgcgttttgtgtagagaataaggaacgtggatctttttattttgcaatcctgggccagctagaagccaggagctgattgaccttttaacttttttcagtggccacattttggttatcgatgtacctagaagtatgtaaattagattaaatttctcttctggaaacaccctggg

SEQ ID NO: 200104 - DNA, 1230 bp, Homo sapiens
  Payload ID: 19474
  Gene Name: Williams Beuren syndrome chromosome region 22
  Uniprot ID: O43709
  ENST ID: ENST00000265758
  CDS Start-End: 59-904
gacataaaaaccgggtgccggcaggcgccagtcgcaggtgtgctgctgaggcgtgagaatggcgtcccgcggccggcgtccggagcatggcggacccccagagctgttttatgacgagacagaagcccggaaatacgttcgcaactcacggatgattgatatccagaccaggatggctgggcgagcattggagcttctttatctgccagagaataagccctgttacctgctggatattggctgtggcactgggctgagtggaagttatctgtcagatgaagggcactattgggtgggcctggatatcagccctgccatgctggatgaggctgtggaccgagagatagagggagacctgctgctgggggatatgggccagggcatcccattcaagccaggcacatttgatggttgcatcagcatttctgctgtgcagtggctctgtaatgctaacaagaagtctgaaaaccctgccaagcgcctgtactgcttttttgcttctcttttttctgttctcgtccggggatcccgagctgtcctgcagctgtaccctgagaactcagagcagttggagctgatcacaacccaggccacaaaggcaggcttctccggtggcatggtggtagactaccctaacagtgccaaagcaaagaaattctacctctgcttgttttctgggccttcgacctttataccagaggggctgagtgaaaatcaggatgaagttgaacccagggagtctgtgttcaccaatgagaggttcccattaaggatgtcgaggcggggaatggtgaggaagagtcgggcatgggtgctggagaagaaggagcggcacaggcgccagggcagggaagtcagacctgacacccagtacaccggccgcaagcgcaagccccgcttctaagtcaccacgcggttctggaaaggcacttgcctctgcacttttctatattgttcagctgacaaagtagtattttagaaaagttctaaagttataaaaatgttttctgcagtaaaaaaaaagttctctgggccgggcgtggtggctcacacctgtaatcccagcaccttgggaggctgaggtgggaggatcatttgaggccaggagtttgagacctgcctgggcaacataatgaaacttcctttccagggaggaaaaaaaaaaaaaaaaaaagctctgagagcatcttattttgtttaaaggcaagaaataaaatttccttttgtgga

SEQ ID NO: 200105 - DNA, 577 bp, Homo sapiens
  Payload ID: 19474
  Gene Name: Williams Beuren syndrome chromosome region 22
  ENST ID: ENST00000428163
  CDS Start-End: 20-442
gtgctgctgaggcgtgagaatggcgtcccgcggccggcgtccggagcatggcggacccccagagctgttttatgacgagacagaagcccggaaatacgttcgcaactcacggatgattgatatccagaccaggatggctgggcgagcattggagcttctttatctgccagagaataagccctgttacctgctggatattggctgtggcactgggctgagtggaagttatctgtcagatgaagggcactattgggtgggcctggatatcagccctgccatgctggatgaggctgtggaccgagagatagagggagacctgctgctgggggatatgggccagggcatcccattcaagccaggcacatttgatggttgcatcaggtccggggatcccgagctgtcctgcagctgtaccctgagaactcagagcagttggagctgatcacaacccaggccacaaaggcaggcttctccggtggcatggtggtagactaccctaacagtgccaaagcaaagaaattctacctctgcttgttttctgggccttcgacctttataccagaggggctgagtgaaa

SEQ ID NO: 200106 - DNA, 1074 bp, Homo sapiens
  Payload ID: 19474
  Gene Name: Williams Beuren syndrome chromosome region 22
  ENST ID: ENST00000432522
  CDS Start-End: 56-478
ataaaaaccgggtgccggcaggcgccagtcgcaggtgtgctgctgaggcgtgagaatggcgtcccgcggccggcgtccggagcatggcggacccccagagctgttttatgacgagacagaagcccggaaatacgttcgcaactcacggatgattgatatccagaccaggatggctgggcgagcattggagcttctttatctgccagagaataagccctgttacctgctggatattggctgtggcactgggctgagtggaagttatctgtcagatgaagggcactattgggtgggcctggatatcagccctgccatgctggcatttctgctgtgcagtggctctgtaatgctaacaagaagtctgaaaaccctgccaagcgcctgtactgcttttttgcttctcttttttctgttctcgtccggggatcccgagctgtcctgcagctgtaccctgagaactcagagcagttggagctgatcacaacccaggccacaaaggcaggcttctccggtggcatggtggtagactaccctaacagtgccaaagcaaagaaattctacctctgcttgttttctgggccttcgacctttataccagaggggctgagtgaaaatcaggatgaagttgaacccagggagtctgtgttcaccaatgagaggtaaagcaactgctgaagcctgccccggctgcagcgggggctgccacatttgttagacatggactttctctctgccctcacccaagcctctcaggtcacatgcagcagggacaccaaggtgacggtagaaacatcaggtcccatttggactgtgcctgtttggggctaggggtttggggtcctggatgtctgggtgcagccatgcagcctggactccctttgtgagcccacacatgccccttccccttgccacgcctggcaggctgtctccttcttttctgatgctgccctccacctgcatctgggaccctctcccttgggtgctgtggctctcccttccttcctgcatcctcatcttgactctcctgggtcactgctgtcggcacacagacatgctgcacaatttctccttttc

SEQ ID NO: 200107 - DNA, 2496 bp, Homo sapiens
  Payload ID: 19474
  Gene Name: Williams Beuren syndrome chromosome region 22
  ENST ID: ENST00000436944
  CDS Start-End: 48-419
gtgctgctgaggcgtgagaatggcgtcccgcggccggcgtccggagcatggcggacccccagagctgttttatgacgagacagaagcccggaaatacgttcgcaagtgaggggagcctgaatactgcggggcgtccgggggtcgggaagcggcaagttgcccctgttgctggcgttgcccggaaaggccgtagaatttggggctcacggatgattgatatccagaccaggatggctgggcgagcattggagcttctttatctgccagagaataagccctgttacctgctggatattggctgtggcactgggctgagtggaagttatctgtcagatgaagggcactattgggtgggcctggatatcagccctgccatgctgggtccggggatcccgagctgtcctgcagctgtaccctgagaactcagagcagttggagctgatcacaacccaggccacaaaggcaggcttctccggtggcatggtggtagactaccctaacagtgccaaagcaaagaaattctacctctgcttgttttctgggccttcgacctttataccagaggggctgagtgaaaatcaggatgaagttgaacccagggagtctgtgttcaccaatgagaggttcccattaaggatgtcgaggcggggaatggtgaggaagagtcgggcatgggtgctggagaagaaggagcggcacaggcgccagggcagccccaagcctgcctcgaacacctgtgtgccacatccttcagggagcacccctgcccggcttcacgtgaacacagaaatggccaaatgtcctccaggagaggaaaagggcccacggataagaggaggagccgctggccgccggcgaaagtgagtccaactgggaggcatcaggagacaggggtcttgagtccacctttgccgctgacatttatgtgacctcagcctggtgttttcccctctctgggactcttccttccctaaaacctgccttacaaggggtctgtgtccaaatactgtccagacccagcactaggggtcatggacgtagggaacatggtgagggggtcatggcaggagggatggggcctacactcaccccagaggcaaagatggcggggttcccactctccagcatgtcctccagctcctcactggtcgtggtcctgccggctgcaagcgagtggggtcacactgagcccagccctcttcggggagttcagcagcagcattgggccccgccccctccgtcccaggcccgggctccccccagccccgagctcagcggcagcctcaggccccgcccccccggcccttaacacagcagccgcctcaggcccccgcccctccagccccaaactcagcagctgcctcgggccacccgcctcgggcccctaactaagcagcagccttgagccacgcactcagcagcagactcgggccccgcccctccaggctccaggccccgccccaggccccacccccagctcactgatctccagctgcctctggatgcggcctttgcagcgctcgcggtagtcggactgcgtggcgttgtactccgacatgacctccacaaactttctggacagcgtggagtgctgggggcccgagatggaggtgcaggggtcaggccctgcggggaccgacccagagactcaggtgcccgcccatcctagactccgtggccgcacctgtgtcttccggatcctcaggtcagcggaggagcggttcaggccttcctcttgctcgatggactgctcgatgcctgggggcacaggtggctgctaagtcataaccaggccccttcaaccccgtcccctacccgcacacccagcatctatccaccttcccacatcccctagggtatgtgtgtggcctgtggctggtgggatcagtgccaggcaccgatggaggaggggcctacagaagcccttccagctgtgacgctgtgtggtgtgtgcatgtgtgtaaatgcacacccactccaagctctgcgtgtgtgtgaggtctggtagctccggccaccctatgcctgggtaccactccttttctgctcagaaaggctgtgtacgagggaccatgcccacagcggggagagccaggtggcccctcctgcagggcatgtggccccgaggccttggcactcatggggtgcacgtgtctgttcacccagaataccgggcttctgcaagagaccaggaagtactggccacttcttcaaccctctttagcagaggtgaggggcagtgcccatccagagtggagccctccctcgccaaagccttaggtgggtgtgtccctgggcccagcccagagtctggcaccaacgggccttgccaagtagctgctgagtgaatgggcacatgacgccaccctcagaaaggaaagcaagatccggcgcaccccctcagggcgagcaaaaccccatgggctccgcagaggaagcaggcctagaatgccccccacccacccccagacaagcctgactcactctttaacttgg

SEQ ID NO: 200108 - DNA, 538 bp, Homo sapiens
  Payload ID: 19474
  Gene Name: Williams Beuren syndrome chromosome region 22
  ENST ID: ENST00000421304
  CDS Start-End: 270-538
acataaaaaccgggtgccggcaggcgccagtcgcaggtgtgctgctgaggcgtgagaatggcgtcccgcggccggcgtccggagcatggcggacccccagagctgttttatgacgagacagaagcccggaaatacgttcgcaagtgaggggagcctgaatactgcggggcgtccgggggtcgggaagcggcaagttgcccctgttgctggcgttgcccggaaaggccgtagaatttgggggtgcgggaagggaaggacccggctcacggatgattgatatccagaccaggatggctgggcgagcattggagcttctttatctgccagagaataagccctgttacctgctggatattggctgtggcactgggctgagtggaagttatctgtcagatgaagggcactattgggtgggcctggatatcagccctgccatgctggatgaggctgtggaccgagagatagagggagacctgctgctgggggatatgggccagggcatcccattcaagccaggcacatttgatggttgcatcag

SEQ ID NO: 200109 - DNA, 632 bp, Homo sapiens
  Payload ID: 19474
  Gene Name: Williams Beuren syndrome chromosome region 22
  ENST ID: ENST00000441822
  CDS Start-End: 54-632
gcaggtgtgctgctgaggcgtgagaatggcgtcccgcggccggcgtccggagcatggcggacccccagagctgttttatgacgagacagaagcccggaaatacgttcgcaagtgaggggagcctgaatactgcggggcgtccgggggtcgggaagcggcaagttgcccctgttgctggcgttgcccggaaaggccgtagaatttggggctcacggatgattgatatccagaccaggatggctgggcgagcattggagcttctttatctgccagagaataagccctgttacctgctggatattggctgtggcactgggctgagtggaagttatctgtcagatgaagggcactattgggtgggcctggatatcagccctgccatgctggatgaggctgtggaccgagagatagagggagacctgctgctgggggatatgggccagggcatcccattcaagccaggcacatttgatggttgcatcagcatttctgctgtgcagtggctctgtaatgctaacaagaagtctgaaaaccctgccaagcgcctgtactgcttttttgcttctcttttttctgttctcgtccggggatcccgagctgtcctgcagctgtaccctgagaactcagagcag

SEQ ID NO: 200110 - DNA, 452 bp, Homo sapiens
  Payload ID: 19474
  Gene Name: Williams Beuren syndrome chromosome region 22
  ENST ID: ENST00000453316
  CDS Start-End: 1-196
gtccggggatcccgagctgtcctgcagctgtaccctgagaactcagagcaggttcccattaaggatgtcgaggcggggaatggtgaggaagagtcgggcatgggtgctggagaagaaggagcggcacaggcgccagggcagggaagtcagacctgacacccagtacaccggccgcaagcgcaagccccgcttctaagtcaccacgcggttctggaaaggcacttgcctctgcacttttctatattgttcagctgacaaagtagtattttagaaaagttctaaagttataaaaatgttttctgcagtaaaaaaaaagttctctgggccgggcgtggtggctcacacctgtaatcccagcaccttgggaggctgaggtgggaggatcatttgaggccaggagtttgagacctgcctgggcaacataatgaaacttcctttccagggaggaaaaa

SEQ ID NO: 200111 - DNA, 1260 bp, Homo sapiens
  Payload ID: 19474
  Gene Name: Williams Beuren syndrome chromosome region 22
  ENST ID: ENST00000430270
  CDS Start-End: 29-232
atggcgtcccgcggccggcgtccggagcatggcggacccccagagctgttttatgacgagacagaagcccggaaatacgttcgcaagtgaggggagcctgaatactgcggggcgtccgggggtcgggaagcggcaagttgcccctgttgctggcgttgcccggaaaggccgtagaatttgggggtgcgggaagggaaggacccgggtgggtgccgatttctgtctctggtaaatcaactttaagttgccgacctctctgggcctcggtacctcagcgttgagctcacggatgattgatatccagaccaggatggctgggcgagcattggagcttctttatctgccagagaataagccctgttacctgctggatattggctgtggcactgggctgagtggaagttatctgtcagatgaagggcactattgggtgggcctggatatcagccctgccatgctggatgaggctgtggaccgagagatagagggagacctgctgctgggggatatgggccagggcatcccattcaagccaggcacatttgatggttgcatcagcatttctgctgtgcagtggctctgtaatgctaacaagaagtctgaaaaccctgccaagcgcctgtactgcttttttgcttctcttttttctgttctcgtccggggatcccgagctgtcctgcagctgtaccctgagaactcagagcagttggagctgatcacaacccaggccacaaaggcaggcttctccggtggcatggtggtagactaccctaacagtgccaaagcaaagaaattctacctctgcttgttttctgggccttcgacctttataccagaggggctgagtgaaaatcaggatgaagttgaacccagggagtctgtgttcaccaatgagaggttcccattaaggatgtcgaggcggggaatggtgaggaagagtcgggcatgggtgctggagaagaaggagcggcacaggcgccagggcagggaagtcagacctgacacccagtacaccggccgcaagcgcaagccccgcttctaagtcaccacgcggttctggaaaggcacttgcctctgcacttttctatattgttcagctgacaaagtagtattttagaaaagttctaaagttataaaaatgttttctgcagtaaaaaaaaagttctctgggccgggcgtggtggctcacacctgtaatcccagcaccttgggaggctgaggtgggaggatcatttgaggccaggagtttgagacctgcct

SEQ ID NO: 200112 - DNA, 691 bp, Homo sapiens
  Payload ID: 19474
  Gene Name: Williams Beuren syndrome chromosome region 22
  ENST ID: ENST00000442099
  CDS Start-End: 1-385
catttctgctgtgcagtggctctgtaatgctaacaagaagtctgaaaaccctgccaagcgcctgtactgcttttttgcttctcttttttctgttctcgtccggggatcccgagctgtcctgcagctgtaccctgagaactcagagcagttggagctgatcacaacccaggccacaaaggcaggcttctccggtggcatggtggtagactaccctaacagtgccaaagcaaagaaattctacctctgcttgttttctgggccttcgacctttataccagaggttcccattaaggatgtcgaggcggggaatggtgaggaagagtcgggcatgggtgctggagaagaaggagcggcacaggcgccagggcagggaagtcagacctgacacccagtacaccggccgcaagcgcaagccccgcttctaagtcaccacgcggttctggaaaggcacttgcctctgcacttttctatattgttcagctgacaaagtagtattttagaaaagttctaaagttataaaaatgttttctgcagtaaaaaaaaagttctctgggccgggcgtggtggctcacacctgtaatcccagcaccttgggaggctgaggtgggaggatcatttgaggccaggagtttgagacctgcctgggcaacataatgaaacttcctttccagggaggaaaaaaaaaaaaaaa

SEQ ID NO: 200113 - DNA, 1219 bp, Homo sapiens
  Payload ID: 19474
  Gene Name: Williams Beuren syndrome chromosome region 22
  Uniprot ID: O43709
  ENST ID: ENST00000423497
  CDS Start-End: 1-897
atggcgtcccgcggccggcgtccggagcatggcggacccccagagctgttttatgacgagacagaagcccggaaatacgttcgcaactcacggatgattgatatccagaccaggatggctgggcgagcattggagcttctttatctgccagagaataagccctgttacctgctggatattggctgtggcactgggctgagtggaagttatctgtcagatgaagggcactattgggtgggcctggatatcagccctgccatgctggatgaggctgtggaccgagagatagagggagacctgctgctgggggatatgggccagggcatcccattcaagccaggcacatttgatggttgcatcagcatttctgctgtgcagtggctctgtaatgctaacaagaagtctgaaaaccctgccaagcgcctgtactgcttttttgcttctcttttttctgttctcgtccggggatcccgagctgtcctgcagctgtaccctgagaactcagagcagttggagctgatcacaacccaggccacaaaggcaggcttctccggtggcatggtggtagactaccctaacagtgccaaagcaaagaaattctacctctgcttgttttctgggccttcgacctttataccagaggggctgagtgaaaatcaggatgaagttgaacccagggagtctgtgttcaccaatgagagggaaggtggagcatttgagagaaggggcatccgaggccaccagactcggaggttcccattaaggatgtcgaggcggggaatggtgaggaagagtcgggcatgggtgctggagaagaaggagcggcacaggcgccagggcagggaagtcagacctgacacccagtacaccggccgcaagcgcaagccccgcttctaagtcaccacgcggttctggaaaggcacttgcctctgcacttttctatattgttcagctgacaaagtagtattttagaaaagttctaaagttataaaaatgttttctgcagtaaaaaaaaagttctctgggccgggcgtggtggctcacacctgtaatcccagcaccttgggaggctgaggtgggaggatcatttgaggccaggagtttgagacctgcctgggcaacataatgaaacttcctttccagggaggaaaaaaaaaaaaaaaaaaagctctgagagcatcttattttgtttaaaggcaagaaataaaatttccttttg

SEQ ID NO: 200114 - DNA, 895 bp, Homo sapiens
  Payload ID: 19474
  Gene Name: Williams Beuren syndrome chromosome region 22
  ENST ID: ENST00000421744
  CDS Start-End: 54-356
aaaaaccgggtgccggcaggcgccagtcgcaggtgtgctgctgaggcgtgagaatggcgtcccgcggccggcgtccggagcatggcggacccccagagctgttttatgacgagacagaagcccggaaatacgttcgcaactcacggatgattgatatccagaccaggatggctgggcgagcattggagcttctttatctgccagagaataagccctgttacctgctggatattggctgtggcactgggctgagtggaagttatctgtcagatgaagggcactattgggtgggcctggatatcagccctgccatgctgggtccggggatcccgagctgtcctgcagctgtaccctgagaactcagagcagttggagctgatcacaacccaggccacaaaggcaggcttctccggtggcatggtggtagactaccctaacagtgccaaagcaaagaaattctacctctgcttgttttctgggccttcgacctttataccagaggggctgagtgaaaatcaggatgaagttgaacccagggagtctgtgttcaccaatgagaggatccttcttgtccttacactggtgtcttcaaacgacatgtcctaaaagtaaatgtgggtaagttgaatgacctgagcatccattcctcagctattcaaaaagtaggggtagtgccacctatcttggcagtgtgttgagggtgcccagcacgtaccttgccatccctcgttctgtaggctctcacttccagttcctcagatgaggtacagggcagggaggagcttctcccgttactgtcatctcagtctaaccacattcaggacacttgtttattttaaataaacaggtgaattaagaaaaagttttttaagtctttacctaatcagtctccagg

SEQ ID NO: 200115 - DNA, 738 bp, Homo sapiens
  Payload ID: 19474
  Gene Name: Williams Beuren syndrome chromosome region 22
  ENST ID: ENST00000430446
  CDS Start-End: 1-119
gtggcactgggctgagtggaagttatctgtcagatgaagggcactattgggtgggcctggatatcagccctgccatgctgggtccggggatcccgagctgtcctgcagctgtaccctgagaactcagagcagttggagctgatcacaacccaggccacaaaggcaggcttctccggtggcatggtggtagactaccctaacagtgccaaagcaaagaaattctacctctgcttgttttctgggccttcgacctttataccagaggggctgagtgaaaatcaggatgaagttgaacccagggagtctgtgttcaccaatgagaggttcccattaaggatgtcgaggcggggaatggtgaggaagagtcgggcatgggtgctggagaagaaggagcggcacaggcgccagggcagggaagtcagacctgacacccagtacaccggccgcaagcgcaagccccgcttctaagtcaccacgcggttctggaaaggcacttgcctctgcacttttctatattgttcagctgacaaagtagtattttagaaaagttctaaagttataaaaatgttttctgcagtaaaaaaaaagttctctgggccgggcgtggtggctcacacctgtaatcccagcaccttgggaggctgaggtgggaggatcatttgaggccaggagtttgagacctgcctgggcaacataatgaaacttcctttccagggaggaaaaaaaaaaaaaaaaaaa

SEQ ID NO: 200116 - DNA, 941 bp, Homo sapiens
  Payload ID: 19475
  Gene Name: Williams Beuren syndrome chromosome region 27
  Uniprot ID: Q8N6F8
  ENST ID: ENST00000297873
  CDS Start-End: 51-788
gccccgagtcctgttgcccacacgcccgaggcgcgctggattggcggagcatggcccaggaggagggtgggagcctgcccgaggtgcgggcgcgggtcagggccgcgcatggcatccccgacctggcccaaaagctccatttctatgaccgctgggctccggactacgaccaggatgtggccaccctgctgtaccgtgcgccccgcctcgcagtggactgcctcacacaagcccttccaggcccgccccacagtgccctgatcctggacgtggcctgtggcacaggcctagtggctgccgagctgcgggctccaggcttcctccagctgcatggggtggatgggagcccagggatgctggaacaggcccaggcccccggcctctatcagcgcctcagcctctgcaccctgggccaggagcctctgcccagcccggaagggaccttcgacgcggtgctgatagtcggtgccctcagtgacggccaggtgccctgcaatgcgatacctgagctacatgtcaccaagccaggtgggctggtgtgtctgaccaccaggaccaactcgtccaaccttcaatacaaggaggctctggaggccaccctggacaggctggagcaggctgggatgtgggaaggcctggtggcctggcctgtggaccgcctgtggaccgctgggagctggctacctccgagctggaggtggtatccggcatctctgccaaggatggcttcatctccggcattgtctacctgtaccgaaagtggaaggcgacccaggttgaggaagtgagatccagcccccagcccccagctggcccctgactccatgtggccttagctgggcccatctgctgggcctcctctgcctcccctgtaaaatgggacctccgaaccaaccctgcccctcagaaatgccctgcctattaaatgagctcccagaaaa

SEQ ID NO: 200117 - DNA, 539 bp, Homo sapiens
  Payload ID: 19475
  Gene Name: Williams Beuren syndrome chromosome region 27
  ENST ID: ENST00000458679
  CDS Start-End: 32-304
acacgcccgaggcgcgctggattggcggagcatggcccaggaggagggtgggagcctgcccgaggtgcgggcgcgggtcagggccgcgcatggcatccccgacctggcccaaaagctccatttctatgaccgctgggctccggactacgaccaggatgtggccaccctgctgtaccgtgcgccccgcctcgcagtggactgcctcacacaagcccttccaggcccgccccacagtgccctgatcctggacgtggcctgtggcacaggcctagtggctgccgagggaccttcgacgcggtgctgatagtcggtgccctcagtgacggccaggtgccctgcaatgcgatacctgagctacatgtcaccaagccagggacaaccatccccagcagagatggcccaggactgtggctcctgcccctcccccacctcacctacccctctcccccaggtgggctggtgtgtctgaccaccaggaccaactcgtccaaccttcaatacaaggaggctctggaggccaccctggacaggctggagca

SEQ ID NO: 200118 - DNA, 592 bp, Homo sapiens
  Payload ID: 19476
  Gene Name: Williams-Beuren syndrome chromosome region 16
  ENST ID: ENST00000615250
  CDS Start-End: 132-592
attagccgggcgtggtggcgtacgcctgtggtcccagctactcgggaggctgagacacgagagtcacttgaacccaggagggggaggttgcagtgagcctgtcgataggtttgaggggacctgggcaggggatgcgaaggcagcagggaatcgtccactccagctcgctgtcgctggaggacggcctggggcggcgtgggagcagaccggagcggagacggctgcagcaaggccagatttcatctgctgcttgcggctatggattcacactgctgtcctctaagactgcggatgttacgaaagtctgggggatgggactcaacaaagattctcagcttggatttcacaggagccggaaagataaaacgaggggctacgagtatgtgttggagccctcacccgtctccctgcctctggacagacctcaggagacacgggtgctgcaggtctcctgcggccgagctcactctcttgtgttgactgacagggaaggagtcttcagcatgggaaacaattcttatgggcaatgtggaagaaaggtggtcgaaaatgaaatttacagtgaaagtcacagagtccacaggatgcagga

SEQ ID NO: 200119 - DNA, 2419 bp, Homo sapiens
  Payload ID: 19476
  Gene Name: Williams-Beuren syndrome chromosome region 16
  Uniprot ID: Q96I51
  ENST ID: ENST00000614461
  CDS Start-End: 145-1509
acgcctccctgagccttgggctgccgtcagcgcctttgccttcaaccaggagtaaaagtggccgtagcctcttccggcgaggactggtgttaagggtcacgcaagatggcggcgcccagaggctgctgaggcgcggaacggaggatggcgctggtggcgttggtggctggggctcggctggggcggcggctgagcgggccggggctggggcgagggcactggacggcggccgggcgctcccggagccggcgcgaagcggcagaagccgaggcggaggtgcccgtggtccagtacgtgggcgagcgcgctgcccgcgccgatcgcgtcttcgtgtggggcttcagcttctcgggggcgctgggcgtgccttcctttgtggtgcccagctccgggcccgggccccgcgccggcgcccgaccgcgccgcaggatccagcccgtgccctatcgcctggagctggaccaaaagatttcatctgctgcttgcggctatggattcacactgctgtcctctaagactgcggatgttacgaaagtctgggggatgggactcaacaaagattctcagcttggatttcacaggagccggaaagataaaacgaggggctacgagtatgtgttggagccctcacccgtctccctgcctctggacagacctcaggagacacgggtgctgcaggtctcctgcggccgagctcactctcttgtgttgactgacagggaaggagtcttcagcatgggaaacaattcttatgggcaatgtggaagaaaggtggtcgaaaatgaaatttacagtgaaagtcacagagtccacaggatgcaggacttcgatggccaggtggtccaggtcgcctgtggtcaggatcatagtctgttcctgacggataaaggagaagtctattcttgtggatggggtgctgatgggcaaacaggtctgggtcactacaatatcaccagctcgcccaccaagctgggtggagacctggcgggagtgaacgttatccaagttgccacctacggtgattgctgcctggccgtgtccgccgacggaggactttttggttggggaaactcggagtacctgcagctggcctctgtcactgactccacacaggtgaatgtgccccgctgcttacacttctcaggagtggggaaggtgcgacaggctgcatgcggtggcacgggctgtgcagtgttaaacggagaaggacatgtttttgtctggggctatggaattcttgggaaaggtccaaacctagtggaaagtgccgtccctgaaatgattccacccactctctttggcttgacggagttcaacccagaaatccaggtttcccgcatccgatgtggactcagccactttgctgcactgaccaacaaaggagagctgtttgtatggggcaagaacatccgagggtgcctgggaatcggtcgcctggaggaccagtatttcccatggagggcacctgccccatccgccagcgccaagacaacaggcccactcctctgattacctccgggggatggacggcaaacaggtaaggagttccatgcaactgcggatggagcccctctgagaaacacatgcccctccaagtggggtctggggcctggagagaccctcccacccagcagaccaggagatagctgggggacaagggcagacggcccctgcctgggaaaaaccacactcacaccccaccccgaagagctgtggagaccaaaccaagactacgctacacacagaacgccgagaagataaaccaagctttacacgagcaggatggggatgggaaaactaaaggggccccctgtgaccgaggagcagggtccccagggggcagctcccacggagcgggcttgaacagggaccacccctgcagagccagccagggcggagagccataccctggccccagcgcgccccgacacacatgcttttctccatgacacgaggccagtccccaggagcagccccaggagcacaacctgagatttctaagcttgcaggttacaaaaaacaaaaaaaacagagaagctgcctgcgtaaaaagtgccacccacggaggcaggacacaggcagcgtgtggcccattcagcaggcccaggtcttcagggtgaggctgctggcgagggcaggggagagggggcattctggttaaaagcaagaaattccaaatactcctccctcgggatcaacatccccccaaataagggcgcccagggatcttgcctggggaaagtggggtgcagaaggcatgacccacgccacagcgggctctcagcacccttcccacgtcccatgtcacaggctctttgagctgctggctttgttctctcaagtcaggtctgagggaacccatcggcttctgtaataatcgtattgcctatatacttgaattaaaaatatatggtggctc

SEQ ID NO: 200120 - DNA, 2300 bp, Homo sapiens
  Payload ID: 19476
  Gene Name: Williams-Beuren syndrome chromosome region 16
  Uniprot ID: Q96I51
  ENST ID: ENST00000610322
  CDS Start-End: 57-1451
gttaagggtcacgcaagatggcggcgcccagaggctgctgaggcgcggaacggaggatggcgctggtggcgttggtggctggggctcggctggggcggcggctgagcgggccggggctggggcgagggcactggacggcggccgggcgctcccggagccggcgcgaagcggcagaagccgaggcggaggtgcccgtggtccagtacgtgggcgagcgcgctgcccgcgccgatcgcgtcttcgtgtggggcttcagcttctcgggggcgctgggcgtgccttcctttgtggtgcccagctccgggcccgggccccgcgccggcgcccgaccgcgccgcaggatccagcccgtgccctatcgcctggagctggaccaaaagatttcatctgctgcttgcggctatggattcacactgctgtcctctaagactgcggatgttacgaaagtctgggggatgggactcaacaaagattctcagcttggatttcacaggagccggaaagataaaacgaggggctacgagtatgtgttggagccctcacccgtctccctgcctctggacagacctcaggagacacgggtgctgcaggtctcctgcggccgagctcactctcttgtgttgactgacagggaaggagtcttcagcatgggaaacaattcttatgggcaatgtggaagaaaggtggtcgaaaatgaaatttacagtgaaagtcacagagtccacaggatgcaggacttcgatggccaggtggtccaggtcgcctgtggtcaggatcatagtctgttcctgacggataaaggagaagtctattcttgtggatggggtgctgatgggcaaacaggtctgggtcactacaatatcaccagctcgcccaccaagctgggtggagacctggcgggagtgaacgttatccaagttgccacctacggtgattgctgcctggccgtgtccgccgacggaggactttttggttggggaaactcggagtacctgcagctggcctctgtcactgactccacacaggtgaatgtgccccgctgcttacacttctcaggagtggggaaggtgcgacaggctgcatgcggtggcacgggctgtgcagtgttaaacggagaaggacatgtttttgtctggggctatggaattcttgggaaaggtccaaacctagtggaaagtgccgtccctgaaatgattccacccactctctttggcttgacggagttcaacccagaaatccaggtttcccgcatccgatgtggactcagccactttgctgcactgaccaacaaaggagagctgtttgtatggggcaagaacatccgagggtgcctgggaatcggtcgcctggaggaccagtatttcccatggagggtgacgatgcctggggagcctgtggacgtggcatgtggcgtggaccacatggtgaccctggccaagtcattcatctaaacctccctcacctgcttgggcggccccgtcccgggaaccactggcactccttggcagaggccagcgcgtggccagccccccggggttcttggatggtggtggcggaggaccctgcgtgcagtgtgacgctctgtcctgaatcccttagcgggtacctaccaggaggatcagggcaaggtccctctccagctgcaggtgaggcctgcggaactcagcttggatggcagcctttggtgggccgctgtggcccgcacgtctctgttctctccaagtaacatgcgacggtgtctggtgtcacgtctcgcctgagaagcccgtcttaggaaagcttagcttgaacacagtgctcgggaggtttctgctctgtctgtcatggcagtctcttggtttgtgtctggccaaggccatgcgtgtgcctcggaccgagccccagcttaggcgagggagtcaggctggcttcggccctcggttttcattcaggccaccctgctcatggcccttcctggccgcctgccacaccgcaagctcgctggggggacactagaagcaccgtggcctgggattccatctggagctgtccgcaggcaccagccccagcctcccaccacgctcactgcctggcttggaaaagttaagaagcccctcaggaagagaatcgaggccaagttcctctgcgccgagggccccgagcatatccgccaaggctcagctgcagtgccaggcggaggaggaagatccagaaattgtgaacaatgtttgatttagtagcgtgacttgcctttccctttaaaaacatcttttacaaatctgtcttggaataaagtctattttctgccttttggtttttaa

SEQ ID NO: 200121 - DNA, 1409 bp, Homo sapiens
  Payload ID: 19476
  Gene Name: Williams-Beuren syndrome chromosome region 16
  Uniprot ID: Q96I51
  ENST ID: ENST00000618035
  CDS Start-End: 145-1221
acgcctccctgagccttgggctgccgtcagcgcctttgccttcaaccaggagtaaaagtggccgtagcctcttccggcgaggactggtgttaagggtcacgcaagatggcggcgcccagaggctgctgaggcgcggaacggaggatggcgctggtggcgttggtggctggggctcggctggggcggcggctgagcgggccggggctggggcgagggcactggacggcggccgggcgctcccggagccggcgcgaagcggcagaagccgaggcggaggtgcccgtggtccagtacgtgggcgagcgcgctgcccgcgccgatcgcgtcttcgtgtggggcttcagcttctcgggggcgctgggcgtgccttcctttgtggtgcccagctccgggcccgggccccgcgccggcgcccgaccgcgccgcaggatccagcccgtgccctatcgcctggagctggaccaaaagatttcatctgctgcttgcggctatggattcacactgctgtcctctaagactgcggatgttacgaaagtctgggggatgggactcaacaaagattctcagcttggatttcacaggagccggaaagataaaacgaggggctacgagtatgtgttggagccctcacccgtctccctgcctctggacagacctcaggagacacgggtgctgcaggtctcctgcggccgagctcactctcttgtgttgactgacagggaaggagtcttcagcatgggaaacaattcttatgggcaatgtggaagaaaggtggtcgaaaatgaaatttacagtgaaagtcacagagtccacaggatgcaggacttcgatggccaggtggtccaggtcgcctgtggtcaggatcatagtctgttcctgacggataaaggagaagtctattcttgtggatggggtgctgatgggcaaacaggtctgggtcactacaatatcaccagctcgcccaccaagctgggtggagacctggcgggagtgaacgttatccaagttgccacctacggtgattgctgcctggccgtgtccgccgacggaggactttttggttggggaaactcggagtacctgcagctggcctctgtcactgactccacacaggtgaatgtgccccgctgcttacacttctcaggagtggggaaggtgcgacaggctgcatgcggtggcacgggctgtgcagtgttaaacgatacatggccacagagctgagtcatcctagagcaaacctctggagtggagagcgaactacttcattcccctcccttagcctgggccagagagactccagctctgccttctccagccaaaaaatcaaaggcagatgggagaacagccttcagctttggataacgatgaaatatctggcaccactgatgaatattaaactttctataacc

SEQ ID NO: 200122 - DNA, 3884 bp, Homo sapiens
  Payload ID: 19477
  Gene Name: Williams-Beuren syndrome chromosome region 17
  Uniprot ID: Q6IS24
  ENST ID: ENST00000333538
  CDS Start-End: 635-2431
tggaggatgcgggctccccgagcgggcttcccctctgcccggcgcgatggagcgggtcggtgagcggaacaaaggcgcctgcccgggggagcgggtcttccgctgaagagcgcgggtggcgcgccgcgacggccgcctgcgggccaaggtgggaggctgtgcggccccaggcgcggcgcgctccgccgtgggcgggcggcgatccctgagtccggcacctgtgcgccgctccctctgtgcctcccgggcagccccgcctgccggcctcggagtccgcggcgccggcggctagaggtccagaggcgaaccacttgctggtgcagaagagaaaccctcaaatccctggcctttcgcggagacgcctggacggggccgtgcgccgtggactgagcaggcgtctcggggagcacttctgcagagcgaggacttccatgtgagcgattccgttctccccaccaccaatccgacctcccagccgtctccgccgcccgagcatccttgaggtgggacgagcaggggcttggatccctgccggccgtctggtgtgtgaggcttgcacggcccctggctgccccgcgcctcgccggagcccgagggggcgcaggtccggggcgagggccggccgggctgtttgatggcttcactgagaagagtcaaagtgctgttggtgttgaacttgatcgcggtagccggcttcgtgctcttcctggccaagtgccggcccatcgcggtgcgcagcggagacgccttccacgagatccggccgcgcgccgaggtggccaacctcagcgcgcacagcgccagccccatccaggatgcggtcctgaagcgcctgtcgctgctggaggacatcgtgtaccggcagctgaatggcttatccaaatcccttgggctcattgaaggttatggtgggcggggtaaagggggccttccggctactctttccccggctgaagaagaaaaggctaagggaccccatgagaagtatggctacaattcatacctcagtgaaaaaatttcactggaccgttccattccggattatcgtcccaccaagtgtaaggagctcaagtactccaaggacctgccccagatatccatcatattcatcttcgtgaacgaggccctgtcggtgatcctgcggtccgtgcacagtgccgtcaatcacacgcccacacacctgctgaaggaaatcattctggtggatgacaacagcgacgaagaggagctgaaggtccccctagaggagtatgtccacaaacgctaccccgggctggtgaaggtggtaagaaatcagaagagggaaggcctgatccgcgctcgcattgagggctggaaggtggctaccgggcaggtcactggcttctttgatgcccacgtggaattcaccgctggctgggctgagccggttctatcccgcatccaggaaaaccggaagcgtgtgatcctcccctccattgacaacatcaaacaggacaactttgaggtgcagcggtacgagaactcggcccacgggtacagctgggagctgtggtgcatgtacatcagccccccaaaagactggtgggacgccggagacccttctctccccatcaggaccccagccatgataggctgctcgttcgtggtcaacaggaagttcttcggtgaaattggtcttctggatcctggcatggatgtatacggaggagaaaatattgaactgggaatcaaggtatggctctgtgggggcagcatggaggtccttccttgctcacgggtggcccacattgagcggaagaagaagccatataatagcaacattggcttctacaccaagaggaatgctcttcgcgttgctgaggtctggatggacgattacaagtctcatgtgtacatagcgtggaacctgccgctggagaatccgggaattgacatcggtgatgtctccgaaagaagagcattaaggaaaagtttaaagtgtaagaatttccagtggtacctggaccatgtttacccagaaatgagaagatacaataataccgttgcttacggggagcttcgcaacaacaaggcaaaagacgtctgcttggaccaggggccgctggagaaccacacagcaatattgtatccgtgccatggctggggaccacagcttgcccgctacaccaaggaaggcttcctgcacttgggtgccctggggaccaccacactcctccctgacacccgctgcctggtggacaactccaagagtcggctgccccagctcctggactgcgacaaggtcaagagcagcctgtacaagcgctggaacttcatccagaatggagccatcatgaacaagggcacgggacgctgcctggaggtggagaaccggggcctggctggcatcgacctcatcctccgcagctgcacaggtcagaggtggaccattaagaactccatcaagtagagggagggagctggggcactggagcctggcccccaggacatggctgctccccccaacatctggaccagctgccctggcggagagacagcaaggggccggcaggtgctcgatgggccccccagggcttctccagggcagcacagggaccccggatgaagactctgtcccccctcaggcattcagctgcccacaagtttcctgcaccctggaaaagccccccacccttcctctgggaaactgacagctgtcttccacagcctctgatgtggacctggtactgaggagcaagactgtccagttctcctccacatctcccatcccagaatcaggatctgggactggcagggtcccctcctgtgtctcatctcttgcagcagcagctgctgaactccagccatcaacacggtgggaggcagcgggggcttcagccatgtcctagctccccgccctaaaaggaggcagtgaggaccaggcactatttcctccgaggttacttctacccagatgacacctgcctgttcacgccccaaggcagctactgcccctaacccttcccaccagggtagctttgggcactgcagctctggacttttctggcccctcctgagatgacctgatggagctgatgctttctctcctaatccctgggcactaggctcttatcagtgtgcttgggccagctctcctgcctgtgtctagaggaagccagagacagaaataggctaagcctgcagtaggatctcagccacaagggccccgcaggatggagctgggtcaaggaccagggagccctgactcccagaggctgccaccggggagaagcagcggtcctccatccagaacctaagggctgaagcaaaggctgccaggacccttgaagatgcttttggctcacctcatttcaccccacgctctgctggctggcagaggagaaggcagtcgtttcctctctgaagagtatttttttcgattgccctctggttagggtgcacatataaatcagagttaatatatgaacgcgtgtgcatgcacaagtgtgtgtgtgcctgcgtgctgtgcgtggcagggtgtgtgtgtgtgtgtctggctgtgcgttccggagtgtgtgacgatgctgacctagctgtgtggccttgggcttgctgcttcattactcacctggatggggacgagggatgagaagggtgtgggtttggccccatgtcactggccggaaggatgtgtctcagccctgccctgtggggtgcccccgatgggaggctgtcccatctcccagtccccatctctttttccccacactgtccctggccaagccctgcccagagctgaaccctgtagctgcccccttgccctgtgtgggattcgcagtgtctcatttggtgacgtcttactggtgatcatctcctcaccccatctcccaccttgtggaataaatacatgttagcacttccca

SEQ ID NO: 200123 - DNA, 566 bp, Homo sapiens
  Payload ID: 19477
  Gene Name: Williams-Beuren syndrome chromosome region 17
  ENST ID: ENST00000447516
  CDS Start-End: 1-566
ttgttggatttcaaaaccaagacgacaccacctcttggtgtgctggcagacacagagagaggactgtctgtcttccctcctgtgtccctctctgccacagctgaaatggctgatcttttcagaatcactgactgggggatgttcatgagcttggacaggataacaaatggaggcttatccaaatcccttgggctcattgaaggttatggtgggcggggtaaagggggccttccggctactctttccccggctgaagaagaaaaggctaagggaccccatgagaagtatggctacaattcatacctcagtgaaaaaatttcactggaccgttccattccggattatcgtcccaccaagtgtaaggagctcaagtactccaaggacctgccccagatatccatcatattcatcttcgtgaacgaggccctgtcggtgatcctgcggtccgtgcacagtgccgtcaatcacacgcccacacacctgctgaaggaaatcattctggtggatgacaacagcgacgaagaggagctgaaggtccccctagaggagtatgtccacaaacgcta

SEQ ID NO: 200124 - DNA, 3012 bp, Homo sapiens
  Payload ID: 19477
  Gene Name: Williams-Beuren syndrome chromosome region 17
  ENST ID: ENST00000618959
  CDS Start-End: 1-1560
ggcttatccaaatcccttgggctcattgaaggttatggtgggcggggtaaagggggccttccggctactctttccccggctgaagaagaaaaggctaagggaccccatgagaagtatggctacaattcatacctcagtgaaaaaatttcactggaccgttccattccggattatcgtcccaccaagtgtaaggagctcaagtactccaaggacctgccccagatatccatcatattcatcttcgtgaacgaggccctgtcggtgatcctgcggtccgtgcacagtgccgtcaatcacacgcccacacacctgctgaaggaaatcattctggtggatgacaacagcgacgaagaggagctgaaggtccccctagaggagtatgtccacaaacgctaccccgggctggtgaaggtggtaagaaatcagaagagggaaggcctgatccgcgctcgcattgagggctggaaggtggctaccgggcaggtcactggcttctttgatgcccacgtggaattcaccgctggctgggctgagccggttctatcccgcatccaggaaaaccggaagcgtgtgatcctcccctccattgacaacatcaaacaggacaactttgaggtgcagcggtacgagaactcggcccacgggtacagctgggagctgtggtgcatgtacatcagccccccaaaagactggtgggacgccggagacccttctctccccatcaggaccccagccatgataggctgctcgttcgtggtcaacaggaagttcttcggtgaaattggtcttctggatcctggcatggatgtatacggaggagaaaatattgaactgggaatcaaggtatggctctgtgggggcagcatggaggtccttccttgctcacgggtggcccacattgagcggaagaagaagccatataatagcaacattggcttctacaccaagaggaatgctcttcgcgttgctgaggtctggatggacgattacaagtctcatgtgtacatagcgtggaacctgccgctggagaatccgggaattgacatcggtgatgtctccgaaagaagagcattaaggaaaagtttaaagtgtaagaatttccagtggtacctggaccatgtttacccagaaatgagaagatacaataataccgttgcttacggggagcttcgcaacaacaaggcaaaagacgtctgcttggaccaggggccgctggagaaccacacagcaatattgtatccgtgccatggctggggaccacagcttgcccgctacaccaaggaaggcttcctgcacttgggtgccctggggaccaccacactcctccctgacacccgctgcctggtggacaactccaagagtcggctgccccagctcctggactgcgacaaggtcaagagcagcctgtacaagcgctggaacttcatccagaatggagccatcatgaacaagggcacgggacgctgcctggaggtggagaaccggggcctggctggcatcgacctcatcctccgcagctgcacaggtcagaggtggaccattaagaactccatcaagtagagggagggagctggggcactggagcctggcccccaggacatggctgctccccccaacatctggaccagctgccctggcggagagacagcaaggggccggcaggtgctcgatgggccccccagggcttctccagggcagcacagggaccccggatgaagactctgtcccccctcaggcattcagctgcccacaagtttcctgcaccctggaaaagccccccacccttcctctgggaaactgacagctgtcttccacagcctctgatgtggacctggtactgaggagcaagactgtccagttctcctccacatctcccatcccagaatcaggatctgggactggcagggtcccctcctgtgtctcatctcttgcagcagcagctgctgaactccagccatcaacacggtgggaggcagcgggggcttcagccatgtcctagctccccgccctaaaaggaggcagtgaggaccaggcactatttcctccgaggttacttctacccagatgacacctgcctgttcacgccccaaggcagctactgcccctaacccttcccaccagggtagctttgggcactgcagctctggacttttctggcccctcctgagatgacctgatggagctgatgctttctctcctaatccctgggcactaggctcttatcagtgtgcttgggccagctctcctgcctgtgtctagaggaagccagagacagaaataggctaagcctgcagtaggatctcagccacaagggccccgcaggatggagctgggtcaaggaccagggagccctgactcccagaggctgccaccggggagaagcagcggtcctccatccagaacctaagggctgaagcaaaggctgccaggacccttgaagatgcttttggctcacctcatttcaccccacgctctgctggctggcagaggagaaggcagtcgtttcctctctgaagagtatttttttcgattgccctctggttagggtgcacatataaatcagagttaatatatgaacgcgtgtgcatgcacaagtgtgtgtgtgcctgcgtgctgtgcgtggcagggtgtgtgtgtgtgtgtctggctgtgcgttccggagtgtgtgacgatgctgacctagctgtgtggccttgggcttgctgcttcattactcacctggatggggacgagggatgagaagggtgtgggtttggccccatgtcactggccggaaggatgtgtctcagccctgccctgtggggtgcccccgatgggaggctgtcccatctcccagtccccatctctttttccccacactgtccctggccaagccctgcccagagctgaaccctgtagctgcccccttgccctgtgtgggattcgcagtgtctcatttggtgacgtcttactggtgatcatctcctcaccccatctcccaccttgtggaataaatacatgttagcacttccc

SEQ ID NO: 200125 - DNA, 854 bp, Homo sapiens
  Payload ID: 19478
  Gene Name: Williams-Beuren syndrome chromosome region 28
  Uniprot ID: Q6UE05
  ENST ID: ENST00000320531
  CDS Start-End: 37-834
gcttctcccagctggagtaggtgggggaggccagacatggaggcccttcctccagtcagatccagccttttggggatcctgttgcaggttacgaggctctcagtgctgttggttcagaaccgagatcacctctataatttcctgctcctcaagatcaacctcttcaaccactgggtgtcagggctggcccaggaggcccgggggtcctgtaactggcaggcccacctacccctgggagctgcagcctgccccctgggccaggctctctgggctgggctggctctgatacaggtccccgtatggctggtgctacagggacccaggctgatgtgggctggcatgtggggcagcaccaagggcctgggcctggccttgctcagtgcctgggagcagctgggcctgtctgtggccatctggacagatctgtttttgtcatgtctgcacggcctgatgttggtggccttgctcttggtggtagtgacctggagggtgtgtcagaagtcccactgcttccgactgggcaggcagctcagtaaggccttgcaagtgaactgcgtggtaaggaagctcctggtacagctgagacgtctgtattggtgggtggagactatgactgccctcacctcctggcacctggcctatctcatcacctggaccacctgcctggcctcccacctgctgcaggctgcctttgagcacacgacccagctggccgaggcccaggaggttgaaccccaggaggtctcagggtcttccttgctgccctcactgtctgcgtcctcggactcagagtctggaacagttttgccagagcaagaaactcccagagaataaatgtatccccatctgcctct

SEQ ID NO: 200126 - DNA, 961 bp, Homo sapiens
  Payload ID: 19478
  Gene Name: Williams-Beuren syndrome chromosome region 28
  Uniprot ID: Q6UE05
  ENST ID: ENST00000426490
  CDS Start-End: 24-206
ggagtaggtgggggaggccagacatggaggcccttcctccagtcagatccagccttttggggatcctgttgcaggttacgaggctctcagtgctgagacagggtctcgctctgtcgcccagcctggagcgcagtggtgccggctcagctcgttgcagcctccaactcccggtctcaagcaatcctcccccctcagcctccaagtagccgggactatagttggttcagaaccgagatcacctctataatttcctgctcctcaagatcaacctcttcaaccactgggtgtcagggctggcccaggaggcccgggggtcctgtaactggcaggcccacctacccctgggagctgcagcctgccccctgggccaggctctctgggctgggctggctctgatacaggtccccgtatggctggtgctacagggacccaggctgatgtgggctggcatgtggggcagcaccaagggcctgggcctggccttgctcagtgcctgggagcagctgggcctgtctgtggccatctggacagatctgtttttgtcatgtctgcacggcctgatgttggtggccttgctcttggtggtagtgacctggagggtgtgtcagaagtcccactgcttccgactgggcaggcagctcagtaaggccttgcaagtgaactgcgtggtaaggaagctcctggtacagctgagacgtctgtattggtgggtggagactatgactgccctcacctcctggcacctggcctatctcatcacctggaccacctgcctggcctcccacctgctgcaggctgcctttgagcacacgacccagctggccgaggcccaggaggttgaaccccaggaggtctcagggtcttccttgctgccctcactgtctgcgtcctcggactcagagtctggaacagttttgccagagcaagaaactcccagagaataaatgtatccccatctgcc

SEQ ID NO: 200127 - DNA, 3122 bp, Homo sapiens
  Payload ID: 19479
  Gene Name: Wilms tumor 1
  ENST ID: ENST00000332351
  CDS Start-End: 286-1839
tgagtgaatggagcggccgagcctcctggctcctcctcttccccgcgccgccggcccctcttatttgagctttgggaagctgagggcagccaggcagctggggtaaggagttcaaggcagcgcccacacccgggggctctccgcaacccgaccgcctgtccgctcccccacttcccgccctccctcccacctactcattcacccacccacccacccagagccgggacggcagcccaggcgcccgggccccgccgtctcctcgccgcgatcctggacttcctcttgctgcaggacccggcttccacgtgtgtcccggagccggcgtctcagcacacgctccgctccgggcctgggtgcctacagcagccagagcagcagggagtccgggacccgggcggcatctgggccaagttaggcgccgccgaggccagcgctgaacgtctccagggccggaggagccgcggggcgtccgggtctgagccgcagcaaatgggctccgacgtgcgggacctgaacgcgctgctgcccgccgtcccctccctgggtggcggcggcggctgtgccctgcctgtgagcggcgcggcgcagtgggcgccggtgctggactttgcgcccccgggcgcttcggcttacgggtcgttgggcggccccgcgccgccaccggctccgccgccacccccgccgccgccgcctcactccttcatcaaacaggagccgagctggggcggcgcggagccgcacgaggagcagtgcctgagcgccttcactgtccacttttccggccagttcactggcacagccggagcctgtcgctacgggcccttcggtcctcctccgcccagccaggcgtcatccggccaggccaggatgtttcctaacgcgccctacctgcccagctgcctcgagagccagcccgctattcgcaatcagggttacagcacggtcaccttcgacgggacgcccagctacggtcacacgccctcgcaccatgcggcgcagttccccaaccactcattcaagcatgaggatcccatgggccagcagggctcgctgggtgagcagcagtactcggtgccgcccccggtctatggctgccacacccccaccgacagctgcaccggcagccaggctttgctgctgaggacgccctacagcagtgacaatttataccaaatgacatcccagcttgaatgcatgacctggaatcagatgaacttaggagccaccttaaagggagttgctgctgggagctccagctcagtgaaatggacagaagggcagagcaaccacagcacagggtacgagagcgataaccacacaacgcccatcctctgcggagcccaatacagaatacacacgcacggtgtcttcagaggcattcaggatgtgcgacgtgtgcctggagtagccccgactcttgtacggtcggcatctgagaccagtgagaaacgccccttcatgtgtgcttacccaggctgcaataagagatattttaagctgtcccacttacagatgcacagcaggaagcacactggtgagaaaccataccagtgtgacttcaaggactgtgaacgaaggttttctcgttcagaccagctcaaaagacaccaaaggagacatacaggtgtgaaaccattccagtgtaaaacttgtcagcgaaagttctcccggtccgaccacctgaagacccacaccaggactcatacaggtaaaacaagtgaaaagcccttcagctgtcggtggccaagttgtcagaaaaagtttgcccggtcagatgaattagtccgccatcacaacatgcatcagagaaacatgaccaaactccagctggcgctttgaggggtctccctcggggaccgttcagtgtcccaggcagcacagtgtgtgaactgctttcaagtctgactctccactcctcctcactaaaaaggaaacttcagttgatcttcttcatccaacttccaagacaagataccggtgcttctggaaactaccaggtgtgcctggaagagttggtctctgccctgcctacttttagttgactcacaggccctggagaagcagctaacaatgtctggttagttaaaagcccattgccatttggtgtggattttctactgtaagaagagccatagctgatcatgtccccctgacccttcccttctttttttatgctcgttttcgctggggatggaattattgtaccattttctatcatggaatatttataggccagggcatgtgtatgtgtctgctaatgtaaactttgtcatggtttccatttactaacagcaacagcaagaaataaatcagagagcaaggcatcgggggtgaatcttgtctaacattcccgaggtcagccaggctgctaacctggaaagcaggatgtagttctgccaggcaacttttaaagctcatgcatttcaagcagctgaagaaaaaatcagaactaaccagtacctctgtatagaaatctaaaagaattttaccattcagttaattcaatgtgaacactggcacactgctcttaagaaactatgaagatctgagatttttttgtgtatgtttttgactcttttgagtggtaatcatatgtgtctttatagatgtacatacctccttgcacaaatggaggggaattcattttcatcactgggagtgtccttagtgtataaaaaccatgctggtatatggcttcaagttgtaaaaatgaaagtgactttaaaagaaaataggggatggtccaggatctccactgataagactgtttttaagtaacttaaggacctttgggtctacaagtatatgtgaaaaaaatgagacttactgggtgaggaaatccattgtttaaagatggtcgtgtgtgtgtgtgtgtgtgtgtgtgtgtgtgtgttgtgttgtgttttgttttttaagggagggaatttattatttaccgttgcttgaaattactgtgtaaatatatgtctgataatgatttgctctttgacaactaaaattaggactgtataagtactagatgcatcactgggtgttgatcttacaagatattgatgataacacttaaaattgtaacctgcatttttcactttgctctcaattaaagtctattcaaaaggaaa

SEQ ID NO: 200128 - DNA, 3032 bp, Homo sapiens
  Payload ID: 19479
  Gene Name: Wilms tumor 1
  ENST ID: ENST00000379077
  CDS Start-End: 43-996
gggccccgccgtctcctcgccgcgatcctggacttcctcttgctgcaggacccggcttccacgtgtgtcccggagccggcgtctcagcacacgctccgctccgggcctgggtgcctacagcagccagagcagcagggagtccgggacccgggcggcatctgggccaagttaggcgccgccgaggccagcgctgaacgtctccagggccggaggagccgcggggcgtccgggtctgagccgcagcaaatgggctccgacgtgcgggacctgaacgcgctgctgcccgccgtcccctccctgggtggcggcggcggctgtgccctgcctgtgagcggcgcggcgcagtgggcgccggtgctggactttgcgcccccgggcgcttcggcttacgggtcgttgggcggccccgcgccgccaccggctccgccgccacccccgccgccgccgcctcactccttcatcaaacaggagccgagctggggcggcgcggagccgcacgaggagcagtgcctgagcgccttcactgtccacttttccggccagttcactggcacagccggagcctgtcgctacgggcccttcggtcctcctccgcccagccaggcgtcatccggccaggccaggatgtttcctaacgcgccctacctgcccagctgcctcgagagccagcccgctattcgcaatcagggttacagcacggtcaccttcgacgggacgcccagctacggtcacacgccctcgcaccatgcggcgcagttccccaaccactcattcaagcatgaggatcccatgggccagcagggctcgctgggtgagcagcagtactcggtgccgcccccggtctatggctgccacacccccaccgacagctgcaccggcagccaggctttgctgctgaggacgccctacagcagtgacaatttataccaaatgacatcccagcttgaatgcatgacctggaatcagatgaacttaggagccaccttaaaggggtaaggttttctctattccattgcctttccacagtaacttatacctgtttgaaccatttcaaaggtgcttagaacttatgaagaaagtacagttttagaagaaagggcaaagctctctgtgacattagaacgctttcctccttcccctagttgagttgctgctgggagctccagctcagtgaaatggacagaagggcagagcaaccacagcacagggtacgagagcgataaccacacaacgcccatcctctgcggagcccaatacagaatacacacgcacggtgtcttcagaggcattcaggatgtgcgacgtgtgcctggagtagccccgactcttgtacggtcggcatctgagaccagtgagaaacgccccttcatgtgtgcttacccaggctgcaataagagatattttaagctgtcccacttacagatgcacagcaggaagcacactggtgagaaaccataccagtgtgacttcaaggactgtgaacgaaggttttctcgttcagaccagctcaaaagacaccaaaggagacatacaggtgtgaaaccattccagtgtaaaacttgtcagcgaaagttctcccggtccgaccacctgaagacccacaccaggactcatacaggtaaaacaagtgaaaagcccttcagctgtcggtggccaagttgtcagaaaaagtttgcccggtcagatgaattagtccgccatcacaacatgcatcagagaaacatgaccaaactccagctggcgctttgaggggtctccctcggggaccgttcagtgtcccaggcagcacagtgtgtgaactgctttcaagtctgactctccactcctcctcactaaaaaggaaacttcagttgatcttcttcatccaacttccaagacaagataccggtgcttctggaaactaccaggtgtgcctggaagagttggtctctgccctgcctacttttagttgactcacaggccctggagaagcagctaacaatgtctggttagttaaaagcccattgccatttggtgtggattttctactgtaagaagagccatagctgatcatgtccccctgacccttcccttctttttttatgctcgttttcgctggggatggaattattgtaccattttctatcatggaatatttataggccagggcatgtgtatgtgtctgctaatgtaaactttgtcatggtttccatttactaacagcaacagcaagaaataaatcagagagcaaggcatcgggggtgaatcttgtctaacattcccgaggtcagccaggctgctaacctggaaagcaggatgtagttctgccaggcaacttttaaagctcatgcatttcaagcagctgaagaaaaaatcagaactaaccagtacctctgtatagaaatctaaaagaattttaccattcagttaattcaatgtgaacactggcacactgctcttaagaaactatgaagatctgagatttttttgtgtatgtttttgactcttttgagtggtaatcatatgtgtctttatagatgtacatacctccttgcacaaatggaggggaattcattttcatcactgggagtgtccttagtgtataaaaaccatgctggtatatggcttcaagttgtaaaaatgaaagtgactttaaaagaaaataggggatggtccaggatctccactgataagactgtttttaagtaacttaaggacctttgggtctacaagtatatgtgaaaaaaatgagacttactgggtgaggaaatccattgtttaaagatggtcgtgtgtgtgtgtgtgtgtgtgtgtgtgtgtgtgttgtgttgtgttttgttttttaagggagggaatttattatttaccgttgcttgaaattactgtgtaaatatatgtctgataatgatttgctctttgacaactaaaattaggactgtataagtactagatgcatcactgggtgttgatcttacaagatattgatgataacacttaaaattgtaacctgcatttttcactttgctctcaattaaagtctattcaaaaggaaa

SEQ ID NO: 200129 - DNA, 2466 bp, Homo sapiens
  Payload ID: 19479
  Gene Name: Wilms tumor 1
  Uniprot ID: P19544
  ENST ID: ENST00000379079
  CDS Start-End: 275-1183
gctttcaccactgcccctcccggggggacctgaaggagagggtttgaggccggtctttgcccgccgaggtctgcgtgtccggtctgggaggaggcctaggagggctcgcgggccacgggcatccttgggcccgagttctggggtgcggacggacgtctcgagagtgggtgccgcgactcgggacccacggccctcgccgggcacggacagttgcggagcagggctctgaggattgtgcagtgccctgggtccctgcctactcctgggctcaggaatggagaagggttacagcacggtcaccttcgacgggacgcccagctacggtcacacgccctcgcaccatgcggcgcagttccccaaccactcattcaagcatgaggatcccatgggccagcagggctcgctgggtgagcagcagtactcggtgccgcccccggtctatggctgccacacccccaccgacagctgcaccggcagccaggctttgctgctgaggacgccctacagcagtgacaatttataccaaatgacatcccagcttgaatgcatgacctggaatcagatgaacttaggagccaccttaaagggagttgctgctgggagctccagctcagtgaaatggacagaagggcagagcaaccacagcacagggtacgagagcgataaccacacaacgcccatcctctgcggagcccaatacagaatacacacgcacggtgtcttcagaggcattcaggatgtgcgacgtgtgcctggagtagccccgactcttgtacggtcggcatctgagaccagtgagaaacgccccttcatgtgtgcttacccaggctgcaataagagatattttaagctgtcccacttacagatgcacagcaggaagcacactggtgagaaaccataccagtgtgacttcaaggactgtgaacgaaggttttctcgttcagaccagctcaaaagacaccaaaggagacatacaggtgtgaaaccattccagtgtaaaacttgtcagcgaaagttctcccggtccgaccacctgaagacccacaccaggactcatacaggtgaaaagcccttcagctgtcggtggccaagttgtcagaaaaagtttgcccggtcagatgaattagtccgccatcacaacatgcatcagagaaacatgaccaaactccagctggcgctttgaggggtctccctcggggaccgttcagtgtcccaggcagcacagtgtgtgaactgctttcaagtctgactctccactcctcctcactaaaaaggaaacttcagttgatcttcttcatccaacttccaagacaagataccggtgcttctggaaactaccaggtgtgcctggaagagttggtctctgccctgcctacttttagttgactcacaggccctggagaagcagctaacaatgtctggttagttaaaagcccattgccatttggtgtggattttctactgtaagaagagccatagctgatcatgtccccctgacccttcccttctttttttatgctcgttttcgctggggatggaattattgtaccattttctatcatggaatatttataggccagggcatgtgtatgtgtctgctaatgtaaactttgtcatggtttccatttactaacagcaacagcaagaaataaatcagagagcaaggcatcgggggtgaatcttgtctaacattcccgaggtcagccaggctgctaacctggaaagcaggatgtagttctgccaggcaacttttaaagctcatgcatttcaagcagctgaagaaaaaatcagaactaaccagtacctctgtatagaaatctaaaagaattttaccattcagttaattcaatgtgaacactggcacactgctcttaagaaactatgaagatctgagatttttttgtgtatgtttttgactcttttgagtggtaatcatatgtgtctttatagatgtacatacctccttgcacaaatggaggggaattcattttcatcactgggagtgtccttagtgtataaaaaccatgctggtatatggcttcaagttgtaaaaatgaaagtgactttaaaagaaaataggggatggtccaggatctccactgataagactgtttttaagtaacttaaggacctttgggtctacaagtatatgtgaaaaaaatgagacttactgggtgaggaaatccattgtttaaagatggtcgtgtgtgtgtgtgtgtgtgtgtgtgtgtgtgtgttgtgttgtgttttgttttttaagggagggaatttattatttaccgttgcttgaaattactgtgtaaatatatgtctgataatgatttgctctttgacaactaaaattaggactgtataagtactagatgcatcactgggtgttgatcttacaagatattgatgataacacttaaaattgtaacctgcatttttcactttgctctcaattaaagtctattcaaaaggaaa

SEQ ID NO: 200130 - DNA, 2114 bp, Homo sapiens
  Payload ID: 19479
  Gene Name: Wilms tumor 1
  ENST ID: ENST00000448076
  CDS Start-End: 191-1735
agctggggtaaggagttcaaggcagcgcccacacccgggggctctccgcaacccgaccgcctgtccgctcccccacttcccgccctccctcccacctactcattcacccacccacccacccagagccgggacggcagcccaggcgcccgggccccgccgtctcctcgccgcgatcctggacttcctcttgctgcaggacccggcttccacgtgtgtcccggagccggcgtctcagcacacgctccgctccgggcctgggtgcctacagcagccagagcagcagggagtccgggacccgggcggcatctgggccaagttaggcgccgccgaggccagcgctgaacgtctccagggccggaggagccgcggggcgtccgggtctgagccgcagcaaatgggctccgacgtgcgggacctgaacgcgctgctgcccgccgtcccctccctgggtggcggcggcggctgtgccctgcctgtgagcggcgcggcgcagtgggcgccggtgctggactttgcgcccccgggcgcttcggcttacgggtcgttgggcggccccgcgccgccaccggctccgccgccacccccgccgccgccgcctcactccttcatcaaacaggagccgagctggggcggcgcggagccgcacgaggagcagtgcctgagcgccttcactgtccacttttccggccagttcactggcacagccggagcctgtcgctacgggcccttcggtcctcctccgcccagccaggcgtcatccggccaggccaggatgtttcctaacgcgccctacctgcccagctgcctcgagagccagcccgctattcgcaatcagggttacagcacggtcaccttcgacgggacgcccagctacggtcacacgccctcgcaccatgcggcgcagttccccaaccactcattcaagcatgaggatcccatgggccagcagggctcgctgggtgagcagcagtactcggtgccgcccccggtctatggctgccacacccccaccgacagctgcaccggcagccaggctttgctgctgaggacgccctacagcagtgacaatttataccaaatgacatcccagcttgaatgcatgacctggaatcagatgaacttaggagccaccttaaagggagttgctgctgggagctccagctcagtgaaatggacagaagggcagagcaaccacagcacagggtacgagagcgataaccacacaacgcccatcctctgcggagcccaatacagaatacacacgcacggtgtcttcagaggcattcaggatgtgcgacgtgtgcctggagtagccccgactcttgtacggtcggcatctgagaccagtgagaaacgccccttcatgtgtgcttacccaggctgcaataagagatattttaagctgtcccacttacagatgcacagcaggaagcacactggtgagaaaccataccagtgtgacttcaaggactgtgaacgaaggttttctcgttcagaccagctcaaaagacaccaaaggagacatacaggtgtgaaaccattccagtgtaaaacttgtcagcgaaagttctcccggtccgaccacctgaagacccacaccaggactcatacaggtgaaaagcccttcagctgtcggtggccaagttgtcagaaaaagtttgcccggtcagatgaattagtccgccatcacaacatgcatcagagaaacatgaccaaactccagctggcgctttgaggggtctccctcggggaccgttcagtgtcccaggcagcacagtgtgtgaactgctttcaagtctgactctccactcctcctcactaaaaaggaaacttcagttgatcttcttcatccaacttccaagacaagataccggtgcttctggaaactaccaggtgtgcctggaagagttggtctctgccctgcctacttttagttgactcacaggccctggagaagcagctaacaatgtctggttagttaaaagcccattgccatttggtgtggattttctactgtaagaagagccatagctgatcatgtccccctgacccttcccttctttttttatgctcgttttcgctggggatggaattattgtaccattttctatcat

SEQ ID NO: 200131 - DNA, 2768 bp, Homo sapiens
  Payload ID: 19479
  Gene Name: Wilms tumor 1
  ENST ID: ENST00000452863
  CDS Start-End: 1-1494
ctgcaggacccggcttccacgtgtgtcccggagccggcgtctcagcacacgctccgctccgggcctgggtgcctacagcagccagagcagcagggagtccgggacccgggcggcatctgggccaagttaggcgccgccgaggccagcgctgaacgtctccagggccggaggagccgcggggcgtccgggtctgagccgcagcaaatgggctccgacgtgcgggacctgaacgcgctgctgcccgccgtcccctccctgggtggcggcggcggctgtgccctgcctgtgagcggcgcggcgcagtgggcgccggtgctggactttgcgcccccgggcgcttcggcttacgggtcgttgggcggccccgcgccgccaccggctccgccgccacccccgccgccgccgcctcactccttcatcaaacaggagccgagctggggcggcgcggagccgcacgaggagcagtgcctgagcgccttcactgtccacttttccggccagttcactggcacagccggagcctgtcgctacgggcccttcggtcctcctccgcccagccaggcgtcatccggccaggccaggatgtttcctaacgcgccctacctgcccagctgcctcgagagccagcccgctattcgcaatcagggttacagcacggtcaccttcgacgggacgcccagctacggtcacacgccctcgcaccatgcggcgcagttccccaaccactcattcaagcatgaggatcccatgggccagcagggctcgctgggtgagcagcagtactcggtgccgcccccggtctatggctgccacacccccaccgacagctgcaccggcagccaggctttgctgctgaggacgccctacagcagtgacaatttataccaaatgacatcccagcttgaatgcatgacctggaatcagatgaacttaggagccaccttaaagggccacagcacagggtacgagagcgataaccacacaacgcccatcctctgcggagcccaatacagaatacacacgcacggtgtcttcagaggcattcaggatgtgcgacgtgtgcctggagtagccccgactcttgtacggtcggcatctgagaccagtgagaaacgccccttcatgtgtgcttacccaggctgcaataagagatattttaagctgtcccacttacagatgcacagcaggaagcacactggtgagaaaccataccagtgtgacttcaaggactgtgaacgaaggttttctcgttcagaccagctcaaaagacaccaaaggagacatacaggtgtgaaaccattccagtgtaaaacttgtcagcgaaagttctcccggtccgaccacctgaagacccacaccaggactcatacaggtgaaaagcccttcagctgtcggtggccaagttgtcagaaaaagtttgcccggtcagatgaattagtccgccatcacaacatgcatcagagaaacatgaccaaactccagctggcgctttgaggggtctccctcggggaccgttcagtgtcccaggcagcacagtgtgtgaactgctttcaagtctgactctccactcctcctcactaaaaaggaaacttcagttgatcttcttcatccaacttccaagacaagataccggtgcttctggaaactaccaggtgtgcctggaagagttggtctctgccctgcctacttttagttgactcacaggccctggagaagcagctaacaatgtctggttagttaaaagcccattgccatttggtgtggattttctactgtaagaagagccatagctgatcatgtccccctgacccttcccttctttttttatgctcgttttcgctggggatggaattattgtaccattttctatcatggaatatttataggccagggcatgtgtatgtgtctgctaatgtaaactttgtcatggtttccatttactaacagcaacagcaagaaataaatcagagagcaaggcatcgggggtgaatcttgtctaacattcccgaggtcagccaggctgctaacctggaaagcaggatgtagttctgccaggcaacttttaaagctcatgcatttcaagcagctgaagaaaaaatcagaactaaccagtacctctgtatagaaatctaaaagaattttaccattcagttaattcaatgtgaacactggcacactgctcttaagaaactatgaagatctgagatttttttgtgtatgtttttgactcttttgagtggtaatcatatgtgtctttatagatgtacatacctccttgcacaaatggaggggaattcattttcatcactgggagtgtccttagtgtataaaaaccatgctggtatatggcttcaagttgtaaaaatgaaagtgactttaaaagaaaataggggatggtccaggatctccactgataagactgtttttaagtaacttaaggacctttgggtctacaagtatatgtgaaaaaaatgagacttactgggtgaggaaatccattgtttaaagatggtcgtgtgtgtgtgtgtgtgtgtgtgtgtgtgtgtgttgtgttgtgttttgttttttaagggagggaatttattatttaccgttgcttgaaattactgtgtaaatatatgtctgataatgatttgctctttgacaactaaaattaggactgtataagtactagatgcatcactgggtgttgatcttacaagatattgatgataacacttaaaattgtaacctgcatttttcactttgctctcaattaaagtctattc

SEQ ID NO: 200132 - DNA, 2421 bp, Homo sapiens
  Payload ID: 19479
  Gene Name: Wilms tumor 1
  Uniprot ID: P19544
  ENST ID: ENST00000530998
  CDS Start-End: 275-1141
gctttcaccactgcccctcccggggggacctgaaggagagggtttgaggccggtctttgcccgccgaggtctgcgtgtccggtctgggaggaggcctaggagggctcgcgggccacgggcatccttgggcccgagttctggggtgcggacggacgtctcgagagtgggtgccgcgactcgggacccacggccctcgccgggcacggacagttgcggagcagggctctgaggattgtgcagtgccctgggtccctgcctactcctgggctcaggaatggagaagggttacagcacggtcaccttcgacgggacgcccagctacggtcacacgccctcgcaccatgcggcgcagttccccaaccactcattcaagcatgaggatcccatgggccagcagggctcgctgggtgagcagcagtactcggtgccgcccccggtctatggctgccacacccccaccgacagctgcaccggcagccaggctttgctgctgaggacgccctacagcagtgacaatttataccaaatgacatcccagcttgaatgcatgacctggaatcagatgaacttaggagccaccttaaagggccacagcacagggtacgagagcgataaccacacaacgcccatcctctgcggagcccaatacagaatacacacgcacggtgtcttcagaggcattcaggatgtgcgacgtgtgcctggagtagccccgactcttgtacggtcggcatctgagaccagtgagaaacgccccttcatgtgtgcttacccaggctgcaataagagatattttaagctgtcccacttacagatgcacagcaggaagcacactggtgagaaaccataccagtgtgacttcaaggactgtgaacgaaggttttctcgttcagaccagctcaaaagacaccaaaggagacatacaggtgtgaaaccattccagtgtaaaacttgtcagcgaaagttctcccggtccgaccacctgaagacccacaccaggactcatacaggtaaaacaagtgaaaagcccttcagctgtcggtggccaagttgtcagaaaaagtttgcccggtcagatgaattagtccgccatcacaacatgcatcagagaaacatgaccaaactccagctggcgctttgaggggtctccctcggggaccgttcagtgtcccaggcagcacagtgtgtgaactgctttcaagtctgactctccactcctcctcactaaaaaggaaacttcagttgatcttcttcatccaacttccaagacaagataccggtgcttctggaaactaccaggtgtgcctggaagagttggtctctgccctgcctacttttagttgactcacaggccctggagaagcagctaacaatgtctggttagttaaaagcccattgccatttggtgtggattttctactgtaagaagagccatagctgatcatgtccccctgacccttcccttctttttttatgctcgttttcgctggggatggaattattgtaccattttctatcatggaatatttataggccagggcatgtgtatgtgtctgctaatgtaaactttgtcatggtttccatttactaacagcaacagcaagaaataaatcagagagcaaggcatcgggggtgaatcttgtctaacattcccgaggtcagccaggctgctaacctggaaagcaggatgtagttctgccaggcaacttttaaagctcatgcatttcaagcagctgaagaaaaaatcagaactaaccagtacctctgtatagaaatctaaaagaattttaccattcagttaattcaatgtgaacactggcacactgctcttaagaaactatgaagatctgagatttttttgtgtatgtttttgactcttttgagtggtaatcatatgtgtctttatagatgtacatacctccttgcacaaatggaggggaattcattttcatcactgggagtgtccttagtgtataaaaaccatgctggtatatggcttcaagttgtaaaaatgaaagtgactttaaaagaaaataggggatggtccaggatctccactgataagactgtttttaagtaacttaaggacctttgggtctacaagtatatgtgaaaaaaatgagacttactgggtgaggaaatccattgtttaaagatggtcgtgtgtgtgtgtgtgtgtgtgtgtgtgtgtgtgttgtgttgtgttttgttttttaagggagggaatttattatttaccgttgcttgaaattactgtgtaaatatatgtctgataatgatttgctctttgacaactaaaattaggactgtataagtactagatgcatcactgggtgttgatcttacaagatattgatgataacacttaaaattgtaacctgcatttttcactttgctctcaattaaagtctattcaaaagg

SEQ ID NO: 200133 - DNA, 578 bp, Homo sapiens
  Payload ID: 19479
  Gene Name: Wilms tumor 1
  ENST ID: ENST00000527775
  CDS Start-End: 186-578
agattcatttcgcttgcccgcgctgctcctgcggaagagctgcagtttatttttggggggtgaacaaccttctctgtcgatcaggttacagcacggtcaccttcgacgggacgcccagctacggtcacacgccctcgcaccatgcggcgcagttccccaaccactcattcaagcatgaggatcccatgggccagcagggctcgctgggtgagcagcagtactcggtgccgcccccggtctatggctgccacacccccaccgacagctgcaccggcagccaggctttgctgctgaggacgccctacagcagtgacaatttataccaaatgacatcccagcttgaatgcatgacctggaatcagatgaacttaggagccaccttaaagggagttgctgctgggagctccagctcagtgaaatggacagaagggcagagcaaccacagcacagggtacgagagcgataaccacacaacgcccatcctctgcggagcccaatacagaatacacacgcacggtgtcttcagaggcattcaggatgtgcgacgtgtgcctggagtagccccgactcttgtacgg

SEQ ID NO: 200134 - DNA, 551 bp, Homo sapiens
  Payload ID: 19479
  Gene Name: Wilms tumor 1
  ENST ID: ENST00000527882
  CDS Start-End: 1-535
cttaggagccaccttaaagggagttgctgctgggagctccagctcagtgaaatggacagaagggcagagcaaccacagcacagggtacgagagcgataaccacacaacgcccatcctctgcggagcccaatacagaatacacacgcacggtgtcttcagaggcattcaggatgtgcgacgtgtgcctggagtagccccgactcttgtacggtcggcatctgagaccagtgagaaacgccccttcatgtgtgcttacccaggctgcaataagagatattttaagctgtcccacttacagatgcacagcaggaagcacactggtgtgaaaccattccagtgtaaaacttgtcagcgaaagttctcccggtccgaccacctgaagacccacaccaggactcatacaggtaaaacaagtgaaaagcccttcagctgtcggtggccaagttgtcagaaaaagtttgcccggtcagatgaattagtccgccatcacaacatgcatcagagaaacatgaccaaactccagctggcgctttgaggggtctccctcgggg

SEQ ID NO: 200135 - DNA, 718 bp, Homo sapiens
  Payload ID: 19479
  Gene Name: Wilms tumor 1
  ENST ID: ENST00000526685
  CDS Start-End: 643-718
cacctacagcacaggctggctaccaagagttaagctgatctggaaaactgacctgtcatttaagcagagtgaggccacagatatgtaatccccacttctgaggacatgacatctcttcttgcgtcatcacttttttggtgctatctggtaaaaactgagtcatgaggtgccgacaaattcagtgcacttaacgtgaagcttgaggcattctgctcattcctgagatacctgcagctgtcagccctgccgtctagatggtaaacaacttgccgaggatgaaaccctgccactgtggtcttcctcggcttgtctgagcgagacctagaccgtgacggtgcacgcctacgagaatcggaggatgagggaggggctgcgaggtggcggccaggatccaggggcctcgccctccgcagaaccctgcatctaaagtggccccatggagggaggcaaaaaccaactatttttgttctccacagcacagggtacgagagcgataaccacacaacgcccatcctctgcggagcccaatacagaatacacacgcacggtgtcttcagaggcattcaggatgtgcgacgtgtgcctggagtagccccgactcttgtacggtcggcatctgagaccagtgagaaacgccccttcatgtgtgcttacccaggctgcaataagagatattttaagctgtcccacttacagatgcacagcaggaagcacactg

SEQ ID NO: 200136 - DNA, 1622 bp, Homo sapiens
  Payload ID: 19480
  Gene Name: Wilms tumor 1 associated protein
  Uniprot ID: Q15007
  ENST ID: ENST00000337387
  CDS Start-End: 125-580
ggccggcggcagagctgtccggctgcgcggtggcccggggggcccgggcggcagggcaagcagcgcggcctcggcctatgcgaccggtggcgccggcgcggcttctgcctggagaggattcaagatgaccaacgaagaacctcttcccaagaaggttcgattgagtgaaacagacttcaaagttatggcaagagatgagttaattctaagatggaaacaatatgaagcatatgtacaagctttggagggcaagtacacagatcttaactctaatgatgtaactggcctaagagagtctgaagaaaaactaaagcaacaacagcaggagtctgcacgcagggaaaacatccttgtaatgcgactagcaaccaaggaacaagagatgcaagagtgtactactcaaatccagtacctcaagcaagtccagcagccgagcgttgcccaactgagatcaacaatggtagacccagcgatcaacttgtttttcctaaaaatgaaaggtgaactggaacagactaaagacaaactggaacaagcccaaaatgaactgagtgcctggaagtttacgcctgataggtaaacaaatcatactccccagtcaagacttccctgacagtcccactacgagaaagctgtggtgggacagccaagtactcgtttccacaccaagactcagactttttgagccaaaaaaaagccacattcttacactgtccagcttgtaatggttaatgtaaaacttaccagatgaaccttgtgtttcagcttttttcttttccccttccccttgcttcagaggcctgatggcgtcggactattccgaagaagtggccacctccgaaaaattccccttctagaacatgtagacacttgagaaatgtttctgtttgaagaaaatagagggagaaacagaagtcttaagtctgtggcacactgtgtcttcagacagtttgaaggaatgaaaacctagagattttaaatcatgaattgaacatgtaaaattccagtaaaatgtaaaaacggaatatgcatcgctcttaaccttgagcatagtgacttagagacactgtgtatcagttttgccaataagactgtggacttcatgattgttgttgaacttctgggtcaaaactcaaatgaggtgaattttgcctttaaagggtttatttgctgagaaccaactttcaatagtcatgagagaatcaaataatagatgtccgtacaagtagcgcatatatttaaccatttagtttggggctctatattacttgcttgagccttaatcaatgtggttttattcaatggtttgttctttgaatggttgcaaaaactgtagataatcttactgaggactgtacaaacatgaaggtgtggtatcaaacttcaggttgaaactgtttgaagcattataaacattcatttcacaactagattgtataaggatattagctgtgatgagactcactgcattattttttttagtgaattttatgaaatccccgttccattcaacaggcacatgtttaaaagagctttgtcgttggtgttaatgggggaatgtgttccttcattgtatttgggccttttgtattgcactcttgatattaaattaaatgtgcctt

SEQ ID NO: 200137 - DNA, 3656 bp, Homo sapiens
  Payload ID: 19480
  Gene Name: Wilms tumor 1 associated protein
  Uniprot ID: Q15007
  ENST ID: ENST00000358372
  CDS Start-End: 1758-2948
ttactttgtttccttttttatttacttttttggctatgtaaaactaaaagttcaaagacagagaaatcttgtctccaccccccactctttataggcaactaaaaatgttaagtttccaggatatccttccaattcctccccgaaaataagcatatacacataaatattcatattaaatataaatatatatttttatgtatttaagtaaatacataaaagcatatatgcttatttttgcttttgaatacagtgaatacttactacacttaaatatttaagtgaatacttaatacaacctgagactcattccaaagcaacacacgattatttcctgaatctttttaatggttgcattgtgttctactgtatggatgcaccattcccaatcagttccctattaacggatatttgggttatccctaacttttgctatgacaaatagcactgcaataaccttgtatacctattgtttccatgtgtggagctgcaccttcagaataaggttagggttagaagtataactgcaaggtataagaataaacacaagtaattttgtactccgtggaacttgaaccatttttccactcccaccaggaaaggtaatttcaacgtgtatttccattgtaagtgaggtggagcgactttctatgtttaaagaccattacggtattttttctgagaatcatctgttcatgtccttccccattttctcctttggcttttgcactttttgttttcaatttttgagagctcttgtgatacgagttgcaaagattttctccagaccgatctgattcactggaaatatactacgaccatctggaatgtactttaatcttatcctaataaatcaccttactacaagacactcctttggggatgaacaggtttgataaagccggctaaggacagaccaatcaaaagaattacgtgctcttctagtaagtgtttagagactgtttcacgttctccaggtaacaccgccattactcggcggtccagatggcagtcttacttcagggagtctactccacttgcaggacctctttgattgagttcactaaacctcacagggccgccttccccgtgttccagttagcaaggggccctcaacgccgcggacacagcgcaacctccgacgccagagaacaatagctcctcgatgcgtctccagagatgtcaaggaggaacgaacccagcggccaggagactgcgcctcacgactgatgagagggaaggcatcggtttctaagttctcaaaacttacaggtgagcttctgctaagagtaaacgcccgcggctcgccgcccacggcctctctcttgaggtggcacctggtcctccgacacgcggaagcatcacggatgagcgtcacgaacacagagcggccaatcacgcgccgccttcgcccagatccctccgcacgaggcagccccgcagccgcaggtggccccggcgagtacttccaccttcccttcccgtgatgccctggggctgacctccgacctcgctggcccgcccctcccctcggccgcttcccttactgagcttgctgagctccggggcccgcggagctcgcgccaggctcctgggaaaggacggggagtgttaccggggagcagctgctccattgtgcctcgaggccccgatcgggctaggccgacggcctccctcccttcacctttcctctcctggcggggttcggcggcgggcgagtgactgcggccacgcctgaaaggcgactctcctgattcaagatgaccaacgaagaacctcttcccaagaaggttcgattgagtgaaacagacttcaaagttatggcaagagatgagttaattctaagatggaaacaatatgaagcatatgtacaagctttggagggcaagtacacagatcttaactctaatgatgtaactggcctaagagagtctgaagaaaaactaaagcaacaacagcaggagtctgcacgcagggaaaacatccttgtaatgcgactagcaaccaaggaacaagagatgcaagagtgtactactcaaatccagtacctcaagcaagtccagcagccgagcgttgcccaactgagatcaacaatggtagacccagcgatcaacttgtttttcctaaaaatgaaaggtgaactggaacagactaaagacaaactggaacaagcccaaaatgaactgagtgcctggaagtttacgcctgatagccaaacagggaaaaagttaatggcgaagtgtcgaatgcttatccaggagaatcaagagcttggaaggcagctgtcccagggacgtattgcacaacttgaagcagagttggctttacagaagaaatacagtgaggagcttaaaagcagtcaggatgaactgaatgacttcatcatccagcttgatgaagaagtagagggtatgcagagtaccattctagttctgcagcagcagctgaaggagacacgccagcagttggctcagtaccagcagcagcagtctcaggcctctgccccaagtaccagcaggactacagcttctgaacctgtagaacagtcagaggccacaagtaaagactgcagtcgtctgacaaacggaccaagtaatggtagctcctcccgccagaggacgtctgggtctggatttcacagggagggcaacacaaccgaagatgactttccttcttctccagggaatggtaataagtcctccaacagctcagaggagagaactggcagaggaggtagtggttacgtaaatcaactcagtgcggggtatgaaagtgtagactctcccacgggcagtgaaaactctctcacacaccaatcaaatgacacagactccagtcatgaccctcaagaggagaaagcagtgagtgggaaaggtaatcgaactgtgggttcccgccacgttcagaatggcttggactcaagtgtaaatgtacagggttcagttttgtaatattttttcagcaaatttttatacagtgtcatttaatttgggagaggatactgtccagaaaattaatgcatacttttgtcacaatttgcctttttgtgggtgtacgttttggtttttttttgttgttttttttctttgttttttttttcttttctttttttttttttttttttttttttgcttcaatacttctgccgctttggaaattgtaacagttaattactttgaatgttgctaaaaggacattttgtgtagggtcaagttatttttatatgagttaatgtgaaattgtaaatggaaatttttccttaaaatacaacacaatgatgtctgtataaatctgtctgtttagaatctgtgctgtgtaagggcattcgtactcatgctgttactgtacttatgcaccattcagacttgttagagtagatgtgggtttatgactgccaagtttgcccagtacagtagttttttatcactaaaagttggactcattgatggagtcctgtagtagtttcagtgttagatacagttttttccaccatacatctgtgcattttctctttaggtgactgtttaagaaatttgtgtgcatagttactcagtttttatgaactgttgtatcctgttaatgcatattgctctgtgactccagtatatcttacctgtactgaccaaacctaaataaagatttttattgtaactccttaa

SEQ ID NO: 200138 - DNA, 2109 bp, Homo sapiens
  Payload ID: 19480
  Gene Name: Wilms tumor 1 associated protein
  Uniprot ID: Q15007
  ENST ID: ENST00000621533
  CDS Start-End: 213-1403
ggtttcctccctcagcgccattttgtggcagcgagacccacaaataaaggggagcgcaggggttgcggcgggactaggagcgcggcggggccggcggcagagctgtccggctgcgcggtggcccggggggcccgggcggcagggcaagcagcgcggcctcggcctatgcgaccggtggcgccggcgcggcttctgcctggagaggattcaagatgaccaacgaagaacctcttcccaagaaggttcgattgagtgaaacagacttcaaagttatggcaagagatgagttaattctaagatggaaacaatatgaagcatatgtacaagctttggagggcaagtacacagatcttaactctaatgatgtaactggcctaagagagtctgaagaaaaactaaagcaacaacagcaggagtctgcacgcagggaaaacatccttgtaatgcgactagcaaccaaggaacaagagatgcaagagtgtactactcaaatccagtacctcaagcaagtccagcagccgagcgttgcccaactgagatcaacaatggtagacccagcgatcaacttgtttttcctaaaaatgaaaggtgaactggaacagactaaagacaaactggaacaagcccaaaatgaactgagtgcctggaagtttacgcctgatagccaaacagggaaaaagttaatggcgaagtgtcgaatgcttatccaggagaatcaagagcttggaaggcagctgtcccagggacgtattgcacaacttgaagcagagttggctttacagaagaaatacagtgaggagcttaaaagcagtcaggatgaactgaatgacttcatcatccagcttgatgaagaagtagagggtatgcagagtaccattctagttctgcagcagcagctgaaggagacacgccagcagttggctcagtaccagcagcagcagtctcaggcctctgccccaagtaccagcaggactacagcttctgaacctgtagaacagtcagaggccacaagtaaagactgcagtcgtctgacaaacggaccaagtaatggtagctcctcccgccagaggacgtctgggtctggatttcacagggagggcaacacaaccgaagatgactttccttcttctccagggaatggtaataagtcctccaacagctcagaggagagaactggcagaggaggtagtggttacgtaaatcaactcagtgcggggtatgaaagtgtagactctcccacgggcagtgaaaactctctcacacaccaatcaaatgacacagactccagtcatgaccctcaagaggagaaagcagtgagtgggaaaggtaatcgaactgtgggttcccgccacgttcagaatggcttggactcaagtgtaaatgtacagggttcagttttgtaatattttttcagcaaatttttatacagtgtcatttaatttgggagaggatactgtccagaaaattaatgcatacttttgtcacaatttgcctttttgtgggtgtacgttttggtttttttttgttgttttttttctttgttttttttttcttttctttttttttttttttttttttttttgcttcaatacttctgccgctttggaaattgtaacagttaattactttgaatgttgctaaaaggacattttgtgtagggtcaagttatttttatatgagttaatgtgaaattgtaaatggaaatttttccttaaaatacaacacaatgatgtctgtataaatctgtctgtttagaatctgtgctgtgtaagggcattcgtactcatgctgttactgtacttatgcaccattcagacttgttagagtagatgtgggtttatgactgccaagtttgcccagtacagtagttttttatcactaaaagttggactcattgatggagtcctgtagtagtttcagtgttagatacagttttttccaccatacatctgtgcattttctctttaggtgactgtttaagaaatttgtgtgcatagttactcagtttttatgaactgttgtatcctgttaatgcatattgctctgtgactccagtatatcttacctgtactgaccaaacctaaataaagatttttattgtaactcctt

SEQ ID NO: 200139 - DNA, 1623 bp, Homo sapiens
  Payload ID: 19480
  Gene Name: Wilms tumor 1 associated protein
  ENST ID: ENST00000614346
  CDS Start-End: 345-857
atccctccgcacgaggcagccccgcagccgcaggtggccccggcgagtacttccaccttcccttcccgtgatgccctggggctgacctccgacctcgctggcccgcccctcccctcggccgcttcccttactgagcttgctgagctccggggcccgcggagctcgcgccaggctcctgggaaaggacggggagtgttaccggggagcagctgctccattgtgcctcgaggccccgatcgggctaggccgacggcctccctcccttcacctttcctctcctggcggggttcggcggcgggcgagtgactgcggccacgcctgaaaggcgactctcctgattcaagatgaccaacgaagaacctcttcccaagaaggttcgattgagtgaaacagacttcaaagttatggcaagagatgagttaattctaagatggaaacaatatgaagcatatgtacaagctttggagggcaagtacacagatcttaactctaatgatgtaactggcctaagagagtctgaagaaaaactaaagcaacaacagcaggagtctgcacgcagggaaaacatccttgtaatgcgactagcaaccaaggaacaagagatgcaagagtgtactactcaaatccagtacctcaagcaagtccagcagccgagcgttgcccaactgagatcaacaatggtagacccagcgatcaacttgtttttcctaaaaatgaaaggtgaactggaacagactaaagacaaactggaacaagcccaaaatgaactgagtgcctggaagtttacgcctgatagaggcctgatggcgtcggactattccgaagaagtggccacctccgaaaaattccccttctagaacatgtagacacttgagaaatgtttctgtttgaagaaaatagagggagaaacagaagtcttaagtctgtggcacactgtgtcttcagacagtttgaaggaatgaaaacctagagattttaaatcatgaattgaacatgtaaaattccagtaaaatgtaaaaacggaatatgcatcgctcttaaccttgagcatagtgacttagagacactgtgtatcagttttgccaataagactgtggacttcatgattgttgttgaacttctgggtcaaaactcaaatgaggtgaattttgcctttaaagggtttatttgctgagaaccaactttcaatagtcatgagagaatcaaataatagatgtccgtacaagtagcgcatatatttaaccatttagtttggggctctatattacttgcttgagccttaatcaatgtggttttattcaatggtttgttctttgaatggttgcaaaaactgtagataatcttactgaggactgtacaaacatgaaggtgtggtatcaaacttcaggttgaaactgtttgaagcattataaacattcatttcacaactagattgtataaggatattagctgtgatgagactcactgcattattttttttagtgaattttatgaaatccccgttccattcaacaggcacatgtttaaaagagctttgtcgttggtgttaatgggggaatgtgttccttcattgtatttgggccttttgtattgcactcttgatattaaattaaatgtgccttg

SEQ ID NO: 200140 - DNA, 1430 bp, Homo sapiens
  Payload ID: 19480
  Gene Name: Wilms tumor 1 associated protein
  ENST ID: ENST00000631126
  CDS Start-End: 147-659
ggcgggactaggagcgcggcggggccggcggcagagctgtccggctgcgcggtggcccggggggcccgggcggcagggcaagcagcgcggcctcggcctatgcgaccggtggcgccggcgcggcttctgcctggagaggattcaagatgaccaacgaagaacctcttcccaagaaggttcgattgagtgaaacagacttcaaagttatggcaagagatgagttaattctaagatggaaacaatatgaagcatatgtacaagctttggagggcaagtacacagatcttaactctaatgatgtaactggcctaagagagtctgaagaaaaactaaagcaacaacagcaggagtctgcacgcagggaaaacatccttgtaatgcgactagcaaccaaggaacaagagatgcaagagtgtactactcaaatccagtacctcaagcaagtccagcagccgagcgttgcccaactgagatcaacaatggtagacccagcgatcaacttgtttttcctaaaaatgaaaggtgaactggaacagactaaagacaaactggaacaagcccaaaatgaactgagtgcctggaagtttacgcctgatagaggcctgatggcgtcggactattccgaagaagtggccacctccgaaaaattccccttctagaacatgtagacacttgagaaatgtttctgtttgaagaaaatagagggagaaacagaagtcttaagtctgtggcacactgtgtcttcagacagtttgaaggaatgaaaacctagagattttaaatcatgaattgaacatgtaaaattccagtaaaatgtaaaaacggaatatgcatcgctcttaaccttgagcatagtgacttagagacactgtgtatcagttttgccaataagactgtggacttcatgattgttgttgaacttctgggtcaaaactcaaatgaggtgaattttgcctttaaagggtttatttgctgagaaccaactttcaatagtcatgagagaatcaaataatagatgtccgtacaagtagcgcatatatttaaccatttagtttggggctctatattacttgcttgagccttaatcaatgtggttttattcaatggtttgttctttgaatggttgcaaaaactgtagataatcttactgaggactgtacaaacatgaaggtgtggtatcaaacttcaggttgaaactgtttgaagcattataaacattcatttcacaactagattgtataaggatattagctgtgatgagactcactgcattattttttttagtgaattttatgaaatccccgttccattcaacaggcacatgtttaaaagagctttgtcgttggtgttaatgggggaatgtgttccttcattgtatttgggccttttgtattgcactcttgatattaaattaaatgtgccttgaaata

SEQ ID NO: 200141 - DNA, 667 bp, Homo sapiens
  Payload ID: 19481
  Gene Name: Wilms tumor 1 interacting protein
  ENST ID: ENST00000585928
  CDS Start-End: 1-602
tcccgctgccccctggccgggagggcggcccaagcgcggccgagcggcggctggaggcgctcacccgggagctggagcgggcgctcgaggcgcgcacggcgcgggactacttcggcatttgcatcaagtgtgggcttggcatctacggagcccagcaggcgtgccaggcaatggggagtctttatcacactgactgcttcacctgcgactcgtgtgggagacgactccgtgggaaggcgttctacaacgtgggtgagaaagtgtactgccaggaggacttcctgtactccgggttccagcagacggccgacaaatgcagcgtgtgtggacatctcatcatggaaatgatcctgcaggccctgggcaagtcctaccacccaggctgcttccggtgctccgtgtgcaatgagtgcctggacggggttcccttcaccgtggacgtggagaacaacatctactgcgtgcgagactatcacacggtttttgcaccaaaatgcgcctcctgtgcccgtcctatcctccctgcacagggctgcgagacaaccatccgtgtggtgtccatggacagagactaccacgtggcatgttaccactgtgagtgatctgcaccccctggaagaggtggtctcctgttttgtctttaaaaaccatcacgtgaccgggcgcg

SEQ ID NO: 200142 - DNA, 13665 bp, Homo sapiens
  Payload ID: 19481
  Gene Name: Wilms tumor 1 interacting protein
  Uniprot ID: A6NIX2
  ENST ID: ENST00000590071
  CDS Start-End: 338-1630
ccacattccagaggccgcagcgccgtctccttcctcgcattcctgcccccgcaaaggagtccctccgccccgcgcgaggccgcggcgaggagggggcgcggcccggcgcctgggagcttacattcctccgccgcgcgcgccgccgagcagggcgccgcgtcccccggcccgcgcgtggccgccggaacgaccccggcccggcgccggccccgccccgccccgcgcccaggggtcccggggcgggctccgggcttcgggcggacgatgcggcggcccggccggagcggcggcgggaagcggaggcggaggtgacgcgccagggccggcgggccgggccatgcagcgctccagggcgggcgcggacgaggcggccctactcctggccgggctggccctgcgggagctggagcccgggtgcggctctcccggtcgggggcggcgggggccgcggcctgggcctggagacgaggcggcgcccgcgctgggccgcagagggaagggcagcggcggccccgaggccggggcggacggactgagccgcggggagcggggtccccggcgcgcggcggttccggagctcagcgcgcagcctgcgggcagcccacgggccagcctggcggggtccgacggcggcggcggtggcggcagcgcccgatccagcggcatcagcctgggctacgaccagcgccacggcagcccgcgctccggtcgctcggacccgcgtcccggtcccgggccgccttcggtgggcagcgcccgctccagcgtttccagcctcggctcccggggctcggccggcgcctacgctgacttcctcccgcccggcgcctgccccgcgcccgctcgctccccggagcctgcggggccggctcccttcccgctgcctgcactcccgctgccccctggccgggagggcggcccaagcgcggccgagcggcggctggaggcgctcacccgggagctggagcgggcgctcgaggcgcgcacggcgcgggactacttcggcatttgcatcaagtgtgggcttggcatctacggagcccagcaggcgtgccaggcaatggggagtctttatcacactgactgcttcacctgcgactcgtgtgggagacgactccgtgggaaggcgttctacaacgtgggtgagaaagtgtactgccaggaggacttcctgtactccgggttccagcagacggccgacaaatgcagcgtgtgtggacatctcatcatggaaatgatcctgcaggccctgggcaagtcctaccacccaggctgcttccggtgctccgtgtgcaatgagtgcctggacggggttcccttcaccgtggacgtggagaacaacatctactgcgtgcgagactatcacacggtttttgcaccaaaatgcgcctcctgtgcccgtcctatcctccctgcacagggctgcgagacaaccatccgtgtggtgtccatggacagagactaccacgtggcatgttaccactgtgaggactgcgggctgcagctgagcggggaggagggacgccgttgctatcccctggcgggccacctactgtgtcgtcgttgccacctgcggcgcctccaacctgggcctcttccctcacccactgtgcacgtcactgagctctgagcaggggaaaacccgtccctgggccggggtgggtgtgggtgtggagggagggcccgcgtgggtggccctggtcagcgtcaggggagctccctccaatcagtttcccaccgagctgctgtctgcaggggccggacccccgcgtggaagcttctatttattcaccgtctgtgcctgctcaagtcacttccctgcgggccctgcctcccacccaccccatcaccagctttccacttggaggccccctgtgccctgcagcctcagggtaggccgtgggtcaccaggctggagagggcccctgccttggccaggggtgcgaggtgacccggctgcattgctgggtgggagctgctgtctgttgttcaggggcctggcccccgccctcccccccgaccccgacctcgcaaagcgcactcccgggcagggtgtggtctggaaggcggggctggcggggacatgggtgttcctgcatctcctagcgcagttcctgctggtgggtggaagggtgcctggtttaggcggggtcccaggagggggtgaggggtgacacccttggggagggggcctgcaaagggcactgcctgtggccacgtggtgtctgtgggaattggtcctggggactttgatgggtgtttgcggccccagttgccgccctgctccctcttccagggctcctggcttgggccccccgacccccctgctcagctcgggaaaatccccgtgcggctccagccccgggtcacgctcaggagcgatgagaggggcgccctggccacgcttcaggaaagcctgtgtctgcgcgcggggcaaggggctccacgacaaaaggacaagatttgacttaaattaagtttttcccttgaggatattttcattttctttaaaagaatataattttcttctaagatcttggaccagccttgttatttttaaagcaaatgccggcaaactcacaagtgtctagtttgtctgttacggagctggttttcaggtggtaagaaccttgtggtttcaggacttttgtcctgaaattcctctaaaacttcgccacgcgtgtccacctttcagactttagggtagtgtggggttccgtgtgtgtccgggtgttaagggcggtcgccccatgaaatgcagtgtggaggtccctccgtgctccccgggacacactgacgggaatgtggggtctggacatgggaggccctggtcctgatgcggaatccccaggggttcaggggacatctggactgaagtcactcgcccctgggagagcctggacccacctcttggctgctgctctccccttcctcccccaccgtcaggtgtgagttctgtgaatcactcgcggggctgggctaggctccgggaaccagcagggctgtccaggccgagcccaagggaacaaacaccaggaggcgcccgcagggaagtggcggcttcggagtccagcagggccgaggcatggcgcgggcgccacctggtgggctgagccggcaagtacaggggtggtcagggagccttagccagggacttacacagcgtggagagcgctgcatcttagagtggggccttcagcaggaccaggggccacttcttggaggaggtgatcccactggggccagagagtaaagtccaggcgtggaggctccggtgctggctctctcctgctagctgagctgctttttcttttcttttctttttttttttttgagacggagtgtcattgtgtcacccaggctggagtgcagtggcacaatcttggctcactgcagcctccgcctcccgggttcaagcaattctcctgctttagtctcccgagtagctgggactacaggcgcacgccaccacgcccggctaattttgtatttttagtagagatggggtttcaccatgttggtcaggctggtctccaactgctgacctcaggggcgatccacccacctcagcctcccaaagtgctgggattacaggtgtgtaccactgtgcccggctttttttttttttttttttgagacagggtctcgttctgtcgcccaggctggagtgcgttggcacaatctgggcctactgcaacctctgcctccagggttcaagtaattctcatgcctcagcctccccagtagctgagactacaggtgtgccccatgacgcccagctattttttttttttttttttttaaagacagagtctagctctgtcgcccaggctggagtgcagtggcgtgatctgggctgactgcaacctctgcctcccacgttcaagcattctgcctcagccttccaagtgctgggattacaagtgtgcgccaccaggcctggctaatttttgtatttttagtagagtcggggtttcaccatgttggccagactggtctggaactcctggcctcaagcgatccatccgccttgaccttccaaagttctgggattacaggcgtgagccactgtgcctggccttactttttgtatttttagttgagagggggtttcagcatgttggccaggttggtgtcaaactcctgacctcaagcgagcccaccttggcctcccagagtgttgggattacaggcttgagccaccgtgcctggcctgggctcctttgccttctaactggtcagttgcaaagctgtcctctgaactgtcctctctgcttcctccctcaaacctgctttgagccgggtttctccttgttgccaacccggtccttctcctccccttcctttgcatgtgccatggtgggccctgtgcttatatccatggggttgcttcactgaaccctgctccatcccggtcaccatgcacgctcctgccagctggcctgagtcatcacagcttggagtccccccaaccccacccaagtaacacactttgtcaaaggtcgcagtcaagggactgcataggcccttggggcagtggcctcaccaggccacactctgccctttctttctgggcccctgggccccgcattgccttctgtcagggctggtggccactgctccacctcctcccccggagctgtgcatggcagttccctccgtgggagccactctcccggggtttcttcctctatgaagaaaccttggcctctatgaagtcaggccccagttgtgacacctcacttgacacccagaagtcttggcctctgctctccaagctcatttgccaacagcagtatctccatttcatgcccaggggtgacactgaccccatgattatagagatggaggatgctgtgtgagaactgggctgagccatgccagtggcctgtgaccctccagccctggatgccaccccccacctgcccaaggggacccccactgatgtggtctctgctgacacctgtgcctgtgcctggggtccctgtcatccttccctggtctgagtggcaagtctcctgccatccctgtccccgctatgcggtgagctcttcagcttgggcccgcctggtggctcacgctactctccaccgtgcctggattagggcgagtgctgaggctggagctgaccctgccctggccttcagggtcttggcttagttccacctgcactggtccaagtccagcctggttgcctagtgaaggatccacagtgggtacataaagggccaagcgctgtccacgtggacacatcctatgtgggcgtgagtgctccctgcaatccccagacaagcctgcctctcagcggggctcagctcagagacatagaccctggagggctgagtctgcctgtgtgcgtgtgtgtgtgcatgtgtgtgtgtgtgagagagagacagggatggggggagagtgtgtgtatcaatgagagagacggagaaagtcgtgtgtgaaagggattgaatatttcagaaaatgaatgagagagattgggagagatggtgggaggtggagtgggagagagacctgttgtttaagagggagactgagtgactccgagaatgagggggaaagatacggagacaggataagctgcagagagagagggagagagggattgaactggagcgagaccaacagagccctgacgctgggatttgggaggatttggtgggttctcagtgaccccactgaggcctgacccaccagtggaaaaggctcacctcctgtaagtgaccacactgtggggtgtaattgtgtgtttgtttgtgtgtgtgtgtgtgtgtctgtgtgtgtgttggcgtcgccctgatggcctcttggagggtcctggggtgggtgggtcttgggcatggggtgccctctgccctcattctttcttcatccgggctccctgcccctgttggggtgggaagcacagatgtcagcttgctgagctgcaggtaccatgacaatcccaagtggaactgctcttggggggctgtgtggggaggggccactgggcaggatttatgagacctgggcagaggtgtggggagcagtgtgggccagagggtgactgggggttggggtgagttgggtagggtgcagctgtgctcatccctcccacccagccccaccctgaggctggtctctagctcgtgagcagaggccgagagaaggcccttccccatcacggggtcctgtctcgtccggtctggcagccctcatctggccaggaggccagcaaggacttccggtgccacactcgggaggggtgagggctttgctggctgcagggttaggagtaggcgcagcctgtggggcccaggagaaccttggggtggggatcaagaacaggtctgggagaggggggagcatcagggccacctgcagcctccacccagcccagctctggaggctttgcccccaccccgcccccatggtaggcgtgttccctagaggctggtggggacctgggagaggggcatgtgcacacatttcatggggatgatgggggactctgggagccagcctgggtgggggctcagaggtgggaggggccctgaggcctgaggtggtggaaggagctcacctatctcaggcccaggcccttgccaggttcctagtccctggccggataccccagggtggcctgggatcctggagagtgctcaggaaactcaggaggagtgtggacgcggctcctctccttccacccacttccctggccctgagggcattgctgggccaccatcccagacctggggcatgtgtcacagggctgccaggagggcatagggcccaaggattccccagggatgccagcccccctgtgggccctcaggactggtagccctgggccccctggcgctttgtagggaggtgctcagcagtgatggttgtgtgcctgtcacacccacccacctgtgcctccccccacctgccacgcccattgtcctacacccagcgcacactcctctccacgctgcgcacgtgaacccgcccgggtcacacacctgccctgccatggtgacaggactgtgtgggatctctgcctccctgcctgaagttcctgccattgggacctgtcacaggcacacaggacacagctggctcaccctcttctctgacagcacctgggccatccctgatagtgatcagccctgctgaggaagggttagggtgggctgcaggctggaggccagggagaggccctggaccgggcctggcatttactcaccctcctcccatcccacactgtcccggagcctccatctccacctgagccagctgggttgatgcggatttccaggcatcctcagcgggacccatggcctggggtcaccaccttcctgagctgcgtggatctcagccaggacttctcgtccctgagaacagattggggctgggagtcccagcccgtccctggaccagccctgccatcagcttgcccagcctagttccctttctcttctgcgctctgaatgtgcactccgcgtgttcagatgctcatggtttctgatgagaagttggctgtgtctctcacggagcctctctcggaggtgatgagtgacttttctcttgctgccgtcaagattcctggctgtggattggatggatgggaagctctgtccctgaacagcccttgtgactatggggctgtccttccacagtgtgcactgagggtgcaggccaaaccttttaaagaataaacagaaagaaatcggctctttcacttcttgcaagttggtgaaaacagactcttccagggaattttaactttttatcatcctatttactctggaaagccttgtctcgtgttttagagcttgtagggtttaataaaactagttaacagccaggcacggtggttcacgcctgtaatcccagcactttgggaggccgtggcggataggtcacttgaggtcaggagttcgagacaatcctggccaacatggcgaaaccccgtctctactaaaattacaaaaactagccaggtgtggtggtgggcacctgtagtcccagctactggggaggaggctgaggcacgagaatcgcttgaactggggagactgaggttgcagtgagccgagttcacaccactgcactccagcctgggtgacagagctagacgctatctcaaaaataaataaataaataaataaataaataaataaatgaatataaataaaactggttaaaaattgagtctccctgaagtaggtgctctttcccgtgaaaactacttttttggtttggtttgaaggtaagaaagagcgggagaaactttgctcttttcatttaataattgtgttcagcctggccgggcgcggtggctcacgcctgtaatcccagcactttgggaggccgaggtgggcggatcacctgaggtcgggagtttgagaccaacctgaccaatatggagaaaccctgtctctactaaaaatacaaaatttttagccgggcatggtggcgcatgcctgtaatcccagctactcgggaggctgaggcagaagaagcgcttgaacccgggaggcggaggttgcagtcagccgagatcgtgccattgcactccagcctgggcaacaagagtgaactccgtctcaaaaaaaaaaaaaaaaaaaaaaattgtattcggcctatgatgaaatattttattattagatagcagtgtcactaataagttttaagttgtccagagttaattgtgaatatcagaacaggattcttataacaaaagcagttgtcttaagatgaatggctcatatttgggtgcagtatttgatgcccaaaagaacaaacataaaccaaaaaaaaaaaaaaaaaaattccagactgtcccctttggatgccagttgaatctgtgtcttgtgccccctgagggtctgcccggtcacatccccttgtcttctctagggttcacggggatccttctcatcctcttctaggtaccaggttccattagttttgtctgtcagtcttgtcaccagggagctggagacctggaggggagccctgatgtctgggacagtgcttgtcagtggatgggcttttgcatagggggatggggtagggagtgagtcattgcattatagacttggactaggtggatgctatttttcatggtggtggtgatgggagaagctgttgggttatttcacagaggaagcccgagctccctgctgaagatgataaatgatgcacagatttcaatccatcctacggcttcagcctccagtcctggtcccacacatctcctggagcagagcctgattcccagcctctgtagctggttgaggagcaaataggtttccctgtcctgactccaccttggagcaccttcccttgagacccaccaggctctctttcagtcacagcatcttcctcctgctccatgtggttgaaatctcaggtcctctaaggatccctcctcattctctgttagtgtgaggtgggacttttttttttgttttgagatggagtcttgctctgtcgcccaggctggagttcagtggcaggatttcagctcagtacagcctcggcctcccgggttcaagtgactctccggcctcagcctcccaagtagctgggattacaggcacctgccatcactcccagctaattttttatatttttagtgaatacagggtttcatcatgttggccaggctggtctctaactcctgaccttaagtgatctacccgcctcagcctcctaaagtgctaggattataggtgtgagccactgcacctggcctgtgaggtgggaagtttcaatactcccttagccttggtttggtcaccagaaggaggggacatgagtgaaggtcccagtccaccctatgcaagcagaagcctctttggttttagttttaaaggtgcattgacccatgtacctttgcatggacatgttcttatttggggttacctttgtgttgactttgtgtggccaggaccctggagatgaggccaggatggccgactccaaccccttagctgcttccttgccctgtatggagcagctcagcctgggatgcaggagcagctgtgtccctccgctcccgccaggcctctccccctgccttctgggactggaagttcctaggagtccggaagtgctgagctgcaggaggcttctcatggccccaggacacacccatcaccccatctatattgagatgttatctagagagacgcctgtagtaaaatccgctctgtgacggtggtgtataaacattttctgtgcaaggaccttgccctccttttcaaaaaagtaagtatgactcccacatgaaaattttcttctacaacacgacatacgttcattgtggtacatttaggaaatttaaatgatttatttcttataaaacatcatctgtttttctactggacctggcttttataaatcatgcggtgataaataatatggcagttagagctgggtgcacttggctcctgcctgtggtcccagctggctgggaggcagaggcaggaggattgcttgaggccaggattccaggctgcagggagctatgactgccagtgcactccagccagggtaacacagcgagaccctgtgttagcctgttttcacgctgctgataaagacatccccaagactgggaagaaaaagaggtttaattggatttacagttccacatggctggggaggcctcagcctcccacatggctggggaggcctcccaccaaaaggcactttcatggtggcggcaagagaaaaatgacagagatgcaaaagcagaaacccccgataaaaccatcagatcttgtgagacttattcactaccatgagaacagtgtgggggaaactgcccccatgattcagattctctcccactgggtccctcccacaaaatgtgggaattaagggagtacagttcaagatgagatttgggtggagacacagagccaaacgatatcattctgcccctggccccttcaaatctcatgtcctcacatttcaaaaccaatcatgacttcccaacagtcccccaaattcttaactcatttcagcattaacccaaatccagagtccaaagtctaatctgagacaaggcaaggcccttccacctatgagcctgtaaaatcaaaagcaagttagttacttcctagatacaatgggggtacaggtattgggtgaatacggccattccaaatgggagaaattggccaaaacaaaggggttacaggacccatgcaagtccaaaatccagcggggcagtcaaattttgaagctccaaagtgatttcctttgactccatgtctcatatccaagtcacagtgatgcaagaggtgtgttcccatagtcgtaggcagctccacccctgtggctttgcagggcatagctcccctgctggcttctttcatgggctggcattgagtgtctgcggcttttccaggcaccttgtacaagctgtcagtgtatctaccattctgatgtttggaggatggtggccttcttcttacagctctactaggcagtaccccagtagggatactgtgtttgggctctgaccccacatttcccttctgcactgccctagcagaggttctccaagagggcccctcccctgcagcaaacttttgcctgggcatccaggcattttcatacatcttctgaaatctagatggaggttcccaaacctcaattcttgacttctgtacacccgcaggctcaacaccacatggtagctgccaaggttggggtttgcactctctgaaaccatgggctgagctgtaccttggccccttttagcaatggctggagtggctgggacacaaggcagcaagtcctaggctgcacacaacatggggactttgggtccagcccacaaaaccattttttgctcctaggcttctgggtctgtgatgggaagaccaatgacatgccctggagacattttccccattgtcttggggttaaacattcccctccttgttacttatgcaaatttctgcagccagcttgaatttcttctaaaaaaatgggtgtttctttactgcatcgtcaggctgcaaattttccaattttttatgctctgtttcccttttaaaatggaatgtttttaaacccaagtcacctcttgaacgcttttctgcttagaaatttcttctgccagataccctaaattatctctctcaagttcaaagttccacaaatctctagggcaggggcaaaatgccgccaatctctttgcttaaacataacaagaatcacctttgctccagttcccaacaagttcctcatctccatctgagaccacatcagcctggaccttagtattcatatcactatcagcatttttatcaaatattaaacaaatttctaggaggttccaaactttcccacattttcctatattcttctgagccctccaaactgttccaacctctgcctgttacccagttccaaagttgcttccacattttcgggtatgttttcagcaacaccccactcccagtaccaatttactgtattagtttgttttcatgctgctgataaagacatacctgtgactgggaagaaaaagaggtttaatgggacttgtagctccacatggctgggaggcctcagaatcatggcctgaggcaaaagttatgtggtagcggcaagagaaaatgaagggtgcaaaagcggaaaccctcgataaaaccatgagatctcgtgagacatattcactaccatgagaacaatatgggggaaactgcccccatgattcaaaatatttcccattgggtccctcccacaacacgtgagaattatgggagtacaattcaagatgagatttcggtggggacacagagccaaaccgtatcagaccccgtctctacaaaaacaaaaacaaaataaaaaaaagtagctacgtgtttgggcctggctttcattatttaccaaggatcaagacctgaacatgaaaatggcaggccaagggttcctgcctttggatgcacatggccaccttgcccactagaacatctgtgccaagcagtgttcccatcaatcataggaaaataccatttcccgcatccttaccaaccctaggtattgccaataagaaaacaaagtctgtatcaatttgatgaaaataatttgaatgtgtgcatttgatgagctgtgagaatgagaatcttttgcatgcattggccatgggcttcccttttgtgagttgcctgtgaatgtccttttcccagtttactagtttgggattgaatattcttacacatttatttggtgaagaacttttatttcaaattatgaaagaaaaaaatacttgctagaattctgatttgaagtgctttcaaattctgtgttaatttggagctgacaccctttaatattgagtcctggctttgagggtctggtgcgtttcctccattcactgaagttttattttacatctctcagtaaagctttatggattagggtcttcagaagccttacttgtttttctggctctattttcttgtccagaaactccaccactgtgctaaagagacagtggtggaggtgctgggcgtgctgcttttctcctggctctaatgggaaggccaagaggcaggtcagggtcagactccaccttgagtctggcattggctgttggcatcatgaggaccccacgtattgtactttgataaagttaataaatggaattctcctttacctcaa

SEQ ID NO: 200143 - DNA, 2907 bp, Homo sapiens
  Payload ID: 19482
  Gene Name: wingless-type MMTV integration site family member 2
  Uniprot ID: P09544
  ENST ID: ENST00000265441
  CDS Start-End: 301-1383
agcagagcggacggggcgcgcgggaggcgcgcagagctttcgggctgcaggcgctcgctgcgcctggggaattgggctgtgggcgaggcggtccgggctggcctttatcgctcgctgggcccatcgtttgaaactttatcagcgagtctcgccactcgtcgcagacgcgagcggggggcgggggcgcggcgaggcgccggcggccgtgacgaggcgctcccggagctgagcgcttctgctctgggcacgcatggcgcccgcacacggagtctgacctgatgcagacgcaagggggttaatatgaacgcccctctcggtggaatctggctctggctccctctgctcttgacctggctcacccccgaggtcaactcttcatggtggtacatgagagctacaggtggctcctccagggtgatgtgcgataatgtgccaggcctggtgagcagccagcggcagctgtgtcaccgacatccagatgtgatgcgtgccattagccagggcgtggccgagtggacagcagaatgccagcaccagttccgccagcaccgctggaattgcaacaccctggacagggatcacagcctttttggcagggtcctactccgaagtagtcgggaatctgcctttgtttatgccatctcctcagctggagttgtatttgccatcaccagggcctgtagccaaggagaagtaaaatcctgttcctgtgatccaaagaagatgggaagcgccaaggacagcaaaggcatttttgattggggtggctgcagtgataacattgactatgggatcaaatttgcccgcgcatttgtggatgcaaaggaaaggaaaggaaaggatgccagagccctgatgaatcttcacaacaacagagctggcaggaaggctgtaaagcggttcttgaaacaagagtgcaagtgccacggggtgagcggctcatgtactctcaggacatgctggctggccatggccgacttcaggaaaacgggcgattatctctggaggaagtacaatggggccatccaggtggtcatgaaccaggatggcacaggtttcactgtggctaacgagaggtttaagaagccaacgaaaaatgacctcgtgtattttgagaattctccagactactgtatcagggaccgagaggcaggctccctgggtacagcaggccgtgtgtgcaacctgacttcccggggcatggacagctgtgaagtcatgtgctgtgggagaggctacgacacctcccatgtcacccggatgaccaagtgtgggtgtaagttccactggtgctgcgccgtgcgctgtcaggactgcctggaagctctggatgtgcacacatgcaaggcccccaagaacgctgactggacaaccgctacatgaccccagcaggcgtcaccatccaccttcccttctacaaggactccattggatctgcaagaacactggacctttgggttctttctggggggatatttcctaaggcatgtggcctttatctcaacggaagccccctcttcctccctgggggccccaggatgggggggccacacgctgcacctaaagcctaccctattctatccatctcctggtgttctgcagtcatctcccctcctggcgagttctctttggaaatagcatgacaggctgttcagccgggagggtggtgggcccagaccactgtctccacccaccttgacgtttcttctttctagagcagttggccaagcagaaaaaaaagtgtctcaaaggagctttctcaatgtcttcccacaaatggtcccaattaagaaattccatacttctctcagatgggaacagtaaagaaagcagaatcaactgcccctgacttaactttaacttttgaaaagaccaagacttttgtctgatcaagtggttttacagctaccacccttaggggtaattggtaattacctggagaagaatggctttcaatacccttttaagtttaaaatgtgtatttttcaaggcatttattgccatattaaaatctgatgtaacaaggtggggacgtgtgtcctttggtactatggtgtgttgtatctttgtaagagcaaaagcctcagaaagggattgctttgcattactgtccccttgatataaaaaatctttagggaatgagagttccttctcacttagaatccgaagggaattaaaaagaagatgaatggtctggcaatattctgtaactattgggtgaatatggtggaaaataatttagtggatggaatatcagaagtatatctgtacagatcaagaaaaaaagggagaataaaattcctatctcatattatgcatgtgacccatggaatctcataactgaaagacttgaaggatgaaaattttggggatacaagattggtgaactaaaatgctgacagagaggtttccagagctaactcgtgcctggggcggccttacaataagcagatgcctgaaagaagtcggccacgtccgccgtctgctaatgcccatcacccttcaagcccagtttaaagacctgtcatatttaattgtatttatttgatgcttacaagatgatgtgatactgtagcctaaagcaaatgacacatagcattgcttataaagttggtaaccctgctatattatattgcaaacaaatcgtaacttggagactatgtttaagggactcaactgtaattatgggagcatcagtatgcaaatagtggttggcttctgccatcagccaaaagatgacattcagggaaaatggagaggctgcctgcaccgtttttttatgttaaatgaaagaaaggtgaaatagctacttctcgtcttcttgaaaaatttggttcttattctgtatatgacttccttacagtgctacattaacaggatatttcattacatgcatctggtatcaaa

SEQ ID NO: 200144 - DNA, 1768 bp, Homo sapiens
  Payload ID: 19482
  Gene Name: wingless-type MMTV integration site family member 2
  ENST ID: ENST00000449446
  CDS Start-End: 126-458
gggcgggggcgcggcgaggcgccggcggccgtgacgaggcgctcccggagctgagcgcttctgctctgggcacgcatggcgcccgcacacggagtctgacctgatgcagacgcaagggggttaatatgaacgcccctctcggtggaatctggctctggctccctctgctcttgacctggctcacccccgaggtcaactcttcatggtggtacatgagagctacaggtggctcctccagggtgatgtgcgataatgtgccaggcctggtgagcagccagcggcagctgtgtcaccgacatccagatgtgatgcgtgccattagccagggcgtggccgagtggacagcagaatgccagcaccagttccgccagcaccgctggaattgcaacaccctggacagggatcacagcctttttggcagggtcctactccgaaggcctgtagccaaggagaagtaaaatcctgttcctgtgatccaaagaagatgggaagcgccaaggacagcaaaggcatttttgattggggtggctgcagtgataacattgactatgggatcaaatttgcccgcgcatttgtggatgcaaaggaaaggaaaggaaaggatgccagagccctgatgaatcttcacaacaacagagctggcaggaaggctgtaaagcggttcttgaaacaagagtgcaagtgccacggggtgagcggctcatgtactctcaggacatgctggctggccatggccgacttcaggaaaacgggcgattatctctggaggaagtacaatggggccatccaggtggtcatgaaccaggatggcacaggtttcactgtggctaacgagaggtttaagaagccaacgaaaaatgacctcgtgtattttgagaattctccagactactgtatcagggaccgagaggcaggctccctgggtacagcaggccgtgtgtgcaacctgacttcccggggcatggacagctgtgaagtcatgtgctgtgggagaggctacgacacctcccatgtcacccggatgaccaagtgtgggtgtaagttccactggtgctgcgccgtgcgctgtcaggactgcctggaagctctggatgtgcacacatgcaaggcccccaagaacgctgactggacaaccgctacatgaccccagcaggcgtcaccatccaccttcccttctacaaggactccattggatctgcaagaacactggacctttgggttctttctggggggatatttcctaaggcatgtggcctttatctcaacggaagccccctcttcctccctgggggccccaggatgggggggccacacgctgcacctaaagcctaccctattctatccatctcctggtgttctgcagtcatctcccctcctggcgagttctctttggaaatagcatgacaggctgttcagccgggagggtggtgggcccagaccactgtctccacccaccttgacgtttcttctttctagagcagttggccaagcagaaaaaaaagtgtctcaaaggagctttctcaatgtcttcccacaaatggtcccaattaagaaattccatacttctctcagatgggaacagtaaagaaagcagaatcaactgcccctgacttaactttaacttttgaaaagaccaagacttttgtctgatcaagtggttttacagctaccacccttaggggtaattggtaattacctggagaagaatggctttcaatacccttttaagtttaaaatgtgtatttttcaaggcatttattgccatatt

SEQ ID NO: 200145 - DNA, 513 bp, Homo sapiens
  Payload ID: 19482
  Gene Name: wingless-type MMTV integration site family member 2
  ENST ID: ENST00000491214
  CDS Start-End: 53-513
gcatggcgcccgcacacggagtctgacctgatgcagacgcaagggggttaatatgaacgcccctctcggtggaatctggctctggctccctctgctcttgacctggctcacccccgaggtcaactcttcatggtggtacatgagagctacaggtggctcctccagggtgatgtgcgataatgtgccaggcctggtgagcagccagcggcagctgtgtcaccgacatccagatgtgatgcgtgccattagccagggcgtggccgagtggacagcagaatgccagcaccagttccgccagcaccgctggaattgcaacaccctggacagggatcacagcctttttggcagggtcctactccgaagctgtaaagcggttcttgaaacaagagtgcaagtgccacggggtgagcggctcatgtactctcaggacatgctggctggccatggccgacttcaggaaaacgggcgattatctctggaggaagtacaatggggccatccaggtggtcatga

SEQ ID NO: 200146 - DNA, 1185 bp, Homo sapiens
  Payload ID: 19483
  Gene Name: wingless-type MMTV integration site family, member 1
  Uniprot ID: P04628
  ENST ID: ENST00000293549
  CDS Start-End: 37-1149
caactgcagcacagagcgggcaaagccaggcaggccatggggctctgggcgctgttgcctggctgggtttctgctacgctgctgctggcgctggccgctctgcccgcagccctggctgccaacagcagtggccgatggtggggtattgtgaacgtagcctcctccacgaacctgcttacagactccaagagtctgcaactggtactcgagcccagtctgcagctgttgagccgcaaacagcggcgtctgatacgccaaaatccggggatcctgcacagcgtgagtggggggctgcagagtgccgtgcgcgagtgcaagtggcagttccggaatcgccgctggaactgtcccactgctccagggccccacctcttcggcaagatcgtcaaccgaggctgtcgagaaacggcgtttatcttcgctatcacctccgccggggtcacccattcggtggcgcgctcctgctcagaaggttccatcgaatcctgcacgtgtgactaccggcggcgcggccccgggggccccgactggcactgggggggctgcagcgacaacattgacttcggccgcctcttcggccgggagttcgtggactccggggagaaggggcgggacctgcgcttcctcatgaaccttcacaacaacgaggcaggccgtacgaccgtattctccgagatgcgccaggagtgcaagtgccacgggatgtccggctcatgcacggtgcgcacgtgctggatgcggctgcccacgctgcgcgccgtgggcgatgtgctgcgcgaccgcttcgacggcgcctcgcgcgtcctgtacggcaaccgcggcagcaaccgcgcttcgcgggcggagctgctgcgcctggagccggaagacccggcccacaaaccgccctccccccacgacctcgtctacttcgagaaatcgcccaacttctgcacgtacagcggacgcctgggcacagcaggcacggcagggcgcgcctgtaacagctcgtcgcccgcgctggacggctgcgagctgctctgctgcggcaggggccaccgcacgcgcacgcagcgcgtcaccgagcgctgcaactgcaccttccactggtgctgccacgtcagctgccgcaactgcacgcacacgcgcgtactgcacgagtgtctgtgaggcgctgcgcggactcgcccccaggaacgctctcct

SEQ ID NO: 200147 - DNA, 1278 bp, Homo sapiens
  Payload ID: 19483
  Gene Name: wingless-type MMTV integration site family, member 1
  ENST ID: ENST00000613114
  CDS Start-End: 199-1278
gcggtgccgcccgccgtggccgcctcagcccaccagccgggaccgcgagccatgctgtccgccgcccgcccccagggttgttaaagccagactgcgaactctcgccactgccgccaccgccgcgtcccgtcccaccgtcgcgggcaacaaccaaagtcgccgcaactgcagcacagagcgggcaaagccaggcaggccatggggctctgggcgctgttgcctggctgggtttctgctacgctgctgctggcgctggccgctctgcccgcagccctggctgccaacagcagtggccgatggtggggtattgtgaacgtagcctcctccacgaacctgcttacagactccaagagtctgcaactggtactcgagcccagtctgcagctgttgagccgcaaacagcggcgtctgatacgccaaaatccggggatcctgcacagcgtgagtggggggctgcagagtgccgtgcgcgagtgcaagtggcagttccggaatcgccgctggaactgtcccactgctccagggccccacctcttcggcaagatcgtcaaccgaggctgtcgagaaacggcgtttatcttcgctatcacctccgccggggtcacccattcggtggcgcgctcctgctcagaaggttccatcgaatcctgcacgtgtgactaccggcggcgcggccccgggggccccgactggcactgggggggctgcagcgacaacattgacttcggccgcctcttcggccgggagttcgtggactccggggagaaggggcgggacctgcgcttcctcatgaaccttcacaacaacgaggcaggccgtacgaccgtattctccgagatgcgccaggagtgcaagtgccacgggatgtccggctcatgcacggtgcgcacgtgctggatgcggctgcccacgctgcgcgccgtgggcgatgtgctgcgcgaccgcttcgacggcgcctcgcgcgtcctgtacggcaaccgcggcagcaaccgcgcttcgcgggcggagctgctgcgcctggagcccgacctcgtctacttcgagaaatcgcccaacttctgcacgtacagcggacgcctgggcacagcaggcacggcagggcgcgcctgtaacagctcgtcgcccgcgctggacggctgcgagctgctctgctgcggcaggggccaccgcacgcgcacgcagcgcgtcaccgagcgctgcaactgcaccttccactggtgctgccacgtcagctgccgcaactgcacgcacacgcgcgtactgcacgagtgtctgtga

SEQ ID NO: 200148 - DNA, 2547 bp, Homo sapiens
  Payload ID: 19484
  Gene Name: wingless-type MMTV integration site family, member 10A
  Uniprot ID: Q9GZT5
  ENST ID: ENST00000258411
  CDS Start-End: 634-1887
cctcagcagggacgctcccacccccagtccccagcggacgcagtggcctcgggactcgtacacgcctccacgccccgccgcgtgacgtcacgtggggtagagccctgagacactaaatggcgggggggtggggggaggaaagggaaggcggcagagctccccgagccgggacagtcacttactctacaggcagtggggcccgacacagacagcgccgcccccgccagccagcctcgcacgccctcggaagcgcaggctcccggcgctgcgctggagggttccccggcaccccagcctcccgtccccagcccgctgcacctccgggccccccttacccttgagaggcaccgggagttgtcgcgggggggcctcgggaaattccccggacccctgtgccaggaggtgcccggttcgcccgctcttcaccccccgccccccccgagggcggtgcccgggggtgctgccccatggagcggggaggcgggcgccgtctgctccgggagccctgacccgagtcggagctgtgtgtcgcagccgccccgaccccccgccgatcatgcgccggcgcccctggctctccagtcccactgggctgtgagccccccactcccagcccgtcagggcctgcgcgccatgggcagcgcccaccctcgcccctggctgcggctccgaccccagccccagccgcggccagcgctctgggtgctcctgttcttcctactgctgctggctgctgccatgcccaggtcagcacccaatgacattctggacctccgcctccccccggagcccgtgctcaatgccaacacagtgtgcctaacattgccaggcctgagccggcggcagatggaggtgtgtgtgcgtcaccctgatgtggctgcctcagccatacagggcatccagatcgccatccacgaatgccaacaccaattcagggaccagcgctggaactgctcaagcctggagactcgcaacaagatcccctatgagagtcccatcttcagcagaggtttccgagagagcgcttttgcctacgccatcgcagcagctggcgtggtgcacgccgtgtccaatgcgtgtgccctgggcaaactgaaggcctgtggctgtgatgcgtcccggcgaggggacgaggaggccttccgtaggaagctgcaccgcttacaactggatgcactgcagcgtggtaagggcctgagccatggggtcccggaacacccagccctgcccacagccagcccaggcctgcaggactcctgggagtggggcggctgcagccccgacatgggcttcggggagcgcttttctaaggactttctggactcccgggagcctcacagagacatccacgcgagaatgaggcttcacaacaaccgagttgggaggcaggcagtgatggagaacatgcggcggaagtgcaagtgccacggcacgtcaggcagctgccagctcaagacgtgctggcaggtgacgcccgagttccgcaccgtgggggcgctgctgcgcagccgcttccaccgcgccacgctcatccggccgcacaaccgcaacggcggccagctggagccgggcccagcgggggcaccctcgccggctccgggcgctcccgggccgcgccgacgggccagccccgccgacctggtctacttcgaaaagtctcccgacttctgcgagcgcgagccgcgcctggactcggcgggcaccgtgggccgcctgtgcaacaagagcagcgccggctcggatggctgcggcagcatgtgctgcggccgcggccacaacatcctgcgccagacgcgcagcgagcgctgccactgccgcttccactggtgctgtttcgtggtctgcgaagagtgccgcatcaccgagtgggtcagcgtctgcaagtgagcggcccggggtcccctgggccctgatcgaggtcccctcctggagcctggccctctgaggcttacggtcttggcaaggcagcatcgccttggctcttgggaagaggagattggaccacatgatcttataggaacccctcagctctgaggtctgtgatcgccggacagtccaggcctgtctgaaccccaccactcacttctgtgggctctaggactgactgggttcttcctccctccccgaagcccagacagttcagttgggctgggggttgctccacaccctaaaacaagcctcagccaggcaacccgtcagtctgtctccatcctttcaccccttccctggagatgggaggtggggaatgaatggaagctgacgggcagagagaggaggattaaaaaaaagaaatagacataactgagctgaagtaattccataaagggcccagacagcctcctccaccattcccttcatcattcatttaacaaatatttattttgcactctctttgcggcactctgggggcggtggggtgcgtgggggtggcaatgcaaggcactgaggccacagatgtgagtaagcgagacacaacacttgtcctcttggaggttacattcttgctggggggaggcatgggcaataaacaagtaaatatacaaacaa

SEQ ID NO: 200149 - DNA, 636 bp, Homo sapiens
  Payload ID: 19484
  Gene Name: wingless-type MMTV integration site family, member 10A
  ENST ID: ENST00000458582
  CDS Start-End: 1-636
gtcagcacccaatgacattctggacctccgcctccccccggagcccgtgctcaatgccaacacagtgtgcctaacattgccaggcctgagccggcggcagatggaggtgtgtgtgcgtcaccctgatgtggctgcctcagccatacagggcatccagatcgccatccacgaatgccaacaccaattcagggaccagcgctggaactgctcaagcctggagactcgcaacaagatcccctatgagagtcccatcttcagcagaggcagtgatggagaacatgcggcggaagtgcaagtgccacggcacgtcaggcagctgccagctcaagacgtgctggcaggtgacgcccgagttccgcaccgtgggggcgctgctgcgcagccgcttccaccgcgccacgctcatccggccgcacaaccgcaacggcggccagctggagccgggcccagcgggggcaccctcgccggctccgggcgctcccgggccgcgccgacgggccagccccgccgacctggtctacttcgaaaagtctcccgacttctgcgagcgcgagccgcgcctggactcggcgggcaccgtgggccgcctgtgcaacaagagcagcgccggctcggatggctgcggcagcatgtgct

SEQ ID NO: 200150 - DNA, 2274 bp, Homo sapiens
  Payload ID: 19485
  Gene Name: wingless-type MMTV integration site family, member 10B
  Uniprot ID: O00744
  ENST ID: ENST00000301061
  CDS Start-End: 350-1519
ggaggggctgcagctccgtcagcccggcagagccaccctgagctcggtgagagcaaagccagagcccccagtcctttgctcgccggcttgctagctctctcgatcactccctcccttcctccctcccttcctcccggcggccgcggcggcgctggggaagcggtgaagaggagtggcccggccctggaagaatgcggctctgacaaggggacagaacccagcgcagtctccccacggtttaagcagcactagtgaagcccaggcaacccaaccgtgcctgtctcggaccccgcacccaaaccactggaggtcctgatcgatctgcccaccggagcctccgggcttcgacatgctggaggagccccggccgcggcctccgccctcgggcctcgcgggtctcctgttcctggcgttgtgcagtcgggctctaagcaatgagattctgggcctgaagttgcctggcgagccgccgctgacggccaacaccgtgtgcttgacgctgtccggcctgagcaagcggcagctaggcctgtgcctgcgcaaccccgacgtgacggcgtccgcgcttcagggtctgcacatcgcggtccacgagtgtcagcaccagctgcgcgaccagcgctggaactgctccgcgcttgagggcggcggccgcctgccgcaccacagcgccatcctcaagcgcggtttccgagaaagtgctttttccttctccatgctggctgctggggtcatgcacgcagtagccacggcctgcagcctgggcaagctggtgagctgtggctgtggctggaagggcagtggtgagcaggatcggctgagggccaaactgctgcagctgcaggcactgtcccgaggcaagagtttcccccactctctgcccagccctggccctggctcaagccccagccctggcccccaggacacatgggaatggggtggctgtaaccatgacatggactttggagagaagttctctcgggatttcttggattccagggaagctccccgggacatccaggcacgaatgcgaatccacaacaacagggtggggcgccaggtggtaactgaaaacctgaagcggaaatgcaagtgtcatggcacatcaggcagctgccagttcaagacatgctggagggcggccccagagttccgggcagtgggggcggcgttgagggagcggctgggccgggccatcttcattgatacccacaaccgcaattctggagccttccagccccgtctgcgtccccgtcgcctctcaggagagctggtctactttgagaagtctcctgacttctgtgagcgagaccccactatgggctccccagggacaaggggccgggcctgcaacaagaccagccgcctgttggatggctgtggcagcctgtgctgtggccgtgggcacaacgtgctccggcagacacgagttgagcgctgccattgccgcttccactggtgctgctatgtgctgtgtgatgagtgcaaggttacagagtgggtgaatgtgtgtaagtgagggtcagccttaccttggggctggggaagaggactgtgtgagaggggcgccttttcagccctttgctctgatttccttccaaggtcactcttggtccctggaagcttaaagtatctacctggaaacagctttaggggtggtgggggtcaggtggactctgggatgtgtagccttctccccaacaattggagggtcttgaggggaagctgccacccctcttctgctccttagacacctgaatggactaagatgaaatgcactgtattgctcctcccacttctcaactccagagcccctttaaccctgattcatactccttttggctggggagtccctatagtttcaccactcctctcccttgagggataaccccaggcactgtttggagccataagatctgtatctagaaagagatcacccactcctatgtactatccccaaactcctttactgcagcctgggctccctcttgtgggataatgggagacagtggtagagaggtttttcttgggaaagagacagagtgctgaggggcactctcccctgaatcctcagagagttgtctgtccaggcccttagggaagttgtctccttccattcagatgttaatggggaccctccaaaggaaggggttttcccatgactcttggagcctctttttccttcttcagcaggaagggtgggaagggataatttatcatactgagacttgttcttggttcctgtttgaaactaaaataaattaagttactgga

SEQ ID NO: 200151 - DNA, 1802 bp, Homo sapiens
  Payload ID: 19485
  Gene Name: wingless-type MMTV integration site family, member 10B
  Uniprot ID: O00744
  ENST ID: ENST00000407467
  CDS Start-End: 85-660
acccaaccgtgcctgtctcggaccccgcacccaaaccactggaggtcctgatcgatctgcccaccggagcctccgggcttcgacatgctggaggagccccggccgcggcctccgccctcgggcctcgcgggtctcctgttcctggcgttgtgcagtcgggctctaagcaatgagattctgggcctgaagttgcctggcgagccgccgctgacggccaacaccgtgtgcttgacgctgtccggcctgagcaagcggcagctaggcctgtgcctgcgcaaccccgacgtgacggcgtccgcgcttcagggtctgcacatcgcggtccacgagtgtcagcaccagctgcgcgaccagcgctggaactgctccgcgcttgagggcggcggccgcctgccgcaccacagcgccatcctcaagcgcggtttccgagaaagtgctttttccttctccatgctggctgctggggtcatgcacgcagtagccacggcctgcagcctgggcaagctggtgagctgtggctgtggctggaagggcagtggtgagcaggatcggctgagggccaaactgctgcagctgcaggcactgtcccgagggaagctccccgggacatccaggcacgaatgcgaatccacaacaacagggtggggcgccaggtggtaactgaaaacctgaagcggaaatgcaagtgtcatggcacatcaggcagctgccagttcaagacatgctggagggcggccccagagttccgggcagtgggggcggcgttgagggagcggctgggccgggccatcttcattgatacccacaaccgcaattctggagccttccagccccgtctgcgtccccgtcgcctctcaggagagctggtctactttgagaagtctcctgacttctgtgagcgagaccccactatgggctccccagggacaaggggccgggcctgcaacaagaccagccgcctgttggatggctgtggcagcctgtgctgtggccgtgggcacaacgtgctccggcagacacgagttgagcgctgccattgccgcttccactggtgctgctatgtgctgtgtgatgagtgcaaggttacagagtgggtgaatgtgtgtaagtgagggtcagccttaccttggggctggggaagaggactgtgtgagaggggcgccttttcagccctttgctctgatttccttccaaggtcactcttggtccctggaagcttaaagtatctacctggaaacagctttaggggtggtgggggtcaggtggactctgggatgtgtagccttctccccaacaattggagggtcttgaggggaagctgccacccctcttctgctccttagacacctgaatggactaagatgaaatgcactgtattgctcctcccacttctcaactccagagcccctttaaccctgattcatactccttttggctggggagtccctatagtttcaccactcctctcccttgagggataaccccaggcactgtttggagccataagatctgtatctagaaagagatcacccactcctatgtactatccccaaactcctttactgcagcctgggctccctcttgtgggataatgggagacagtggtagagaggtttttcttgggaaagagacagagtgctgaggggcactctcccctgaatcctcagagagttgtctgtccaggcccttagggaagttgtctccttccattcagatgttaatggggaccctccaaaggaaggggttttcccatgactcttggagcctctttttccttcttcagcaggaagggtgggaaggga

SEQ ID NO: 200152 - DNA, 1817 bp, Homo sapiens
  Payload ID: 19485
  Gene Name: wingless-type MMTV integration site family, member 10B
  ENST ID: ENST00000403957
  CDS Start-End: 305-826
ggtgagagcaaagccagagcccccagtcctttgctcgccggcttgctagctctctcgatcactccctcccttcctccctcccttcctcccggcggccgcggcggcgctggggaagcggtgaagaggagtggcccggccctggaagaatgcggctctgacaaggggacagaacccagcgcagtctccccacggtttaagcagcactagtgaagcccaggcaacccaaccgtgcctgtctcggaccccgcacccaaaccactggaggtcctgatcgatctgcccaccggagcctccgggcttcgacatgctggaggagccccggccgcggcctccgccctcgggcctcgcgggtctcctgttcctggcgttgtgcagtcgggctctaagcaatgagattctgggcctgaagttgcctggcgagccgccgctgacggccaacaccgtgtgcttgacgctgtccggcctgagcaagcggcagctaggcctgtgcctgcgcaaccccgacgtgacggcgtccgcgcttcagggtctgcacatcgcggtccacgagtgtcagcaccagctgcgcgaccagcgctggaactgctccgcgcttgagggcggcggccgcctgccgcaccacagcgccatcctcaagcgcggtttccgagaaagtgctttttccttctccatgctggctgctggggtcatgcacgcagtagccacggcctgcagcctgggcaagctggtgagctgtggctgtggctggaagggcagtgggaagctccccgggacatccaggcacgaatgcgaatccacaacaacagggtggggcgccaggtggtaactgaaaacctgaagcggaaatgcaagtgtcatggcacatcaggcagctgccagttcaagacatgctggagggcggccccagagttccgggcagtgggggcggcgttgagggagcggctgggccgggccatcttcattgatacccacaaccgcaattctggagccttccagccccgtctgcgtccccgtcgcctctcaggagagctggtctactttgagaagtctcctgacttctgtgagcgagaccccactatgggctccccagggacaaggggccgggcctgcaacaagaccagccgcctgttggatggctgtggcagcctgtgctgtggccgtgggcacaacgtgctccggcagacacgagttgagcgctgccattgccgcttccactggtgctgctatgtgctgtgtgatgagtgcaaggttacagagtgggtgaatgtgtgtaagtgagggtcagccttaccttggggctggggaagaggactgtgtgagaggggcgccttttcagccctttgctctgatttccttccaaggtcactcttggtccctggaagcttaaagtatctacctggaaacagctttaggggtggtgggggtcaggtggactctgggatgtgtagccttctccccaacaattggagggtcttgaggggaagctgccacccctcttctgctccttagacacctgaatggactaagatgaaatgcactgtattgctcctcccacttctcaactccagagcccctttaaccctgattcatactccttttggctggggagtccctatagtttcaccactcctctcccttgagggataaccccaggcactgtttggagccataagatctgtatctagaaagagatcacccactcctatgtactatccccaaactcctttactgcagcctgggctccctcttgtgggataatgggagacagtggtagagaggtttttcttgggaaagagacagagtgctgaggggcactc
